United States Patent Application Publication US 2011/0183924 A1 - sequence listing, part 148

SEQ ID NO: 383254 - DNA, 2537 bp, Homo sapiens
gagcgggcttacacagtatggccggcgacattagctagcgctcgctctactctctctaacgggaaagcagcggaatacaagagactgaactgtatctgcctctatttccaaaagactcacgttcaactttcgctcacacaaagccgggaaaattttattagtcctttttttaaaaaaagttaatataaaattatagcaaaaaaaaaaaggaacctgaactttagtaacacagctggaacaatccgcagcggcggcggcagcggcgggagaagaggtttaatttagttgattttctgtggttgttggttgttcgctagtctcacggtgatggaagctgcacattttttcgaagggaccgagaagctgctggaggtttggttctcccggcagcagcccgacgcaaaccaaggatctggggatcttcgcactatcccaagatctgagtgggacatacttttgaaggatgtgcaatgttcaatcataagtgtgacaaaaactgacaagcaggaagcttatgtactcagtgagagtagcatgtttgtctccaagagacgtttcattttgaagacatgtggtaccaccctcttgctgaaagcactggttcccctgttgaagcttgctagggattacagtgggtttgactcaattcaaagcttcttttattctcgtaagaatttcatgaagccttctcaccaagggtacccacaccggaatttccaggaagaaatagagtttcttaatgcaattttcccaaatggagcagcatattgtatgggacgtatgaattctgactgttggtacttatatactctggatttcccagagagtcgggtaatcagtcagccagatcaaaccttggaaattctgatgagtgagcttgacccagcagttatggaccagttctacatgaaagatggtgttactgcaaaggatgtcactcgtgagagtggaattcgtgacctgataccaggttctgtcattgatgccacaatgttcaatccttgtgggtattcgatgaatggaatgaaatcggatggaacttattggactattcacatcactccagaaccagaattttcttatgttagctttgaaacaaacttaagtcagacctcctatgatgacctgatcaggaaagttgtagaagtcttcaagccaggaaaatttgtgaccaccttgtttgttaatcagatggtccctgggcttaatattctttaaagggcatgggaatttagcctctcttttattgtaatgtgctcttttggaaaatagttggttagcagggaagacccagagttgtagattgagattagggtgtactggctgaactgtggaaaacatacaattctgtgttcctcagtaaatgagattagcgtctaatgagtagcacccctttactaacttagtagtagtataaaatcatttttatttagttaattaccagagagatttagcataattttgttctggattcagtaaatcaagtcagcttggatcattcaccttaacttttcctttagcagccatttccactagtttccattaagtagtgttctataaactttgatccaaagcagaatcaatgtcttttccatctcgtgacttaaagttctgtgactgtgatgcatgtgagtgttccgacttcatctgttcctcttaactacggtgtttcccttaccatggcattcataggatgaaatgaatgactgcccagaatgagaatttgtccagattattcagataaacatcataaagcagaatacattataaataagtagaatatgaataaatagaataataaaattccaaaatactcaatgggaaatgactagtaatataggctttcaagagttggtaccttttagctatatttgcagattctctgggattttaaggaactgagaaaacagcaaagttgactaaattttatatttcttgtcctctaaatattttgataatttctggattgatgcagtgatgtttttgttccttccgtatttataaatgaaacacctttttttagtgtttctaaacctaaaatctacttggtttgaaatcaagtggttggaacactgtttgacttttatttgaagcatgttgttgattgaaaatttcattgaggaagttttcaatcagtgtgatcagtttgattctgtaatgagcacagcacctaatattttgaggagctctgttttgaggaccaatgcttaaggtggactttgttcgtaaacaatatcccaatagatttgttgacttgaggtctggtttggttttgtttttgttttgttttgttttgttttgtttccaatagaattaagaattctaatgttgaaaaactgcacaaatttttatgggacaaagcctagaaaagagaaatgtagtttgaatcataatctaaatcatcgtatgatagaagagggaaagttttggtgccataatttctcctttcactggtgttggacttaaatcagttgaaatgtatttctgtaccacaatttacgcttcaataaaagtttaattgtctagtgacattcaga

SEQ ID NO: 383255 - DNA, 1654 bp, Homo sapiens
  misc_feature (1007)..(1008): n is a, c, g, or t
gagcgggcttacacagtatggccggcgacattagctagcgctcgctctactctctctaacgggaaagcagcggaatacaagagactgaactgtatctgcctctatttccaaaagactcacgttcaactttcgctcacacaaagccgggaaaattttattagtcctttttttaaaaaaagttaatataaaattatagcaaaaaaaaaaaggaacctgaactttagtaacacagctggaacaatccgcagcggcggcggcagcggcgggagaagaggtttaatttagttgattttctgtggttgttggttgttcgctagtctcacggtgatggaagctgcacattttttcgaagggaccgagaagctgctggaggtttggttctcccggcagcagcccgacgcaaaccaaggatctggggatcttcgcactatcccaagatctgagtgggacatacttttgaaggatgtgcaatgttcaatcataagtgtgacaaaaactgacaagcaggaagcttatgtactcagtgagagtagcatgtttgtctccaagagacgtttcattttgaagacatgtggtaccaccctcttgctgaaagcactggttcccctgttgaagcttgctagggattacagtgggtttgactcaattcaaagcttcttttattctcgtaagaatttcatgaagccttctcaccaagggtacccacaccggaatttccaggaagaaatagagtttcttaatgcaattttcccaatggagcagcatatgtttggggcgtatgaatctgactgggtactatatactctgggttccagagagtcggtatcagtcagcagattaactgggatttgtgggggttgtccgcgtttggccgttccttgagacggtgcggagaggcccggaaggatcgccgacggttgtgtgccgcactcggttcagggcgggggtggtgcccccctttctctctcctctcgctgtctcgcttgatttccggtgaatgagcaatnngcaaggacagacaacagacaaagacacgaacacaaaacacacacagccacgacaaggagcaccagggagaagacacaaaacacacaaagagccaaagacgagagcagacacagaacagcaacggacacaacaacgagaagcaaccaatacagacgacgaacagacggagagagtcaaggaaaagggcagaggcgaacggcacaggaaagaagagaagaaggcgaagcagaaaagagagacgagacgaagatggaggagcgagaaggggaaaacaggaagcgggaagagaaggagagcaaggaagaacgcgctaagaagaggggaggagaggagcgacgaataaagagcaggaggagacaggaggaacaagaagaagggagaaaggacagcagagaagaagaagaccgagacagaagagcaagggaagatgaaggacgactactcagggcagcaagaggcaaaaagaacagaaaggaagcaagaagaagagcggagacgcagacaacgaagaacaacgagacgacggaaagagcggacaagaaggagaaggaaagagaagaagcggaagacacgacacgaaaaacacaaggagaaaaaagaacagagaaagagagcaaaccagacaagaaaacaaagaaggaccaag

SEQ ID NO: 383256 - DNA, 3427 bp, Homo sapiens
gagcgggcttacacagtatggccggcgacattagctagcgctcgctctactctctctaacgggaaagcagcggaatacaagagactgaactgtatctgcctctatttccaaaagactcacgttcaactttcgctcacacaaagccgggaaaattttattagtcctttttttaaaaaaagttaatataaaattatagcaaaaaaaaaaaggaacctgaactttagtaacacagctggaacaatccgcagcggcggcggcagcggcgggagaagaggtttaatttagttgattttctgtggttgttggttgttcgctagtctcacggtgatggaagctgcacattttttcgaagggaccgagaagctgctggaggtttggttctcccggcagcagcccgacgcaaaccaaggatctggggatcttcgcactatcccaagatctgagtgggacatacttttgaaggatgtgcaatgttcaatcataagtgtgacaaaaactgacaagcaggaagcttatgtactcagtgagagtagcatgtttgtctccaagagacgtttcattttgaagacatgtggtaccaccctcttgctgaaagcactggttcccctgttgaagcttgctagggattacagtgggtttgactcaattcaaagcttcttttattctcgtaagaatttcatgaagccttctcaccaagggtacccacaccggaatttccaggaagaaatagagtttcttaatgcaattttcccaaatggagcagcatattgtatgggacgtatgaattctgactgttggtacttatatactctggatttcccagagagtcgggtaatcagtcagccagatcaaaccttggaaattctgatgagtgagcttgacccagcagttatggaccagttctacatgaaagatggtgttactgcaaaggatgtcactcgtgagagtggaattcgtgacctgataccaggttctgtcattgatgccacaatgttcaatccttgtgggtattcgatgaatggaatgaaatcggatggaacttattggactattcacatcactccagaaccagaattttcttatgttagctttgaaacaaacttaagtcagacctcctatgatgacctgatcaggaaagttgtagaagtcttcaagccaggaaaatttgtgaccaccttgtttgttaatcagagttctaaatgtcgcacagtgcttgcttcgccccagaagattgaaggttttaagcgtcttgattgccagagtgctatgttcaatgattacaattttgtttttaccagttttgctaagaagcagcaacaacagcagagttgattaagaaaaatgaagaaaaaacgcaaaaagagaacacatgtagaaggtggtggatgctttctagatgtcgatgctgggggcagtgctttccataaccaccactgtgtagttgcagaaagccctagatgtaatgatagtgtaatcattttgaattgtatgcattattatatcaaggagttagatatcttgcatgaatgctctcttctgtgtttaggtattctctgccactcttgctgtgaaattgaagtgcatgtagaaaaaaccttttactatatgaaactttacaacacttgtgaaagcaactcaatttggtttatgcacagtgtaatatttctccaagtatcatccaaaattccccacagacaaggctttcgtcctcattaggtgttggcctcagcctaaccctctaggactgttctattaaattgctgccagaattttacatccagttacctccactttctagaacatattctttactaatgttattgaaaccaatttctacttcatactgatgtttttggaaacagcaattaaagtttttcttccatgagttgagtccttaagaaaatgattccagttactcattttgcatatttgctattttaacattattggaccctgcatttatagtcctttgatttcttccctctccctggtgtctcccccaagaccccaaataaagcaatacactgttaacactgtgggtttatatactaattctataccccagatggggaatgggggagatggtccctgggcttaatattctttaaagggcatgggaatttagcctctcttttattgtaatgtgctcttttggaaaatagttggttagcagggaagacccagagttgtagattgagattagggtgtactggctgaactgtggaaaacatacaattctgtgttcctcagtaaatgagattagcgtctaatgagtagcacccctttactaacttagtagtagtataaaatcatttttatttagttaattaccagagagatttagcataattttgttctggattcagtaaatcaagtcagcttggatcattcaccttaacttttcctttagcagccatttccactagtttccattaagtagtgttctataaactttgatccaaagcagaatcaatgtcttttccatctcgtgacttaaagttctgtgactgtgatgcatgtgagtgttccgacttcatctgttcctcttaactacggtgtttcccttaccatggcattcataggatgaaatgaatgactgcccagaatgagaatttgtccagattattcagataaacatcataaagcagaatacattataaataagtagaatatgaataaatagaataataaaattccaaaatactcaatgggaaatgactagtaatataggctttcaagagttggtaccttttagctatatttgcagattctctgggattttaaggaactgagaaaacagcaaagttgactaaattttatatttcttgtcctctaaatattttgataatttctggattgatgcagtgatgtttttgttccttccgtatttataaatgaaacacctttttttagtgtttctaaacctaaaatctacttggtttgaaatcaagtggttggaacactgtttgacttttatttgaagcatgttgttgattgaaaatttcattgaggaagttttcaatcagtgtgatcagtttgattctgtaatgagcacagcacctaatattttgaggagctctgttttgaggaccaatgcttaaggtggactttgttcgtaaacaatatcccaatagatttgttgacttgaggtctggtttggttttgtttttgttttgttttgttttgttttgtttccaatagaattaagaattctaatgttgaaaaactgcacaaatttttatgggacaaagcctagaaaagagaaatgtagtttgaatcataatctaaatcatcgtatgatagaagagggaaagttttggtgccataatttctcctttcactggtgttggacttaaatcagttgaaatgtatttctgtaccacaatttacgcttcaataaaagtttaattgtctagtgacattcaga

SEQ ID NO: 383257 - DNA, 1896 bp, Homo sapiens
gagcgggcttacacagtatggccggcgacattagctagcgctcgctctactctctctaacgggaaagcagcggaatacaagagactgaactgtatctgcctctatttccaaaagactcacgttcaactttcgctcacacaaagccgggaaaattttattagtcctttttttaaaaaaagttaatataaaattatagcaaaaaaaaaaaggaacctgaactttagtaacacagctggaacaatccgcagcggcggcggcagcggcgggagaagaggtttaatttagttgattttctgtggttgttggttgttcgctagtctcacggtgatggaagctgcacattttttcgaagggaccgagaagctgctggaggtttggttctcccggcagcagcccgacgcaaaccaaggatctggggatcttcgcactatcccaagatctgagtgggacatacttttgaaggatgtgcaatgttcaatcataagtgtgacaaaaactgacaagcaggaagcttatgtactcagtgagagtagcatgtttgtctccaagagacgtttcattttgaagacatgtggtaccaccctcttgctgaaagcactggttcccctgttgaagcttgctagggattacagtgggtttgactcaattcaaagcttcttttattctcgtaagaatttcatgaagccttctcaccaagggtacccacaccggaatttccaggaagaaatagagtttcttaatgcaattttcccaaatggagcagcatattgtatgggacgtatgaattctgactgttggtacttatatactctggatttcccagagagtcgggtaatcagtcagccagatcaaaccttggaaattctgatgagtgagcttgacccagcagttatggaccagttctacatgaaagatggtgttactgcaaaggatgtcactcgtgagagtggaattcgtgacctgataccaggttctgtcattgatgccacaatgttcaatccttgtgggtattcgatgaatggaatgaaatcggatggaacttattggactattcacatcactccagaaccagaattttcttatgttagctttgaaacaaacttaagtcagacctcctatgatgacctgatcaggaaagttgtagaagtcttcaagccaggaaaatttgtgaccaccttgtttgttaatcagagttctaaatgtcgcacagtgcttgcttcgccccagaagattgaaggttttaagcgtcttgattgccagagtgctatgttcaatgattacaattttgtttttaccagttttgctaagaagcagcaacaacagcagagttgattaagaaaaatgaagaaaaaacgcaaaaagagaacacatgtagaaggtggtggatgctttctagatgtcgatgctgggggcagtgctttccataaccaccactgtgtagttgcagaaagccctagatgtaatgatagtgtaatcattttgaattgtatgcattattatatcaaggagttagatatcttgcatgaatgctctcttctgtgtttaggtattctctgccactcttgctgtgaaattgaagtgcatgtagaaaaaaccttttactatatgaaactttacaacacttgtgaaagcaactcaatttggtttatgcacagtgtaatatttctccaagtatcatccaaaattccccacagacaaggctttcgtcctcattaggtgttggcctcagcctaaccctctaggactgttctattaaattgctgccagaattttacatccagttacctccactttctagaacatattctttactaatgttattgaaaccaatttctacttcatactgatgtttttggaaacagcaattaaagtttttcttccatgagttgagtcctt

SEQ ID NO: 383258 - DNA, 3706 bp, Homo sapiens
gagcgggcttacacagtatggccggcgacattagctagcgctcgctctactctctctaacgggaaagcagcggaatacaagagactgaactgtatctgcctctatttccaaaagactcacgttcaactttcgctcacacaaagccgggaaaattttattagtcctttttttaaaaaaagttaatataaaattatagcaaaaaaaaaaaggaacctgaactttagtaacacagctggaacaatccgcagcggcggcggcagcggcgggagaagaggtttaatttagttgattttctgtggttgttggttgttcgctagtctcacggtgatggaagctgcacattttttcgaagggaccgagaagctgctggaggtttggttctcccggcagcagcccgacgcaaaccaaggatctggggatcttcgcactatcccaagatctgagtgggacatacttttgaaggatgtgcaatgttcaatcataagtgtgacaaaaactgacaagcaggaagcttatgtactcagtgagagtagcatgtttgtctccaagagacgtttcattttgaagacatgtggtaccaccctcttgctgaaagcactggttcccctgttgaagcttgctagggattacagtgggtttgactcaattcaaagcttcttttattctcgtaagaatttcatgaagccttctcaccaagggtacccacaccggaatttccaggaagaaatagagtttcttaatgcaattttcccaaatggagcagcatattgtatgggacgtatgaattctgactgttggtacttatatactctggatttcccagagagtcgggtaatcagtcagccagatcaaaccttggaaattctgatgagtgagcttgacccagcagttatggaccagttctacatgaaagatggtgttactgcaaaggatgtcactcgtgagagtggaattcgtgacctgataccaggttctgtcattgatgccacaatgttcaatccttgtgggtattcgatgaatggaatgaaatcggatggaacttattggactattcacatcactccagaaccagaattttcttatgttagctttgaaacaaacttaagtcagacctcctatgatgacctgatcaggaaagttgtagaagtcttcaagccaggaaaatttgtgaccaccttgtttgttaatcagagttctaaatgtcgcacagtgcttgcttcgccccagaagattgaaggttttaagcgtcttgattgccagagtgctatgttcaatgattacaattttgtttttaccagttttgctaagaagcagcaacaacagcagagttgattaagaaaaatgaagaaaaaacgcaaaaagagaacacatgtagaaggtggtggatgctttctagatgtcgatgctgggggcagtgctttccataaccaccactgtgtagttgcagaaagccctagatgtaatgatagtgtaatcattttgaattgtatgcattattatatcaaggagttagatatcttgcatgaatgctctcttctgtgtttaggtattctctgccactcttgctgtgaaattgaagtgcatgtagaaaaaaccttttactatatgaaactttacaacacttgtgaaagcaactcaatttggtttatgcacagtgtaatatttctccaagtatcatccaaaattccccacagacaaggctttcgtcctcattaggtgttggcctcagcctaaccctctaggactgttctattaaattgctgccagaattttacatccagttacctccactttctagaacatattctttactaatgttattgaaaccaatttctacttcatactgatgtttttggaaacagcaattaaagtttttcttccatgagttgagtccttaagaaaatgattccagttactcattttgcatatttgctattttaacattattggaccctgcatttatagtcctttgatttcttccctctccctggtgtctcccccaagaccccaaataaagcaatacactgttaacactgtgggtttatatactaattctataccccagatggggaatgggggagatggtccctgggcttaatattctttaaagggcatgggaatttagcctctcttttattgtaatgtgctcttttggaaaatagttggttagcagggaagacccagagttgtagattgagattagggtgtactggctgaactgtggaaaacatacaattctgtgttcctcagtaaatgagattagcgtctaatgagtagcacccctttactaacttagtagtagtataaaatcatttttatttagttaattaccagagagatttagcataattttgttctggattcagtaaatcaagtcagcttggatcattcaccttaacttttcctttagcagccatttccactagtttccattaagtagtgttctataaactttgatccaaagcagaatcaatgtcttttccatctcgtgacttaaagttctgtgactgtgatgcatgtgagtgttccgacttcatctgttcctcttaactacggtgtttcccttaccatggcattcataggatgaaatgaatgactgcccagaatgagaatttgtccagattattcagataaacatcataaagcagaatacattataaataagtagaatatgaataaatagaataataaaattccaaaatactcaatgggaaatgactagtaatataggctttcaagagttggtaccttttagctatatttgcagattctctgggattttaaggaactgagaaaacagcaaagttgactaaattttatatttcttgtcctctaaatattttgataatttctggattgatgcagtgatgtttttgttccttccgtatttataaatgaaacacctttttttagtgtttctaaacctaaaatctacttggtttgaaatcaagtggttggaacactgtttgacttttatttgaagcatgttgttgattgaaaatttcattgaggaagttttcaatcagtgtgatcagtttgattctgtaatgagcacagcacctaatattttgaggagctctgttttgaggaccaatgcttaaggtggactttgttcgtaaacaatatcccaatagatttgttgacttgaggtctggtttggttttgtttttgttttgttttgttttgttttgtttccaatagaattaagaattctaatgttgaaaaactgcacaaatttttatgggacaaagcctagaaaagagaaatgtagtttgaatcataatctaaatcatcgtatgatagaagagggaaagttttggtgccataatttctcctttcactggtgttggacttaaatcagttgaaatgtatttctgtaccacaatttacgcttcaataaaagtttaattgtctagtgacattcagaaacttttctgttgccctgttttttaagtagcctacttgaccaaatactacatgtctgaagtttaaaatcaatacaacaatgtgtatttatgagtttggagttagacagaagtttaaaagtgttaggtcccaacctttattatagactagactcttaaaacattggttgaggatgatcaaactcaaataagtttccttatttcattcatggttatttctattaagtagaaaaaaatttataaccttgatcattttctttattttttttaatttaggatct

SEQ ID NO: 383259 - DNA, 3368 bp, Homo sapiens
gagcgggcttacacagtatggccggcgacattagctagcgctcgctctactctctctaacgggaaagcagcggaatacaagagactgaactgtatctgcctctatttccaaaagactcacgttcaactttcgctcacacaaagccgggaaaattttattagtcctttttttaaaaaaagttaatataaaattatagcaaagcggcgggagaagaggtttaatttagttgattttctgtggttgttggttgttcgctagtctcacggtgatggaagctgcacattttttcgaagggaccgagaagctgctggaggtttggttctcccggcagcagcccgacgcaaaccaaggatctggggatcttcgcactatcccaagatctgagtgggacatacttttgaaggatgtgcaatgttcaatcataagtgtgacaaaaactgacaagcaggaagcttatgtactcagtgagagtagcatgtttgtctccaagagacgtttcattttgaagacatgtggtaccaccctcttgctgaaagcactggttcccctgttgaagcttgctagggattacagtgggtttgactcaattcaaagcttcttttattctcgtaagaatttcatgaagccttctcaccaagggtacccacaccggaatttccaggaagaaatagagtttcttaatgcaattttcccaaatggagcagcatattgtatgggacgtatgaattctgactgttggtacttatatactctggatttcccagagagtcgggtaatcagtcagccagatcaaaccttggaaattctgatgagtgagcttgacccagcagttatggaccagttctacatgaaagatggtgttactgcaaaggatgtcactcgtgagagtggaattcgtgacctgataccaggttctgtcattgatgccacaatgttcaatccttgtgggtattcgatgaatggaatgaaatcggatggaacttattggactattcacatcactccagaaccagaattttcttatgttagctttgaaacaaacttaagtcagacctcctatgatgacctgatcaggaaagttgtagaagtcttcaagccaggaaaatttgtgaccaccttgtttgttaatcagagttctaaatgtcgcacagtgcttgcttcgccccagaagattgaaggttttaagcgtcttgattgccagagtgctatgttcaatgattacaattttgtttttaccagttttgctaagaagcagcaacaacagcagagttgattaagaaaaatgaagaaaaaacgcaaaaagagaacacatgtagaaggtggtggatgctttctagatgtcgatgctgggggcagtgctttccataaccaccactgtgtagttgcagaaagccctagatgtaatgatagtgtaatcattttgaattgtatgcattattatatcaaggagttagatatcttgcatgaatgctctcttctgtgtttaggtattctctgccactcttgctgtgaaattgaagtgcatgtagaaaaaaccttttactatatgaaactttacaacacttgtgaaagcaactcaatttggtttatgcacagtgtaatatttctccaagtatcatccaaaattccccacagacaaggctttcgtcctcattaggtgttggcctcagcctaaccctctaggactgttctattaaattgctgccagaattttacatccagttacctccactttctagaacatattctttactaatgttattgaaaccaatttctacttcatactgatgtttttggaaacagcaattaaagtttttcttccatgagttgagtccttaagaaaatgattccagttactcattttgcatatttgctattttaacattattggaccctgcatttatagtcctttgatttcttccctctccctggtgtctcccccaagaccccaaataaagcaatacactgttaacactgtgggtttatatactaattctataccccagatggggaatgggggagatggtccctgggcttaatattctttaaagggcatgggaatttagcctctcttttattgtaatgtgctcttttggaaaatagttggttagcagggaagacccagagttgtagattgagattagggtgtactggctgaactgtggaaaacatacaattctgtgttcctcagtaaatgagattagcgtctaatgagtagcacccctttactaacttagtagtagtataaaatcatttttatttagttaattaccagagagatttagcataattttgttctggattcagtaaatcaagtcagcttggatcattcaccttaacttttcctttagcagccatttccactagtttccattaagtagtgttctataaactttgatccaaagcagaatcaatgtcttttccatctcgtgacttaaagttctgtgactgtgatgcatgtgagtgttccgacttcatctgttcctcttaactacggtgtttcccttaccatggcattcataggatgaaatgaatgactgcccagaatgagaatttgtccagattattcagataaacatcataaagcagaatacattataaataagtagaatatgaataaatagaataataaaattccaaaatactcaatgggaaatgactagtaatataggctttcaagagttggtaccttttagctatatttgcagattctctgggattttaaggaactgagaaaacagcaaagttgactaaattttatatttcttgtcctctaaatattttgataatttctggattgatgcagtgatgtttttgttccttccgtatttataaatgaaacacctttttttagtgtttctaaacctaaaatctacttggtttgaaatcaagtggttggaacactgtttgacttttatttgaagcatgttgttgattgaaaatttcattgaggaagttttcaatcagtgtgatcagtttgattctgtaatgagcacagcacctaatattttgaggagctctgttttgaggaccaatgcttaaggtggactttgttcgtaaacaatatcccaatagatttgttgacttgaggtctggtttggttttgtttttgttttgttttgttttgttttgtttccaatagaattaagaattctaatgttgaaaaactgcacaaatttttatgggacaaagcctagaaaagagaaatgtagtttgaatcataatctaaatcatcgtatgatagaagagggaaagttttggtgccataatttctcctttcactggtgttggacttaaatcagttgaaatgtatttctgtaccacaatttacgcttcaataaaagtttaattgtctagtgacattcaga

SEQ ID NO: 383260 - DNA, 3198 bp, Homo sapiens
acaacgaccgtcactacccagggccggagcggcaactccgcagcggagctctgcctgcccgctgcgttcccccaagagactagaccccacaaactcctcctccaccgcggtcccaactcgagtccccccgccgtctccgagcactcggagggcgcccctctgggacgggaccgacgcctcggaccgggctgcgccgcgggagttcgagatctgagtgggacatacttttgaaggatgtgcaatgttcaatcataagtgtgacaaaaactgacaagcaggaagcttatgtactcagtgagagtagcatgtttgtctccaagagacgtttcattttgaagacatgtggtaccaccctcttgctgaaagcactggttcccctgttgaagcttgctagggattacagtgggtttgactcaattcaaagcttcttttattctcgtaagaatttcatgaagccttctcaccaagggtacccacaccggaatttccaggaagaaatagagtttcttaatgcaattttcccaaatggagcagcatattgtatgggacgtatgaattctgactgttggtacttatatactctggatttcccagagagtcgggtaatcagtcagccagatcaaaccttggaaattctgatgagtgagcttgacccagcagttatggaccagttctacatgaaagatggtgttactgcaaaggatgtcactcgtgagagtggaattcgtgacctgataccaggttctgtcattgatgccacaatgttcaatccttgtgggtattcgatgaatggaatgaaatcggatggaacttattggactattcacatcactccagaaccagaattttcttatgttagctttgaaacaaacttaagtcagacctcctatgatgacctgatcaggaaagttgtagaagtcttcaagccaggaaaatttgtgaccaccttgtttgttaatcagagttctaaatgtcgcacagtgcttgcttcgccccagaagattgaaggttttaagcgtcttgattgccagagtgctatgttcaatgattacaattttgtttttaccagttttgctaagaagcagcaacaacagcagagttgattaagaaaaatgaagaaaaaacgcaaaaagagaacacatgtagaaggtggtggatgctttctagatgtcgatgctgggggcagtgctttccataaccaccactgtgtagttgcagaaagccctagatgtaatgatagtgtaatcattttgaattgtatgcattattatatcaaggagttagatatcttgcatgaatgctctcttctgtgtttaggtattctctgccactcttgctgtgaaattgaagtgcatgtagaaaaaaccttttactatatgaaactttacaacacttgtgaaagcaactcaatttggtttatgcacagtgtaatatttctccaagtatcatccaaaattccccacagacaaggctttcgtcctcattaggtgttggcctcagcctaaccctctaggactgttctattaaattgctgccagaattttacatccagttacctccactttctagaacatattctttactaatgttattgaaaccaatttctacttcatactgatgtttttggaaacagcaattaaagtttttcttccatgagttgagtccttaagaaaatgattccagttactcattttgcatatttgctattttaacattattggaccctgcatttatagtcctttgatttcttccctctccctggtgtctcccccaagaccccaaataaagcaatacactgttaacactgtgggtttatatactaattctataccccagatggggaatgggggagatggtccctgggcttaatattctttaaagggcatgggaatttagcctctcttttattgtaatgtgctcttttggaaaatagttggttagcagggaagacccagagttgtagattgagattagggtgtactggctgaactgtggaaaacatacaattctgtgttcctcagtaaatgagattagcgtctaatgagtagcacccctttactaacttagtagtagtataaaatcatttttatttagttaattaccagagagatttagcataattttgttctggattcagtaaatcaagtcagcttggatcattcaccttaacttttcctttagcagccatttccactagtttccattaagtagtgttctataaactttgatccaaagcagaatcaatgtcttttccatctcgtgacttaaagttctgtgactgtgatgcatgtgagtgttccgacttcatctgttcctcttaactacggtgtttcccttaccatggcattcataggatgaaatgaatgactgcccagaatgagaatttgtccagattattcagataaacatcataaagcagaatacattataaataagtagaatatgaataaatagaataataaaattccaaaatactcaatgggaaatgactagtaatataggctttcaagagttggtaccttttagctatatttgcagattctctgggattttaaggaactgagaaaacagcaaagttgactaaattttatatttcttgtcctctaaatattttgataatttctggattgatgcagtgatgtttttgttccttccgtatttataaatgaaacacctttttttagtgtttctaaacctaaaatctacttggtttgaaatcaagtggttggaacactgtttgacttttatttgaagcatgttgttgattgaaaatttcattgaggaagttttcaatcagtgtgatcagtttgattctgtaatgagcacagcacctaatattttgaggagctctgttttgaggaccaatgcttaaggtggactttgttcgtaaacaatatcccaatagatttgttgacttgaggtctggtttggttttgtttttgttttgttttgttttgttttgtttccaatagaattaagaattctaatgttgaaaaactgcacaaatttttatgggacaaagcctagaaaagagaaatgtagtttgaatcataatctaaatcatcgtatgatagaagagggaaagttttggtgccataatttctcctttcactggtgttggacttaaatcagttgaaatgtatttctgtaccacaatttacgcttcaataaaagtttaattgtctagtgacattcaga

SEQ ID NO: 383261 - DNA, 3340 bp, Homo sapiens
gagcgggcttacacagtatggccggcgacattagctagcgctcgctctactctctctaacgggaaagcagcggaatacaagagactgaactgtatctgcctctatttccaaaagactcacgttcaactttcgctcacacaaagccgggaaaattttattagtcctttttttaaaaaaagttaatataaaattatagcaaaaaaaaaaaggaacctgaactttagtaacacagctggaacaatccgcagcggcggcggcagcggcgggagaagaggtttaatttagttgattttctgtggttgttggttgttcgctagtctcacggtgatggaagctgcacattttttcgaagggaccgagaagctgctggaggtttggttctcccggcagcagcccgacgcaaaccaaggatctggggatcttcgcactatcccaagtgagagtagcatgtttgtctccaagagacgtttcattttgaagacatgtggtaccaccctcttgctgaaagcactggttcccctgttgaagcttgctagggattacagtgggtttgactcaattcaaagcttcttttattctcgtaagaatttcatgaagccttctcaccaagggtacccacaccggaatttccaggaagaaatagagtttcttaatgcaattttcccaaatggagcagcatattgtatgggacgtatgaattctgactgttggtacttatatactctggatttcccagagagtcgggtaatcagtcagccagatcaaaccttggaaattctgatgagtgagcttgacccagcagttatggaccagttctacatgaaagatggtgttactgcaaaggatgtcactcgtgagagtggaattcgtgacctgataccaggttctgtcattgatgccacaatgttcaatccttgtgggtattcgatgaatggaatgaaatcggatggaacttattggactattcacatcactccagaaccagaattttcttatgttagctttgaaacaaacttaagtcagacctcctatgatgacctgatcaggaaagttgtagaagtcttcaagccaggaaaatttgtgaccaccttgtttgttaatcagagttctaaatgtcgcacagtgcttgcttcgccccagaagattgaaggttttaagcgtcttgattgccagagtgctatgttcaatgattacaattttgtttttaccagttttgctaagaagcagcaacaacagcagagttgattaagaaaaatgaagaaaaaacgcaaaaagagaacacatgtagaaggtggtggatgctttctagatgtcgatgctgggggcagtgctttccataaccaccactgtgtagttgcagaaagccctagatgtaatgatagtgtaatcattttgaattgtatgcattattatatcaaggagttagatatcttgcatgaatgctctcttctgtgtttaggtattctctgccactcttgctgtgaaattgaagtgcatgtagaaaaaaccttttactatatgaaactttacaacacttgtgaaagcaactcaatttggtttatgcacagtgtaatatttctccaagtatcatccaaaattccccacagacaaggctttcgtcctcattaggtgttggcctcagcctaaccctctaggactgttctattaaattgctgccagaattttacatccagttacctccactttctagaacatattctttactaatgttattgaaaccaatttctacttcatactgatgtttttggaaacagcaattaaagtttttcttccatgagttgagtccttaagaaaatgattccagttactcattttgcatatttgctattttaacattattggaccctgcatttatagtcctttgatttcttccctctccctggtgtctcccccaagaccccaaataaagcaatacactgttaacactgtgggtttatatactaattctataccccagatggggaatgggggagatggtccctgggcttaatattctttaaagggcatgggaatttagcctctcttttattgtaatgtgctcttttggaaaatagttggttagcagggaagacccagagttgtagattgagattagggtgtactggctgaactgtggaaaacatacaattctgtgttcctcagtaaatgagattagcgtctaatgagtagcacccctttactaacttagtagtagtataaaatcatttttatttagttaattaccagagagatttagcataattttgttctggattcagtaaatcaagtcagcttggatcattcaccttaacttttcctttagcagccatttccactagtttccattaagtagtgttctataaactttgatccaaagcagaatcaatgtcttttccatctcgtgacttaaagttctgtgactgtgatgcatgtgagtgttccgacttcatctgttcctcttaactacggtgtttcccttaccatggcattcataggatgaaatgaatgactgcccagaatgagaatttgtccagattattcagataaacatcataaagcagaatacattataaataagtagaatatgaataaatagaataataaaattccaaaatactcaatgggaaatgactagtaatataggctttcaagagttggtaccttttagctatatttgcagattctctgggattttaaggaactgagaaaacagcaaagttgactaaattttatatttcttgtcctctaaatattttgataatttctggattgatgcagtgatgtttttgttccttccgtatttataaatgaaacacctttttttagtgtttctaaacctaaaatctacttggtttgaaatcaagtggttggaacactgtttgacttttatttgaagcatgttgttgattgaaaatttcattgaggaagttttcaatcagtgtgatcagtttgattctgtaatgagcacagcacctaatattttgaggagctctgttttgaggaccaatgcttaaggtggactttgttcgtaaacaatatcccaatagatttgttgacttgaggtctggtttggttttgtttttgttttgttttgttttgttttgtttccaatagaattaagaattctaatgttgaaaaactgcacaaatttttatgggacaaagcctagaaaagagaaatgtagtttgaatcataatctaaatcatcgtatgatagaagagggaaagttttggtgccataatttctcctttcactggtgttggacttaaatcagttgaaatgtatttctgtaccacaatttacgcttcaataaaagtttaattgtctagtgacattcaga

SEQ ID NO: 383262 - DNA, 2432 bp, Homo sapiens
tagtctttccattcttaacactgtgaactttttctctcagggaacttattggactattcacatcactccagaaccagaattttcttatgttagctttgaaacaaacttaagtcagacctcctatgatgacctgatcaggaaagttgtagaagtcttcaagccaggaaaatttgtgaccaccttgtttgttaatcagagttctaaatgtcgcacagtgcttgcttcgccccagaagattgaaggttttaagcgtcttgattgccagagtgctatgttcaatgattacaattttgtttttaccagttttgctaagaagcagcaacaacagcagagttgattaagaaaaatgaagaaaaaacgcaaaaagagaacacatgtagaaggtggtggatgctttctagatgtcgatgctgggggcagtgctttccataaccaccactgtgtagttgcagaaagccctagatgtaatgatagtgtaatcattttgaattgtatgcattattatatcaaggagttagatatcttgcatgaatgctctcttctgtgtttaggtattctctgccactcttgctgtgaaattgaagtgcatgtagaaaaaaccttttactatatgaaactttacaacacttgtgaaagcaactcaatttggtttatgcacagtgtaatatttctccaagtatcatccaaaattccccacagacaaggctttcgtcctcattaggtgttggcctcagcctaaccctctaggactgttctattaaattgctgccagaattttacatccagttacctccactttctagaacatattctttactaatgttattgaaaccaatttctacttcatactgatgtttttggaaacagcaattaaagtttttcttccatgagttgagtccttaagaaaatgattccagttactcattttgcatatttgctattttaacattattggaccctgcatttatagtcctttgatttcttccctctccctggtgtctcccccaagaccccaaataaagcaatacactgttaacactgtgggtttatatactaattctataccccagatggggaatgggggagatggtccctgggcttaatattctttaaagggcatgggaatttagcctctcttttattgtaatgtgctcttttggaaaatagttggttagcagggaagacccagagttgtagattgagattagggtgtactggctgaactgtggaaaacatacaattctgtgttcctcagtaaatgagattagcgtctaatgagtagcacccctttactaacttagtagtagtataaaatcatttttatttagttaattaccagagagatttagcataattttgttctggattcagtaaatcaagtcagcttggatcattcaccttaacttttcctttagcagccatttccactagtttccattaagtagtgttctataaactttgatccaaagcagaatcaatgtcttttccatctcgtgacttaaagttctgtgactgtgatgcatgtgagtgttccgacttcatctgttcctcttaactacggtgtttcccttaccatggcattcataggatgaaatgaatgactgcccagaatgagaatttgtccagattattcagataaacatcataaagcagaatacattataaataagtagaatatgaataaatagaataataaaattccaaaatactcaatgggaaatgactagtaatataggctttcaagagttggtaccttttagctatatttgcagattctctgggattttaaggaactgagaaaacagcaaagttgactaaattttatatttcttgtcctctaaatattttgataatttctggattgatgcagtgatgtttttgttccttccgtatttataaatgaaacacctttttttagtgtttctaaacctaaaatctacttggtttgaaatcaagtggttggaacactgtttgacttttatttgaagcatgttgttgattgaaaatttcattgaggaagttttcaatcagtgtgatcagtttgattctgtaatgagcacagcacctaatattttgaggagctctgttttgaggaccaatgcttaaggtggactttgttcgtaaacaatatcccaatagatttgttgacttgaggtctggtttggttttgtttttgttttgttttgttttgttttgtttccaatagaattaagaattctaatgttgaaaaactgcacaaatttttatgggacaaagcctagaaaagagaaatgtagtttgaatcataatctaaatcatcgtatgatagaagagggaaagttttggtgccataatttctcctttcactggtgttggacttaaatcagttgaaatgtatttctgtaccacaatttacgcttcaataaaagtttaattgtctagtgacattcaga

SEQ ID NO: 383263 - DNA, 695 bp, Homo sapiens
gagcgggcttacacagtatggccggcgacattagctagcgctcgctctactctctctaacgggaaagcagcggaatacaagagactgaactgtatctgcctctatttccaaaagactcacgttcaactttcgctcacacaaagccgggaaaattttattagtcctttttttaaaaaaagttaatataaaattatagcaaaaaaaaaaaggaacctgaactttagtaacacagctggaacaatccgcagcggcggcggcagcggcgggagaagaggtttaatttagttgattttctgtggttgttggttgttcgctagtctcacggtgatggaagctgcacattttttcgaagggaccgagaagctgctggaggtttggttctcccggcagcagcccgacgcaaaccaaggatctggggatcttcgcactatcccaaggtgggtccccggggcgctcgctgacatccgggcctgggggctgtcgccgccgccgaggcaccagccacgggtggagcccgagttccctcagctttcagttgggggcaagtctgcggcctggggtcgcttcggcggccttggaaggtgcgcggtttgggggagagcggccatgtccacgcgggccggagccggcttctcccgccgtggttgccgcgcctggcattgccctgggggaggggaggaggccggcgcggccgc

SEQ ID NO: 383264 - DNA, 280 bp, Homo sapiens
gctatctagtttatcttagggtaatttgggaatacccctagaaggccactgtataaacctgcatgtagtaaattgaggtctatgtttctgtaatggatggaaagaaaagcaacaaaacaaataactaattttgttaaatctgattttaattcttctttttaaaaaaagcaaatggcatgatattttggcagactttttgacagcacccacatttgatttgatgagatgtgtgctcctatttgagttatgtccaaagggcagacagatggaagggttttac

SEQ ID NO: 383265 - DNA, 278 bp, Homo sapiens
tgctccaccctaacatcgtatattcaagaccagaggcagggagacaattaagaaggtgttggtgagagatgacggtggctccaactgatgtcatggtgtggatggatttaagaggaagaatcagcaaagttctggcatgtttaaatgactccagctttccatacctttcctttgcagcacctggtctatcatttcaactgctccctctcacctgcacatcgcaggtgcctgacaaagccctagtcttcatcaatcccaatgcatatacttgggtactg

SEQ ID NO: 383266 - DNA, 1716 bp, Homo sapiens
  misc_feature (250)..(250): n is a, c, g, or t
  misc_feature (718)..(718): n is a, c, g, or t
cactagtgaactttgtcatcactattattattggtgaatttcatcggtctattagcataggagaattgcctatcattttgtgtatctgtggaaagaccaggagaaggcattattttctggtagagcaagaggtggatttactttaggagattattcagttgtgaggtgccatctgtgcattttctgtaaatctttctgaagtgttgggggaaaaagtgaatgggtactcaagtcagggaagcgtaagccntacgacactcaggtaagaaacagatttttctcttaatgccctattcttataggaaaattcacttggcaataagaattctgcctacacagccttgcagatctgatgcaattatcaaagccatgttttgcaaaatgaaactgatgccaagctcgtgtcaagtggattatagattgtagaactgcagtcactggccattagctgagtgtctttgttttctactctaaaatcttgaattccttattggttctgcttctgatgtgctgcgtggcactcttcctgtggaaatggtcttgcaggagatgattttcctttctagctcaagcttctcaagtgcccaaccccggatcagcaaccccagggcttgtcctgttcgggaacacgatggagttcagttgctctttgatccccttcttccacctcaagacactctctcttctccaggtatcacagtgtcctctttcagtcttntatttggaatcatccctttctcccattttccctgttaaacatcctcccttaggtgcctttggaaaaagatttgatgaactgaagaacagggaggtattggcccattgacttcatgttttactactgcttacgtgtttgtctgttgactgggaacggtttctctagttcaacaatgaacccaataggtgggttttcacactggctaggctttggaggattgcatttttttagacataatgtgtggggcttagggagggcagccaggcagtgtgggatgcaatctcttctctgaagcagctggttctcgctataagctcagccacgtacattccactcccaagtttccttggcgctaaaactgcttggaatagcctaagcctacggaagcaaagatgacttatttaaacagcttcatggttcctattacctttctttttctgtatcttctaactttccatgtcttcctgaaggacatgttccttttgtcactgatatttccagtcaaatttagtgatcttaaatttgatcgagagtgaggtgtaactcctaggagaaattctgagtgtttataactaggtttccgaaataatgtgtttggggaagtctctgagatgttattaattttgactttttattggtaagatctctaaaaatgaaagagtattttcacaacagttcatgtagatataatttcttggcatgtggttttggcaatcagagttttatttatttatttttttccctgtacctgcttggttaggggagactttaaaatcttgtcctggcccaattgagaggagttatctaggaactgaaaaataggtaggccctggctgctacctcctttctgggctaagacccgtaacctgggtttcttcatttgaagtgtgagaatgcacgtgtaatcccagcactttgggaggccgaggcaggtggatcacctcaggtcaggagttcgagaccagcctggccaacatggtgaaacccctgtctctact

SEQ ID NO: 383267 - DNA, 906 bp, Homo sapiens
tagaaatttgtctgcaaattttttcctcattcagacagagagctggggtccaggaaacactgggttgatatgataacttgattaagtctggggacagatgacacgggagcaccaactcgactcaaaggaacctgtgctctcctctttaacctctccttgggagcctacaaattatatctattaatgcatcagccccgggaactgcacaaagacattgtctgcctaaatgtatgtcagtcatttgcaggggcctttgtggaattcccaccacattttcatgtctcttcgctatttgaaaaaataaaatgtaaactgatgggctagacaaaggctcacagtctacctcctctcgttaaaatcgctttgaaggcagaagtcaagttcatcagcaaaagtgttcaagaaattcttgaaatgggccctgggcagctggagcatatccaggggagagaaactacaaggaagaagggtttggaaactgcatccagtgaagcatggatggaaaacccagggatttgcctggagaagagaaaacacagagaggacttgggagctgaagaagtgccaacgggaagaaggatgagagtttgctgtgggtcccgggacagagcccagggagagacaggcgttcgccaagtgccagcaaagtgactggatgaaaaatgggccacgtgctggggccgcccctgcggatgtgaggaaatcagtagcgtggccacagctgcacaaatcacagctgcctctcctggtgtctgatccaggagacagccggccattgagaggctggtaaacctcagctccaaataacgtgagtttttaaaatgtgagggttaatttaacatacagtaagttttgtatccaccaccccagtcaagatatagaaaatttctaccacaatgcaaggta

SEQ ID NO: 383268 - DNA, 870 bp, Homo sapiens
  misc_feature (821)..(821): n is a, c, g, or t
tagaaatttgtctgcaaattttttcctcattcagacagagagctggggtccaggaaacactgggttgatatgataacttgattaagtctggggacagatgacacgggagcaccaactcgactcaaaggaacctgtgctctcctctttaacctctccttgggagcctacaaattatatctattaatgcatcagccccgggaactgcacaaagacattgtctgcctaaatgtatgtcagtcatttgcaggggcctttgtggaattcccaccacattttcatgtctcttcgctatttgaaaaaataaaatgtaaactgatgggctagacaaaggctcacagtctacctcctctcgttaaaatcgctttgaaggcagaagtcaagttcatcagcaaaagtgttcaagaaattcttgaaatgggccctgggcagctggagcatatccaggggagagaaactacaaggaagaagggtttggaaactgcatccagtgaagcatggatggaaaacccagggatttgcctggagaagagaaaacacagagaggacttgggagctgaagaagtgccaacgggaagaaggatgagagtttgctgtgggtcccgggacagagcccagggagagacaggcgttcgccaagtgccagcaaagtgactggatgaaaaatgggccacgtgctggggccgcccctgcggatgtgaggaaatcagtagcgtggccacagctgcacaaatcacagctgcctctcctggtgtctgatccaggagacagccggccattgagaggctggtaaacctcagctccaaataaccctggaaacattngcaccgaaccaatatttagaaaggagggacttttgcagcggaatttaaa

SEQ ID NO: 383269 - DNA, 493 bp, Homo sapiens
gccccttgtgaaattgcttcactctccctcccacctgcaaccctctcaggacttacgctccacgacctctgaaatcattttccttttcctggaaatgagcccacatgccccccaggcctctgtaagttaacttcctcagtttccctctttcctaggaactttttcctccctctctgccttcaggctagttcccaaccagaactattcaaactagagttcaattcttttggtgtatccccatgatactttctttgtgcctttgccatagcacttaccactctcccattgaactgcatttcctgtgttatatggcaaaattaaaataatacaaaaaattagccaagcgtgatggtgcatgcctgtaatcccagctactcgggaggctgaggtaggagaatcgcttgaacccaggaggcggaggttgcagtgagccaagattgcgtcattgcactccagcttgggcaacaacacaaaactctgtccaaaaaaaaaa

SEQ ID NO: 383270 - DNA, 920 bp, Homo sapiens
agcagtcgataaggaaaaagattgacaaaagaaactataagcaagcatgctgttttgagtcgccggaggatagagacggcccaagaagaatttcaagagaactgctaatgagaaaccttccgtggtgagacttgaactgacaagctattcccccaggctcctcgggaacatctcataactaatcgggacattccatcaagaccacatgcacagggccacagcctagacagcagagcatccaaaccgccaaagaaaatgttgaggctgcaccaataagggactttgtgcaatgcctcttttattgaaaaaatctatttaaatgaaatctttctaggacattatgtcaaaactgcaactggaaacgtctgcttttctcacctggaagaattgcccctattaaaccatagtaactataaacagtaattatgtatagctgtgcataagcatgcaagtgtgtatctataggtaaccatttatttaacaatatatattaagcaccttgtgtgtaccaagtactgttttttgttgttgttagtttgtttttgagatagaggctcactgtgtcgcccaatctgaagtacagtggtacaatcacatttcactgcagccttgacctctctggctcaggtgatcctcccacctcagcctcccgagtagctgggaccgcaggcctgtgtcaccacacctggctaatttttgtagtatttgtagaaatggggtttcgccatgttgcccaggctggtctcgaactcatgggcacaagcaatcctcccaccttggcctcccaaagtgctgggattataggcatgagccaccatgccaggcccaggtactgttataagtgcttgtgaatatgtcagcaaataaacaaatgtccctaccattgtagtgctaacattttagaagggaaagtcagaaaa

SEQ ID NO: 383271 - DNA, 381 bp, Homo sapiens
tgctcctacttctttttttctttcccactattgaagtctgtgatctggaaaaaatgtgtgctccattcttcacgtgaagtagggtctcagctgtattgactgtacaattctggtatttgtgtggagagctttttagccaaggtggctggtgcgggggttaccctaagtacttcagcttttgggaatcatcatttgctttaattgtcagctaaaatggctcataactccatgccatttactgtgggaagtctatttactaatcaagatttctaaggctctctcggtgtgacgaatgcattttaaggatttcttctgatgtcatcacacacctggctcacctctagtggttgctaatctgctttctggccactttgccctcca

SEQ ID NO: 383272 - DNA, 772 bp, Homo sapiens
gcgcgggggtgaggcggccctcgcgtccgcccgccccgccacagattgcctccgaagtggcctggccgtggagcgccggcgaaaaccgaactcccgcccggctcccggagtcgggagcctgccggggtctcgccctcaggacccccagggagcggccgggcgccgcctatcaccctgacccaccgcaccttgagagcgctttcactgcgcctcttttttctcctctaccaatctggaaaggaagtgagtgtcatttcagacattgagaaacattattcaacactggttacccagtgactcagctcactccttaaccgcaggcttccacatcctgctgtcccttaaaattgccttcacaaagggcagccaagagcccagctttggagagatacccagctccaactacccactggcaggcaatacgcagggcagctagatggcagagagaccttggaccttcggaccttcggggagcggttttcccttcggtgatatctaccttgctatgttcgtgatatctaccttgctacgttattttgaagattaagtgagctcttactttaccgagtaaagtgctttgcttagcacactgtctggaacttaaatgagaagtactgacaatataacttacaaaaatcctaaactattgcctgagaaaaagagggagacaggacagctaagcaaaagacgagaatagaaaacacccacagcgtgaaaaactgtaaaattaactcaatagtattctcttttacttgttacaacaacgcaagac

SEQ ID NO: 383273 - DNA, 252 bp, Homo sapiens
gaaataacaaagatttatttcttgtgcaacacattcatctgtggtaggtgtataggtggggtgttttattcttccccaggtaacttataccctgggatgctggtgtttccactagctggagtgtcatagatcactgtggccagaggaaattggaacttgggggatcatgttctacttctggcttttgcttacagttcattggccaaagcaagttacatggccactgctcacttccaggcgctgaggaagatc

SEQ ID NO: 383274 - DNA, 441 bp, Homo sapiens
tatgcagtagcaaaaatcaatgctggttgctttacacttacattctacttctagagaccccagaatacagactgattggatagctctggaaaaaatcctggggatgagtttgaattgactggatttgggttcaaagataatccatgaacaatccactgttaccagggtgattgtgttctctgagcaacacatcctgtaatagatgtcacccttggtgctggaagttggggtcagactcctgagccacttggactgagactggggatgggacattttccaaaatattctgggaagaaagagtgtctactataaacctatagacagccaagtcagagtttcagccagttccgtgtgatcttagaacatcaatgtgaaaatatggtcatccattcattcaacaaatatttagacatttttcaatgctatagaatgcaatgataa

SEQ ID NO: 383275 - DNA, 427 bp, Homo sapiens
ccaaatcttgctctgtcacccaggctggagtgcaatggtgtgatcttggctcactgcaacctctgcctcccgggttcgagctattttcctgcttcagcttcccgagtagctgggactacaggcatgcagcaccatgcccggctattttttttttttttttttttttgtatttttagcagagacagaattttgccatgttggccaggctggtctcaaactcctgacctcaagtgatccgcccgcctcggcctcccaaagtgctgggattacaggtgtgagccatcaatgcctggcccactaactcacttctaaatgatcttgttctctttgaacagaaataaaggatattatgatcttaccactttataaattagaatgatgaaattgagaaaaactagagatgactaagatgaagacagacatgaaa

SEQ ID NO: 383276 - DNA, 1207 bp, Homo sapiens
tgagccctgatgacccttgggctgttcagctctgctagaacctcccagatgacccgctaggagtctagtgcttcacaggaccaccccgagcagaactgggacccaagagcctgcaccccaaggaccagagtccatgccaagaccacccttcagcttccaaggccctccactgcccggctgtcgccagtcaccacggcctcagacagggcttgtgctcagctgacacctgtgacacagctcttctgcctcatgagctgttgtccagctacacctccccgactctgtcctcgtgctgctggcggttctgaggtctgcagattttagctgagttccgggctgttgaaagcctgctgacgcttggttctgttatcagtggaatgaggtgactttcccggagttgtgcaatcctcaggtccggcagtgtcttcttccagttactggtttcaaacaagccaaaagtctgactttggtgtgtttgtgaatcctctgaggaagccgctgttctcctggggtctccccttcccaccggacctgcctaactttcccccatttagtggcacacctggggtcttcagagatgactccgcgtctgtccaaagaagtttggtgagatcagtttccgtagaggtcatgacagttcagcagcctgccatccagtcattcgacagaaattcgggaatctttcacttcatgccatgccctgtgccaggtgccagagatacagctgctcactccagggctcatcgctggggagacagataagaggacgggcagtccccaccctctgtgaaagatgtgatgtcagggagcagtgtggtcctgtggggcatctaaccaagtcaggggcattgccaggcagggacagggaaggcttcctggagcaggtggcctccaagtggggctctgaagactgagaaggagccaggcaaagagcaggggtagatgagggcatctggggcagaaggagaatatacaaaggcccagaggccgggggcaggacagggtacctttggggacattgcatgtaattgaccacattcggagtttggatttggaagtggtggaagagatggagatggtgagacaagtagtaagcacgtcagccttccaggtgcgctcctttccgatgagcactgtcttatcccacgtaactttgagaagtttgggcctttcccactgtggcagaggtttcctgaggctcttgcat

SEQ ID NO: 383277 - DNA, 129 bp, Homo sapiens
tttggagaaaacagacttttataaatatattgattcactcatctttccatttaatcattaattagcctaaatcatttaattgctaaatcatataatatactagccccctccaaaaaatgataaataaaa

SEQ ID NO: 383278 - DNA, 635 bp, Homo sapiens
ccaccacacccggctagtttctacatctttaaattgagagaatggaaatacgtgatctgtagtttcatttccggctctagctgattctgacttacctatcaaatgagattggcctgggagttttggctttgaagattttgcttctgttgtaagtcactgggaggcttgcccagtgcccagcttaatcttgaattcctatttctccgttctctcatttagtaagtcctttagaaccttcctcttgtgctgttgcttgggctaacatctcccctcccaccctctaccactagaattccttgtatatacacagcagctagattagtctcactttgcctctctatagaaataaactgaggtagatctccattgtctcccgaagaaaggccaaactcattagctgggtattcaggatcgcctgtcaatctcagctcacattactccccttcacataatctaaagaatagttaaactgaacctaatatcctcctgcacctggtcatgccctgcctctctccattgtcactcggtcacaattaccatctcacgaaatctcccaggcttccacagcagaagtaacccttttcttctcagctcccatagcgtgttttctgtacctgctagtactgattgatttg

SEQ ID NO: 383279 - DNA, 318 bp, Homo sapiens
tttagaagctacagaaagctcttatggacaaaggcctgctcatccttaaagacttcccttgaaaagtcttttcagatgttcctagataaagtatcctcccatagccccttagtcatatttcagaacagcatttgtcacttggtcttgtaatgatgagttaatacacttgtttataccatccaactgtgaactcctagactgaggaatatctttggactgaggacatatccccacatgggagcactggggagaatacgtaggcatttcccattgagcactttttgaaataagtaaataaaagggtcacagaaaattgaa

SEQ ID NO: 383280 - DNA, 440 bp, Homo sapiens
acaggcacttctcaaaagaagacgtacatgcagctgacaaacatgaaaaaaaagctcaacatcactatcattagataaatgcaaatcaaaaccacaatgagatactgtctcacatcagtcacaatggcaattataaaaaagtaaaaaagaagccatttgcagcagctcaaagtgctgtaatcccaaacctttgggaggctgaggtgggtggatcacttgaggtcaggagttggagaccagcccggccaacatggcgaaacgaacccctgtctctactaaaaatacaaaaaattagctggatgtggtggtgcatgcctataatccccagctacttgggaggctgaggcatgagaattggttgaaccggaggcagaggttgcagtgagtcaaggtcatgccactgcacttcagcctgggcaacagtgaaactgtgtctcaaa

SEQ ID NO: 383281 - DNA, 329 bp, Homo sapiens
cacgtggtgatatgttaaagggtcacaggagtcaaatgaaaaagttcccaatgtccaaagctggaactacaaaatagagcagtattggattataaaccaaaatttaaaataaatatccatgagttggacacacagtggggaacaacacacactggggcctgtggtggagggagcaagccggggagggagagcatcaggaagaacagctaatggatgctgggcttaatacctgggtgatgggttggtctatgtagcaaaccaccatagcacacatttacccatgaaacaaacctgcacatcctgcacatgtaccccagaacttaaaagtt

SEQ ID NO: 383282 - DNA, 577 bp, Homo sapiens
gtctgagattcttgagcctttcagtcagtgtttgatctggccattcaggaaggcttattataaactaatgtataactttgttcacaatctcgcaaagtttccactgtctgaaaatcctagtgcatgagactcctacatcgttattaatggcatatccttaataaaagtttggcttttgatttttaatgggttttcaggagataacttcccaaagaggcattagatagtttaacagagcctgtcattaatgtgacctgtgagaagacttggctagaggtggtgaaatatctttcctctatccctcccaaagacaagaaaaacctatggatgaggatgaaaatttggcacaagagcaatcattggcggaagttgaatctgaaactgttgacaccaattcaagttaatgctgctagaggctgatcctcaggaagctttcttgactccagaggttattatcataagtgatgatgaagacaattaggaggctgtgggactggaaacaaatacagcaataagaaacaggagcaaaatttttagaacaagattaaaacctccctaagaaggtaattaaaattgg

SEQ ID NO: 383283 - DNA, 675 bp, Homo sapiens
cttgtccttggagcaaaaataacttttttttttttgacagaatctcgctctgttgcccaggctggagtgcagtggcgtgatttcagtgcaatgcaacctccgcctcccgagttcaagcgattctcctgcctcagcctcccgagtagctgggattacaggaacgtgccaccatgttcttgagttgtaattattccactccctaaatatatcaccttgagtgagtcacttaacctctctcaatcttaatttctgataggaattaataatcttttcatataacatagtgtcattgtgagactgaaaagagaaaatgtgcgtgactgttctttataaactgtaagcgcttgaaaggttatgcttttcaaaggaagaggagcattgccttttacacccagtaactgtaggactatgagtaggtactgaccaggatattgggtgttatatagaagttaattcattcctgacttccgaacatttcagacaaatcttcggtgataaattgaaaatatttttcaaacaaccacataagattactatttcaaatattgaaaagtataaccaaagtagtctggaccatatccttcattggaaatattttaaaacagggtaaaatatcttctttggggcctcatttcatcagttctgcctacagaagcttgcctatcctatgattca

SEQ ID NO: 383284 - DNA, 144 bp, Homo sapiens
ggcggcgctatgctgtcctgcttcaggctcctctccaggcacatcagcccttcgctggcgtctctgcgcccggtgcgctgctgcttcgcgctcccgctgcgttgggccccggggcgccccttggaccccaggcagatcgccccc

SEQ ID NO: 383285 - DNA, 865 bp, Homo sapiens
ggatcaaaacatagatatttaatctgattcaaatataattgggttcctggcattttttttcttggcccactgataagtgaaggtactcaacagccgtatgttcaatatctgttaactcagttccctaagtcaaacaatatttgccaggaagttggattggggaatgtcaagattgagacttagcacatgtggcatgtaaacaatggccttgtttggcttctgtagaaaattcttctttgtgatctaggtagtcagcattacattttagtcagtgttactaggaggaaggcagatacaggagaagctttatccacattagaaagaagagtctcttcattgtgatgtcggctacaaccaggtcgttttccatctcttagccatcagcaaacagctatcagccatgcactgcttataccaagcactgtgccattcacgcttctcaccctggtgataatcacagtcttgaggagaatgcagacatactcaaagatgaggaaactgaggccctgggatgctagattgcctgtggtcacaaagctagtcattgtagagaaatgattaaaattcatgctcaaaattattctgcactctcttccatctcttgccaatctcccctcaaaaaggatcctaaaaattgtgttggcccagctctaatctaaagtcctgtgtatcacaggattacacatgccagctttgaacacaaagtgcaaggaaatgaagtagccgttaaagcagtttcattttaacatgcccttattgacctggcaggctgctagggagtctggggaggaattagacactgcacagaagcacaagctccagttccaaaccagagaaaaggcacatgcgtggcgggggtgggggt

SEQ ID NO: 383286 - DNA, 297 bp, Homo sapiens
attgtaagcatgtgaattatagctcaataaagctgttaattttaattcaattcaattcagttaattaaattaaaaaattaattagagctgttaaataatatatatattatatttttattatattatatattttatagttatttttattggattaaggaaatttgccctaattctagttggctaagacattcatcattatgattatcaatatttttaggaatttttaccaaagtagtatacctatagaatataaagagtcagttctgttgagaaaagcattcctctgacccactcctc

SEQ ID NO: 383287 - DNA, 473 bp, Homo sapiens
caggctgagggtccacctggaagataccaaggcgatggggcttggtgccgtcctgagtttgcaggccgaggctcacgctgctctgccaacactcacatacagtatccgcatcaaaggctgagtgtggccaagtgaaggagaaagcccctgtgcgggcacctgcagaggcgtccaccctgcccaggggcctctggggacgcagcgacccactgaccagtgagcgcagatgagcgactgcacctctctgcttcagctcttcatggccagatgggaggacaatccccaccttgcaaggtggcgttaaggactgagaaagaacgagcaccaggcctggccccatgagcactgctgggtctggatccaggcgccgtccaccttccacccggcagcactaatgcttccctccccggctgcactggcccttatctgggggtcaggaactcacgtgctgaataaagagcaactcttttcca

SEQ ID NO: 383288 - DNA, 1315 bp, Homo sapiens
ggaattcgggcacgagtgaaagatttcaaaccccaaacagtgcaactgaaacttttgcattactatactactgagaatatctaacatgttgttactaatcaatgtcattctgaccttgtgggtttcctgtgctaatggacaagaagtgaaaccttgtgattttccagaaattcaacatggaggtctatattataagagtttgcgtagactatactttccagcagctgcaggacaatcttattcctattactgtgatcaaaattttgtgactccttcaggaagttactgggattacattcactgcacacaagatgggtggttgccaacagtcccatgcctcagaacatgctcaaaatcagatatagaaattgaaaatggattcatttctgaatcttcctctatttatattttaaataaagaaatacaatataaatgtaaaccaggatatgcaacagcagatggaaattcttcaggttcaattacatgtttgcaaaatggatggtcagcacaaccaatttgcattaaattttgtgatatgcctgtttttgagaattccagagccaagagtaatggcatgcggtttaagctccatgacacattggactacgaatgctacgatggatatgaaatcagttatggaaacaccacaggttccatagtgtgtggtgaagatgggtggtcccattttccaacatgttataattcttcagaaaagtgtgggcctcctccacctattagcaatggtgataccacctcctttctactaaaagtgtatgtgccacagtcaagagtcgagtaccaatgccagtcctactatgaacttcagggttctaattatgtaacatgtagtaatggagagtggtcggaaccaccaagatgcatacatccatgtataataactgaagaaaacatgaataaaaataacatacagttaaaaggaaaaagtgacataaaatattatgcaaaaacaggggataccattgaatttatgtgtaaattgggatataatgcgaatacatcagttctatcatttcaagcagtgtgtagggaaggcatagtggaataccccagatgcgaataaggcagcattgttaccctaaatgtatgtcaacttcacttctcactcttatggtctcaaagcttcgaaagatagcttctgatattgttgtaatttctactttatttcaaagaaaattaatataatagtttcaatttgcaacttaatatgttctcaaaaatatgttaaaacaaactaaattattgcttatgcttgtactaaaataataaaaactacccttatattggaaaaaaaaaa

SEQ ID NO: 383289 - DNA, 479 bp, Homo sapiens
tgtgtacatatatgtacatatatatgtagtcctcctatgagtgtgaattatcttgagacttaaaaaaaaaaaaaacaacgttgaaaatgcagatgtcttcctaagaaatcaaataagatacagttaagagtatataaaaagctttatttagaaagtttccaataagactattgatttttccccacatataaagtattttttttcagattcttcagaaaagtgtgggcctcctccacctattagcaatggtgataccacctcctttctactaaaagtgtatgtgccacagtcaagagtcgagtaccaatgccagtcctactatgaacttcagggttctaattatgtaacatgtagtaatggagagtggtcggaaccaccaagatgcatacgtatccacttctgtagatgatcatgtccaagtttgagctccaaactatgcaagtggcaagactgaagaagaaattagtatcctcaaatca

SEQ ID NO: 383290 - DNA, 1229 bp, Homo sapiens
ttacgtttgattttaaaagctgcttatgacttgtatttctgttactgctaccgacttcaggcaggaagaattcatttttgtggagactttgcttgaagttagaaagttgggtgttttagattgaattgcagaaattttttaaagcaatgcactatgaaatcacagagaagcatataggtttgtccttcagaactaaaattgtatgtacttgcagtgtggtaattactgtagaaatggtttgtggctttaaagttaaggaacttgcataaataattacaagatgtaacttgtgtttgctatgtctggatatgttttcagttttaactgtactgtagtttcctaaaatatgaagggtagttaacatgaaagcaaaggtatggtaacatttatattgcaagtggcagctaagtttttgcagtggttctttgggactttgcaaatcgagtcactgtgtctttcgagttcatgtgttctgagttttatctatacatgaggaaacaagggggtcagtgggcctgtagagcttgtcattttggctggcataatgagccatctgacgaagatggacaaactcctgcaagatgtgagatagactatgaaatactctgattagactggctgctatagactaagccaaatcattctgctgtgttaggattagttatttctgagacacgcacttacattcacacacatgcctgcatataaatggtctcaatataaatctggaaatcaaaacaagcctctctatcagtgagagcttcctaggaaaaaggatagttttaattttgtgaaggacagtttccatcataaccttcatttagcgtctaaaagtcctagacaaacttgacggcccttttccttcaaacctcaggctggaatctggtgtggggctggccggggggacacagcagctagcaggcacactgtcaagcagtcctgctgtaggggcgatctatgtacgaatgaatccatttactttggacactttactacctgaacggaaacaatcaggcaggaacttgttcaataactacatggttggcctttcagcagaatttttgaactcttataaataaaccatacttgggataatttagtctttctctggtgagaaggaaacaagaaaaaaaaatgtgagcagtcactcttgagttaggtgcttgacgaggactgggcaatttacaacgtgcagttttgcttaacctttacagcaactgtccagaagt

SEQ ID NO: 383291 - DNA, 269 bp, Homo sapiens
aatgattttctggctatccatagcggacatgtctagatacatactctgttcattttaaaagatgaggaggttctgacacaatcagagaactttttaaaagttatggatgcctgagccccagccccagagataatgattaaacaggcctagaggttgttagtttttgaatgaagtttttagtttttatctgcctgagtgagtctgatgtgctattgtgttttacacagatcaatatgatggtagaatgaaacagagaaaacggggaagct

SEQ ID NO: 383292 - DNA, 572 bp, Homo sapiens
gcctcgaccgcccagcagagctgcggccgggggaacccagtttccgaggaacttttcgccggcgccgggccgcctctgaggccagggcaggacacgaacgcgcggagcggcggcggcgactgagagccggggccgcggcggcgctccctaggaagggccgtacgaggcggcgggcccggcgggcctcccggaggaggcggctgcgccatggacgagccacccttcagcgaggcggctttggagcaggcgctgggcgagccgtgcgatctggacgcggcgctgctgaccgacatcgaagaccttagtggcttttttcctcctgtgtacagggaagagaggggtacatttccctgtgctgacggaagccaacttggctttcccggactgcaagcagggctctgccccagaggcctctctctccgtcgtgggagagagacgtgtacatagtgtaggtcagcgtgcttagcctcctgacctgaggctcctgtgctactttgccttttgcaaactttattttcatagattgagaagttttgtacagagaattaaaaatgaaattatttataatctgg

SEQ ID NO: 383293 - DNA, 4291 bp, Homo sapiens
gcctcgaccgcccagcagagctgcggccgggggaacccagtttccgaggaacttttcgccggcgccgggccgcctctgaggccagggcaggacacgaacgcgcggagcggcggcggcgactgagagccggggccgcggcggcgctccctaggaagggccgtacgaggcggcgggcccggcgggcctcccggaggaggcggctgcgccatggacgagccacccttcagcgaggcggctttggagcaggcgctgggcgagccgtgcgatctggacgcggcgctgctgaccgacatcgaaggtgaagtcggcgcggggaggggtagggccaacggctggacgccccaagggcgggcgcagatcgcggagccatggattgcactttcgaagacatgcttcagcttatcaacaaccaagacagtgacttccctggcctatttgacccaccctatgctgggagtggggcagggggcacagaccctgccagccccgataccagctccccaggcagcttgtctccacctcctgccacattgagctcctctcttgaagccttcctgagcgggccgcaggcagcgccctcacccctgtcccctccccagcctgcacccactccattgaagatgtacccgtccatgcccgctttctcccctgggcctggtatcaaggaagagtcagtgccactgagcatcctgcagacccccaccccacagcccctgccaggggccctcctgccacagagcttcccagccccagccccaccgcagttcagctccacccctgtgttaggctaccccagccctccgggaggcttctctacaggaagccctcccgggaacacccagcagccgctgcctggcctgccactggcttccccgccaggggtcccgcccgtctccttgcacacccaggtccagagtgtggtcccccagcagctactgacagtcacagctgcccccacggcagcccctgtaacgaccactgtgacctcgcagatccagcaggtcccggtcctgctgcagccccacttcatcaaggcagactcgctgcttctgacagccatgaagacagacggagccactgtgaaggcggcaggtctcagtcccctggtctctggcaccactgtgcagacagggcctttgccgaccctggtgagtggcggaaccatcttggcaacagtcccactggtcgtagatgcggagaagctgcctatcaaccggctcgcagctggcagcaaggccccggcctctgcccagagccgtggagagaagcgcacagcccacaacgccattgagaagcgctaccgctcctccatcaatgacaaaatcattgagctcaaggatctggtggtgggcactgaggcaaagctgaataaatctgctgtcttgcgcaaggccatcgactacattcgctttctgcaacacagcaaccagaaactcaagcaggagaacctaagtctgcgcactgctgtccacaaaagcaaatctctgaaggatctggtgtcggcctgtggcagtggagggaacacagacgtgctcatggagggcgtgaagactgaggtggaggacacactgaccccacccccctcggatgctggctcacctttccagagcagccccttgtcccttggcagcaggggcagtggcagcggtggcagtggcagtgactcggagcctgacagcccagtctttgaggacagcaaggcaaagccagagcagcggccgtctctgcacagccggggcatgctggaccgctcccgcctggccctgtgcacgctcgtcttcctctgcctgtcctgcaaccccttggcctccttgctgggggcccgggggcttcccagcccctcagataccaccagcgtctaccatagccctgggcgcaacgtgctgggcaccgagagcagagatggccctggctgggcccagtggctgctgcccccagtggtctggctgctcaatgggctgttggtgctcgtctccttggtgcttctctttgtctacggtgagccagtcacacggccccactcaggccccgccgtgtacttctggaggcatcgcaagcaggctgacctggacctggcccggggagactttgcccaggctgcccagcagctgtggctggccctgcgggcactgggccggcccctgcccacctcccacctggacctggcttgtagcctcctctggaacctcatccgtcacctgctgcagcgtctctgggtgggccgctggctggcaggccgggcagggggcctgcagcaggactgtgctctgcgagtggatgctagcgccagcgcccgagacgcagccctggtctaccataagctgcaccagctgcacaccatggggaagcacacaggcgggcacctcactgccaccaacctggcgctgagtgccctgaacctggcagagtgtgcaggggatgccgtgtctgtggcgacgctggccgagatctatgtggcggctgcattgagagtgaagaccagtctcccacgggccttgcattttctgacacgcttcttcctgagcagtgcccgccaggcctgcctggcacagagtggctcagtgcctcctgccatgcagtggctctgccaccccgtgggccaccgtttcttcgtggatggggactggtccgtgctcagtaccccatgggagagcctgtacagcttggccgggaacccagtggaccccctggcccaggtgactcagctattccgggaacatctcttagagcgagcactgaactgtgtgacccagcccaaccccagccctgggtcagctgatggggacaaggaattctcggatgccctcgggtacctgcagctgctgaacagctgttctgatgctgcgggggctcctgcctacagcttctccatcagttccagcatggccaccaccaccggcgtagacccggtggccaagtggtgggcctctctgacagctgtggtgatccactggctgcggcgggatgaggaggcggctgagcggctgtgcccgctggtggagcacctgccccgggtgctgcaggagtctgagagacccctgcccagggcagctctgcactccttcaaggctgcccgggccctgctgggctgtgccaaggcagagtctggtccagccagcctgaccatctgtgagaaggccagtgggtacctgcaggacagcctggctaccacaccagccagcagctccattgacaaggccgtgcagctgttcctgtgtgacctgcttcttgtggtgcgcaccagcctgtggcggcagcagcagcccccggccccggccccagcagcccagggcaccagcagcaggccccaggcttccgcccttgagctgcgtggcttccaacgggacctgagcagcctgaggcggctggcacagagcttccggcccgccatgcggagggtgttcctacatgaggccacggcccggctgatggcgggggccagccccacacggacacaccagctcctcgaccgcagtctgaggcggcgggcaggccccggtggcaaaggaggcgcggtggcggagctggagccgcggcccacgcggcgggagcacgcggaggccttgctgctggcctcctgctacctgccccccggcttcctgtcggcgcccgggcagcgcgtgggcatgctggctgaggcggcgcgcacactcgagaagcttggcgatcgccggctgctgcacgactgtcagcagatgctcatgcgcctgggcggtgggaccactgtcacttccaggctagaccccgtgtccccggcctcagcacccctgtctctagccactttggtcccgtgcagcttctgtcctgcgtcgaagctttgaaggccgaaggcagtgcaagagactctggcctccacagttcgacctgcggctgctgtgtgccttcgcggtggaaggcccgaggggcgcgatcttgaccctaagaccggcggccatgatggtgctgacctctggtggccgatcggggcactgcaggggccgagccattttggggggcccccctccttgctctgcaggcaccttagtggcttttttcctcctgtgtacagggaagagaggggtacatttccctgtgctgacggaagccaacttggctttcccggactgcaagcagggctctgccccagaggcctctctctccgtcgtgggagagagacgtgtacatagtgtaggtcagcgtgcttagcctcctgacctgaggctcctgtgctactttgccttttgcaaactttattttcatagattgagaagttttgtacagagaattaaaaatgaaattatttataatctgg

SEQ ID NO: 383294 - DNA, 3189 bp, Homo sapiens
gcctgtctgcacagtggtgccagagaccaggcccttgccgaccctggtgagtggcggaaccatcttggcaacagtcccactggtcgtagatgcggagaagctgcctatcaaccggctcgcagctggcagcaaggccccggcctctgcccagagccgtggagagaagcgcacagcccacaacgccattgagaagcgctaccgctcctccatcaatgacaaaatcattgagctcaaggatctggtggtgggcactgaggcaaagctgaataaatctgctgtcttgcgcaaggccatcgactacattcgctttctgcaacacagcaaccagaaactcaagcaggagaacctaagtctgcgcactgctgtccacaaaagcaaatctctgaaggatctggtgtcggcctgtggcagtggagggaacacagacgtgctcatggagggcgtgaagactgaggtggaggacacactgaccccacccccctcggatgctggctcacctttccagagcagccccttgtcccttggcagcaggggcagtggcagcggtggcagtggcagtgactcggagcctgacagcccagtctttgaggacagcaaggcaaagccagagcagcggccgtctctgcacagccggggcatgctggaccgctcccgcctggccctgtgcacgctcgtcttcctctgcctgtcctgcaaccccttggcctccttgctgggggcccgggggcttcccagcccctcagataccaccagcgtctaccatagccctgggcgcaacgtgctgggcaccgagagcagagatggccctggctgggcccagtggctgctgcccccagtggtctggctgctcaatgggctgttggtgctcgtctccttggtgcttctctttgtctacggtgagccagtcacacggccccactcaggccccgccgtgtacttctggaggcatcgcaagcaggctgacctggacctggcccggggagactttgcccaggctgcccagcagctgtggctggccctgcgggcactgggccggcccctgcccacctcccacctggacctggcttgtagcctcctctggaacctcatccgtcacctgctgcagcgtctctgggtgggccgctggctggcaggccgggcagggggcctgcagcaggactgtgctctgcgagtggatgctagcgccagcgcccgagacgcagccctggtctaccataagctgcaccagctgcacaccatggggaagcacacaggcgggcacctcactgccaccaacctggcgctgagtgccctgaacctggcagagtgtgcaggggatgccgtgtctgtggcgacgctggccgagatctatgtggcggctgcattgagagtgaagaccagtctcccacgggccttgcattttctgacacgcttcttcctgagcagtgcccgccaggcctgcctggcacagagtggctcagtgcctcctgccatgcagtggctctgccaccccgtgggccaccgtttcttcgtggatggggactggtccgtgctcagtaccccatgggagagcctgtacagcttggccgggaacccagtggaccccctggcccaggtgactcagctattccgggaacatctcttagagcgagcactgaactgtgtgacccagcccaaccccagccctgggtcagctgatggggacaaggaattctcggatgccctcgggtacctgcagctgctgaacagctgttctgatgctgcgggggctcctgcctacagcttctccatcagttccagcatggccaccaccaccggcgtagacccggtggccaagtggtgggcctctctgacagctgtggtgatccactggctgcggcgggatgaggaggcggctgagcggctgtgcccgctggtggagcacctgccccgggtgctgcaggagtctgagagacccctgcccagggcagctctgcactccttcaaggctgcccgggccctgctgggctgtgccaaggcagagtctggtccagccagcctgaccatctgtgagaaggccagtgggtacctgcaggacagcctggctaccacaccagccagcagctccattgacaaggccgtgcagctgttcctgtgtgacctgcttcttgtggtgcgcaccagcctgtggcggcagcagcagcccccggccccggccccagcagcccagggcaccagcagcaggccccaggcttccgcccttgagctgcgtggcttccaacgggacctgagcagcctgaggcggctggcacagagcttccggcccgccatgcggagggtgttcctacatgaggccacggcccggctgatggcgggggccagccccacacggacacaccagctcctcgaccgcagtctgaggcggcgggcaggccccggtggcaaaggaggcgcggtggcggagctggagccgcggcccacgcggcgggagcacgcggaggccttgctgctggcctcctgctacctgccccccggcttcctgtcggcgcccgggcagcgcgtgggcatgctggctgaggcggcgcgcacactcgagaagcttggcgatcgccggctgctgcacgactgtcagcagatgctcatgcgcctgggcggtgggaccactgtcacttccaggctagaccccgtgtccccggcctcagcacccctgtctctagccactttggtcccgtgcagcttctgtcctgcgtcgaagctttgaaggccgaaggcagtgcaagagactctggcctccacagttcgacctgcggctgctgtgtgccttcgcggtggaaggcccgaggggcgcgatcttgaccctaagaccggcggccatgatggtgctgacctctggtggccgatcggggcactgcaggggccgagccattttggggggcccccctccttgctctgcaggcaccttagtggcttttttcctcctgtgtacagggaagagaggggtacatttccctgtgctgacggaagccaacttggctttcccggactgcaagcagggctctgccccagaggcctctctctccgtcgtgggagagagacgtgtacatagtgtaggtcagcgtgcttagcctcctgacctgaggctcctgtgctactttgccttttgcaaactttattttcatagattgagaagttttgtacagagaattaaaaatgaaattatttataatctgg

SEQ ID NO: 383295 - DNA, 3457 bp, Homo sapiens
attggaattcagcctccccaggcctggccagcctcgtttatttagttaaactggtttgcaggcctcttcaataaaggtggggctgtgctaggcattggggatgcagcaatgaacaagacagacaaaaattgtccctcaaagaagagccgaccttctggtgggggagatggacagtaggcaggatgaataagtgctcgagaccaccacgtttggctcgttgcagagaaagcaggaagaggatggtgagggtcccctggtggtagccagggaaggcctccctgagatggcggcaggcacagcagcagctagccagaccctgctgtctgcatcttacattctaaccctatgcccggcctgggaggtgggtgctactaggcgaggaacggttcaggtagaaggaacaagtgcaaaggtcctgaggcagtaatgttgcaaagcagctccgcacccccttgctagggctctccaaccccacaacccccgacctgacaggccacctgtgcgctccccctccctcccacaccgtgcagctgaataaatctgctgtcttgcgcaaggccatcgactacattcgctttctgcaacacagcaaccagaaactcaagcaggagaacctaagtctgcgcactgctgtccacaaaagcaaatctctgaaggatctggtgtcggcctgtggcagtggagggaacacagacgtgctcatggagggcgtgaagactgaggtggaggacacactgaccccacccccctcggatgctggctcacctttccagagcagccccttgtcccttggcagcaggggcagtggcagcggtggcagtggcagtgactcggagcctgacagcccagtctttgaggacagcaaggcaaagccagagcagcggccgtctctgcacagccggggcatgctggaccgctcccgcctggccctgtgcacgctcgtcttcctctgcctgtcctgcaaccccttggcctccttgctgggggcccgggggcttcccagcccctcagataccaccagcgtctaccatagccctgggcgcaacgtgctgggcaccgagagcagagatggccctggctgggcccagtggctgctgcccccagtggtctggctgctcaatgggctgttggtgctcgtctccttggtgcttctctttgtctacggtgagccagtcacacggccccactcaggccccgccgtgtacttctggaggcatcgcaagcaggctgacctggacctggcccggggagactttgcccaggctgcccagcagctgtggctggccctgcgggcactgggccggcccctgcccacctcccacctggacctggcttgtagcctcctctggaacctcatccgtcacctgctgcagcgtctctgggtgggccgctggctggcaggccgggcagggggcctgcagcaggactgtgctctgcgagtggatgctagcgccagcgcccgagacgcagccctggtctaccataagctgcaccagctgcacaccatggggaagcacacaggcgggcacctcactgccaccaacctggcgctgagtgccctgaacctggcagagtgtgcaggggatgccgtgtctgtggcgacgctggccgagatctatgtggcggctgcattgagagtgaagaccagtctcccacgggccttgcattttctgacacgcttcttcctgagcagtgcccgccaggcctgcctggcacagagtggctcagtgcctcctgccatgcagtggctctgccaccccgtgggccaccgtttcttcgtggatggggactggtccgtgctcagtaccccatgggagagcctgtacagcttggccgggaacccagtggaccccctggcccaggtgactcagctattccgggaacatctcttagagcgagcactgaactgtgtgacccagcccaaccccagccctgggtcagctgatggggacaaggaattctcggatgccctcgggtacctgcagctgctgaacagctgttctgatgctgcgggggctcctgcctacagcttctccatcagttccagcatggccaccaccaccggcgtagacccggtggccaagtggtgggcctctctgacagctgtggtgatccactggctgcggcgggatgaggaggcggctgagcggctgtgcccgctggtggagcacctgccccgggtgctgcaggagtctgagagacccctgcccagggcagctctgcactccttcaaggctgcccgggccctgctgggctgtgccaaggcagagtctggtccagccagcctgaccatctgtgagaaggccagtgggtacctgcaggacagcctggctaccacaccagccagcagctccattgacaaggccgtgcagctgttcctgtgtgacctgcttcttgtggtgcgcaccagcctgtggcggcagcagcagcccccggccccggccccagcagcccagggcaccagcagcaggccccaggcttccgcccttgagctgcgtggcttccaacgggacctgagcagcctgaggcggctggcacagagcttccggcccgccatgcggagggtgttcctacatgaggccacggcccggctgatggcgggggccagccccacacggacacaccagctcctcgaccgcagtctgaggcggcgggcaggccccggtggcaaaggaggcgcggtggcggagctggagccgcggcccacgcggcgggagcacgcggaggccttgctgctggcctcctgctacctgccccccggcttcctgtcggcgcccgggcagcgcgtgggcatgctggctgaggcggcgcgcacactcgagaagcttggcgatcgccggctgctgcacgactgtcagcagatgctcatgcgcctgggcggtgggaccactgtcacttccaggctagaccccgtgtccccggcctcagcacccctgtctctagccactttggtcccgtgcagcttctgtcctgcgtcgaagctttgaaggccgaaggcagtgcaagagactctggcctccacagttcgacctgcggctgctgtgtgccttcgcggtggaaggcccgaggggcgcgatcttgaccctaagaccggcggccatgatggtgctgacctctggtggccgatcggggcactgcaggggccgagccattttggggggcccccctccttgctctgcaggcaccttagtggcttttttcctcctgtgtacagggaagagaggggtacatttccctgtgctgacggaagccaacttggctttcccggactgcaagcagggctctgccccagaggcctctctctccgtcgtgggagagagacgtgtacatagtgtaggtcagcgtgcttagcctcctgacctgaggctcctgtgctactttgccttttgcaaactttattttcatagattgagaagttttgtacagagaattaaaaatgaaattatttataatctgg

SEQ ID NO: 383296 - DNA, 4182 bp, Homo sapiens
gcctcgaccgcccagcagagctgcggccgggggaacccagtttccgaggaacttttcgccggcgccgggccgcctctgaggccagggcaggacacgaacgcgcggagcggcggcggcgactgagagccggggccgcggcggcgctccctaggaagggccgtacgaggcggcgggcccggcgggcctcccggaggaggcggctgcgccatggacgagccacccttcagcgaggcggctttggagcaggcgctgggcgagccgtgcgatctggacgcggcgctgctgaccgacatcgaaggtgaagtcggcgcggggaggggtagggccaacggctggacgccccaagggcgggcgcagatcgcggagccatggattgcactttcgaagacatgcttcagcttatcaacaaccaagacagtgacttccctggcctatttgacccaccctatgctgggagtggggcagggggcacagaccctgccagccccgataccagctccccaggcagcttgtctccacctcctgccacattgagctcctctcttgaagccttcctgagcgggccgcaggcagcgccctcacccctgtcccctccccagcctgcacccactccattgaagatgtacccgtccatgcccgctttctcccctgggcctggtatcaaggaagagtcagtgccactgagcatcctgcagacccccaccccacagcccctgccaggggccctcctgccacagagcttcccagccccagccccaccgcagttcagctccacccctgtgttaggctaccccagccctccgggaggcttctctacaggaagccctcccgggaacacccagcagccgctgcctggcctgccactggcttccccgccaggggtcccgcccgtctccttgcacacccaggtccagagtgtggtcccccagcagctactgacagtcacagctgcccccacggcagcccctgtaacgaccactgtgacctcgcagatccagcaggtcccggtcctgctgcagccccacttcatcaaggcagactcgctgcttctgacagccatgaagacagacggagccactgtgaaggcggcaggtctcagtcccctggtctctggcaccactgtgcagacagggcctttgccgaccctggtgagtggcggaaccatcttggcaacagtcccactggtcgtagatgcggagaagctgcctatcaaccggctcgcagctggcagcaaggccccggcctctgcccagagccgtggagagaagcgcacagcccacaacgccattgagaagcgctaccgctcctccatcaatgacaaaatcattgagctcaaggatctggtggtgggcactgaggcaaagctgaataaatctgctgtcttgcgcaaggccatcgactacattcgctttctgcaacacagcaaccagaaactcaagcaggagaacctaagtctgcgcactgctgtccacaaaagcaaatctctgaaggatctggtgtcggcctgtggcagtggagggaacacagacgtgctcatggagggcgtgaagactgaggtggaggacacactgaccccacccccctcggatgctggctcacctttccagagcagccccttgtcccttggcagcaggggcagtggcagcggtggcagtggcagtgactcggagcctgacagcccagtctttgaggacagcaaggcaaagccagagcagcggccgtctccagcccctcagataccaccagcgtctaccatagccctgggcgcaacgtgctgggcaccgagagcagagatggccctggctgggcccagtggctgctgcccccagtggtctggctgctcaatgggctgttggtgctcgtctccttggtgcttctctttgtctacggtgagccagtcacacggccccactcaggccccgccgtgtacttctggaggcatcgcaagcaggctgacctggacctggcccggggagactttgcccaggctgcccagcagctgtggctggccctgcgggcactgggccggcccctgcccacctcccacctggacctggcttgtagcctcctctggaacctcatccgtcacctgctgcagcgtctctgggtgggccgctggctggcaggccgggcagggggcctgcagcaggactgtgctctgcgagtggatgctagcgccagcgcccgagacgcagccctggtctaccataagctgcaccagctgcacaccatggggaagcacacaggcgggcacctcactgccaccaacctggcgctgagtgccctgaacctggcagagtgtgcaggggatgccgtgtctgtggcgacgctggccgagatctatgtggcggctgcattgagagtgaagaccagtctcccacgggccttgcattttctgacacgcttcttcctgagcagtgcccgccaggcctgcctggcacagagtggctcagtgcctcctgccatgcagtggctctgccaccccgtgggccaccgtttcttcgtggatggggactggtccgtgctcagtaccccatgggagagcctgtacagcttggccgggaacccagtggaccccctggcccaggtgactcagctattccgggaacatctcttagagcgagcactgaactgtgtgacccagcccaaccccagccctgggtcagctgatggggacaaggaattctcggatgccctcgggtacctgcagctgctgaacagctgttctgatgctgcgggggctcctgcctacagcttctccatcagttccagcatggccaccaccaccggcgtagacccggtggccaagtggtgggcctctctgacagctgtggtgatccactggctgcggcgggatgaggaggcggctgagcggctgtgcccgctggtggagcacctgccccgggtgctgcaggagtctgagagacccctgcccagggcagctctgcactccttcaaggctgcccgggccctgctgggctgtgccaaggcagagtctggtccagccagcctgaccatctgtgagaaggccagtgggtacctgcaggacagcctggctaccacaccagccagcagctccattgacaaggccgtgcagctgttcctgtgtgacctgcttcttgtggtgcgcaccagcctgtggcggcagcagcagcccccggccccggccccagcagcccagggcaccagcagcaggccccaggcttccgcccttgagctgcgtggcttccaacgggacctgagcagcctgaggcggctggcacagagcttccggcccgccatgcggagggtgttcctacatgaggccacggcccggctgatggcgggggccagccccacacggacacaccagctcctcgaccgcagtctgaggcggcgggcaggccccggtggcaaaggaggcgcggtggcggagctggagccgcggcccacgcggcgggagcacgcggaggccttgctgctggcctcctgctacctgccccccggcttcctgtcggcgcccgggcagcgcgtgggcatgctggctgaggcggcgcgcacactcgagaagcttggcgatcgccggctgctgcacgactgtcagcagatgctcatgcgcctgggcggtgggaccactgtcacttccaggctagaccccgtgtccccggcctcagcacccctgtctctagccactttggtcccgtgcagcttctgtcctgcgtcgaagctttgaaggccgaaggcagtgcaagagactctggcctccacagttcgacctgcggctgctgtgtgccttcgcggtggaaggcccgaggggcgcgatcttgaccctaagaccggcggccatgatggtgctgacctctggtggccgatcggggcactgcaggggccgagccattttggggggcccccctccttgctctgcaggcaccttagtggcttttttcctcctgtgtacagggaagagaggggtacatttccctgtgctgacggaagccaacttggctttcccggactgcaagcagggctctgccccagaggcctctctctccgtcgtgggagagagacgtgtacatagtgtaggtcagcgtgcttagcctcctgacctgaggctcctgtgctactttgccttttgcaaactttattttcatagattgagaagttttgtacagagaattaaaaatgaaattatttataatctgg

SEQ ID NO: 383297 - DNA, 2432 bp, Homo sapiens
  misc_feature (151)..(151): n is a, c, g, or t
ctctttgttttcggtcatcaacagactaggacccctgctctgtctctgttggagctggcatacaaaacgggtaagacattgcctgcctggtgtcaccttctccaggaggacaggcaggtgaacgaatagcgggggcttgtacgcgggggcnttgtacgcgtacaaggccccgccgtgtacttctggaggcatcgcaagcaggctgacctggacctggcccggggagactttgcccaggctgcccagcagctgtggctggccctgcgggcactgggccggcccctgcccacctcccacctggacctggcttgtagcctcctctggaacctcatccgtcacctgctgcagcgtctctgggtgggccgctggctggcaggccgggcagggggcctgcagcaggactgtgctctgcgagtggatgctagcgccagcgcccgagacgcagccctggtctaccataagctgcaccagctgcacaccatggggaagcacacaggcgggcacctcactgccaccaacctggcgctgagtgccctgaacctggcagagtgtgcaggggatgccgtgtctgtggcgacgctggccgagatctatgtggcggctgcattgagagtgaagaccagtctcccacgggccttgcattttctgacacgcttcttcctgagcagtgcccgccaggcctgcctggcacagagtggctcagtgcctcctgccatgcagtggctctgccaccccgtgggccaccgtttcttcgtggatggggactggtccgtgctcagtaccccatgggagagcctgtacagcttggccgggaacccagtggaccccctggcccaggtgactcagctattccgggaacatctcttagagcgagcactgaactgtgtgacccagcccaaccccagccctgggtcagctgatggggacaaggaattctcggatgccctcgggtacctgcagctgctgaacagctgttctgatgctgcgggggctcctgcctacagcttctccatcagttccagcatggccaccaccaccggcgtagacccggtggccaagtggtgggcctctctgacagctgtggtgatccactggctgcggcgggatgaggaggcggctgagcggctgtgcccgctggtggagcacctgccccgggtgctgcaggagtctgagagacccctgcccagggcagctctgcactccttcaaggctgcccgggccctgctgggctgtgccaaggcagagtctggtccagccagcctgaccatctgtgagaaggccagtgggtacctgcaggacagcctggctaccacaccagccagcagctccattgacaaggccgtgcagctgttcctgtgtgacctgcttcttgtggtgcgcaccagcctgtggcggcagcagcagcccccggccccggccccagcagcccagggcaccagcagcaggccccaggcttccgcccttgagctgcgtggcttccaacgggacctgagcagcctgaggcggctggcacagagcttccggcccgccatgcggagggtgttcctacatgaggccacggcccggctgatggcgggggccagccccacacggacacaccagctcctcgaccgcagtctgaggcggcgggcaggccccggtggcaaaggaggcgcggtggcggagctggagccgcggcccacgcggcgggagcacgcggaggccttgctgctggcctcctgctacctgccccccggcttcctgtcggcgcccgggcagcgcgtgggcatgctggctgaggcggcgcgcacactcgagaagcttggcgatcgccggctgctgcacgactgtcagcagatgctcatgcgcctgggcggtgggaccactgtcacttccaggctagaccccgtgtccccggcctcagcacccctgtctctagccactttggtcccgtgcagcttctgtcctgcgtcgaagctttgaaggccgaaggcagtgcaagagactctggcctccacagttcgacctgcggctgctgtgtgccttcgcggtggaaggcccgaggggcgcgatcttgaccctaagaccggcggccatgatggtgctgacctctggtggccgatcggggcactgcaggggccgagccattttggggggcccccctccttgctctgcaggcaccttagtggcttttttcctcctgtgtacagggaagagaggggtacatttccctgtgctgacggaagccaacttggctttcccggactgcaagcagggctctgccccagaggcctctctctccgtcgtgggagagagacgtgtacatagtgtaggtcagcgtgcttagcctcctgacctgaggctcctgtgctactttgccttttgcaaactttattttcatagattgagaagttttgtacagagaattaaaaatgaaattatttataatctgg

SEQ ID NO: 383298 - DNA, 4832 bp, Homo sapiens
gcctcgaccgcccagcagagctgcggccgggggaacccagtttccgaggaacttttcgccggcgccgggccgcctctgaggccagggcaggacacgaacgcgcggagcggcggcggcgactgagagccggggccgcggcggcgctccctaggaagggccgtacgaggcggcgggcccggcgggcctcccggaggaggcggctgcgccatggacgagccacccttcagcgaggcggctttggagcaggcgctgggcgagccgtgcgatctggacgcggcgctgctgaccgacatcgaaggtgaagtcggcgcggggaggggtagggccaacggctggacgccccaagggcgggcgcagatcgcggagccatggattgcactttcgaagacatgcttcagcttatcaacaaccaagacagtgacttccctggcctatttgacccaccctatgctgggagtggggcagggggcacagaccctgccagccccgataccagctccccaggcagcttgtctccacctcctgccacattgagctcctctcttgaagccttcctgagcgggccgcaggcagcgccctcacccctgtcccctccccagcctgcacccactccattgaagatgtacccgtccatgcccgctttctcccctgggcctggtatcaaggaagagtcagtgccactgagcatcctgcagacccccaccccacagcccctgccaggggccctcctgccacagagcttcccagccccagccccaccgcagttcagctccacccctgtgttaggctaccccagccctccgggaggcttctctacaggaagccctcccgggaacacccagcagccgctgcctggcctgccactggcttccccgccaggggtcccgcccgtctccttgcacacccaggtccagagtgtggtcccccagcagctactgacagtcacagctgcccccacggcagcccctgtaacgaccactgtgacctcgcagatccagcaggtcccggtcctgctgcagccccacttcatcaaggcagactcgctgcttctgacagccatgaagacagacggagccactgtgaaggcggcaggtctcagtcccctggtctctggcaccactgtgcagacagggcctttgccgaccctggtgagtggcggaaccatcttggcaacagtcccactggtcgtagatgcggagaagctgcctatcaaccggctcgcagctggcagcaaggccccggcctctgcccagagccgtggagagaagcgcacagcccacaacgccattgagaagcgctaccgctcctccatcaatgacaaaatcattgagctcaaggatctggtggtgggcactgaggcaaagctgaataaatctgctgtcttgcgcaaggccatcgactacattcgctttctgcaacacagcaaccagaaactcaagcaggagaacctaagtctgcgcactgctgtccacaaaagcaaatctctgaaggatctggtgtcggcctgtggcagtggagggaacacagacgtgctcatggagggcgtgaagactgaggtggaggacacactgaccccacccccctcggatgctggctcacctttccagagcagccccttgtcccttggcagcaggggcagtggcagcggtggcagtggcagtgactcggagcctgacagcccagtctttgaggacagcaaggcaaagccagagcagcggccgtctctgcacagccggggcatgctggaccgctcccgcctggccctgtgcacgctcgtcttcctctgcctgtcctgcaaccccttggcctccttgctgggggcccgggggcttcccagcccctcagataccaccagcgtctaccatagccctgggcgcaacgtgctgggcaccgagagcagagatggccctggctgggcccagtggctgctgcccccagtggtctggctgctcaatgggctgttggtgctcgtctccttggtgcttctctttgtctacggtgagccagtcacacggccccactcaggccccgccgtgtacttctggaggcatcgcaagcaggctgacctggacctggcccggggagactttgcccaggctgcccagcagctgtggctggccctgcgggcactgggccggcccctgcccacctcccacctggacctggcttgtagcctcctctggaacctcatccgtcacctgctgcagcgtctctgggtgggccgctggctggcaggccgggcagggggcctgcagcaggactgtgctctgcgagtggatgctagcgccagcgcccgagacgcagccctggtctaccataagctgcaccagctgcacaccatggggaagcacacaggcgggcacctcactgccaccaacctggcgctgagtgccctgaacctggcagagtgtgcaggggatgccgtgtctgtggcgacgctggccgagatctatgtggcggctgcattgagagtgaagaccagtctcccacgggccttgcattttctgacacgcttcttcctgagcagtgcccgccaggcctgcctggcacagagtggctcagtgcctcctgccatgcagtggctctgccaccccgtgggccaccgtttcttcgtggatggggactggtccgtgctcagtaccccatgggagagcctgtacagcttggccgggaacccagtggaccccctggcccaggtgactcagctattccgggaacatctcttagagcgagcactgaactgtgtgacccagcccaaccccagccctgggtcagctgatggggacaaggaattctcggatgccctcgggtacctgcagctgctgaacagctgttctgatgctgcgggggctcctgcctacagcttctccatcagttccagcatggccaccaccaccggcgtagacccggtggccaagtggtgggcctctctgacagctgtggtgatccactggctgcggcgggatgaggaggcggctgagcggctgtgcccgctggtggagcacctgccccgggtgctgcaggagtctgagagacccctgcccagggcagctctgcactccttcaaggctgcccgggccctgctgggctgtgccaaggcagagtctggtccagccagcctgaccatctgtgagaaggccagtgggtacctgcaggacagcctggctaccacaccagccagcagctccattgacaaggccgtgcagctgttcctgtgtgacctgcttcttgtggtgcgcaccagcctgtggcggcagcagcagcccccggccccggccccagcagcccagggcaccagcagcaggccccaggcttccgcccttgagctgcgtggcttccaacgggacctgagcagcctgaggcggctggcacagagcttccggcccgccatgcggagggtgttcctacatgaggccacggcccggctgatggcgggggccagccccacacggacacaccagctcctcgaccgcagtctgaggcggcgggcaggccccggtggcaaaggaggcgcggtggcggagctggagccgcggcccacgcggcgggagcacgcggaggccttgctgctggcctcctgctacctgccccccggcttcctgtcggcgcccgggcagcgcgtgggcatgctggctgaggcggcgcgcacactcgagaagcttggcgatcgccggctgctgcacgactgtcagcagatgctcatgcgcctgggcggtgggaccactgtcacttccaggctagaccccgtgtccccggcctcagcacccctgtctctagccactttggtcccgtgcagcttctgtcctgcgtcgaagctttgaaggccgaaggcagtgcaagagactctggcctccacagttcgacctgcggctgctgtgtgccttcgcggtggaaggcccgaggggcgcgatcttgaccctaagaccggcggccatgatggtgctgacctctggtggccgatcggggcactgcaggggccgagccattttggggggcccccctccttgctctgcaggcaccttagtggcttttttcctcctgtgtacagggaagagaggggtacatttccctgtgctgacggaagccaacttggctttcccggactgcaagcagggctctgccccagaggcctctctctccgtcgtgggagagagacgtgtacatagtgtaggtcagcgtgcttagcctcctgacctgaggctcctgtgctactttgccttttgcaaactttattttcatagattgagaagttttgtacagagaattaaaaatgaaattatttataatctggttttgtgtcttcagctgatggatgtgctgactagtgagagtgcttgggccctcccccagcacctaggcaaaggcttcccctccccctccggccacaaggtccctgggtggcacgggaggatggactgacttccaggacctgttgtgtgacaggagctacagcttgggtctccctgcaagaagtctggcacgtctcacctcccccatcccggcccctggtcatctcacagcaaagaagcctcctccctcccgacctgccgccacactggagagggggcacaggggcgggggaggtttcctgttctgtgaaaggccgactccctgactccattcatgccccccccccagcccctcccttcattcccattccccaacctaaagcctggcccggctcccagctgaatctggtcggaatccacgggctgcagattttccaaaacaatcgttgtatctttattgacttttttttttttttttctgaatgcaatgactgttttttactcttaaggaaaataaacatcttttagaaacaaaaaaaaaca

SEQ ID NO: 383299 - DNA, 5020 bp, Homo sapiens
gcctcgaccgcccagcagagctgcggccgggggaacccagtttccgaggaacttttcgccggcgccgggccgcctctgaggccagggcaggacacgaacgcgcggagcggcggcggcgactgagagccggggccgcggcggcgctccctaggaagggccgtacgaggcggcgggcccggcgggcctcccggaggaggcggctgcgccatggacgagccacccttcagcgaggcggctttggagcaggcgctgggcgagccgtgcgatctggacgcggcgctgctgaccgacatcgaaggtgaagtcggcgcggggaggggtagggccaacggctggacgccccaagggcgggcgcagatcgcggagccatggattgcactttcgaagacatgcttcagcttatcaacaaccaagacagtgacttccctggcctatttgacccaccctatgctgggagtggggcagggggcacagaccctgccagccccgataccagctccccaggcagcttgtctccacctcctgccacattgagctcctctcttgaagccttcctgagcgggccgcaggcagcgccctcacccctgtcccctccccagcctgcacccactccattgaagatgtacccgtccatgcccgctttctcccctgggcctggtatcaaggaagagtcagtgccactgagcatcctgcagacccccaccccacagcccctgccaggggccctcctgccacagagcttcccagccccagccccaccgcagttcagctccacccctgtgttaggctaccccagccctccgggaggcttctctacaggaagccctcccgggaacacccagcagccgctgcctggcctgccactggcttccccgccaggggtcccgcccgtctccttgcacacccaggtccagagtgtggtcccccagcagctactgacagtcacagctgcccccacggcagcccctgtaacgaccactgtgacctcgcagatccagcaggtcccggtcctgctgcagccccacttcatcaaggcagactcgctgcttctgacagccatgaagacagacggagccactgtgaaggcggcaggtctcagtcccctggtctctggcaccactgtgcagacagggcctttgccgaccctggtgagtggcggaaccatcttggcaacagtcccactggtcgtagatgcggagaagctgcctatcaaccggctcgcagctggcagcaaggccccggcctctgcccagagccgtggagagaagcgcacagcccacaacgccattgagaagcgctaccgctcctccatcaatgacaaaatcattgagctcaaggatctggtggtgggcactgaggcaaagctgaataaatctgctgtcttgcgcaaggccatcgactacattcgctttctgcaacacagcaaccagaaactcaagcaggagaacctaagtctgcgcactgctgtccacaaaagcaaatctctgaaggatctggtgtcggcctgtggcagtggagggaacacagacgtgctcatggagggcgtgaagactgaggtggaggacacactgaccccacccccctcggatgctggctcacctttccagagcagccccttgtcccttggcagcaggggcagtggcagcggtggcagtggcagtgactcggagcctgacagcccagtctttgaggacagcaaggcaaagccagagcagcggccgtctctgcacagccggggcatgctggaccgctcccgcctggccctgtgcacgctcgtcttcctctgcctgtcctgcaaccccttggcctccttgctgggggcccgggggcttcccagcccctcagataccaccagcgtctaccatagccctgggcgcaacgtgctgggcaccgagagcagagatggccctggctgggcccagtggctgctgcccccagtggtctggctgctcaatgggctgttggtgctcgtctccttggtgcttctctttgtctacggtgagccagtcacacggccccactcaggccccgccgtgtacttctggaggcatcgcaagcaggctgacctggacctggcccggggagactttgcccaggctgcccagcagctgtggctggccctgcgggcactgggccggcccctgcccacctcccacctggacctggcttgtagcctcctctggaacctcatccgtcacctgctgcagcgtctctgggtgggccgctggctggcaggccgggcagggggcctgcagcaggactgtgctctgcgagtggatgctagcgccagcgcccgagacgcagccctggtctaccataagctgcaccagctgcacaccatggggaagcacacaggcgggcacctcactgccaccaacctggcgctgagtgccctgaacctggcagagtgtgcaggggatgccgtgtctgtggcgacgctggccgagatctatgtggcggctgcattgagagtgaagaccagtctcccacgggccttgcattttctgacacgcttcttcctgagcagtgcccgccaggcctgcctggcacagagtggctcagtgcctcctgccatgcagtggctctgccaccccgtgggccaccgtttcttcgtggatggggactggtccgtgctcagtaccccatgggagagcctgtacagcttggccgggaacccagtggaccccctggcccaggtgactcagctattccgggaacatctcttagagcgagcactgaactgtgtgacccagcccaaccccagccctgggtcagctgatggggacaaggaattctcggatgccctcgggtacctgcagctgctgaacagctgttctgatgctgcgggggctcctgcctacagcttctccatcagttccagcatggccaccaccaccggcgtagacccggtggccaagtggtgggcctctctgacagctgtggtgatccactggctgcggcgggatgaggaggcggctgagcggctgtgcccgctggtggagcacctgccccgggtgctgcaggagtctgagagacccctgcccagggcagctctgcactccttcaaggctgcccgggccctgctgggctgtgccaaggcagagtctggtccagccagcctgaccatctgtgagaaggccagtgggtacctgcaggacagcctggctaccacaccagccagcagctccattgacaaggccgtgcagctgttcctgtgtgacctgcttcttgtggtgcgcaccagcctgtggcggcagcagcagcccccggccccggccccagcagcccagggcaccagcagcaggccccaggcttccgcccttgagctgcgtggcttccaacgggacctgagcagcctgaggcggctggcacagagcttccggcccgccatgcggagggtgttcctacatgaggccacggcccggctgatggcgggggccagccccacacggacacaccagctcctcgaccgcagtctgaggcggcgggcaggccccggtggcaaaggaggcgcggtggcggagctggagccgcggcccacgcggcgggagcacgcggaggccttgctgctggcctcctgctacctgccccccggcttcctgtcggcgcccgggcagcgcgtgggcatgctggctgaggcggcgcgcacactcgagaagcttggcgatcgccggctgctgcacgactgtcagcagatgctcatgcgcctgggcggtgggaccactgtcacttccaggctagaccccgtgtccccggcctcagcacccctgtctctagccactttggtcccgtgcagcttctgtcctgcgtcgaagctttgaaggccgaaggcagtgcaagagactctggcctccacagttcgacctgcggctgctgtgtgccttcgcggtggaaggcccgaggggcgcgatcttgaccctaagaccggcggccatgatggtgctgacctctggtggccgatcggggcactgcaggggccgagccattttggggggcccccctccttgctctgcaggcaccttagtggcttttttcctcctgtgtacagggaagagaggggtacatttccctgtgctgacggaagccaacttggctttcccggactgcaagcagggctctgccccagaggcctctctctccgtcgtgggagagagacgtgtacatagtgtaggtcagcgtgcttagcctcctgacctgaggctcctgtgctactttgccttttgcaaactttattttcatagattgagaagttttgtacagagaattaaaaatgaaattatttataatctggttttgtgtcttcagctgatggatgtgctgactagtgagagtgcttgggccctcccccagcacctaggcaaaggcttcccctccccctccggccacaaggtacacaacttttaacttagctcttcccgatgtttgtttgttagtgggaggagtggggagggctggctgtatggcctccagcctacctgttccccctgctcccagggcacatggttgggctgtgtcaacccttagggcctccatggggtcagttgtcccttctcacctcccagctctgtccccatcaggtccctgggtggcacgggaggatggactgacttccaggacctgttgtgtgacaggagctacagcttgggtctccctgcaagaagtctggcacgtctcacctcccccatcccggcccctggtcatctcacagcaaagaagcctcctccctcccgacctgccgccacactggagagggggcacaggggcgggggaggtttcctgttctgtgaaaggccgactccctgactccattcatgccccccccccagcccctcccttcattcccattccccaacctaaagcctggcccggctcccagctgaatctggtcggaatccacgggctgcagattttccaaaacaatcgttgtatctttattgacttttttttttttttttctgaatgcaatgactgttttttactcttaaggaaaataaacatcttttagaaacaaaaaaaaaca

SEQ ID NO: 383300 - DNA, 4811 bp, Homo sapiens
gcctcgaccgcccagcagagctgcggccgggggaacccagtttccgaggaacttttcgccggcgccgggccgcctctgaggccagggcaggacacgaacgcgcggagcggcggcggcgactgagagccggggccgcggcggcgctccctaggaagggccgtacgaggcggcgggcccggcgggcctcccggaggaggcggctgcgccatggacgagccacccttcagcgaggcggctttggagcaggcgctgggcgagccgtgcgatctggacgcggcgctgctgaccgacatcgaaggtgaagtcggcgcggggaggggtagggccaacggctggacgccccaagggcgggcgcagatcgcggagccatggattgcactttcgaagacatgcttcagcttatcaacaaccaagacagtgacttccctggcctatttgacccaccctatgctgggagtggggcagggggcacagaccctgccagccccgataccagctccccaggcagcttgtctccacctcctgccacattgagctcctctcttgaagccttcctgagcgggccgcaggcagcgccctcacccctgtcccctccccagcctgcacccactccattgaagatgtacccgtccatgcccgctttctcccctgggcctggtatcaaggaagagtcagtgccactgagcatcctgcagacccccaccccacagcccctgccaggggccctcctgccacagagcttcccagccccagccccaccgcagttcagctccacccctgtgttaggctaccccagccctccgggaggcttctctacaggaagccctcccgggaacacccagcagccgctgcctggcctgccactggcttccccgccaggggtcccgcccgtctccttgcacacccaggtccagagtgtggtcccccagcagctactgacagtcacagctgcccccacggcagcccctgtaacgaccactgtgacctcgcagatccagcaggtcccggtcctgctgcagccccacttcatcaaggcagactcgctgcttctgacagccatgaagacagacggagccactgtgaaggcggcaggtctcagtcccctggtctctggcaccactgtgcagacagggcctttgccgaccctggtgagtggcggaaccatcttggcaacagtcccactggtcgtagatgcggagaagctgcctatcaaccggctcgcagctggcagcaaggccccggcctctgcccagagccgtggagagaagcgcacagcccacaacgccattgagaagcgctaccgctcctccatcaatgacaaaatcattgagctcaaggatctggtggtgggcactgaggcaaagctgaataaatctgctgtcttgcgcaaggccatcgactacattcgctttctgcaacacagcaaccagaaactcaagcaggagaacctaagtctgcgcactgctgtccacaaaagcaaatctctgaaggatctggtgtcggcctgtggcagtggagggaacacagacgtgctcatggagggcgtgaagactgaggtggaggacacactgaccccacccccctcggatgctggctcacctttccagagcagccccttgtcccttggcagcaggggcagtggcagcggtggcagtggcagtgactcggagcctgacagcccagtctttgaggacagcaaggcaaagccagagcagcggccgtctctgcacagccggggcatgctggaccgctcccgcctggccctgtgcacgctcgtcttcctctgcctgtcctgcaaccccttggcctccttgctgggggcccgggggcttcccagcccctcagataccaccagcgtctaccatagccctgggcgcaacgtgctgggcaccgagagcagagatggccctggctgggcccagtggctgctgcccccagtggtctggctgctcaatgggctgttggtgctcgtctccttggtgcttctctttgtctacggtgagccagtcacacggccccactcaggccccgccgtgtacttctggaggcatcgcaagcaggctgacctggacctggcccggggagactttgcccaggctgcccagcagctgtggctggccctgcgggcactgggccggcccctgcccacctcccacctggacctggcttgtagcctcctctggaacctcatccgtcacctgctgcagcgtctctgggtgggccgctggctggcaggccgggcagggggcctgcagcaggactgtgctctgcgagtggatgctagcgccagcgcccgagacgcagccctggtctaccataagctgcaccagctgcacaccatggggaagcacacaggcgggcacctcactgccaccaacctggcgctgagtgccctgaacctggcagagtgtgcaggggatgccgtgtctgtggcgacgctggccgagatctatgtggcggctgcattgagagtgaagaccagtctcccacgggccttgcattttctgacacgcttcttcctgagcagtgcccgccaggcctgcctggcacagagtggctcagtgcctcctgccatgcagtggctctgccaccccgtgggccaccgtttcttcgtggatggggactggtccgtgctcagtaccccatgggagagcctgtacagcttggccgggaacccagtggaccccctggcccaggtgactcagctattccgggaacatctcttagagcgagcactgaactgtgtgacccagcccaaccccagccctgggtcagctgatggggacaaggaattctcggatgccctcgggtacctgcagctgctgaacagctgttctgatgctgcgggggctcctgcctacagcttctccatcagttccagcatggccaccaccaccggcgtagacccggtggccaagtggtgggcctctctgacagctgtggtgatccactggctgcggcgggatgaggaggcggctgagcggctgtgcccgctggtggagcacctgccccgggtgctgcaggagtctgagagacccctgcccagggcagctctgcactccttcaaggctgcccgggccctgctgggctgtgccaaggcagagtctggtccagccagcctgaccatctgtgagaaggccagtgggtacctgcaggacagcctggctaccacaccagccagcagctccattgacaaggccgtgcagctgttcctgtgtgacctgcttcttgtggtgcgcaccagcctgtggcggcagcagcagcccccggccccggccccagcagcccagggcaccagcagcaggccccaggcttccgcccttgagctgcgtggcttccaacgggacctgagcagcctgaggcggctggcacagagcttccggcccgccatgcggagggtgttcctacatgaggccacggcccggctgatggcgggggccagccccacacggacacaccagctcctcgaccgcagtctgaggcggcgggcaggccccggtggcaaaggaggcgcggtggcggagctggagccgcggcccacgcggcgggagcacgcggaggccttgctgctggcctcctgctacctgccccccggcttcctgtcggcgcccgggcagcgcgtgggcatgctggctgaggcggcgcgcacactcgagaagcttggcgatcgccggctgctgcacgactgtcagcagatgctcatgcgcctgggcggtgggaccactgtcacttccaggctagaccccgtgtccccggcctcagcacccctgtctctagccactttggtcccgtgcagcttctgtcctgcgtcgaagctttgaaggccgaaggcagtgcaagagactctggcctccacagttcgacctgcggctgctgtgtgccttcgcggtggaaggcccgaggggcgcgatcttgaccctaagaccggcggccatgatggtgctgacctctggtggccgatcggggcactgcaggggccgagccattttggggggcccccctccttgctctgcaggcaccttagtggcttttttcctcctgtgtacagggaagagaggggtacatttccctgtgctgacggaagccaacttggctttcccggactgcaagcagggctctgccccagaggcctctctctccgtcgtgggagagagacgtgtacatagtgtaggtcagcgtgcttagcctcctgacctgaggctcctgtgctactttgccttttgcaaactttattttcatagattgagaagttttgtacagagaattaaaaatgaaattatttataatctggaaaaaaaaaaaaaaaaaaaaaaaaaaaaaaaaaaaaaaaaaaaaaaaaaaaaaaaaaaaaaaaaaaaaaaacaaaaagaaaaaaaacaaaaaaagaagaggggggggcggccgcgtcaaaaactatcccccggcgagagggcacacagcgtgaagcactaccccccgcatttttcggaacaggagggccgccccctaagggggagggctctcaaaacaagcacgagcgcggcgccgccgatacaacaacacacttcgcggggacaaaacacgtgcacgacggggcgtctgtggggaggagaaacccccacacgaggggggggggaaacaaatatttgggggacccaaacctcctgcctacggagagataatatcgccccaccggggcgacgaacaaacaacccatcgtgagcggctgttagatgtgtggtgacaacacacggctgtattattgtgtgtgcggagaaaagaaagtttgctctccactggtttgtctccgagacagaaaattttatcaggcg

SEQ ID NO: 383301 - DNA, 2682 bp, Homo sapiens
gcctcgaccgcccagcagagctgcggccgggggaacccagtttccgaggaacttttcgccggcgccgggccgcctctgaggccagggcaggacacgaacgcgcggagcggcggcggcgactgagagccggggccgcggcggcgctccctaggaagggccgtacgaggcggcgggcccggcgggcctcccggaggaggcggctgcgccatggacgagccacccttcagcgaggcggctttggagcaggcgctgggcgagccgtgcgatctggacgcggcgctgctgaccgacatcgaaggtgaagtcggcgcggggaggggtagggccaacggctggacgccccaagggcgggcgcagatcgcggagccatggattgcactttcgaagacatgcttcagcttatcaacaaccaagacagtgacttccctggcctatttgacccaccctatgctgggagtggggcagggggcacagaccctgccagccccgataccagctccccaggcagcttgtctccacctcctgccacattgagctcctctcttgaagccttcctgagcgggccgcaggcagcgccctcacccctgtcccctccccagcctgcacccactccattgaagatgtacccgtccatgcccgctttctcccctgggcctggtatcaaggaagagtcagtgccactgagcatcctgcagacccccaccccacagcccctgccaggggccctcctgccacagagcttcccagccccagccccaccgcagttcagctccacccctgtgttaggctaccccagccctccgggaggcttctctacaggaagccctcccgggaacacccagcagccgctgcctggcctgccactggcttccccgccaggggtcccgcccgtctccttgcacacccaggtccagagtgtggtcccccagcagctactgacagtcacagctgcccccacggcagcccctgtaacgaccactgtgacctcgcagatccagcaggtcccggtcctgctgcagccccacttcatcaaggcagactcgctgcttctgacagccatgaagacagacggagccactgtgaaggcggcaggtctcagtcccctggtctctggcaccactgtgcagacagggcctttgccgaccctggtgagtggcggaaccatcttggcaacagtcccactggtcgtagatgcggagaagctgcctatcaaccggctcgcagctggcagcaaggccccggcctctgcccagagccgtggagagaagcgcacagcccacaacgccattgagaagcgctaccgctcctccatcaatgacaaaatcattgagctcaaggatctggtggtgggcactgaggcaaagctgaataaatctgctgtcttgcgcaaggccatcgactacattcgctttctgcaacacagcaaccagaaactcaagcaggagaacctaagtctgcgcactgctgtccacaaaagcaaatctctgaaggatctggtgtcggcctgtggcagtggagggaacacagacgtgctcatggagggcgtgaagactgaggtggaggacacactgaccccacccccctcggatgctggctcacctttccagagcagccccttgtcccttggcagcaggggcagtggcagcggtggcagtggcagtgactcggagcctgacagcccagtctttgaggacagcaaggcaaagccagagcagcggccgtctctgcacagccggggcatgctggaccgctcccgcctggccctgtgcacgctcgtcttcctctgcctgtcctgcaaccccttggcctccttgctgggggcccgggggcttcccccacacggacacaccagctcctcgaccgcagtctgaggcggcgggcaggccccggtggcaaaggaggcgcggtggcggagctggagccgcggcccacgcggcgggagcacgcggaggccttgctgctggcctcctgctacctgccccccggcttcctgtcggcgcccgggcagcgcgtgggcatgctggctgaggcggcgcgcacactcgagaagcttggcgatcgccggctgctgcacgactgtcagcagatgctcatgcgcctgggcggtgggaccactgtcacttccaggctagaccccgtgtccccggcctcagcacccctgtctctagccactttggtcccgtgcagcttctgtcctgcgtcgaagctttgaaggccgaaggcagtgcaagagactctggcctccacagttcgacctgcggctgctgtgtgccttcgcggtggaaggcccgaggggcgcgatcttgaccctaagaccggcggccatgatggtgctgacctctggtggccgatcggggcactgcaggggccgagccattttggggggcccccctccttgctctgcaggcaccttagtggcttttttcctcctgtgtacagggaagagaggggtacatttccctgtgctgacggaagccaacttggctttcccggactgcaagcagggctctgccccagaggcctctctctccgtcgtgggagagagacgtgtacatagtgtaggtcagcgtgcttagcctcctgacctgaggctcctgtgctactttgccttttgcaaactttattttcatagattgagaagttttgtacagagaattaaaaatgaaattatttataatctgg

SEQ ID NO: 383302 - DNA, 1455 bp, Homo sapiens
gtggtggagatggagagccctgagcctccactctcctggcccccaggtgttcctacatgaggccacggcccggctgatggcgggggccagccccacacggacacaccagctcctcgaccgcagtctgaggcggcgggcaggccccggtggcaaaggaggtgagggggcagctgctgaccagggatgtgctgtctgctcagcagggaagggcgcacatgggatgtgataccaagggaggctgtgtgtgtgtcagacgggacagacaggcctggcgcagtggctcacacctagcactttgggaggctcagttgggaggacagcttgagcccaggagttggaggccgcagtgagcctgagtgacagggagagtccctgtctcaaaaaaaaaaaaagaccaagcatcttcttgatggttacctgatgacaattcctttcacaaggaatcagtggggtgactgtcatttgtgggatacatgactgcacgtgcgtgactcagtctgtggactttgtgtgtgggctgagactagggtggggagaggggaacccgccaggcccccgccaggtacctgtgtgccaggtacaggcggctggtgccgtggcttgtgtgtgggcagggctcccgcgggggcgtggccagcttgagacccatccctgacacatcctcgtgtgcgcaggcgcggtggcggagctggagccgcggcccacgcggcgggagcacgcggaggccttgctgctggcctcctgctacctgccccccggcttcctgtcggcgcccgggcagcgcgtgggcatgctggctgaggcggcgcgcacactcgagaagcttggcgatcgccggctgctgcacgactgtcagcagatgctcatgcgcctgggcggtgggaccactgtcacttccaggctagaccccgtgtccccggcctcagcacccctgtctctagccactttggtcccgtgcagcttctgtcctgcgtcgaagctttgaaggccgaaggcagtgcaagagactctggcctccacagttcgacctgcggctgctgtgtgccttcgcggtggaaggcccgaggggcgcgatcttgaccctaagaccggcggccatgatggtgctgacctctggtggccgatcggggcactgcaggggccgagccattttggggggcccccctccttgctctgcaggcaccttagtggcttttttcctcctgtgtacagggaagagaggggtacatttccctgtgctgacggaagccaacttggctttcccggactgcaagcagggctctgccccagaggcctctctctccgtcgtgggagagagacgtgtacatagtgtaggtcagcgtgcttagcctcctgacctgaggctcctgtgctactttgccttttgcaaactttattttcatagattgagaagttttgtacagagaattaaaaatgaaattatttataatctgg

SEQ ID NO: 383303 - DNA, 1105 bp, Homo sapiens
gcctcgaccgcccagcagagctgcggccgggggaacccagtttccgaggaacttttcgccggcgccgggccgcctctgaggccagggcaggacacgaacgcgcggagcggcggcggcgactgagagccggggccgcggcggcgctccctaggaagggccgtacgaggcggcgggcccggcgggcctcccggaggaggcggctgcgccatggacgagccacccttcagcgaggcggctttggagcaggcgctgggcgagccgtgcgatctggacgcggcgctgctgaccgacatcgaagacatgcttcagcttatcaacaaccaagacagtgacttccctggcctatttgacccaccctatgctgggagtggggcagggggcacagaccctgccagccccgataccagctccccaggcagcttgtctccacctcctgccacattgagctcctctcttgaagccttcctgagcgggccgcaggcagcgccctcacccctgtcccctccccagcctgcacccactccattgaagatgtacccgtccatgcccgctttctcccctgggcctggtatcaaggaagagtcagtgccactgagcatcctgcagacccccaccccacagcccctgccaggggccctcctgccacagagcttcccagccccagccccaccgcagttcagctccaccctgtgtgccttcgcggtggaaggcccgaggggcgcgatcttgaccctaagaccggcggccatgatggtgctgacctctggtggccgatcggggcactgcaggggccgagccattttggggggcccccctccttgctctgcaggcaccttagtggcttttttcctcctgtgtacagggaagagaggggtacatttccctgtgctgacggaagccaacttggctttcccggactgcaagcagggctctgccccagaggcctctctctccgtcgtgggagagagacgtgtacatagtgtaggtcagcgtgcttagcctcctgacctgaggctcctgtgctactttgccttttgcaaactttattttcatagattgagaagttttgtacagagaattaaaaatgaaattatttataatctgg

SEQ ID NO: 383304 - DNA, 2607 bp, Homo sapiens
gcctcgaccgcccagcagagctgcggccgggggaacccagtttccgaggaacttttcgccggcgccgggccgcctctgaggccagggcaggacacgaacgcgcggagcggcggcggcgactgagagccggggccgcggcggcgctccctaggaagggccgtacgaggcggcgggcccggcgggcctcccggaggaggcggctgcgccatggacgagccacccttcagcgaggcggctttggagcaggcgctgggcgagccgtgcgatctggacgcggcgctgctgaccgacatcgaaggtgaagtcggcgcggggaggggtagggccaacggctggacgccccaagggcgggcgcagatcgcggagccatggattgcactttcgaagacatgcttcagcttatcaacaaccaagacagtgacttccctggcctatttgacccaccctatgctgggagtggggcagggggcacagaccctgccagccccgataccagctccccaggcagcttgtctccacctcctgccacattgagctcctctcttgaagccttcctgagcgggccgcaggcagcgccctcacccctgtcccctccccagcctgcacccactccattgaagatgtacccgtccatgcccgctttctcccctgggcctggtatcaaggaagagtcagtgccactgagcatcctgcagacccccaccccacagcccctgccaggggccctcctgccacagagcttcccagccccagccccaccgcagttcagctccacccctgtgttaggctaccccagccctccgggaggcttctctacaggaagccctcccgggaacacccagcagccgctgcctggcctgccactggcttccccgccaggggtcccgcccgtctccttgcacacccaggtccagagtgtggtcccccagcagctactgacagtcacagctgcccccacggcagcccctgtaacgaccactgtgacctcgcagatccagcaggtcccggtcctgctgcagccccacttcatcaaggcagactcgctgcttctgacagccatgaagacagacggagccactgtgaaggcggcaggtctcagtcccctggtctctggcaccactgtgcagacagggcctttgccgaccctggtgagtggcggaaccatcttggcaacagtcccactggtcgtagatgcggagaagctgcctatcaaccggctcgcagctggcagcaaggccccggcctctgcccagagccgtggagagaagcgcacagcccacaacgccattgagaagcgctaccgctcctccatcaatgacaaaatcattgagctcaaggatctggtggtgggcactgaggcaaagctgaataaatctgctgtcttgcgcaaggccatcgactacattcgctttctgcaacacagcaaccagaaactcaagcaggagaacctaagtctgcgcactgctgtccacaaaagcaaatctctgaaggatctggtgtcggcctgtggcagtggagggaacacagacgtgctcatggagggcgtgaagactgaggtggaggacacactgaccccacccccctcggatgctggctcacctttccagagcagccccttgtcccttggcagcaggggcagtggcagcggtggcagtggcagtgactcggagcctgacagcccagtctttgaggacagcaaggttgggccctgccacggtgcccccttccccactcccagccatatcctctgagcctcatgacagggccgggaagaccctaacagatcctacctcccatttcatagacagaataactgaggcctggagccacgtggggtcccacagtaaggtgggcagaatcctgaccccccccttcccagccccatgctctctggggtccctccgattctgccctcaccaccctgcccaaccccaccaggcaaagccagagcagcggccgtctctgcacagccggggcatgctggaccgctcccgcctggccctgtgcacgctcgtcttcctctgcctgtcctgcaaccccttggcctccttgctgggggcccgggggcttcccagcccctcagataccaccagcgtctaccatagccctgggcgcaacgtgctgggcaccgagagcagagatggccctggctgggcccagtggctgctgcccccagtggtctggctgctcaatgggctgttggtgctcgtctccttggtgcttctctttgtctacggtgagccagtcacacggccccactcaggccccgccgtgtacttctggaggcatcgcaagcaggctgacctggacctggcccggggagactttgcccaggctgcccagcagctgtggctggccctgcgggcactgggccggcccctgcccacctcccacctggacctggcttgtagcctcctctggaacctcatccgtcacctgctgcagcgtctctgggtgggccgctggctggcaggccgggcagggggcctgcagcaggactgtgctctgcgagtggatgctagcgccagcgcccgagacgcagccctggtctaccataagctgcaccagctgcacaccatgggtaggactgagcgtggggcgggctcc

SEQ ID NO: 383305 - DNA, 194 bp, Homo sapiens
gagcacctgccccgggtgctgcaggagtctgagtgagtgcacggcaggttcctcctgcctggtcccgggctcagccttcctcatcccctgggcactgtgcctcactcagcctttgttctgtgcaggaggagtcaccaccttttttcctcagggaactcgagccagggaagtggggggcactcagccagggcttg

SEQ ID NO: 383306 - DNA, 4202 bp, Homo sapiens
gcctcgaccgcccagcagagctgcggccgggggaacccagtttccgaggaacttttcgccggcgccgggccgcctctgaggccagggcaggacacgaacgcgcggagcggcggcggcgactgagagccggggccgcggcggcgctccctaggaagggccgtacgaggcggcgggcccggcgggcctcccggaggaggcggctgcgccatggacgagccacccttcagcgaggcggctttggagcaggcgctgggcgagccgtgcgatctggacgcggcgctgctgaccgacatcgaagacatgcttcagcttatcaacaaccaagacagtgacttccctggcctatttgacccaccctatgctgggagtggggcagggggcacagaccctgccagccccgataccagctccccaggcagcttgtctccacctcctgccacattgagctcctctcttgaagccttcctgagcgggccgcaggcagcgccctcacccctgtcccctccccagcctgcacccactccattgaagatgtacccgtccatgcccgctttctcccctgggcctggtatcaaggaagagtcagtgccactgagcatcctgcagacccccaccccacagcccctgccaggggccctcctgccacagagcttcccagccccagccccaccgcagttcagctccacccctgtgttaggctaccccagccctccgggaggcttctctacaggaagccctcccgggaacacccagcagccgctgcctggcctgccactggcttccccgccaggggtcccgcccgtctccttgcacacccaggtccagagtgtggtcccccagcagctactgacagtcacagctgcccccacggcagcccctgtaacgaccactgtgacctcgcagatccagcaggtcccggtcctgctgcagccccacttcatcaaggcagactcgctgcttctgacagccatgaagacagacggagccactgtgaaggcggcaggtctcagtcccctggtctctggcaccactgtgcagacagggcctttgccgaccctggtgagtggcggaaccatcttggcaacagtcccactggtcgtagatgcggagaagctgcctatcaaccggctcgcagctggcagcaaggccccggcctctgcccagagccgtggagagaagcgcacagcccacaacgccattgagaagcgctaccgctcctccatcaatgacaaaatcattgagctcaaggatctggtggtgggcactgaggcaaagctgaataaatctgctgtcttgcgcaaggccatcgactacattcgctttctgcaacacagcaaccagaaactcaagcaggagaacctaagtctgcgcactgctgtccacaaaagcaaatctctgaaggatctggtgtcggcctgtggcagtggagggaacacagacgtgctcatggagggcgtgaagactgaggtggaggacacactgaccccacccccctcggatgctggctcacctttccagagcagccccttgtcccttggcagcaggggcagtggcagcggtggcagtggcagtgactcggagcctgacagcccagtctttgaggacagcaaggcaaagccagagcagcggccgtctctgcacagccggggcatgctggaccgctcccgcctggccctgtgcacgctcgtcttcctctgcctgtcctgcaaccccttggcctccttgctgggggcccgggggcttcccagcccctcagataccaccagcgtctaccatagccctgggcgcaacgtgctgggcaccgagagcagagatggccctggctgggcccagtggctgctgcccccagtggtctggctgctcaatgggctgttggtgctcgtctccttggtgcttctctttgtctacggtgagccagtcacacggccccactcaggccccgccgtgtacttctggaggcatcgcaagcaggctgacctggacctggcccggggagactttgcccaggctgcccagcagctgtggctggccctgcgggcactgggccggcccctgcccacctcccacctggacctggcttgtagcctcctctggaacctcatccgtcacctgctgcagcgtctctgggtgggccgctggctggcaggccgggcagggggcctgcagcaggactgtgctctgcgagtggatgctagcgccagcgcccgagacgcagccctggtctaccataagctgcaccagctgcacaccatggggaagcacacaggcgggcacctcactgccaccaacctggcgctgagtgccctgaacctggcagagtgtgcaggggatgccgtgtctgtggcgacgctggccgagatctatgtggcggctgcattgagagtgaagaccagtctcccacgggccttgcattttctgacacgcttcttcctgagcagtgcccgccaggcctgcctggcacagagtggctcagtgcctcctgccatgcagtggctctgccaccccgtgggccaccgtttcttcgtggatggggactggtccgtgctcagtaccccatgggagagcctgtacagcttggccgggaacccagtggaccccctggcccaggtgactcagctattccgggaacatctcttagagcgagcactgaactgtgtgacccagcccaaccccagccctgggtcagctgatggggacaaggaattctcggatgccctcgggtacctgcagctgctgaacagctgttctgatgctgcgggggctcctgcctacagcttctccatcagttccagcatggccaccaccaccggcgtagacccggtggccaagtggtgggcctctctgacagctgtggtgatccactggctgcggcgggatgaggaggcggctgagcggctgtgcccgctggtggagcacctgccccgggtgctgcaggagtctgagagacccctgcccagggcagctctgcactccttcaaggctgcccgggccctgctgggctgtgccaaggcagagtctggtccagccagcctgaccatctgtgagaaggccagtgggtacctgcaggacagcctggctaccacaccagccagcagctccattgacaaggccgtgcagctgttcctgtgtgacctgcttcttgtggtgcgcaccagcctgtggcggcagcagcagcccccggccccggccccagcagcccagggcaccagcagcaggccccaggcttccgcccttgagctgcgtggcttccaacgggacctgagcagcctgaggcggctggcacagagcttccggcccgccatgcggagggtgttcctacatgaggccacggcccggctgatggcgggggccagccccacacggacacaccagctcctcgaccgcagtctgaggcggcgggcaggccccggtggcaaaggaggcgcggtggcggagctggagccgcggcccacgcggcgggagcacgcggaggccttgctgctggcctcctgctacctgccccccggcttcctgtcggcgcccgggcagcgcgtgggcatgctggctgaggcggcgcgcacactcgagaagcttggcgatcgccggctgctgcacgactgtcagcagatgctcatgcgcctgggcggtgggaccactgtcacttccaggctagaccccgtgtccccggcctcagcacccctgtctctagccactttggtcccgtgcagcttctgtcctgcgtcgaagctttgaaggccgaaggcagtgcaagagactctggcctccacagttcgacctgcggctgctgtgtgccttcgcggtggaaggcccgaggggcgcgatcttgaccctaagaccggcggccatgatggtgctgacctctggtggccgatcggggcactgcaggggccgagccattttggggggcccccctccttgctctgcaggcaccttagtggcttttttcctcctgtgtacagggaagagaggggtacatttccctgtgctgacggaagccaacttggctttcccggactgcaagcagggctctgccccagaggcctctctctccgtcgtgggagagagacgtgtacatagtgtaggtcagcgtgcttagcctcctgacctgaggctcctgtgctactttgccttttgcaaactttattttcatagattgagaagttttgtacagagaattaaaaatgaaattatttataatctgg

SEQ ID NO: 383307 - DNA, 478 bp, Homo sapiens
ctgacctctggtgcacgatcggggcactgcaggggccgagccatgttggggggcccccctccttgctctgcaggcaccttagtggcttttttccgccttgcacacccaggtccagagtgtggtcccccagcagctactgacagtcacagctgcccccacggcagcccctgtaacgaccactgtgacctcgcagatccagcaggtcccggtcctgctgcagccccacttcatcaaggcagactcgctgcttctgacagccatgaagacagacggagccactgtgaaggcggcaggtctcagtcccctggtctctggcaccactgtgcagacagggcctttgccgaccctggtgagtggcggaaccatcttggcaacagtcccactggtcgtagatgcggagaagctgcctatcaaccggctcgcagcatggtcaacaatgtcacagccatctaccaataaccctgaatacttttaccgt

SEQ ID NO: 383308 - DNA, 4434 bp, Homo sapiens
gctccccagaaagttgcttagttctaggcagggatttcccttattcacagccgggagcagtgcctggcatagtgtgggcactcagcactcagcacatgctcactggatgagtgaatgaatgtgagcctgctgtttgctgtggactaaggatgtttctagatgtttgggcaaataccggatggtgggaagagctcaggctctgaagtctgcagtcttgggcccgaccctgggctcagccccagcctagctgtggggcaagattgtgagccttgtggtgcccaccttgtccaggtattgtgatgcactcgcagcagcaggcattgctttagacagcacaggtgctcgcaaaatggctgtatgtccgggaacaccagctcctgtgggtggctttctgtcctggtggcattgcccacacatacagctgtgtgccaacaagggttgtgcaaataaggttgtgtttggatgtgtgtgatgccctgtttgggggtcagtctctgcctcactcacgcaccctcttctccttttcacagacatgcttcagcttatcaacaaccaagacagtgacttccctggcctatttgacccaccctatgctgggagtggggcagggggcacagaccctgccagccccgataccagctccccaggcagcttgtctccacctcctgccacattgagctcctctcttgaagccttcctgagcgggccgcaggcagcgccctcacccctgtcccctccccagcctgcacccactccattgaagatgtacccgtccatgcccgctttctcccctgggcctggtatcaaggaagagtcagtgccactgagcatcctgcagacccccaccccacagcccctgccaggggccctcctgccacagagcttcccagccccagccccaccgcagttcagctccacccctgtgttaggctaccccagccctccgggaggcttctctacaggaagccctcccgggaacacccagcagccgctgcctggcctgccactggcttccccgccaggggtcccgcccgtctccttgcacacccaggtccagagtgtggtcccccagcagctactgacagtcacagctgcccccacggcagcccctgtaacgaccactgtgacctcgcagatccagcaggtcccggtcctgctgcagccccacttcatcaaggcagactcgctgcttctgacagccatgaagacagacggagccactgtgaaggcggcaggtctcagtcccctggtctctggcaccactgtgcagacagggcctttgccgaccctggtgagtggcggaaccatcttggcaacagtcccactggtcgtagatgcggagaagctgcctatcaaccggctcgcagctggcagcaaggccccggcctctgcccagagccgtggagagaagcgcacagcccacaacgccattgagaagcgctaccgctcctccatcaatgacaaaatcattgagctcaaggatctggtggtgggcactgaggcaaagctgaataaatctgctgtcttgcgcaaggccatcgactacattcgctttctgcaacacagcaaccagaaactcaagcaggagaacctaagtctgcgcactgctgtccacaaaagcaaatctctgaaggatctggtgtcggcctgtggcagtggagggaacacagacgtgctcatggagggcgtgaagactgaggtggaggacacactgaccccacccccctcggatgctggctcacctttccagagcagccccttgtcccttggcagcaggggcagtggcagcggtggcagtggcagtgactcggagcctgacagcccagtctttgaggacagcaaggcaaagccagagcagcggccgtctctgcacagccggggcatgctggaccgctcccgcctggccctgtgcacgctcgtcttcctctgcctgtcctgcaaccccttggcctccttgctgggggcccgggggcttcccagcccctcagataccaccagcgtctaccatagccctgggcgcaacgtgctgggcaccgagagcagagatggccctggctgggcccagtggctgctgcccccagtggtctggctgctcaatgggctgttggtgctcgtctccttggtgcttctctttgtctacggtgagccagtcacacggccccactcaggccccgccgtgtacttctggaggcatcgcaagcaggctgacctggacctggcccggggagactttgcccaggctgcccagcagctgtggctggccctgcgggcactgggccggcccctgcccacctcccacctggacctggcttgtagcctcctctggaacctcatccgtcacctgctgcagcgtctctgggtgggccgctggctggcaggccgggcagggggcctgcagcaggactgtgctctgcgagtggatgctagcgccagcgcccgagacgcagccctggtctaccataagctgcaccagctgcacaccatggggaagcacacaggcgggcacctcactgccaccaacctggcgctgagtgccctgaacctggcagagtgtgcaggggatgccgtgtctgtggcgacgctggccgagatctatgtggcggctgcattgagagtgaagaccagtctcccacgggccttgcattttctgacacgcttcttcctgagcagtgcccgccaggcctgcctggcacagagtggctcagtgcctcctgccatgcagtggctctgccaccccgtgggccaccgtttcttcgtggatggggactggtccgtgctcagtaccccatgggagagcctgtacagcttggccgggaacccagtggaccccctggcccaggtgactcagctattccgggaacatctcttagagcgagcactgaactgtgtgacccagcccaaccccagccctgggtcagctgatggggacaaggaattctcggatgccctcgggtacctgcagctgctgaacagctgttctgatgctgcgggggctcctgcctacagcttctccatcagttccagcatggccaccaccaccggcgtagacccggtggccaagtggtgggcctctctgacagctgtggtgatccactggctgcggcgggatgaggaggcggctgagcggctgtgcccgctggtggagcacctgccccgggtgctgcaggagtctgagagacccctgcccagggcagctctgcactccttcaaggctgcccgggccctgctgggctgtgccaaggcagagtctggtccagccagcctgaccatctgtgagaaggccagtgggtacctgcaggacagcctggctaccacaccagccagcagctccattgacaaggccgtgcagctgttcctgtgtgacctgcttcttgtggtgcgcaccagcctgtggcggcagcagcagcccccggccccggccccagcagcccagggcaccagcagcaggccccaggcttccgcccttgagctgcgtggcttccaacgggacctgagcagcctgaggcggctggcacagagcttccggcccgccatgcggagggtgttcctacatgaggccacggcccggctgatggcgggggccagccccacacggacacaccagctcctcgaccgcagtctgaggcggcgggcaggccccggtggcaaaggaggcgcggtggcggagctggagccgcggcccacgcggcgggagcacgcggaggccttgctgctggcctcctgctacctgccccccggcttcctgtcggcgcccgggcagcgcgtgggcatgctggctgaggcggcgcgcacactcgagaagcttggcgatcgccggctgctgcacgactgtcagcagatgctcatgcgcctgggcggtgggaccactgtcacttccaggctagaccccgtgtccccggcctcagcacccctgtctctagccactttggtcccgtgcagcttctgtcctgcgtcgaagctttgaaggccgaaggcagtgcaagagactctggcctccacagttcgacctgcggctgctgtgtgccttcgcggtggaaggcccgaggggcgcgatcttgaccctaagaccggcggccatgatggtgctgacctctggtggccgatcggggcactgcaggggccgagccattttggggggcccccctccttgctctgcaggcaccttagtggcttttttcctcctgtgtacagggaagagaggggtacatttccctgtgctgacggaagccaacttggctttcccggactgcaagcagggctctgccccagaggcctctctctccgtcgtgggagagagacgtgtacatagtgtaggtcagcgtgcttagcctcctgacctgaggctcctgtgctactttgccttttgcaaactttattttcatagattgagaagttttgtacagagaattaaaaatgaaattatttataatctgg

SEQ ID NO: 383309 - DNA, 4529 bp, Homo sapiens
gcctcgaccgcccagcagagctgcggccgggggaacccagtttccgaggaacttttcgccggcgccgggccgcctctgaggccagggcaggacacgaacgcgcggagcggcggcggcgactgagagccggggccgcggcggcgctccctaggaagggccgtacgaggcggcgggcccggcgggcctcccggaggaggcggctgcgccatggacgagccacccttcagcgaggcggctttggagcaggcgctgggcgagccgtgcgatctggacgcggcgctgctgaccgacatcgaaggtgaagtcggcgcggggaggggtagggccaacggctggacgccccaagggcgggcgcagatcgcggagccatggattgcactttcgaagacatgcttcagcttatcaacaaccaagacagtgacttccctggcctatttgacccaccctatgctgggagtggggcagggggcacagaccctgccagccccgataccagctccccaggcagcttgtctccacctcctgccacattgagctcctctcttgaagccttcctgagcgggccgcaggcagcgccctcacccctgtcccctccccagcctgcacccactccattgaagatgtacccgtccatgcccgctttctcccctgggcctggtatcaaggaagagtcagtgccactgagcatcctgcagacccccaccccacagcccctgccaggggccctcctgccacagagcttcccagccccagccccaccgcagttcagctccacccctgtgttaggctaccccagccctccgggaggcttctctacaggaagccctcccgggaacacccagcagccgctgcctggcctgccactggcttccccgccaggggtcccgcccgtctccttgcacacccaggtccagagtgtggtcccccagcagctactgacagtcacagctgcccccacggcagcccctgtaacgaccactgtgacctcgcagatccagcaggtcccggtcctgctgcagccccacttcatcaaggcagactcgctgcttctgacagccatgaagacagacggagccactgtgaaggcggcaggtctcagtcccctggtctctggcaccactgtgcagacagggcctttgccgaccctggtgagtggcggaaccatcttggcaacagtcccactggtcgtagatgcggagaagctgcctatcaaccggctcgcagctggcagcaaggccccggcctctgcccagagccgtggagagaagcgcacagcccacaacgccattgagaagcgctaccgctcctccatcaatgacaaaatcattgagctcaaggatctggtggtgggcactgaggcaaagctgaataaatctgctgtcttgcgcaaggccatcgactacattcgctttctgcaacacagcaaccagaaactcaagcaggagaacctaagtctgcgcactgctgtccacaaaagcaaatctctgaaggatctggtgtcggcctgtggcagtggagggaacacagacgtgctcatggagggcgtgaagactgaggtggaggacacactgaccccacccccctcggatgctggctcacctttccagagcagccccttgtcccttggcagcaggggcagtggcagcggtggcagtggcagtgactcggagcctgacagcccagtctttgaggacagcaaggttgggccctgccacggtgcccccttccccactcccagccatatcctctgagcctcatgacagggccgggaagaccctaacagatcctacctcccatttcatagacagaataactgaggcctggagccacgtggggtcccacagtaaggtgggcagaatcctgaccccccccttcccagccccatgctctctggggtccctccgattctgccctcaccaccctgcccaaccccaccaggcaaagccagagcagcggccgtctctgcacagccggggcatgctggaccgctcccgcctggccctgtgcacgctcgtcttcctctgcctgtcctgcaaccccttggcctccttgctgggggcccgggggcttcccagcccctcagataccaccagcgtctaccatagccctgggcgcaacgtgctgggcaccgagagcagagatggccctggctgggcccagtggctgctgcccccagtggtctggctgctcaatgggctgttggtgctcgtctccttggtgcttctctttgtctacggtgagccagtcacacggccccactcaggccccgccgtgtacttctggaggcatcgcaagcaggctgacctggacctggcccggggagactttgcccaggctgcccagcagctgtggctggccctgcgggcactgggccggcccctgcccacctcccacctggacctggcttgtagcctcctctggaacctcatccgtcacctgctgcagcgtctctgggtgggccgctggctggcaggccgggcagggggcctgcagcaggactgtgctctgcgagtggatgctagcgccagcgcccgagacgcagccctggtctaccataagctgcaccagctgcacaccatggggaagcacacaggcgggcacctcactgccaccaacctggcgctgagtgccctgaacctggcagagtgtgcaggggatgccgtgtctgtggcgacgctggccgagatctatgtggcggctgcattgagagtgaagaccagtctcccacgggccttgcattttctgacacgcttcttcctgagcagtgcccgccaggcctgcctggcacagagtggctcagtgcctcctgccatgcagtggctctgccaccccgtgggccaccgtttcttcgtggatggggactggtccgtgctcagtaccccatgggagagcctgtacagcttggccgggaacccagtggaccccctggcccaggtgactcagctattccgggaacatctcttagagcgagcactgaactgtgtgacccagcccaaccccagccctgggtcagctgatggggacaaggaattctcggatgccctcgggtacctgcagctgctgaacagctgttctgatgctgcgggggctcctgcctacagcttctccatcagttccagcatggccaccaccaccggcgtagacccggtggccaagtggtgggcctctctgacagctgtggtgatccactggctgcggcgggatgaggaggcggctgagcggctgtgcccgctggtggagcacctgccccgggtgctgcaggagtctgagagacccctgcccagggcagctctgcactccttcaaggctgcccgggccctgctgggctgtgccaaggcagagtctggtccagccagcctgaccatctgtgagaaggccagtgggtacctgcaggacagcctggctaccacaccagccagcagctccattgacaaggccgtgcagctgttcctgtgtgacctgcttcttgtggtgcgcaccagcctgtggcggcagcagcagcccccggccccggccccagcagcccagggcaccagcagcaggccccaggcttccgcccttgagctgcgtggcttccaacgggacctgagcagcctgaggcggctggcacagagcttccggcccgccatgcggagggtgttcctacatgaggccacggcccggctgatggcgggggccagccccacacggacacaccagctcctcgaccgcagtctgaggcggcgggcaggccccggtggcaaaggaggcgcggtggcggagctggagccgcggcccacgcggcgggagcacgcggaggccttgctgctggcctcctgctacctgccccccggcttcctgtcggcgcccgggcagcgcgtgggcatgctggctgaggcggcgcgcacactcgagaagcttggcgatcgccggctgctgcacgactgtcagcagatgctcatgcgcctgggcggtgggaccactgtcacttccaggctagaccccgtgtccccggcctcagcacccctgtctctagccactttggtcccgtgcagcttctgtcctgcgtcgaagctttgaaggccgaaggcagtgcaagagactctggcctccacagttcgacctgcggctgctgtgtgccttcgcggtggaaggcccgaggggcgcgatcttgaccctaagaccggcggccatgatggtgctgacctctggtggccgatcggggcactgcaggggccgagccattttggggggcccccctccttgctctgcaggcaccttagtggcttttttcctcctgtgtacagggaagagaggggtacatttccctgtgctgacggaagccaacttggctttcccggactgcaagcagggctctgccccagaggcctctctctccgtcgtgggagagagacgtgtacatagtgtaggtcagcgtgcttagcctcctgacctgaggctcctgtgctactttgccttttgcaaactttattttcatagattgagaagttttgtacagagaattaaaaatgaaattatttataatctgg

SEQ ID NO: 383310 - DNA, 4807 bp, Homo sapiens
gcctcgaccgcccagcagagctgcggccgggggaacccagtttccgaggaacttttcgccggcgccgggccgcctctgaggccagggcaggacacgaacgcgcggagcggcggcggcgactgagagccggggccgcggcggcgctccctaggaagggccgtacgaggcggcgggcccggcgggcctcccggaggaggcggctgcgccatggacgagccacccttcagcgaggcggctttggagcaggcgctgggcgagccgtgcgatctggacgcggcgctgctgaccgacatcgaaggtgaagtcggcgcggggaggggtagggccaacggctggacgccccaagggcgggcgcagatcgcggagccatggattgcactttcgaagacatgcttcagcttatcaacaaccaagacagtgacttccctggcctatttgacccaccctatgctgggagtggggcagggggcacagaccctgccagccccgataccagctccccaggcagcttgtctccacctcctgccacattgagctcctctcttgaagccttcctgagcgggccgcaggcagcgccctcacccctgtcccctccccagcctgcacccactccattgaagatgtacccgtccatgcccgctttctcccctgggcctggtatcaaggaagagtcagtgccactgagcatcctgcagacccccaccccacagcccctgccaggggccctcctgccacagagcttcccagccccagccccaccgcagttcagctccacccctgtgttaggctaccccagccctccgggaggcttctctacaggaagccctcccgggaacacccagcagccgctgcctggcctgccactggcttccccgccaggggtcccgcccgtctccttgcacacccaggtccagagtgtggtcccccagcagctactgacagtcacagctgcccccacggcagcccctgtaacgaccactgtgacctcgcagatccagcaggtcccggtcctgctgcagccccacttcatcaaggcagactcgctgcttctgacagccatgaagacagacggagccactgtgaaggcggcaggtctcagtcccctggtctctggcaccactgtgcagacagggcctttgccgaccctggtgagtggcggaaccatcttggcaacagtcccactggtcgtagatgcggagaagctgcctatcaaccggctcgcagctggcagcaaggccccggcctctgcccagagccgtggagagaagcgcacagcccacaacgccattgagaagcgctaccgctcctccatcaatgacaaaatcattgagctcaaggatctggtggtgggcactgaggcaaagctgaataaatctgctgtcttgcgcaaggccatcgactacattcgctttctgcaacacagcaaccagaaactcaagcaggagaacctaagtctgcgcactgctgtccacaaaagcaaatctctgaaggatctggtgtcggcctgtggcagtggagggaacacagacgtgctcatggagggcgtgaagactgaggtggaggacacactgaccccacccccctcggatgctggctcacctttccagagcagccccttgtcccttggcagcaggggcagtggcagcggtggcagtggcagtgactcggagcctgacagcccagtctttgaggacagcaaggcaaagccagagcagcggccgtctctgcacagccggggcatgctggaccgctcccgcctggccctgtgcacgctcgtcttcctctgcctgtcctgcaaccccttggcctccttgctgggggcccgggggcttcccagcccctcagataccaccagcgtctaccatagccctgggcgcaacgtgctgggcaccgagagcagagatggccctggctgggcccagtggctgctgcccccagtggtctggctgctcaatgggctgttggtgctcgtctccttggtgcttctctttgtctacggtgagccagtcacacggccccactcaggccccgccgtgtacttctggaggcatcgcaagcaggctgacctggacctggcccggggagactttgcccaggctgcccagcagctgtggctggccctgcgggcactgggccggcccctgcccacctcccacctggacctggcttgtagcctcctctggaacctcatccgtcacctgctgcagcgtctctgggtgggccgctggctggcaggccgggcagggggcctgcagcaggactgtgctctgcgagtggatgctagcgccagcgcccgagacgcagccctggtctaccataagctgcaccagctgcacaccatggggaagcacacaggcgggcacctcactgccaccaacctggcgctgagtgccctgaacctggcagagtgtgcaggggatgccgtgtctgtggcgacgctggccgagatctatgtggcggctgcattgagagtgaagaccagtctcccacgggccttgcattttctgacacgcttcttcctgagcagtgcccgccaggcctgcctggcacagagtggctcagtgcctcctgccatgcagtggctctgccaccccgtgggccaccgtttcttcgtggatggggactggtccgtgctcagtaccccatgggagagcctgtacagcttggccgggaacccagtggaccccctggcccaggtgactcagctattccgggaacatctcttagagcgagcactgaactgtgtgacccagcccaaccccagccctgggtcagctgatggggacaaggaattctcggatgccctcgggtacctgcagctgctgaacagctgttctgatgctgcgggggctcctgcctacagcttctccatcagttccagcatggccaccaccaccggcgtagacccggtggccaagtggtgggcctctctgacagctgtggtgatccactggctgcggcgggatgaggaggcggctgagcggctgtgcccgctggtggagcacctgccccgggtgctgcaggagtctgagagacccctgcccagggcagctctgcactccttcaaggctgcccgggccctgctgggctgtgccaaggcagagtctggtccagccagcctgaccatctgtgagaaggccagtgggtacctgcaggacagcctggctaccacaccagccagcagctccattgacaaggccgtgcagctgttcctgtgtgacctgcttcttgtggtgcgcaccagcctgtggcggcagcagcagcccccggccccggccccagcagcccagggcaccagcagcaggccccaggcttccgcccttgagctgcgtggcttccaacgggacctgagcagcctgaggcggctggcacagagcttccggcccgccatgcggagggtgttcctacatgaggccacggcccggctgatggcgggggccagccccacacggacacaccagctcctcgaccgcagtctgaggcggcgggcaggccccggtggcaaaggaggtgagggggcagctgctgaccagggatgtgctgtctgctcagcagggaagggcgcacatgggatgtgataccaagggaggctgtgtgtgtgtcagacgggacagacaggcctggcgcagtggctcacacctagcactttgggaggctcagttgggaggacagcttgagcccaggagttggaggccgcagtgagcctgagtgacagggagagtccctgtctcaaaaaaaaaaaaagaccaagcatcttcttgatggttacctgatgacaattcctttcacaaggaatcagtggggtgactgtcatttgtgggatacatgactgcacgtgcgtgactcagtctgtggactttgtgtgtgggctgagactagggtggggagaggggaacccgccaggcccccgccaggtacctgtgtgccaggtacaggcggctggtgccgtggcttgtgtgtgggcagggctcccgcgggggcgtggccagcttgagacccatccctgacacatcctcgtgtgcgcaggcgcggtggcggagctggagccgcggcccacgcggcgggagcacgcggaggccttgctgctggcctcctgctacctgccccccggcttcctgtcggcgcccgggcagcgcgtgggcatgctggctgaggcggcgcgcacactcgagaagcttggcgatcgccggctgctgcacgactgtcagcagatgctcatgcgcctgggcggtgggaccactgtcacttccaggctagaccccgtgtccccggcctcagcacccctgtctctagccactttggtcccgtgcagcttctgtcctgcgtcgaagctttgaaggccgaaggcagtgcaagagactctggcctccacagttcgacctgcggctgctgtgtgccttcgcggtggaaggcccgaggggcgcgatcttgaccctaagaccggcggccatgatggtgctgacctctggtggccgatcggggcactgcaggggccgagccattttggggggcccccctccttgctctgcaggcaccttagtggcttttttcctcctgtgtacagggaagagaggggtacatttccctgtgctgacggaagccaacttggctttcccggactgcaagcagggctctgccccagaggcctctctctccgtcgtgggagagagacgtgtacatagtgtaggtcagcgtgcttagcctcctgacctgaggctcctgtgctactttgccttttgcaaactttattttcatagattgagaagttttgtacagagaattaaaaatgaaattatttataatctgg

SEQ ID NO: 383311 - DNA, 2421 bp, Homo sapiens
  misc_feature (140)..(140): n is a, c, g, or t
taagtgttcagaaatttgatctgggcatccctagagctctcaacgctcccatacacctgctcaagcgccttcaggcattcggcagtggttatcgcggggttgttgtacttaaggatgcgaataacatcagcggcggggcnttgtacgcgtacaaggccccgccgtgtacttctggaggcatcgcaagcaggctgacctggacctggcccggggagactttgcccaggctgcccagcagctgtggctggccctgcgggcactgggccggcccctgcccacctcccacctggacctggcttgtagcctcctctggaacctcatccgtcacctgctgcagcgtctctgggtgggccgctggctggcaggccgggcagggggcctgcagcaggactgtgctctgcgagtggatgctagcgccagcgcccgagacgcagccctggtctaccataagctgcaccagctgcacaccatggggaagcacacaggcgggcacctcactgccaccaacctggcgctgagtgccctgaacctggcagagtgtgcaggggatgccgtgtctgtggcgacgctggccgagatctatgtggcggctgcattgagagtgaagaccagtctcccacgggccttgcattttctgacacgcttcttcctgagcagtgcccgccaggcctgcctggcacagagtggctcagtgcctcctgccatgcagtggctctgccaccccgtgggccaccgtttcttcgtggatggggactggtccgtgctcagtaccccatgggagagcctgtacagcttggccgggaacccagtggaccccctggcccaggtgactcagctattccgggaacatctcttagagcgagcactgaactgtgtgacccagcccaaccccagccctgggtcagctgatggggacaaggaattctcggatgccctcgggtacctgcagctgctgaacagctgttctgatgctgcgggggctcctgcctacagcttctccatcagttccagcatggccaccaccaccggcgtagacccggtggccaagtggtgggcctctctgacagctgtggtgatccactggctgcggcgggatgaggaggcggctgagcggctgtgcccgctggtggagcacctgccccgggtgctgcaggagtctgagagacccctgcccagggcagctctgcactccttcaaggctgcccgggccctgctgggctgtgccaaggcagagtctggtccagccagcctgaccatctgtgagaaggccagtgggtacctgcaggacagcctggctaccacaccagccagcagctccattgacaaggccgtgcagctgttcctgtgtgacctgcttcttgtggtgcgcaccagcctgtggcggcagcagcagcccccggccccggccccagcagcccagggcaccagcagcaggccccaggcttccgcccttgagctgcgtggcttccaacgggacctgagcagcctgaggcggctggcacagagcttccggcccgccatgcggagggtgttcctacatgaggccacggcccggctgatggcgggggccagccccacacggacacaccagctcctcgaccgcagtctgaggcggcgggcaggccccggtggcaaaggaggcgcggtggcggagctggagccgcggcccacgcggcgggagcacgcggaggccttgctgctggcctcctgctacctgccccccggcttcctgtcggcgcccgggcagcgcgtgggcatgctggctgaggcggcgcgcacactcgagaagcttggcgatcgccggctgctgcacgactgtcagcagatgctcatgcgcctgggcggtgggaccactgtcacttccaggctagaccccgtgtccccggcctcagcacccctgtctctagccactttggtcccgtgcagcttctgtcctgcgtcgaagctttgaaggccgaaggcagtgcaagagactctggcctccacagttcgacctgcggctgctgtgtgccttcgcggtggaaggcccgaggggcgcgatcttgaccctaagaccggcggccatgatggtgctgacctctggtggccgatcggggcactgcaggggccgagccattttggggggcccccctccttgctctgcaggcaccttagtggcttttttcctcctgtgtacagggaagagaggggtacatttccctgtgctgacggaagccaacttggctttcccggactgcaagcagggctctgccccagaggcctctctctccgtcgtgggagagagacgtgtacatagtgtaggtcagcgtgcttagcctcctgacctgaggctcctgtgctactttgccttttgcaaactttattttcatagattgagaagttttgtacagagaattaaaaatgaaattatttataatctgg

SEQ ID NO: 383312 - DNA, 4339 bp, Homo sapiens
gcctcgaccgcccagcagagctgcggccgggggaacccagtttccgaggaacttttcgccggcgccgggccgcctctgaggccagggcaggacacgaacgcgcggagcggcggcggcgactgagagccggggccgcggcggcgctccctaggaagggccgtacgaggcggcgggcccggcgggcctcccggaggaggcggctgcgccatggacgagccacccttcagcgaggcggctttggagcaggcgctgggcgagccgtgcgatctggacgcggcgctgctgaccgacatcgaaggtgaagtcggcgcggggaggggtagggccaacggctggacgccccaagggcgggcgcagatcgcggagccatggattgcactttcgaagacatgcttcagcttatcaacaaccaagacagtgacttccctggcctatttgacccaccctatgctgggagtggggcagggggcacagaccctgccagccccgataccagctccccaggcagcttgtctccacctcctgccacattgagctcctctcttgaagccttcctgagcgggccgcaggcagcgccctcacccctgtcccctccccagcctgcacccactccattgaagatgtacccgtccatgcccgctttctcccctgggcctggtatcaaggaagagtcagtgccactgagcatcctgcagacccccaccccacagcccctgccaggggccctcctgccacagagcttcccagccccagccccaccgcagttcagctccacccctgtgttaggctaccccagccctccgggaggcttctctacaggaagccctcccgggaacacccagcagccgctgcctggcctgccactggcttccccgccaggggtcccgcccgtctccttgcacacccaggtccagagtgtggtcccccagcagctactgacagtcacagctgcccccacggcagcccctgtaacgaccactgtgacctcgcagatccagcaggtcccggtcctgctgcagccccacttcatcaaggcagactcgctgcttctgacagccatgaagacagacggagccactgtgaaggcggcaggtctcagtcccctggtctctggcaccactgtgcagacagggcctttgccgaccctggtgagtggcggaaccatcttggcaacagtcccactggtcgtagatgcggagaagctgcctatcaaccggctcgcagctggcagcaaggccccggcctctgcccagagccgtggagagaagcgcacagcccacaacgccattgagaagcgctaccgctcctccatcaatgacaaaatcattgagctcaaggatctggtggtgggcactgaggcaaagctgaataaatctgctgtcttgcgcaaggccatcgactacattcgctttctgcaacacagcaaccagaaactcaagcaggagaacctaagtctgcgcactgctgtccacaaaagcaaatctctgaaggatctggtgtcggcctgtggcagtggagggaacacagacgtgctcatggagggcgtgaagactgaggtggaggacacactgaccccacccccctcggatgctggctcacctttccagagcagccccttgtcccttggcagcaggggcagtggcagcggtggcagtggcagtgactcggagcctgacagcccagtctttgaggacagcaaggcaaagccagagcagcggccgtctctgcacagccggggcatgctggaccgctcccgcctggccctgtgcacgctcgtcttcctctgcctgtcctgcaaccccttggcctccttgctgggggcccgggggcttcccagcccctcagataccaccagcgtctaccatagccctgggcgcaacgtgctgggcaccgagagcagagatggccctggctgggcccagtggctgctgcccccagtggtctggctgctcaatgggctgttggtgctcgtctccttggtgcttctctttgtctacggtgagccagtcacacggccccactcaggccccgccgtgtacttctggaggcatcgcaagcaggctgacctggacctggcccggggagactttgcccaggctgcccagcagctgtggctggccctgcgggcactgggccggcccctgcccacctcccacctggacctggcttgtagcctcctctggaacctcatccgtcacctgctgcagcgtctctgggtgggccgctggctggcaggccgggcagggggcctgcagcaggactgtgctctgcgagtggatgctagcgccagcgcccgagacgcagccctggtctaccataagctgcaccagctgcacaccatggggaagcacacaggcgggcacctcactgccaccaacctggcgctgagtgccctgaacctggcagagtgtgcaggggatgccgtgtctgtggcgacgctggccgagatctatgtggcggctgcattgagagtgaagaccagtctcccacgggccttgcattttctgacacgcttcttcctgagcagtgcccgccaggcctgcctggcacagagtggctcagtgcctcctgccatgcagtggctctgccaccccgtgggccaccgtttcttcgtggatggggactggtccgtgctcagtaccccatgggagagcctgtacagcttggccgggaacccagtggaccccctggcccaggtgactcagctattccgggaacatctcttagagcgagcactgaactgtgtgacccagcccaaccccagccctgggtcagctgatggggacaaggaattctcggatgccctcgggtacctgcagctgctgaacagctgttctgatgctgcgggggctcctgcctacagcttctccatcagttccagcatggccaccaccaccggcgtagacccggtggccaagtggtgggcctctctgacagctgtggtgatccactggctgcggcgggatgaggaggcggctgagcggctgtgcccgctggtggagcacctgccccgggtgctgcaggagtctgagagacccctgcccagggcagctctgcactccttcaaggctgcccgggccctgctgggctgtgccaaggcagagtctggtccagccagcctgaccatctgtgagaaggccagtgggtacctgcaggacagcctggctaccacaccagccagcagctccattgacaaggccgtgcagctgttcctgtgtgacctgcttcttgtggtgcgcaccagcctgtggcggcagcagcagcccccggccccggccccagcagcccagggcaccagcagcaggccccaggcttccgcccttgagctgcgtggcttccaacgggacctgagcagcctgaggcggctggcacagagcttccggcccgccatgcggagggtgttcctacatgaggccacggcccggctgatggcgggggccagccccacacggacacaccagctcctcgaccgcagtctgaggcggcgggcaggccccggtggcaaaggaggcgcggtggcggagctggagccgcggcccacgcggcgggagcacgcggaggccttgctgctggcctcctgctacctgccccccggcttcctgtcggcgcccgggcagcgcgtgggcatgctggctgaggcggcgcgcacactcgagaagcttggcgatcgccggctgctgcacgactgtcagcagatgctcatgcgcctgggcggtgggaccactgtcacttccaggctagaccccgtgtccccggcctcagcacccctgtctctagccactttggtcccgtgcagcttctgtcctgcgtcgaagctttgaaggccgaaggcagtgcaagagactctggcctccacagttcgacctgcggctgctgtgtgccttcgcggtggaaggcccgaggggcgcgatcttgaccctaagaccggcggccatgatggtgctgacctctggtggccgatcggggcactgcaggggccgagccattttggggggcccccctccttgctctgcaggcaccttagtggcttttttcctcctgtgtacagggaagagaggggtacatttccctgtgctgacggaagccaacttggctttcccggactgcaagcagggctctgccccagaggcctctctctccgtcgtgggagagagacgtgtacatagtgtaggtcagcgtgcttagcctcctgacctgaggctcctgtgctactttgccttttgcaaactttattttcatagattgagaagttttgtacagagaattaaaaatgaaattatttataatctggaaaaaaaaaaaaagaatttaattgggccgccttttacaacgtcgtgat

SEQ ID NO: 383313 - DNA, 4484 bp, Homo sapiens
gcctcgaccgcccagcagagctgcggccgggggaacccagtttccgaggaacttttcgccggcgccgggccgcctctgaggccagggcaggacacgaacgcgcggagcggcggcggcgactgagagccggggccgcggcggcgctccctaggaagggccgtacgaggcggcgggcccggcgggcctcccggaggaggcggctgcgccatggacgagccacccttcagcgaggcggctttggagcaggcgctgggcgagccgtgcgatctggacgcggcgctgctgaccgacatcgaaggtgaagtcggcgcggggaggggtagggccaacggctggacgccccaagggcgggcgcagatcgcggagccatggattgcactttcgaagacatgcttcagcttatcaacaaccaagacagtgacttccctggcctatttgacccaccctatgctgggagtggggcagggggcacagaccctgccagccccgataccagctccccaggcagcttgtctccacctcctgccacattgagctcctctcttgaagccttcctgagcgggccgcaggcagcgccctcacccctgtcccctccccagcctgcacccactccattgaagatgtacccgtccatgcccgctttctcccctgggcctggtatcaaggaagagtcagtgccactgagcatcctgcagacccccaccccacagcccctgccaggggccctcctgccacagagcttcccagccccagccccaccgcagttcagctccacccctgtgttaggctaccccagccctccgggaggcttctctacaggaagccctcccgggaacacccagcagccgctgcctggcctgccactggcttccccgccaggggtcccgcccgtctccttgcacacccaggtccagagtgtggtcccccagcagctactgacagtcacagctgcccccacggcagcccctgtaacgaccactgtgacctcgcagatccagcaggtcccggtcctgctgcagccccacttcatcaaggcagactcgctgcttctgacagccatgaagacagacggagccactgtgaaggcggcaggtctcagtcccctggtctctggcaccactgtgcagacagggcctttgccgaccctggtgagtggcggaaccatcttggcaacagtcccactggtcgtagatgcggagaagctgcctatcaaccggctcgcagctggcagcaaggccccggcctctgcccagagccgtggagagaagcgcacagcccacaacgccattgagaagcgctaccgctcctccatcaatgacaaaatcattgagctcaaggatctggtggtgggcactgaggcaaagctgaataaatctgctgtcttgcgcaaggccatcgactacattcgctttctgcaacacagcaaccagaaactcaagcaggagaacctaagtctgcgcactgctgtccacaaaagcaaatctctgaaggatctggtgtcggcctgtggcagtggagggaacacagacgtgctcatggagggcgtgaagactgaggtggaggacacactgaccccacccccctcggatgctggctcacctttccagagcagccccttgtcccttggcagcaggggcagtggcagcggtggcagtggcagtgactcggagcctgacagcccagtctttgaggacagcaaggcaaagccagagcagcggccgtctctgcacagccggggcatgctggaccgctcccgcctggccctgtgcacgctcgtcttcctctgcctgtcctgcaaccccttggcctccttgctgggggcccgggggcttcccagcccctcagataccaccagcgtctaccatagccctgggcgcaacgtgctgggcaccgagagcagagatggccctggctgggcccagtggctgctgcccccagtggtctggctgctcaatgggctgttggtgctcgtctccttggtgcttctctttgtctacggtgagccagtcacacggccccactcaggccccgccgtgtacttctggaggcatcgcaagcaggctgacctggacctggcccggggagactttgcccaggctgcccagcagctgtggctggccctgcgggcactgggccggcccctgcccacctcccacctggacctggcttgtagcctcctctggaacctcatccgtcacctgctgcagcgtctctgggtgggccgctggctggcaggccgggcagggggcctgcagcaggactgtgctctgcgagtggatgctagcgccagcgcccgagacgcagccctggtctaccataagctgcaccagctgcacaccatggggaagcacacaggcgggcacctcactgccaccaacctggcgctgagtgccctgaacctggcagagtgtgcaggggatgccgtgtctgtggcgacgctggccgagatctatgtggcggctgcattgagagtgaagaccagtctcccacgggccttgcattttctgacacgcttcttcctgagcagtgcccgccaggcctgcctggcacagagtggctcagtgcctcctgccatgcagtggctctgccaccccgtgggccaccgtttcttcgtggatggggactggtccgtgctcagtaccccatgggagagcctgtacagcttggccgggaacccagtggaccccctggcccaggtgactcagctattccgggaacatctcttagagcgagcactgaactgtgtgacccagcccaaccccagccctgggtcagctgatggggacaaggaattctcggatgccctcgggtacctgcagctgctgaacagctgttctgatgctgcgggggctcctgcctacagcttctccatcagttccagcatggccaccaccaccggcgtagacccggtggccaagtggtgggcctctctgacagctgtggtgatccactggctgcggcgggatgaggaggcggctgagcggctgtgcccgctggtggagcacctgccccgggtgctgcaggagtctgagagacccctgcccagggcagctctgcactccttcaaggctgcccgggccctgctgggctgtgccaaggcagagtctggtccagccagcctgaccatctgtgagaaggccagtgggtacctgcaggacagcctggctaccacaccagccagcagctccattgacaaggccgtgcagctgttcctgtgtgacctgcttcttgtggtgcgcaccagcctgtggcggcagcagcagcccccggccccggccccagcagcccagggcaccagcagcaggccccaggcttccgcccttgagctgcgtggcttccaacgggacctgagcagcctgaggcggctggcacagagcttccggcccgccatgcggagggtgttcctacatgaggccacggcccggctgatggcgggggccagccccacacggacacaccagctcctcgaccgcagtctgaggcggcgggcaggccccggtggcaaaggaggcgcggtggcggagctggagccgcggcccacgcggcgggagcacgcggaggccttgctgctggcctcctgctacctgccccccggcttcctgtcggcgcccgggcagcgcgtgggcatgctggctgaggcggcgcgcacactcgagaagcttggcgatcgccggctgctgcacgactgtcagcagatgctcatgcgcctgggcggtgggaccactgtcacttccaggctagaccccgtgtccccggcctcagcacccctgtctctagccactttggtcccgtgcagcttctgtcctgcgtcgaagctttgaaggccgaaggcagtgcaagagactctggcctccacagttcgacctgcggctgctgtgtgccttcgcggtggaaggcccgaggggcgcgatcttgaccctaagaccggcggccatgatggtgctgacctctggtggccgatcggggcactgcaggggccgagccattttggggggcccccctccttgctctgcaggcaccttagtggcttttttcctcctgtgtacagggaagagaggggtacatttccctgtgctgacggaagccaacttggctttcccggactgcaagcagggctctgccccagaggcctctctctccgtcgtgggagagagacgtgtacatagtgtaggtcagcgtgcttagcctcctgacctgaggctcctgtgctactttgccttttgcaaactttattttcatagattgagaagacagagttcgctccgtcaactcatattttcatgctgttcatgaaagattcaatgcccctgaatttaaatagcttttttctctgatacagaaaagttgaattttacatggctggagctagaatttgatatgtgaacagttgtgtttgaagcacagtgatcaagttatttttaatttggttttcacattggaaacagtcagtcattcaatatgattcaaatgtctataaaccgaac

SEQ ID NO: 383314 - DNA, 4051 bp, Homo sapiens
gcctcgaccgcccagcagagctgcggccgggggaacccagtttccgaggaacttttcgccggcgccgggccgcctctgaggccagggcaggacacgaacgcgcggagcggcggcggcgactgagagccggggccgcggcggcgctccctaggaagggccgtacgaggcggcgggcccggcgggcctcccggaggaggcggctgcgccatggacgagccacccttcagcgaggcggctttggagcaggcgctgggcgagccgtgcgatctggacgcggcgctgctgaccgacatcgaaggtgaagtcggcgcggggaggggtagggccaacggctggacgccccaagggcgggcgcagatcgcggagccatggattgcactttcgaagacatgcttcagcttatcaacaaccaagacagtgacttccctggcctatttgacccaccctatgctgggagtggggcagggggcacagaccctgccagccccgataccagctccccaggcagcttgtctccacctcctgccacattgagctcctctcttgaagccttcctgagcgggccgcaggcagcgccctcacccctgtcccctccccagcctgcacccactccattgaagatgtacccgtccatgcccgctttctcccctgggcctggtatcaaggaagagtcagtgccactgagcatcctgcagacccccaccccacagcccctgccaggggccctcctgccacagagcttcccagccccagccccaccgcagttcagctccacccctgtgttaggctaccccagccctccgggaggcttctctacaggaagccctcccgggaacacccagcagccgctgcctggcctgccactggcttccccgccaggggtcccgcccgtctccttgcacacccaggtccagagtgtggtcccccagcagctactgacagtcacagctgcccccacggcagcccctgtaacgaccactgtgacctcgcagatccagcaggtcccggtcctgctgcagccccacttcatcaaggcagactcgctgcttctgacagccatgaagacagacggagccactgtgaaggcggcaggtctcagtcccctggtctctggcaccactgtgcagacagggcctttgccgaccctggtgagtggcggaaccatcttggcaacagtcccactggtcgtagatgcggagaagctgcctatcaaccggctcgcagctggcagcaaggccccggcctctgcccagagccgtggagagaagcgcacagcccacaacgccattgagaagcgctaccgctcctccatcaatgacaaaatcattgagctcaaggatctggtggtgggcactgaggcaaagctgaataaatctgctgtcttgcgcaaggccatcgactacattcgctttctgcaacacagcaaccagaaactcaagcaggagaacctaagtctgcgcactgctgtccacaaaagcaaatctctgaaggatctggtgtcggcctgtggcagtggagggaacacagacgtgctcatggagggcgtgaagactgaggtggaggacacactgaccccacccccctcggatgctggctcacctttccagagcagccccttgtcccttggcagcaggggcagtggcagcggtggcagtggcagtgactcggagcctgacagcccagtctttgaggacagcaaggcaaagccagagcagcggccgtctctgcacagccggggcatgctggaccgctcccgcctggccctgtgcacgctcgtcttcctctgcctgtcctgcaaccccttggcctccttgctgggggcccgggggcttcccagcccctcagataccaccagcgtctaccatagccctgggcgcaacgtgctgggcaccgagagcagagatggccctggctgggcccagtggctgctgcccccagtggtctggctgctcaatgggctgttggtgctcgtctccttggtgcttctctttgtctacggtgagccagtcacacggccccactcaggccccgccgtgtacttctggaggcatcgcaagcaggctgacctggacctggcccggggagactttgcccaggctgcccagcagctgtggctggccctgcgggcactgggccggcccctgcccacctcccacctggacctggcttgtagcctcctctggaacctcatccgtcacctgctgcagcgtctctgggtgggccgctggctggcaggccgggcagggggcctgcagcaggactgtgctctgcgagtggatgctagcgccagcgcccgagacgcagccctggtctaccataagctgcaccagctgcacaccatggggaagcacacaggcgggcacctcactgccaccaacctggcgctgagtgccctgaacctggcagagtgtgcaggggatgccgtgtctgtggcgacgctggccgagatctatgtggcggctgcattgagagtgaagaccagtctcccacgggccttgcattttctgacacgcttcttcctgagcagtgcccgccaggcctgcctggcacagagtggctcagtgcctcctgccatgcagtggctctgccaccccgtgggccaccgtttcttcgtggatggggactggtccgtgctcagtaccccatgggagagcctgtacagcttggccgggaacccagtggaccccctggcccaggtgactcagctattccgggaacatctcttagagcgagcactgaactgtgtgacccagcccaaccccagccctgggtcagctgatggggacaaggaattctcggatgccctcgggtacctgcagctgctgaacagctgttctgatgctgcgggggctcctgcctacagcttctccatcagttccagcatggccaccaccaccggcgtagacccggtggccaagtggtgggcctctctgacagctgtggtgatccactggctgcggcgggatgaggaggcggctgagcggctgtgcccgctggtggagcacctgccccgggtgctgcaggagtctgagagacccctgcccagggcagctctgcactccttcaaggctgcccgggccctgctgggctgtgccaaggcagagtctggtccagccagcctgaccatctgtgagaaggccagtgggtacctgcaggacagcctggctaccacaccagccagcagctccattgacaaggccgtgcagctgttcctgtgtgacctgcttcttgtggtgcgcaccagcctgtggcggcagcagcagcccccggccccggccccagcagcccagggcaccagcagcaggccccaggcttccgcccttgagctgcgtggcttccaacgggacctgagcagcctgaggcggctggcacagagcttccggcccgccatgcggagggtgttcctacatgaggccacggcccggctgatggcgggggccagccccacacggacacaccagctcctcgaccgcagtctgaggcggcgggcaggccccggtggcaaaggagttttgtgtcttcagctgatggatgtgctgactagtgagagtgcttgggccctcccccagcacctaggcaaaggcttcccctccccctccggccacaaggtccctgggtggcacgggaggatggactgacttccaggacctgttgtgtgacaggagctacagcttgggtctccctgcaagaagtctggcacgtctcacctcccccatcccggcccctggtcatctcacagcaaagaagcctcctccctcccgacctgccgccacactggagagggggcacaggggcgggggaggtttcctgttctgtgaaaggccgactccctgactccattcatgccccccccccagcccctcccttcattcccattccccaacctaaagcctggcccggctcccagctgaatctggtcggaatccacgggctgcagattttccaaaacaatcgttgtatctttattgacttttttttttttttttctgaatgcaatgactgttttttactcttaaggaaaataaacatcttttagaaacaaaaaaaaaca

SEQ ID NO: 383315 - DNA, 2147 bp, Homo sapiens
gcctcgaccgcccagcagagctgcggccgggggaacccagtttccgaggaacttttcgccggcgccgggccgcctctgaggccagggcaggacacgaacgcgcggagcggcggcggcgactgagagccggggccgcggcggcgctccctaggaagggccgtacgaggcggcgggcccggcgggcctcccggaggaggcggctgcgccatggacgagccacccttcagcgaggcggctttggagcaggcgctgggcgagccgtgcgatctggacgcggcgctgctgaccgacatcgaaggtgaagtcggcgcggggaggggtagggccaacggctggacgccccaagggcgggcgcagatcgcggagccatggattgcactttcgaagacatgcttcagcttatcaacaaccaagacagtgacttccctggcctatttgacccaccctatgctgggagtggggcagggggcacagaccctgccagccccgataccagctccccaggcagcttgtctccacctcctgccacattgagctcctctcttgaagccttcctgagcgggccgcaggcagcgccctcacccctgtcccctccccagcctgcacccactccattgaagatgtacccgtccatgcccgctttctcccctgggcctggtatcaaggaagagtcagtgccactgagcatcctgcagacccccaccccacagcccctgccaggggccctcctgccacagagcttcccagccccagccccaccgcagttcagctccacccctgtgttaggctaccccagccctccgggaggcttctctacaggaagccctcccgggaacacccagcagccgctgcctggcctgccactggcttccccgccaggggtcccgcccgtctccttgcacacccaggtccagagtgtggtcccccagcagctactgacagtcacagctgcccccacggcagcccctgtaacgaccactgtgacctcgcagatccagcaggtcccggtcctgctgcagccccacttcatcaaggcagactcgctgcttctgacagccatgaagacagacggagccactgtgaaggcggcaggtctcagtcccctggtctctggcaccactgtgcagacagggcctttgccgaccctggtgagtggcggaaccatcttggcaacagtcccactggtcgtagatgcggagaagctgcctatcaaccggctcgcagctggcagcaaggccccggcctctgcccagagccgtggagagaagcgcacagcccacaacgccattgagaagcgctaccgctcctccatcaatgacaaaatcattgagctcaaggatctggtggtgggcactgaggcaaagctgaataaatctgctgtcttgcgcaaggccatcgactacattcgctttctgcaacacagcaaccagaaactcaagcaggagaacctaagtctgcgcactgctgtccacaaaagcaaatctctgaaggatctggtgtcggcctgtggcagtggagggaacacagacgtgctcatggagggcgtgaagactgaggtggaggacacactgaccccacccccctcggatgctggctcacctttccagagcagccccttgtcccttggcagcaggggcagtggcagcggtggcagtggcagtgactcggagcctgacagcccagtctttgaggacagcaaggcaaagccagagcagcggccgtctctgcacagccggggcatgctggaccgctcccgcctggccctgtgcacgctcgtcttcctctgcctgtcctgcaaccccttggcctccttgctgggggcccgggggcttcccagcccctcagataccaccagcgtctaccatagccctgggcgcaacgtgctgggcaccgagagcagagatggccctggctgggcccagtggctgctgcccccagtggtctggctgctcaatgggctgttggtgctcgtctccttggtgcttctctttgtctacggtgagccagtcacacggccccactcaggccccgccgtgcttagcctcctgacctgaggctcctgtgctactttgccttttgcaaactttattttcatagattgagaagttttgtacagagaattaaaaatgaaattatttataatctgg

SEQ ID NO: 383316 - DNA, 1516 bp, Homo sapiens
gcctcgaccgcccagcagagctgcggccgggggaacccagtttccgaggaacttttcgccggcgccgggccgcctctgaggccagggcaggacacgaacgcgcggagcggcggcggcgactgagagccggggccgcggcggcgctccctaggaagggccgtacgaggcggcgggcccggcgggcctcccggaggaggcggctgcgccatggacgagccacccttcagcgaggcggctttggagcaggcgctgggcgagccgtgcgatctggacgcggcgctgctgaccgacatcgaaggtgaagtcggcgcggggaggggtagggccaacggctggacgccccaagggcgggcgcagatcgcggagccatggattgcactttcgaagacatgcttcagcttatcaacaaccaagacagtgacttccctggcctatttgacccaccctatgctgggagtggggcagggggcacagaccctgccagccccgataccagctccccaggcagcttgtctccacctcctgccacattgagctcctctcttgaagccttcctgagcgggccgcaggcagcgccctcacccctgtcccctccccagcctgcacccactccattgaagatgtacccgtccatgcccgctttctcccctgggcctggtatcaaggaagagtcagtgccactgagcatcctgcagacccccaccccacagcccctgccaggggccctcctgccacagagcttcccagccccagccccaccgcagttcagctccacccctgtgttaggctaccccagccctccgggaggcttctctacaggaagccctcccgggaacacccagcagccgctgcctggcctgccactggcttccccgccaggggtcccgcccgtctccttgcacacccaggtccagagtgtggtcccccagcagctactgacagtcacagctgcccccacggcagcccctgtaacgaccactgtgacctcgcagatccagcaggtcccggtcctgctgcagccccacttcatcaaggcagactcgctgcttctgacagccatgaagacagacggagccactgtgaaggcggcaggtctcagtcccctggtctctggcaccactgtgcagacagggcctttgccgaccctggtgagtggcggaaccatcttggcaacagtcccactggtcgtagatgcggagaagctgcctatcaaccggctcgcagctggcagcaaggccccggcctctgcccagagccgtggagagaagcgcacagcccacaacgccattgagaagcgctaccgctcctccatcaatgacaaaatcattgagctcaaggatctggtggtgggcactgaggcaaagctgaataaatctgctgtcttgcgcaaggccatcgactacattcgctttctgcaacacagcaaccagaaactcaagcaggagaacctaagtctgcgcactgctgtccacaaaagcagtgagtcctggctttattgagctccagtctggcctct

SEQ ID NO: 383317 - DNA, 451 bp, Homo sapiens
ggggccgaggctgctccaaccctctgtaccctggagtgtatgccagtgtttcctatttctcaaaatggatatgtgataacatagaaatcacgcccactcctgctcagccagcccctgctctctctccagctctggggcccactctcagcgtcctaatggccatgctggctggctggtcagtgctgtgaggtcaggatacccactctaggattctcatggctgcacaccctgccccagcccagctgcctccagacccctaagcatctcctgtcctggcctctctgaagcagacaagggccacctatcccgggggtggatgctgagtccaggaggtgatgagcaagtgtacaaaagaaaaaagggaagggggagaggggctggtcagggagaacccagcttgggcagagtgcacctgagatttgataagatcattaaatatttacaaagcaag

SEQ ID NO: 383318 - DNA, 380 bp, Homo sapiens
ccattgtccatttgtttattcagtctcttacctccctgaacctcctcctctatcaaccccttctgtcttaattttcctcccatctatttgccagatcatgactagcataccaccatgcttcctgcagcatcttgaagtctcacttgaatttttttttttttgaatttttttttttgcctcgatctggcagccaattcttaaactggttgactcctggttttacccatccttgtcctcagggcagcctcagccattggtccaggccctcataagtctgcaggagagtgggtcccactgttgttcagttctacattcctccaggcagtcatgtccctggtaaaagaggtgagggctttttggagaagcaccattgaatatac

SEQ ID NO: 383319 - DNA, 294 bp, Homo sapiens
cctgattggagaaagcatggacagtcaagaagtagagaaagtgagtgcagatagctcttttgaagacttgaaatcaaaatcagaatgtacaatccttataatgaggtgcttcataataataaaaaatagtcacagtattttaaatgtatatattattttacagtttacaaaatgctttaatgaatctatttcatctgaaagtaaaaaatgtcatgaaagacaggtgtttaaatgttaggtgggtttgtggcatttcaaagacctcagttttctgaataaagacattctgagggg

SEQ ID NO: 383320 - DNA, 1095 bp, Homo sapiens
tgtttatcgatgccacccccgggcgcggtggcgcgtgcctcccaaagtgttgggattactgcgaccggctctaggatgcactcttgaagcatattattcccctgctgttttgtcatgcagccagacttgtccaatcatatgttttctttcagggctttggatcttgagagaataacgagctgtagggttttttggagacctttccagagtcatgtcagcgtgtggatcagactgttctttggcatggttctttgagctgctttctctggtctgttggcactgtttttttccagtctgattttccagtcatctttcagtgttgtgagtttcaacagccttccagtaaagttgctttttaaagatagccagagtcagttactaatgtttctaatgcttgtagacaagaactgtaatacagtaacttaactctatgtcttgaaaaataagtaggtacttgaggtaaataatatgtaatggggtaaaatacttaagattaaccaaaatgatagaactgacttttgtgtggcttttacacaggctccaaagatgttttccatttttggaataaggttcccaaggtcactactttgaagtataatagtgatgaagatgtataacttaacaaaaattgttttcctttctatacgtgtggtgatgtccaccatctctacatatcaaatctgtaaatcagaaattcagtcaacaagtattcagaatttccagatgtgctgagttttagtaatttaaaatataataaaggcttctgagtttttaatgaattttcgttgtttctaagacaaatgatatttccttcatattttttgaagttttgaatttttatctatttttttcaggtgtttaaacacaggtatgagatatacaggatctcagaaattacttttgaagttcattaaactatttgattgtactttttttcttttgagacagggcctagctttgtcttccagactggagtgtggtggtgtgatcatggctcactgcaacctcgacctcctgaactcaagcaatcctccctcctcagtctcctgaatagctgggactataggcgcaccctatcatgcccagctaattaaa

SEQ ID NO: 383321 - DNA, 4434 bp, Homo sapiens
acccgagctcatactagggacgggaagtcgcgaccagagccattggagggcgcggggactgcaaccctaatcagagcccaaatggcgcagtgggaaatgctgcagaatcttgacagcccctttcaggatcagctgcaccagctttactcgcacagcctcctgcctgtggacattcgacagtacttggctgtctggattgaagaccagaactggcaggaagctgcacttgggagtgatgattccaaggctaccatgctattcttccacttcttggatcagctgaactatgagtgtggccgttgcagccaggacccagagtccttgttgctgcagcacaatttgcggaaattctgccgggacattcagcccttttcccaggatcctacccagttggctgagatgatctttaacctccttctggaagaaaaaagaattttgatccaggctcagagggcccaattggaacaaggagagccagttctcgaaacacctgtggagagccagcaacatgagattgaatcccggatcctggatttaagggctatgatggagaagctggtaaaatccatcagccaactgaaagaccagcaggatgtcttctgcttccgatataagatccaggccaaagggaagacaccctctctggacccccatcagaccaaagagcagaagattctgcaggaaactctcaatgaactggacaaaaggagaaaggaggtgctggatgcctccaaagcactgctaggccgattaactaccctaatcgagctactgctgccaaagttggaggagtggaaggcccagcagcaaaaagcctgcatcagagctcccattgaccacgggttggaacagctggagacatggttcacagctggagcaaagctgttgtttcacctgaggcagctgctgaaggagctgaagggactgagttgcctggttagctatcaggatgaccctctgaccaaaggggtggacctacgcaacgcccaggtcacagagttgctacagcgtctgctccacagagcctttgtggtagaaacccagccctgcatgccccaaactccccatcgacccctcatcctcaagactggcagcaagttcaccgtccgaacaaggctgctggtgagactccaggaaggcaatgagtcactgactgtggaagtctccattgacaggaatcctcctcaattacaaggcttccggaagttcaacattctgacttcaaaccagaaaactttgacccccgagaaggggcagagtcagggtttgatttgggactttggttacctgactctggtggagcaacgttcaggtggttcaggaaagggcagcaataaggggccactaggtgtgacagaggaactgcacatcatcagcttcacggtcaaatatacctaccagggtctgaagcaggagctgaaaacggacaccctccctgtggtgattatttccaacatgaaccagctctcaattgcctgggcttcagttctctggttcaatttgctcagcccaaaccttcagaaccagcagttcttctccaacccccccaaggccccctggagcttgctgggccctgctctcagttggcagttctcctcctatgttggccgaggcctcaactcagaccagctgagcatgctgagaaacaagctgttcgggcagaactgtaggactgaggatccattattgtcctgggctgacttcactaagcgagagagccctcctggcaagttaccattctggacatggctggacaaaattctggagttggtacatgaccacctgaaggatctctggaatgatggacgcatcatgggctttgtgagtcggagccaggagcgccggctgctgaagaagaccatgtctggcacctttctactgcgcttcagtgaatcgtcagaagggggcattacctgctcctgggtggagcaccaggatgatgacaaggtgctcatctactctgtgcaaccgtacacgaaggaggtgctgcagtcactcccgctgactgaaatcatccgccattaccagttgctcactgaggagaatatacctgaaaacccactgcgcttcctctatccccgaatcccccgggatgaagcttttgggtgctactaccaggagaaagttaatctccaggaacggaggaaatacctgaaacacaggctcattgtggtctctaatagacaggtggatgaactgcaacaaccgctggagcttaagccagagccagagctggagtcattagagctggaactagggctggtgccagagccagagctcagcctggacttagagccactgctgaaggcagggctggatctggggccagagctagagtctgtgctggagtccactctggagcctgtgatagagcccacactatgcatggtatcacaaacagtgccagagccagaccaaggacctgtatcacagccagtgccagagccagatttgccctgtgatctgagacatttgaacactgagccaatggaaatcttcagaaactgtgtaaagattgaagaaatcatgccgaatggtgacccactgttggctggccagaacaccgtggatgaggtttacgtctcccgccccagccacttctacactgatggacccttgatgccttctgacttctaggaaccacatttcctctgttcttttcatatctcttgcccttcctactcctcatagcatgatattgttctccaaggatgggaatcaggcatgtgtcccttccaagctgtgttaactgttcaaactcaggcctgtgtgactccattggggtgagaggtgaaagcataacatgggtacagaggggacaacaatgaatcagaacagatgctgagccataggtctaaataggatcctggaggctgcctgctgtgctgggaggtataggggtcctgggggcaggccagggcagttgacaggtacttggagggctcagggcagtggcttctttccagtatggaaggatttcaacattttaatagttggttaggctaaactggtgcatactggcattggcccttggtggggagcacagacacaggataggactccatttctttcttccattccttcatgtctaggataacttgctttcttctttcctttactcctggctcaagccctgaatttcttcttttcctgcaggggttgagagctttctgccttagcctaccatgtgaaactctaccctgaagaaagggatggataggaagtagacctctttttcttaccagtctcctcccctactctgcccctaagctggctgtacctgttcctcccccataaaatgatcctgccaatctaatgtgagtgtgaagctttgcacactagtttatgctacctagtctccactttctcaatgcttaggagacagatcactcctggaggctggggatggtaggattgctggggatttttttttttttaaacagggtctcactctgttgcccaggctagagtgcaatggtgcaatcacagctcactgcagcctcaacctcctgggttcaagcaatcctcctacctcagcctcctgggtagctagcaccatggcatgcgccaccatgccctattttttttttttaaagacagggtcttgctatattgcccaggctggtcttgaacggggctcaagtgatcctcacgccttggcctcccaaagtgctgggattataggcatgacgccactgtgcttggcccaggatttttttttttttgagatggagtttctctcttgttgtccaggctggagtgcaatggtgtgatctcggctcactgcaacctccgccttccgggttcaagtgactctcctgcctcagcctccccagtagctgggattacagatctgcaccaccatgcccagctaattttgtatttttagtagagacggggtttctccatgttggtcaggctggtctcgaactcctgacctcaagtgatctgtccacctcggcctcccagagtgctgggattacaggcgtgagccactgttcccagcaggaatttcttttttatagtattggataaagtttggtgtttttacagaggagaagcaatgggtcttagctctttctctattatgttatcatcctcccttttttgtacaatatgttgtttacctgaaaggaaggtttctattcgttggttgtggacctggacaaagtccaagtctgtggaacttaaaaccttgaaggtctgtcataggactctggacaatctcacaccttagctattcccagggaaccccagggggcaactgacattgctccaagatgttctcctgatgtagcttgagatataaaggaaaggccctgcacaggtggctgtttcttgtctgttatgtcagaggaacagtcctgttcagaaaggggctcttctgagcagaaatggctaataaactttgtgctgatctggaaaaaaaaaaac

SEQ ID NO: 383322 - DNA, 4391 bp, Homo sapiens
acccgagctcatactagggacgggaagtcgcgaccagagccattggagggcgcggggactgcaaccctaatcagagcccaaatggcgcagtgggaaatgctgcagaatcttgacagcccctttcaggatcagctgcaccagctttactcgcacagcctcctgcctgtggacattcgacagtacttggctgtctggattgaagaccagaactggcaggaagctgcacttgggagtgatgattccaaggctaccatgctattcttccacttcttggatcagctgaactatgagtgtggccgttgcagccaggacccagagtccttgttgctgcagcacaatttgcggaaattctgccgggacattcagcccttttcccaggatcctacccagttggctgagatgatctttaacctccttctggaagaaaaaagaattttgatccaggctcagagggcccaattggaacaaggagagccagttctcgaaacacctgtggagagccagcaacatgagattgaatcccggatcctggatttaagggctatgatggagaagctggtaaaatccatcagccaactgaaagaccagcaggatgtcttctgcttccgatataagatccaggccaaagggaagacaccctctctggacccccatcagaccaaagagcagaagattctgcaggaaactctcaatgaactggacaaaaggagaaaggaggtgctggatgcctccaaagcactgctaggccgattaactaccctaatcgagctactgctgccaaagttggaggagtggaaggcccagcagcaaaaagcctgcatcagagctcccattgaccacgggttggaacagctggagacatggttcacagctggagcaaagctgttgtttcacctgaggcagctgctgaaggagctgaagggactgagttgcctggttagctatcaggatgaccctctgaccaaaggggtggacctacgcaacgcccaggtcacagagttgctacagcgtctgctccacagagcctttgtggtagaaacccagccctgcatgccccaaactccccatcgacccctcatcctcaagactggcagcaagttcaccgtccgaacaaggctgctggtgagactccaggaaggcaatgagtcactgactgtggaagtctccattgacaggaatcctcctcaattacaaggcttccggaagttcaacattctgacttcaaaccagaaaactttgacccccgagaaggggcagagtcagggtttgatttgggactttggttacctgactctggtggagcaacgttcaggtggttcaggaaagggcagcaataaggggccactaggtgtgacagaggaactgcacatcatcagcttcacggtcaaatatacctaccagggtctgaagcaggagctgaaaacggacaccctccctgtggtgattatttccaacatgaaccagctctcaattgcctgggcttcagttctctggttcaatttgctcagcccaaaccttcagaaccagcagttcttctccaacccccccaaggccccctggagcttgctgggccctgctctcagttggcagttctcctcctatgttggccgaggcctcaactcagaccagctgagcatgctgagaaacaagctgttcgggcagaactgtaggactgaggatccattattgtcctgggctgacttcactaagcgagagagccctcctggcaagttaccattctggacatggctggacaaaattctggagttggtacatgaccacctgaaggatctctggaatgatggacgcatcatgggctttgtgagtcggagccaggagcgccggctgctgaagaagaccatgtctggcacctttctactgcgcttcagtgaatcgtcagaagggggcattacctgctcctgggtggagcaccaggatgatgacaaggtgctcatctactctgtgcaaccgtacacgaaggaggtgctgcagtcactcccgctgactgaaatcatccgccattaccagttgctcactgaggagaatatacctgaaaacccactgcgcttcctctatccccgaatcccccgggatgaagcttttgggtgctactaccaggagaaagttaatctccaggaacggaggaaatacctgaaacacaggctcattgtggtctctaatagacaggtggatgaactgcaacaaccgctggagcttaagccagagccagagctggagtcattagagctggaactagggctggtgccagagccagagctcagcctggacttagagccactgctgaaggcagggctggatctggggccagagctagagtctgtgctggagtccactctggagcctgtgatagagcccacactatgcatggtatcacaaacagtgccagagccagaccaaggacctgtatcacagccagtgccagagccagatttgccctgtgatctgagacatttgaacactgagccaatggaaatcttcagaaactgtgtaaagattgaagaaatcatgccgaatggtgacccactgttggctggccagaacaccgtggatgaggtttacgtctcccgccccagccacttctacactgatggacccttgatgccttctgacttctaggaaccacatttcctctgttcttttcatatctcttgcccttcctactcctcatagcatgatattgttctccaaggatgggaatcaggcatgtgtcccttccaagctgtgttaactgttcaaactcaggcctgtgtgactccattggggtgagaggtgaaagcataacatgggtacagaggggacaacaatgaatcagaacagatgctgagccataggtctaaataggatcctggaggctgcctgctgtgctgggaggtataggggtcctgggggcaggccagggcagttgacaggtacttggagggctcagggcagtggcttctttccagtatggaaggatttcaacattttaatagttggttaggctaaactggtgcatactggcattggcccttggtggggagcacagacacaggataggactccatttctttcttccattccttcatgtctaggataacttgctttcttctttcctttactcctggctcaagccctgaatttcttcttttcctgcaggggttgagagctttctgccttagcctaccatgtgaaactctaccctgaagaaagggatggataggaagtagacctctttttcttaccagtctcctcccctactctgcccctaagctggctgtacctgttcctcccccataaaatgatcctgccaatctaatgtgagtgtgaagctttgcacactagtttatgctacctagtctccactttctcaatgcttaggagacagatcactcctggaggctggggatggtaggattgctggggatttttttttttttaaacagggtctcactctgttgcccaggctagagtgcaatggtgcaatcacagctcactgcagcctcaacctcctgggttcaagcaatcctcctacctcagcctcctgggtagctagcaccatggcatgcgccaccatgccctattttttttttttaaagacagggtcttgctatattgcccaggctggtcttgaacggggctcaagtgatcctcacgccttggcctcccaaagtgctgggattataggcatgacgccactgtgcttggcccaggatttttttttttttgagatggagtttctctcttgttgtccaggctggagtgcaatggtgtgatctcggctcactgcaacctccgccttccgggttcaagtgactctcctgcctcagcctccccagtagctgggattacagatctgcaccaccatgcccagctaattttgtatttttagtagagacggggtttctccatgttggtcaggctggtctcgaactcctgacctcaagtgatctgtccacctcggcctcccagagtgctgggattacaggcgtgagccactgttcccagcaggaatttcttttttatagtattggataaagtttggtgtttttacagaggagaagcaatgggtcttagctctttctctattatgttatcatcctcccttttttgtacaatatgttgtttacctgaaaggaaggtttctattcgttggttgtggacctggacaaagtccaagtctgtggaacttaaaaccttgaaggtctgtcataggactctggacaatctcacaccttagctattcccagggaaccccagggggcaactgacattgctccaagatgttctcctgatgtagcttgagatataaaggaaaggccctttctgaacaggactgttcctctgacataacagactagaaacagccacctgtgcagggcctttgtcgacgc

SEQ ID NO: 383323 - DNA, 4334 bp, Homo sapiens
acccgagctcatactagggacgggaagtcgcgaccagagccattggagggcgcggggactgcaaccctaatcagagcccaaatggcgcagtgggaaatgctgcagaatcttgacagcccctttcaggatcagctgcaccagctttactcgcacagcctcctgcctgtggacattcgacagtacttggctgtctggattgaagaccagaactggcaggaagctgcacttgggagtgatgattccaaggctaccatgctattcttccacttcttggatcagctgaactatgagtgtggccgttgcagccaggacccagagtccttgttgctgcagcacaatttgcggaaattctgccgggacattcagcccttttcccaggatcctacccagttggctgagatgatctttaacctccttctggaagaaaaaagaattttgatccaggctcagagggcccaattggaacaaggagagccagttctcgaaacacctgtggagagccagcaacatgagattgaatcccggatcctggatttaagggctatgatggagaagctggtaaaatccatcagccaactgaaagaccagcaggatgtcttctgcttccgatataagatccaggccaaagggaagacaccctctctggacccccatcagaccaaagagcagaagattctgcaggaaactctcaatgaactggacaaaaggagaaaggaggtgctggatgcctccaaagcactgctaggccgattaactaccctaatcgagctactgctgccaaagttggaggagtggaaggcccagcagcaaaaagcctgcatcagagctcccattgaccacgggttggaacagctggagacatggttcacagctggagcaaagctgttgtttcacctgaggcagctgctgaaggagctgaagggactgagttgcctggttagctatcaggatgaccctctgaccaaaggggtggacctacgcaacgcccaggtcacagagttgctacagcgtctgctccacagagcctttgtggtagaaacccagccctgcatgccccaaactccccatcgacccctcatcctcaagactggcagcaagttcaccgtccgaacaaggctgctggtgagactccaggaaggcaatgagtcactgactgtggaagtctccattgacaggaatcctcctcaattacaaggcttccggaagttcaacattctgacttcaaaccagaaaactttgacccccgagaaggggcagagtcagggtttgatttgggactttggttacctgactctggtggagcaacgttcaggtggttcaggaaagggcagcaataaggggccactaggtgtgacagaggaactgcacatcatcagcttcacggtcaaatatacctaccagggtctgaagcaggagctgaaaacggacaccctccctgtggtgattatttccaacatgaaccagctctcaattgcctgggcttcagttctctggttcaatttgctcagcccaaaccttcagaaccagcagttcttctccaacccccccaaggccccctggagcttgctgggccctgctctcagttggcagttctcctcctatgttggccgaggcctcaactcagaccagctgagcatgctgagaaacaagctgttcgggcagaactgtaggactgaggatccattattgtcctgggctgacttcactaagcgagagagccctcctggcaagttaccattctggacatggctggacaaaattctggagttggtacatgaccacctgaaggatctctggaatgatggacgcatcatgggctttgtgagtcggagccaggagcgccggctgctgaagaagaccatgtctggcacctttctactgcgcttcagtgaatcgtcagaagggggcattacctgctcctgggtggagcaccaggatgatgacaaggtgctcatctactctgtgcaaccgtacacgaaggaggtgctgcagtcactcccgctgactgaaatcatccgccattaccagttgctcactgaggagaatatacctgaaaacccactgcgcttcctctatccccgaatcccccgggatgaagcttttgggtgctactaccaggagaaagttaatctccaggaacggaggaaatacctgaaacacaggctcattgtggtctctaatagacaggtggatgaactgcaacaaccgctggagcttaagccagagccagagctggagtcattagagctggaactagggctggtgccagagccagagctcagcctggacttagagccactgctgaaggcagggctggatctggggccagagctagagtctgtgctggagtccactctggagcctgtgatagagcccacactatgcatggtatcacaaacagtgccagagccagaccaaggacctgtatcacagccagtgccagagccagatttgccctgtgatctgagacatttgaacactgagccaatggaaatcttcagaaactgtgtaaagattgaagaaatcatgccgaatggtgacccactgttggctggccagaacaccgtggatgaggtttacgtctcccgccccagccacttctacactgatggacccttgatgccttctgacttctaggaaccacatttcctctgttcttttcatatctcttgcccttcctactcctcatagcatgatattgttctccaaggatgggaatcaggcatgtgtcccttccaagctgtgttaactgttcaaactcaggcctgtgtgactccattggggtgagaggtgaaagcataacatgggtacagaggggacaacaatgaatcagaacagatgctgagccataggtctaaataggatcctggaggctgcctgctgtgctgggaggtataggggtcctgggggcaggccagggcagttgacaggtacttggagggctcagggcagtggcttctttccagtatggaaggatttcaacattttaatagttggttaggctaaactggtgcatactggcattggcccttggtggggagcacagacacaggataggactccatttctttcttccattccttcatgtctaggataacttgctttcttctttcctttactcctggctcaagccctgaatttcttcttttcctgcaggggttgagagctttctgccttagcctaccatgtgaaactctaccctgaagaaagggatggataggaagtagacctctttttcttaccagtctcctcccctactctgcccctaagctggctgtacctgttcctcccccataaaatgatcctgccaatctaatgtgagtgtgaagctttgcacactagtttatgctacctagtctccactttctcaatgcttaggagacagatcactcctggaggctggggatggtaggattgctggggatttttttttttttaaacagggtctcactctgttgcccaggctagagtgcaatggtgcaatcacagctcactgcagcctcaacctcctgggttcaagcaatcctcctacctcagcctcctgggtagctagcaccatggcatgcgccaccatgccctattttttttttttaaagacagggtcttgctatattgcccaggctggtcttgaacggggctcaagtgatcctcacgccttggcctcccaaagtgctgggattataggcatgacgccactgtgcttggcccaggatttttttttttttgagatggagtttctctcttgttgtccaggctggagtgcaatggtgtgatctcggctcactgcaacctccgccttccgggttcaagtgactctcctgcctcagcctccccagtagctgggattacagatctgcaccaccatgcccagctaattttgtatttttagtagagacggggtttctccatgttggtcaggctggtctcgaactcctgacctcaagtgatctgtccacctcggcctcccagagtgctgggattacaggcgtgagccactgttcccagcaggaatttcttttttatagtattggataaagtttggtgtttttacagaggagaagcaatgggtcttagctctttctctattatgttatcatcctcccttttttgtacaatatgttgtttacctgaaaggaaggtttctattcgttggttgtggacctggacaaagtccaagtctgtggaacttaaaaccttgaaggtctgtcataggactctggacaatctcacaccttagctattcccaggatagacccaggagggacagaatacgaggtcgcaacgatgttctcatagactatcgattgagaaaataatacggtgaaggcccagac

SEQ ID NO: 383324 - DNA, 3711 bp, Homo sapiens
  misc_feature (3476)..(3476): n is a, c, g, or t
  misc_feature (3478)..(3478): n is a, c, g, or t
  misc_feature (3498)..(3498): n is a, c, g, or t
  misc_feature (3503)..(3504): n is a, c, g, or t
  misc_feature (3510)..(3510): n is a, c, g, or t
  misc_feature (3521)..(3523): n is a, c, g, or t
  misc_feature (3526)..(3528): n is a, c, g, or t
acccgagctcatactagggacgggaagtcgcgaccagagccattggagggcgcggggactgcaaccctaatcagagcccaaatggcgcagtgggaaatgctgcagaatcttgacagcccctttcaggatcagctgcaccagctttactcgcacagcctcctgcctgtggacattcgacagtacttggctgtctggattgaagaccagaactggcaggaagctgcacttgggagtgatgattccaaggctaccatgctattcttccacttcttggatcagctgaactatgagtgtggccgttgcagccaggacccagagtccttgttgctgcagcacaatttgcggaaattctgccgggacattcagcccttttcccaggatcctacccagttggctgagatgatctttaacctccttctggaagaaaaaagaattttgatccaggctcagagggcccaattggaacaaggagagccagttctcgaaacacctgtggagagccagcaacatgagattgaatcccggatcctggatttaagggctatgatggagaagctggtaaaatccatcagccaactgaaagaccagcaggatgtcttctgcttccgatataagatccaggccaaagggaagacaccctctctggacccccatcagaccaaagagcagaagattctgcaggaaactctcaatgaactggacaaaaggagaaaggaggtgctggatgcctccaaagcactgctaggccgattaactaccctaatcgagctactgctgccaaagttggaggagtggaaggcccagcagcaaaaagcctgcatcagagctcccattgaccacgggttggaacagctggagacatggttcacagctggagcaaagctgttgtttcacctgaggcagctgctgaaggagctgaagggactgagttgcctggttagctatcaggatgaccctctgaccaaaggggtggacctacgcaacgcccaggtcacagagttgctacagcgtctgctccacagagcctttgtggtagaaacccagccctgcatgccccaaactccccatcgacccctcatcctcaagactggcagcaagttcaccgtccgaacaaggctgctggtgagactccaggaaggcaatgagtcactgactgtggaagtctccattgacaggaatcctcctcaattacaaggcttccggaagttcaacattctgacttcaaaccagaaaactttgacccccgagaaggggcagagtcagggtttgatttgggactttggttacctgactctggtggagcaacgttcaggtggttcaggaaagggcagcaataaggggccactaggtgtgacagaggaactgcacatcatcagcttcacggtcaaatatacctaccagggtctgaagcaggagctgaaaacggacaccctccctgtggtgattatttccaacatgaaccagctctcaattgcctgggcttcagttctctggttcaatttgctcagcccaaaccttcagaaccagcagttcttctccaacccccccaaggccccctggagcttgctgggccctgctctcagttggcagttctcctcctatgttggccgaggcctcaactcagaccagctgagcatgctgagaaacaagctgttcgggcagaactgtaggactgaggatccattattgtcctgggctgacttcactaagcgagagagccctcctggcaagttaccattctggacatggctggacaaaattctggagttggtacatgaccacctgaaggatctctggaatgatggacgcatcatgggctttgtgagtcggagccaggagcgccggctgctgaagaagaccatgtctggcacctttctactgcgcttcagtgaatcgtcagaagggggcattacctgctcctgggtggagcaccaggatgatgacaaggtgctcatctactctgtgcaaccgtacacgaaggaggtgctgcagtcactcccgctgactgaaatcatccgccattaccagttgctcactgaggagaatatacctgaaaacccactgcgcttcctctatccccgaatcccccgggatgaagcttttgggtgctactaccaggagaaagttaatctccaggaacggaggaaatacctgaaacacaggctcattgtggtctctaatagacaggtggatgaactgcaacaaccgctggagcttaagccagagccagagctggagtcattagagctggaactagggctggtgccagagccagagctcagcctggacttagagccactgctgaaggcagggctggatctggggccagagctagagtctgtgctggagtccactctggagcctgtgatagagcccacactatgcatggtatcacaaacagtgccagagccagaccaaggacctgtatcacagccagtgccagagccagatttgccctgtgatctgagacatttgaacactgagccaatggaaatcttcagaaactgtgtaaagattgaagaaatcatgccgaatggtgacccactgttggctggccagaacaccgtggatgaggtttacgtctcccgccccagccacttctacactgatggacccttgatgccttctgacttctaggaaccacatttcctctgttcttttcatatctcttgcccttcctactcctcatagcatgatattgttctccaaggatgggaatcaggcatgtgtcccttccaagctgtgttaactgttcaaactcaggcctgtgtgactccattggggtgagaggtgaaagcataacatgggtacagaggggacaacaatgaatcagaacagatgctgagccataggtctaaataggatcctggaggctgcctgctgtgctgggaggtataggggtcctgggggcaggccagggcagttgacaggtacttggagggctcagggcagtggcttctttccagtatggaaggatttcaacattttaatagttggttaggctaaactggtgcatactggcattggcccttggtggggagcacagacacaggataggactccatttctttcttccattccttcatgtctaggataacttgctttcttctttcctttactcctggctcaagccctgaatttcttcttttcctgcaggggttgagagctttctgccttagcctaccatgtgaaactctaccctgaagaaagggatggataggaagtagacctctttttcttaccagtctcctcccctactctgcccctaagctggctgtacctgttcctcccccataaaatgatcctgccaatctaatgtgagtgtgaagctttgcacactagtttatgctacctagtctccactttctcaatgcttaggagacagatcactcctggaggctggggatggtaggattgctggggatttttttttttttaaacagggtctcactctgttgcccaggctagagtgagcngngatcatgccattgcactccngcctnngtgacngagcaagactnnntannnaataataaggtaaaaggagtacctgtggatgaaagcagcagctaacagctctgtgattcagctagacctagatattgtgcccattccttcccctcagtccattttctgtagcccctttaaaaaccaaaaaacaactttgaagtcactttgggtttaaaataaatagtggtaatttgtataatc

SEQ ID NO: 383325 - DNA, 4846 bp, Homo sapiens
acccgagctcatactagggacgggaagtcgcgaccagagccattggagggcgcggggactgcaaccctaatcagagcccaaatggcgcagtgggaaatgctgcagaatcttgacagcccctttcaggatcagctgcaccagctttactcgcacagcctcctgcctgtggacattcgacagtacttggctgtctggattgaagaccagaactggcaggaagctgcacttgggagtgatgattccaaggctaccatgctattcttccacttcttggatcagctgaactatgagtgtggccgttgcagccaggacccagagtccttgttgctgcagcacaatttgcggaaattctgccgggacattcagcccttttcccaggatcctacccagttggctgagatgatctttaacctccttctggaagaaaaaagaattttgatccaggctcagagggcccaattggaacaaggagagccagttctcgaaacacctgtggagagccagcaacatgagattgaatcccggatcctggatttaagggctatgatggagaagctggtaaaatccatcagccaactgaaagaccagcaggatgtcttctgcttccgatataagatccaggccaaaggtaggaagcacattgaggggctggagaaagataagtgcctgctgagaagccggagctggaagtgaacaggagaaagctccgatgagcagtagtcactgtcagacacaccccactgactacagtcctgctgccgtgcaaagctggaagtgctttgtggaggctgagctggaggtgcagctgagagacagtaaatgttgaggaaatgcatggaaaactaacagtgttttatttgagggggtgtctggtccaagcatgaccattcagaatttgcctgagggtcccacaggtgcctgtgctttgcttggtttccctttcttcctccacaaaattcctccttcctgactctgactgagaccccagtcaggaaggagaggaaagaacccctggactgactcctgttcccaccatccagggaagacaccctctctggacccccatcagaccaaagagcagaagattctgcaggaaactctcaatgaactggacaaaaggagaaaggaggtgctggatgcctccaaagcactgctaggccgattaactaccctaatcgagctactgctgccaaagttggaggagtggaaggcccagcagcaaaaagcctgcatcagagctcccattgaccacgggttggaacagctggagacatggttcacagctggagcaaagctgttgtttcacctgaggcagctgctgaaggagctgaagggactgagttgcctggttagctatcaggatgaccctctgaccaaaggggtggacctacgcaacgcccaggtcacagagttgctacagcgtctgctccacagagcctttgtggtagaaacccagccctgcatgccccaaactccccatcgacccctcatcctcaagactggcagcaagttcaccgtccgaacaaggctgctggtgagactccaggaaggcaatgagtcactgactgtggaagtctccattgacaggaatcctcctcaattacaaggcttccggaagttcaacattctgacttcaaaccagaaaactttgacccccgagaaggggcagagtcagggtttgatttgggactttggttacctgactctggtggagcaacgttcaggtggttcaggaaagggcagcaataaggggccactaggtgtgacagaggaactgcacatcatcagcttcacggtcaaatatacctaccagggtctgaagcaggagctgaaaacggacaccctccctgtggtgattatttccaacatgaaccagctctcaattgcctgggcttcagttctctggttcaatttgctcagcccaaaccttcagaaccagcagttcttctccaacccccccaaggccccctggagcttgctgggccctgctctcagttggcagttctcctcctatgttggccgaggcctcaactcagaccagctgagcatgctgagaaacaagctgttcgggcagaactgtaggactgaggatccattattgtcctgggctgacttcactaagcgagagagccctcctggcaagttaccattctggacatggctggacaaaattctggagttggtacatgaccacctgaaggatctctggaatgatggacgcatcatgggctttgtgagtcggagccaggagcgccggctgctgaagaagaccatgtctggcacctttctactgcgcttcagtgaatcgtcagaagggggcattacctgctcctgggtggagcaccaggatgatgacaaggtgctcatctactctgtgcaaccgtacacgaaggaggtgctgcagtcactcccgctgactgaaatcatccgccattaccagttgctcactgaggagaatatacctgaaaacccactgcgcttcctctatccccgaatcccccgggatgaagcttttgggtgctactaccaggagaaagttaatctccaggaacggaggaaatacctgaaacacaggctcattgtggtctctaatagacaggtggatgaactgcaacaaccgctggagcttaagccagagccagagctggagtcattagagctggaactagggctggtgccagagccagagctcagcctggacttagagccactgctgaaggcagggctggatctggggccagagctagagtctgtgctggagtccactctggagcctgtgatagagcccacactatgcatggtatcacaaacagtgccagagccagaccaaggacctgtatcacagccagtgccagagccagatttgccctgtgatctgagacatttgaacactgagccaatggaaatcttcagaaactgtgtaaagattgaagaaatcatgccgaatggtgacccactgttggctggccagaacaccgtggatgaggtttacgtctcccgccccagccacttctacactgatggacccttgatgccttctgacttctaggaaccacatttcctctgttcttttcatatctcttgcccttcctactcctcatagcatgatattgttctccaaggatgggaatcaggcatgtgtcccttccaagctgtgttaactgttcaaactcaggcctgtgtgactccattggggtgagaggtgaaagcataacatgggtacagaggggacaacaatgaatcagaacagatgctgagccataggtctaaataggatcctggaggctgcctgctgtgctgggaggtataggggtcctgggggcaggccagggcagttgacaggtacttggagggctcagggcagtggcttctttccagtatggaaggatttcaacattttaatagttggttaggctaaactggtgcatactggcattggcccttggtggggagcacagacacaggataggactccatttctttcttccattccttcatgtctaggataacttgctttcttctttcctttactcctggctcaagccctgaatttcttcttttcctgcaggggttgagagctttctgccttagcctaccatgtgaaactctaccctgaagaaagggatggataggaagtagacctctttttcttaccagtctcctcccctactctgcccctaagctggctgtacctgttcctcccccataaaatgatcctgccaatctaatgtgagtgtgaagctttgcacactagtttatgctacctagtctccactttctcaatgcttaggagacagatcactcctggaggctggggatggtaggattgctggggatttttttttttttaaacagggtctcactctgttgcccaggctagagtgcaatggtgcaatcacagctcactgcagcctcaacctcctgggttcaagcaatcctcctacctcagcctcctgggtagctagcaccatggcatgcgccaccatgccctattttttttttttaaagacagggtcttgctatattgcccaggctggtcttgaacggggctcaagtgatcctcacgccttggcctcccaaagtgctgggattataggcatgacgccactgtgcttggcccaggatttttttttttttgagatggagtttctctcttgttgtccaggctggagtgcaatggtgtgatctcggctcactgcaacctccgccttccgggttcaagtgactctcctgcctcagcctccccagtagctgggattacagatctgcaccaccatgcccagctaattttgtatttttagtagagacggggtttctccatgttggtcaggctggtctcgaactcctgacctcaagtgatctgtccacctcggcctcccagagtgctgggattacaggcgtgagccactgttcccagcaggaatttcttttttatagtattggataaagtttggtgtttttacagaggagaagcaatgggtcttagctctttctctattatgttatcatcctcccttttttgtacaatatgttgtttacctgaaaggaaggtttctattcgttggttgtggacctggacaaagtccaagtctgtggaacttaaaaccttgaaggtctgtcataggactctggacaatctcacaccttagctattcccagggaaccccagggggcaactgacattgctccaagatgttctcctgatgtagcttgagatataaaggaaaggccctgcacaggtggctgtttcttgtctgttatgtcagaggaacagtcctgttcagaaaggggctcttctgagcagaaatggctaataaactttgtgctgatctggaaaaaaaaaaac

SEQ ID NO: 383326 - DNA, 5158 bp, Homo sapiens
acccgagctcatactagggacgggaagtcgcgaccagagccattggagggcgcggggactgcaaccctaatcagagcccaaatggcgcagtgggaaatgctgcagaatcttgacagcccctttcaggatcagctgcaccagctttactcgcacagcctcctgcctgtggacattcgacagtacttggctgtctggattgaagaccagaactggcaggaagctgcacttgggagtgatgattccaaggctaccatgctattcttccacttcttggatcagctgaactatgagtgtggccgttgcagccaggacccagagtccttgttgctgcagcacaatttgcggaaattctgccgggacattcagcccttttcccaggatcctacccagttggctgagatgatctttaacctccttctggaagaaaaaagaattttgatccaggctcagagggcccaattggaacaaggagagccagttctcgaaacacctgtggagagccagcaacatgagattgaatcccggatcctggatttaagggctatgatggaggttagtagatgtggtaggagttagggttgacagcgttcagcctaacacctccctgagaagcagcctcatcggggtcctctcccctctgcagaagctggtaaaatccatcagccaactgaaagaccagcaggatgtcttctgcttccgatataagatccaggccaaaggtaggaagcacattgaggggctggagaaagataagtgcctgctgagaagccggagctggaagtgaacaggagaaagctccgatgagcagtagtcactgtcagacacaccccactgactacagtcctgctgccgtgcaaagctggaagtgctttgtggaggctgagctggaggtgcagctgagagacagtaaatgttgaggaaatgcatggaaaactaacagtgttttatttgagggggtgtctggtccaagcatgaccattcagaatttgcctgagggtcccacaggtgcctgtgctttgcttggtttccctttcttcctccacaaaattcctccttcctgactctgactgagaccccagtcaggaaggagaggaaagaacccctggactgactcctgttcccaccatccagggaagacaccctctctggacccccatcagaccaaagagcagaagattctgcaggaaactctcaatgaactggacaaaaggagaaaggaggtgctggatgcctccaaagcactgctaggccgattaactaccctaatcgagctactgctgccaaagttggaggagtggaaggcccagcagcaaaaagcctgcatcagagctcccattgaccacgggttggaacagctggagacatggttcacagctggagcaaagctgttgtttcacctgaggcagctgctgaaggagctgaagggactgagttgcctggttagctatcaggatgaccctctgaccaaaggggtggacctacgcaacgcccaggtcacagagttgctacagcgtctgctccacagagcctttgtggtagaaacccagccctgcatgccccaaactccccatcgacccctcatcctcaagactggcagcaagttcaccgtccgaacaaggctgctggtgagactccaggaaggcaatgagtcactgactgtggaagtctccattgacaggaatcctcctcaattacaagggtaggtgcttgacaaggacactgcaaacatctgtacagtgtatgacctgcagaaccacattcggcagccctggtggcacaaacaaggaagagggggatttgggatatggacaaagggagatggcgagatctgaaatgaagtggaacttctgtttttttttttctgctgagtttttagaataattccattccttgtctccatgtatcttcctcctggaacagcttccggaagttcaacattctgacttcaaaccagaaaactttgacccccgagaaggggcagagtcagggtttgatttgggactttggttacctgactctggtggagcaacgttcaggtggttcaggaaagggcagcaataaggggccactaggtgtgacagaggaactgcacatcatcagcttcacggtcaaatatacctaccagggtctgaagcaggagctgaaaacggacaccctccctgtggtgattatttccaacatgaaccagctctcaattgcctgggcttcagttctctggttcaatttgctcagcccaaaccttcagaaccagcagttcttctccaacccccccaaggccccctggagcttgctgggccctgctctcagttggcagttctcctcctatgttggccgaggcctcaactcagaccagctgagcatgctgagaaacaagctgttcgggcagaactgtaggactgaggatccattattgtcctgggctgacttcactaagcgagagagccctcctggcaagttaccattctggacatggctggacaaaattctggagttggtacatgaccacctgaaggatctctggaatgatggacgcatcatgggctttgtgagtcggagccaggagcgccggctgctgaagaagaccatgtctggcacctttctactgcgcttcagtgaatcgtcagaagggggcattacctgctcctgggtggagcaccaggatgatgacaaggtgctcatctactctgtgcaaccgtacacgaaggaggtgctgcagtcactcccgctgactgaaatcatccgccattaccagttgctcactgaggagaatatacctgaaaacccactgcgcttcctctatccccgaatcccccgggatgaagcttttgggtgctactaccaggagaaagttaatctccaggaacggaggaaatacctgaaacacaggctcattgtggtctctaatagacaggtggatgaactgcaacaaccgctggagcttaagccagagccagagctggagtcattagagctggaactagggctggtgccagagccagagctcagcctggacttagagccactgctgaaggcagggctggatctggggccagagctagagtctgtgctggagtccactctggagcctgtgatagagcccacactatgcatggtatcacaaacagtgccagagccagaccaaggacctgtatcacagccagtgccagagccagatttgccctgtgatctgagacatttgaacactgagccaatggaaatcttcagaaactgtgtaaagattgaagaaatcatgccgaatggtgacccactgttggctggccagaacaccgtggatgaggtttacgtctcccgccccagccacttctacactgatggacccttgatgccttctgacttctaggaaccacatttcctctgttcttttcatatctcttgcccttcctactcctcatagcatgatattgttctccaaggatgggaatcaggcatgtgtcccttccaagctgtgttaactgttcaaactcaggcctgtgtgactccattggggtgagaggtgaaagcataacatgggtacagaggggacaacaatgaatcagaacagatgctgagccataggtctaaataggatcctggaggctgcctgctgtgctgggaggtataggggtcctgggggcaggccagggcagttgacaggtacttggagggctcagggcagtggcttctttccagtatggaaggatttcaacattttaatagttggttaggctaaactggtgcatactggcattggcccttggtggggagcacagacacaggataggactccatttctttcttccattccttcatgtctaggataacttgctttcttctttcctttactcctggctcaagccctgaatttcttcttttcctgcaggggttgagagctttctgccttagcctaccatgtgaaactctaccctgaagaaagggatggataggaagtagacctctttttcttaccagtctcctcccctactctgcccctaagctggctgtacctgttcctcccccataaaatgatcctgccaatctaatgtgagtgtgaagctttgcacactagtttatgctacctagtctccactttctcaatgcttaggagacagatcactcctggaggctggggatggtaggattgctggggatttttttttttttaaacagggtctcactctgttgcccaggctagagtgcaatggtgcaatcacagctcactgcagcctcaacctcctgggttcaagcaatcctcctacctcagcctcctgggtagctagcaccatggcatgcgccaccatgccctattttttttttttaaagacagggtcttgctatattgcccaggctggtcttgaacggggctcaagtgatcctcacgccttggcctcccaaagtgctgggattataggcatgacgccactgtgcttggcccaggatttttttttttttgagatggagtttctctcttgttgtccaggctggagtgcaatggtgtgatctcggctcactgcaacctccgccttccgggttcaagtgactctcctgcctcagcctccccagtagctgggattacagatctgcaccaccatgcccagctaattttgtatttttagtagagacggggtttctccatgttggtcaggctggtctcgaactcctgacctcaagtgatctgtccacctcggcctcccagagtgctgggattacaggcgtgagccactgttcccagcaggaatttcttttttatagtattggataaagtttggtgtttttacagaggagaagcaatgggtcttagctctttctctattatgttatcatcctcccttttttgtacaatatgttgtttacctgaaaggaaggtttctattcgttggttgtggacctggacaaagtccaagtctgtggaacttaaaaccttgaaggtctgtcataggactctggacaatctcacaccttagctattcccagggaaccccagggggcaactgacattgctccaagatgttctcctgatgtagcttgagatataaaggaaaggccctgcacaggtggctgtttcttgtctgttatgtcagaggaacagtcctgttcagaaaggggctcttctgagcagaaatggctaataaactttgtgctgatctggaaaaaaaaaaac

SEQ ID NO: 383327 - DNA, 5623 bp, Homo sapiens
acccgagctcatactagggacgggaagtcgcgaccagagccattggagggcgcggggactgcaaccctaatcagagcccaaatggcgcagtgggaaatgctgcagaatcttgacagcccctttcaggatcagctgcaccagctttactcgcacagcctcctgcctgtggacattcgacagtacttggctgtctggattgaagaccagaactggcaggaagctgcacttgggagtgatgattccaaggctaccatgctattcttccacttcttggatcagctgaactatgagtgtggccgttgcagccaggacccagagtccttgttgctgcagcacaatttgcggaaattctgccgggacattcagcccttttcccaggatcctacccagttggctgagatgatctttaacctccttctggaagaaaaaagaattttgatccaggctcagagggcccaattggaacaaggagagccagttctcgaaacacctgtggagagccagcaacatgagattgaatcccggatcctggatttaagggctatgatggaggttagtagatgtggtaggagttagggttgacagcgttcagcctaacacctccctgagaagcagcctcatcggggtcctctcccctctgcagaagctggtaaaatccatcagccaactgaaagaccagcaggatgtcttctgcttccgatataagatccaggccaaaggtaggaagcacattgaggggctggagaaagataagtgcctgctgagaagccggagctggaagtgaacaggagaaagctccgatgagcagtagtcactgtcagacacaccccactgactacagtcctgctgccgtgcaaagctggaagtgctttgtggaggctgagctggaggtgcagctgagagacagtaaatgttgaggaaatgcatggaaaactaacagtgttttatttgagggggtgtctggtccaagcatgaccattcagaatttgcctgagggtcccacaggtgcctgtgctttgcttggtttccctttcttcctccacaaaattcctccttcctgactctgactgagaccccagtcaggaaggagaggaaagaacccctggactgactcctgttcccaccatccagggaagacaccctctctggacccccatcagaccaaagagcagaagattctgcaggaaactctcaatgaactggacaaaaggagaaaggaggtgctggatgcctccaaagcactgctaggccgattaactaccctaatcgagctactgctgccaaagttggaggagtggaaggcccagcagcaaaaagcctgcatcagagctcccattgaccacgggttggaacagctggagacatggttcacagctggagcaaagctgttgtttcacctgaggcagctgctgaaggagctgaagggactgagttgcctggttagctatcaggatgaccctctgaccaaaggggtggacctacgcaacgcccaggtcacagagttgctacagcgtctgctccacagagcctttgtggtagaaacccagccctgcatgccccaaactccccatcgacccctcatcctcaagactggcagcaagttcaccgtccgaacaaggctgctggtgagactccaggaaggcaatgagtcactgactgtggaagtctccattgacaggaatcctcctcaattacaagggtaggtgcttgacaaggacactgcaaacatctgtacagtgtatgacctgcagaaccacattcggcagccctggtggcacaaacaaggaagagggggatttgggatatggacaaagggagatggcgagatctgaaatgaagtggaacttctgtttttttttttctgctgagtttttagaataattccattccttgtctccatgtatcttcctcctggaacagcttccggaagttcaacattctgacttcaaaccagaaaactttgacccccgagaaggggcagagtcagggtttgatttgggactttggttacctgactctggtggagcaacgttcaggtggttcaggaaagggcagcaataaggtgagatctggacagaggactcgaggcagggggagcttgccaaagagccttctgatgactatgtctttggctgtcccaggggccactaggtgtgacagaggaactgcacatcatcagcttcacggtcaaatatacctaccagggtctgaagcaggagctgaaagtgagtgaaaatggagggcaaggagagagaaagcagctttggaagaaggcataagaaggggataaacagaagcctcttggggtgggttagcactcctttcctctaacaaatacctgcagctagaaacatcacatccctctctgtgactcctgtcttctccccagacggacaccctccctgtggtgattatttccaacatgaaccagctctcaattgcctgggcttcagttctctggttcaatttgctcagcccaaaccttcaggtaggggagtggggccgacaggtcaaggcgcgagaggaggggtgtggaagcttggtgtgataggttgcttctgagccagcctacactgctcccacccctgcagaaccagcagttcttctccaacccccccaaggccccctggagcttgctgggccctgctctcagttggcagttctcctcctatgttggccgaggcctcaactcagaccagctgagcatgctgagaaacaagctgttcggtacagatttccttttctctcagcctttccccagccttagtcttttctgtccctctgtcctatctatcccaggacccctggcttccctcatcatctgtctgtggctatctgtcccacagggcagaactgtaggactgaggatccattattgtcctgggctgacttcactaagcgagagagccctcctggcaagttaccattctggacatggctggacaaaattctggagttggtacatgaccacctgaaggatctctggaatgatggacgcatcatgggctttgtgagtcggagccaggagcgccggctgctgaagaagaccatgtctggcacctttctactgcgcttcagtgaatcgtcagaagggggcattacctgctcctgggtggagcaccaggatgatgacaaggtgctcatctactctgtgcaaccgtacacgaaggaggtgctgcagtcactcccgctgactgaaatcatccgccattaccagttgctcactgaggagaatatacctgaaaacccactgcgcttcctctatccccgaatcccccgggatgaagcttttgggtgctactaccaggagaaagttaatctccaggaacggaggaaatacctgaaacacaggctcattgtggtctctaatagacaggtggatgaactgcaacaaccgctggagcttaagccagagccagagctggagtcattagagctggaactagggctggtgccagagccagagctcagcctggacttagagccactgctgaaggcagggctggatctggggccagagctagagtctgtgctggagtccactctggagcctgtgatagagcccacactatgcatggtatcacaaacagtgccagagccagaccaaggacctgtatcacagccagtgccagagccagatttgccctgtgatctgagacatttgaacactgagccaatggaaatcttcagaaactgtgtaaagattgaagaaatcatgccgaatggtgacccactgttggctggccagaacaccgtggatgaggtttacgtctcccgccccagccacttctacactgatggacccttgatgccttctgacttctaggaaccacatttcctctgttcttttcatatctcttgcccttcctactcctcatagcatgatattgttctccaaggatgggaatcaggcatgtgtcccttccaagctgtgttaactgttcaaactcaggcctgtgtgactccattggggtgagaggtgaaagcataacatgggtacagaggggacaacaatgaatcagaacagatgctgagccataggtctaaataggatcctggaggctgcctgctgtgctgggaggtataggggtcctgggggcaggccagggcagttgacaggtacttggagggctcagggcagtggcttctttccagtatggaaggatttcaacattttaatagttggttaggctaaactggtgcatactggcattggcccttggtggggagcacagacacaggataggactccatttctttcttccattccttcatgtctaggataacttgctttcttctttcctttactcctggctcaagccctgaatttcttcttttcctgcaggggttgagagctttctgccttagcctaccatgtgaaactctaccctgaagaaagggatggataggaagtagacctctttttcttaccagtctcctcccctactctgcccctaagctggctgtacctgttcctcccccataaaatgatcctgccaatctaatgtgagtgtgaagctttgcacactagtttatgctacctagtctccactttctcaatgcttaggagacagatcactcctggaggctggggatggtaggattgctggggatttttttttttttaaacagggtctcactctgttgcccaggctagagtgcaatggtgcaatcacagctcactgcagcctcaacctcctgggttcaagcaatcctcctacctcagcctcctgggtagctagcaccatggcatgcgccaccatgccctattttttttttttaaagacagggtcttgctatattgcccaggctggtcttgaacggggctcaagtgatcctcacgccttggcctcccaaagtgctgggattataggcatgacgccactgtgcttggcccaggatttttttttttttgagatggagtttctctcttgttgtccaggctggagtgcaatggtgtgatctcggctcactgcaacctccgccttccgggttcaagtgactctcctgcctcagcctccccagtagctgggattacagatctgcaccaccatgcccagctaattttgtatttttagtagagacggggtttctccatgttggtcaggctggtctcgaactcctgacctcaagtgatctgtccacctcggcctcccagagtgctgggattacaggcgtgagccactgttcccagcaggaatttcttttttatagtattggataaagtttggtgtttttacagaggagaagcaatgggtcttagctctttctctattatgttatcatcctcccttttttgtacaatatgttgtttacctgaaaggaaggtttctattcgttggttgtggacctggacaaagtccaagtctgtggaacttaaaaccttgaaggtctgtcataggactctggacaatctcacaccttagctattcccagggaaccccagggggcaactgacattgctccaagatgttctcctgatgtagcttgagatataaaggaaaggccctgcacaggtggctgtttcttgtctgttatgtcagaggaacagtcctgttcagaaaggggctcttctgagcagaaatggctaataaactttgtgctgatctggaaaaaaaaaaac

SEQ ID NO: 383328 - DNA, 4305 bp, Homo sapiens
acccgagctcatactagggacgggaagtcgcgaccagagccattggagggcgcggggactgcaaccctaatcagagcccaaatggcgcagtgggaaatgctgcagaatcttgacagcccctttcaggatcagctgcaccagctttactcgcacagcctcctgcctgtggacattcgacagtacttggctgtctggattgaagaccagaactggcaggaagctgcacttgggagtgatgattccaaggctaccatgctattcttccacttcttggatcagctgaactatgagtgtggccgttgcagccaggacccagagtccttgttgctgcagcacaatttgcggaaattctgccgggacattcagcccttttcccaggatcctacccagttggctgagatgatctttaacctccttctggaagaaaaaagaattttgatccaggctcagagggcccaattggaacaaggagagccagttctcgaaacacctgtggagagccagcaacatgagattgaatcccggatcctggatttaagggctatgatggagaagctggtaaaatccatcagccaactgaaagaccagcaggatgtcttctgcttccggaagttcaacattctgacttcaaaccagaaaactttgacccccgagaaggggcagagtcagggtttgatttgggactttggttacctgactctggtggagcaacgttcaggtggttcaggaaagggcagcaataaggtgagatctggacagaggactcgaggcagggggagcttgccaaagagccttctgatgactatgtctttggctgtcccaggggccactaggtgtgacagaggaactgcacatcatcagcttcacggtcaaatatacctaccagggtctgaagcaggagctgaaagtgagtgaaaatggagggcaaggagagagaaagcagctttggaagaaggcataagaaggggataaacagaagcctcttggggtgggttagcactcctttcctctaacaaatacctgcagctagaaacatcacatccctctctgtgactcctgtcttctccccagacggacaccctccctgtggtgattatttccaacatgaaccagctctcaattgcctgggcttcagttctctggttcaatttgctcagcccaaaccttcaggtaggggagtggggccgacaggtcaaggcgcgagaggaggggtgtggaagcttggtgtgataggttgcttctgagccagcctacactgctcccacccctgcagaaccagcagttcttctccaacccccccaaggccccctggagcttgctgggccctgctctcagttggcagttctcctcctatgttggccgaggcctcaactcagaccagctgagcatgctgagaaacaagctgttcggtacagatttccttttctctcagcctttccccagccttagtcttttctgtccctctgtcctatctatcccaggacccctggcttccctcatcatctgtctgtggctatctgtcccacagggcagaactgtaggactgaggatccattattgtcctgggctgacttcactaagcgagagagccctcctggcaagttaccattctggacatggctggacaaaattctggagttggtacatgaccacctgaaggatctctggaatgatggacgcatcatgggctttgtgagtcggagccaggagcgccggctgctgaagaagaccatgtctggcacctttctactgcgcttcagtgaatcgtcagaagggggcattacctgctcctgggtggagcaccaggatgatgacaaggtgctcatctactctgtgcaaccgtacacgaaggaggtgctgcagtcactcccgctgactgaaatcatccgccattaccagttgctcactgaggagaatatacctgaaaacccactgcgcttcctctatccccgaatcccccgggatgaagcttttgggtgctactaccaggagaaagttaatctccaggaacggaggaaatacctgaaacacaggctcattgtggtctctaatagacaggtggatgaactgcaacaaccgctggagcttaagccagagccagagctggagtcattagagctggaactagggctggtgccagagccagagctcagcctggacttagagccactgctgaaggcagggctggatctggggccagagctagagtctgtgctggagtccactctggagcctgtgatagagcccacactatgcatggtatcacaaacagtgccagagccagaccaaggacctgtatcacagccagtgccagagccagatttgccctgtgatctgagacatttgaacactgagccaatggaaatcttcagaaactgtgtaaagattgaagaaatcatgccgaatggtgacccactgttggctggccagaacaccgtggatgaggtttacgtctcccgccccagccacttctacactgatggacccttgatgccttctgacttctaggaaccacatttcctctgttcttttcatatctcttgcccttcctactcctcatagcatgatattgttctccaaggatgggaatcaggcatgtgtcccttccaagctgtgttaactgttcaaactcaggcctgtgtgactccattggggtgagaggtgaaagcataacatgggtacagaggggacaacaatgaatcagaacagatgctgagccataggtctaaataggatcctggaggctgcctgctgtgctgggaggtataggggtcctgggggcaggccagggcagttgacaggtacttggagggctcagggcagtggcttctttccagtatggaaggatttcaacattttaatagttggttaggctaaactggtgcatactggcattggcccttggtggggagcacagacacaggataggactccatttctttcttccattccttcatgtctaggataacttgctttcttctttcctttactcctggctcaagccctgaatttcttcttttcctgcaggggttgagagctttctgccttagcctaccatgtgaaactctaccctgaagaaagggatggataggaagtagacctctttttcttaccagtctcctcccctactctgcccctaagctggctgtacctgttcctcccccataaaatgatcctgccaatctaatgtgagtgtgaagctttgcacactagtttatgctacctagtctccactttctcaatgcttaggagacagatcactcctggaggctggggatggtaggattgctggggatttttttttttttaaacagggtctcactctgttgcccaggctagagtgcaatggtgcaatcacagctcactgcagcctcaacctcctgggttcaagcaatcctcctacctcagcctcctgggtagctagcaccatggcatgcgccaccatgccctattttttttttttaaagacagggtcttgctatattgcccaggctggtcttgaacggggctcaagtgatcctcacgccttggcctcccaaagtgctgggattataggcatgacgccactgtgcttggcccaggatttttttttttttgagatggagtttctctcttgttgtccaggctggagtgcaatggtgtgatctcggctcactgcaacctccgccttccgggttcaagtgactctcctgcctcagcctccccagtagctgggattacagatctgcaccaccatgcccagctaattttgtatttttagtagagacggggtttctccatgttggtcaggctggtctcgaactcctgacctcaagtgatctgtccacctcggcctcccagagtgctgggattacaggcgtgagccactgttcccagcaggaatttcttttttatagtattggataaagtttggtgtttttacagaggagaagcaatgggtcttagctctttctctattatgttatcatcctcccttttttgtacaatatgttgtttacctgaaaggaaggtttctattcgttggttgtggacctggacaaagtccaagtctgtggaacttaaaaccttgaaggtctgtcataggactctggacaatctcacaccttagctattcccagggaaccccagggggcaactgacattgctccaagatgttctcctgatgtagcttgagatataaaggaaaggccctgcacaggtggctgtttcttgtctgttatgtcagaggaacagtcctgttcagaaaggggctcttctgagcagaaatggctaataaactttgtgctgatctggaaaaaaaaaaac

SEQ ID NO: 383329 - DNA, 3343 bp, Homo sapiens
ctcaggtgatccacccgcctcagcctcccaaagtgctgggatcacaggcatgagccaccatagctggcctgcttttagtccaaaggaacaggggttgggggaagttcccagggcttgagaggtcttgaagccaaacaggggttccagggacactagggtgcccactctggcattttctctccttcccttcaattcacagactctggtggagcaacgttcaggtggttcaggaaagggcagcaataaggggccactaggtgtgacagaggaactgcacatcatcagcttcacggtcaaatatacctaccagggtctgaagcaggagctgaaaacggacaccctccctgtggtgattatttccaacatgaaccagctctcaattgcctgggcttcagttctctggttcaatttgctcagcccaaaccttcagaaccagcagttcttctccaacccccccaaggccccctggagcttgctgggccctgctctcagttggcagttctcctcctatgttggccgaggcctcaactcagaccagctgagcatgctgagaaacaagctgttcgggcagaactgtaggactgaggatccattattgtcctgggctgacttcactaagcgagagagccctcctggcaagttaccattctggacatggctggacaaaattctggagttggtacatgaccacctgaaggatctctggaatgatggacgcatcatgggctttgtgagtcggagccaggagcgccggctgctgaagaagaccatgtctggcacctttctactgcgcttcagtgaatcgtcagaagggggcattacctgctcctgggtggagcaccaggatgatgacaaggtgctcatctactctgtgcaaccgtacacgaaggaggtgctgcagtcactcccgctgactgaaatcatccgccattaccagttgctcactgaggagaatatacctgaaaacccactgcgcttcctctatccccgaatcccccgggatgaagcttttgggtgctactaccaggagaaagttaatctccaggaacggaggaaatacctgaaacacaggctcattgtggtctctaatagacaggtggatgaactgcaacaaccgctggagcttaagccagagccagagctggagtcattagagctggaactagggctggtgccagagccagagctcagcctggacttagagccactgctgaaggcagggctggatctggggccagagctagagtctgtgctggagtccactctggagcctgtgatagagcccacactatgcatggtatcacaaacagtgccagagccagaccaaggacctgtatcacagccagtgccagagccagatttgccctgtgatctgagacatttgaacactgagccaatggaaatcttcagaaactgtgtaaagattgaagaaatcatgccgaatggtgacccactgttggctggccagaacaccgtggatgaggtttacgtctcccgccccagccacttctacactgatggacccttgatgccttctgacttctaggaaccacatttcctctgttcttttcatatctcttgcccttcctactcctcatagcatgatattgttctccaaggatgggaatcaggcatgtgtcccttccaagctgtgttaactgttcaaactcaggcctgtgtgactccattggggtgagaggtgaaagcataacatgggtacagaggggacaacaatgaatcagaacagatgctgagccataggtctaaataggatcctggaggctgcctgctgtgctgggaggtataggggtcctgggggcaggccagggcagttgacaggtacttggagggctcagggcagtggcttctttccagtatggaaggatttcaacattttaatagttggttaggctaaactggtgcatactggcattggcccttggtggggagcacagacacaggataggactccatttctttcttccattccttcatgtctaggataacttgctttcttctttcctttactcctggctcaagccctgaatttcttcttttcctgcaggggttgagagctttctgccttagcctaccatgtgaaactctaccctgaagaaagggatggataggaagtagacctctttttcttaccagtctcctcccctactctgcccctaagctggctgtacctgttcctcccccataaaatgatcctgccaatctaatgtgagtgtgaagctttgcacactagtttatgctacctagtctccactttctcaatgcttaggagacagatcactcctggaggctggggatggtaggattgctggggatttttttttttttaaacagggtctcactctgttgcccaggctagagtgcaatggtgcaatcacagctcactgcagcctcaacctcctgggttcaagcaatcctcctacctcagcctcctgggtagctagcaccatggcatgcgccaccatgccctattttttttttttaaagacagggtcttgctatattgcccaggctggtcttgaacggggctcaagtgatcctcacgccttggcctcccaaagtgctgggattataggcatgacgccactgtgcttggcccaggatttttttttttttgagatggagtttctctcttgttgtccaggctggagtgcaatggtgtgatctcggctcactgcaacctccgccttccgggttcaagtgactctcctgcctcagcctccccagtagctgggattacagatctgcaccaccatgcccagctaattttgtatttttagtagagacggggtttctccatgttggtcaggctggtctcgaactcctgacctcaagtgatctgtccacctcggcctcccagagtgctgggattacaggcgtgagccactgttcccagcaggaatttcttttttatagtattggataaagtttggtgtttttacagaggagaagcaatgggtcttagctctttctctattatgttatcatcctcccttttttgtacaatatgttgtttacctgaaaggaaggtttctattcgttggttgtggacctggacaaagtccaagtctgtggaacttaaaaccttgaaggtctgtcataggactctggacaatctcacaccttagctattcccagggaaccccagggggcaactgacattgctccaagatgttctcctgatgtagcttgagatataaaggaaaggccctgcacaggtggctgtttcttgtctgttatgtcagaggaacagtcctgttcagaaaggggctcttctgagcagaaatggctaataaactttgtgctgatctggaaaaaaaaaaac

SEQ ID NO: 383330 - DNA, 3111 bp, Homo sapiens
acccgagctcatactagggacgggaagtcgcgaccagagccattggagggcgcggggactgcaaccctaatcagagcccaaatggcgcagtgggaaatgctgcagaatcttgacagcccctttcaggatcagctgcaccagctttactcgcacagcctcctgcctgtggacattcgacagtacttggctgtctggattgaagaccagaactggcaggaagctgcacttgggagtgatgattccaaggctaccatgctattcttccacttcttggatcagctgaactatgagtgtggccgttgcagccaggacccagagtccttgttgctgcagcacaatttgcggaaattctgccgggacattcagcccttttcccaggatcctacccagttggctgagatgatctttaacctccttctggaagaaaaaagaattttgatccaggctcagagggcccaattggaacaaggagagccagttctcgaaacacctgtggagagccagcaacatgagattgaatcccggatcctggatttaagggctatgatggagaagctggtaaaatccatcagccaactgaaagaccagcaggatgtcttctgcttccgatataagatccaggccaaagggaagacaccctctctggacccccatcagaccaaagagcagaagattctgcaggaaactctcaatgaactggacaaaaggagaaaggaggtgctggatgcctccaaagcactgctaggccgattaactaccctaatcgagctactgctgccaaagttggaggagtggaaggcccagcagcaaaaagcctgcatcagagctcccattgaccacgggttggaacagctggagacatggttcacagctggagcaaagctgttgtttcacctgaggcagctgctgaaggagctgaagggactgagttgcctggttagctatcaggatgaccctctgaccaaaggggtggacctacgcaacgcccaggtcacagagttgctacagcgtctgctccacagagcctttgtggtagaaacccagccctgcatgccccaaactccccatcgacccctcatcctcaagactggcagcaagttcaccgtccgaacaaggctgctggtgagactccaggaaggcaatgagtcactgactgtggaagtctccattgacaggaatcctcctcaattacaaggcttccggaagttcaacattctgacttcaaaccagaaaactttgacccccgagaaggggcagagtcagggtttgatttgggactttggttacctgactctggtggagcaacgttcaggtggttcaggaaagggcagcaataaggggccactaggtgtgacagaggaactgcacatcatcagcttcacggtcaaatatacctaccagggtctgaagcaggagctgaaaacggacaccctccctgtggtgattatttccaacatgaaccagctctcaattgcctgggcttcagttctctggttcaatttgctcagcccaaaccttcagaaccagcagttcttctccaacccccccaaggccccctggagcttgctgggccctgctctcagttggcagttctcctcctatgttggccgaggcctcaactcagaccagctgagcatgctgagaaacaagctgttcgggcagaactgtaggactgaggatccattattgtcctgggctgacttcactaagcgagagagccctcctggcaagttaccattctggacatggctggacaaaattctggagttggtacatgaccacctgaaggatctctggaatgatggacgcatcatgggctttgtgagtcggagccaggagcgccggctgctgaagaagaccatgtctggcacctttctactgcgcttcagtgaatcgtcagaagggggcattacctgctcctgggtggagcaccaggatgatgacaaggtgctcatctactctgtgcaaccgtacacgaaggaggtgctgcagtcactcccgctgactgaaatcatccgccattaccagttgctcactgaggagaatatacctgaaaacccactgcgcttcctctatccccgaatcccccgggatgaagcttttgggtgctactaccaggagaaagttaatctccaggaacggaggaaatacctgaaacacaggctcattgtggtctctaatagacaggtggatgaactgcaacaaccgctggagcttaagccagagccagagctggatggcattggcccttggtggggagcacagacacaggataggactccatttctttcttccattccttcatgtctaggataacttgctttcttctttcctttactcctggctcaagccctgaatttcttcttttcctgcaggggttgagagctttctgccttagcctaccatgtgaaactctaccctgaagaaagggatggataggaagtagacctctttttcttaccagtctcctcccctactctgcccctaagctggctgtacctgttcctccccagtagctgggattacagatctgcaccaccatgcccagctaattttgtatttttagtagagacggggtttctccatgttggtcaggctggtctcgaactcctgacctcaagtgatctgtccacctcggcctcccagagtgctgggattacaggcgtgagccactgttcccagcaggaatttcttttttatagtattggataaagtttggtgtttttacagaggagaagcaatgggtcttagctctttctctattatgttatcatcctcccttttttgtacaatatgttgtttacctgaaaggaaggtttctattcgttggttgtggacctggacaaagtccaagtctgtggaacttaaaaccttgaaggtctgtcataggactctggacaatctcacaccttagctattcccagggaaccccagggggcaactgacattgctccaagatgttctcctgatgtagcttgagatataaaggaaaggccctgcacaggtggctgtttcttgtctgttatgtcagaggaacagtcctgttcagaaaggggctcttctgagcagaaatggctaataaactttgtgctgatctggaaaaaaaaaaac

SEQ ID NO: 383331 - DNA, 2678 bp, Homo sapiens
gtggggcagggtgttgggcggtgtctcacagctgctctctgtgctccagacgcatcatgggctttgtgagtcggagccaggagcgccggctgctgaagaagaccatgtctggcacctttctactgcgcttcagtgaatcgtcagaagggggcattacctgctcctgggtggagcaccaggatgatgacaaggtgctcatctactctgtgcaaccgtacacgaaggaggtgctgcagtcactcccgctgactgaaatcatccgccattaccagttgctcactgaggagaatatacctgaaaacccactgcgcttcctctatccccgaatcccccgggatgaagcttttgggtgctactaccaggagaaagttaatctccaggaacggaggaaatacctgaaacacaggctcattgtggtctctaatagacaggtggatgaactgcaacaaccgctggagcttaagccagagccagagctggagtcattagagctggaactagggctggtgccagagccagagctcagcctggacttagagccactgctgaaggcagggctggatctggggccagagctagagtctgtgctggagtccactctggagcctgtgatagagcccacactatgcatggtatcacaaacagtgccagagccagaccaaggacctgtatcacagccagtgccagagccagatttgccctgtgatctgagacatttgaacactgagccaatggaaatcttcagaaactgtgtaaagattgaagaaatcatgccgaatggtgacccactgttggctggccagaacaccgtggatgaggtttacgtctcccgccccagccacttctacactgatggacccttgatgccttctgacttctaggaaccacatttcctctgttcttttcatatctcttgcccttcctactcctcatagcatgatattgttctccaaggatgggaatcaggcatgtgtcccttccaagctgtgttaactgttcaaactcaggcctgtgtgactccattggggtgagaggtgaaagcataacatgggtacagaggggacaacaatgaatcagaacagatgctgagccataggtctaaataggatcctggaggctgcctgctgtgctgggaggtataggggtcctgggggcaggccagggcagttgacaggtacttggagggctcagggcagtggcttctttccagtatggaaggatttcaacattttaatagttggttaggctaaactggtgcatactggcattggcccttggtggggagcacagacacaggataggactccatttctttcttccattccttcatgtctaggataacttgctttcttctttcctttactcctggctcaagccctgaatttcttcttttcctgcaggggttgagagctttctgccttagcctaccatgtgaaactctaccctgaagaaagggatggataggaagtagacctctttttcttaccagtctcctcccctactctgcccctaagctggctgtacctgttcctcccccataaaatgatcctgccaatctaatgtgagtgtgaagctttgcacactagtttatgctacctagtctccactttctcaatgcttaggagacagatcactcctggaggctggggatggtaggattgctggggatttttttttttttaaacagggtctcactctgttgcccaggctagagtgcaatggtgcaatcacagctcactgcagcctcaacctcctgggttcaagcaatcctcctacctcagcctcctgggtagctagcaccatggcatgcgccaccatgccctattttttttttttaaagacagggtcttgctatattgcccaggctggtcttgaacggggctcaagtgatcctcacgccttggcctcccaaagtgctgggattataggcatgacgccactgtgcttggcccaggatttttttttttttgagatggagtttctctcttgttgtccaggctggagtgcaatggtgtgatctcggctcactgcaacctccgccttccgggttcaagtgactctcctgcctcagcctccccagtagctgggattacagatctgcaccaccatgcccagctaattttgtatttttagtagagacggggtttctccatgttggtcaggctggtctcgaactcctgacctcaagtgatctgtccacctcggcctcccagagtgctgggattacaggcgtgagccactgttcccagcaggaatttcttttttatagtattggataaagtttggtgtttttacagaggagaagcaatgggtcttagctctttctctattatgttatcatcctcccttttttgtacaatatgttgtttacctgaaaggaaggtttctattcgttggttgtggacctggacaaagtccaagtctgtggaacttaaaaccttgaaggtctgtcataggactctggacaatctcacaccttagctattcccagggaaccccagggggcaactgacattgctccaagatgttctcctgatgtagcttgagatataaaggaaaggccctgcacaggtggctgtttcttgtctgttatgtcagaggaacagtcctgttcagaaaggggctcttctgagcagaaatggctaataaactttgtgctgatctggaaaaaaaaaaac

SEQ ID NO: 383332 - DNA, 1126 bp, Homo sapiens
actgtggggtgctctagagatcccgggcaggtgctttatgctacctagtctccactttctcaatgcttaggagacagatcactcctggaggctggggatggtaggattgctggggatttttttttttttaaacagggtctcactctgttgcccaggctagagtgcaatggtgcaatcacagctcactgcagcctcaacctcctgggttcaagcaatcctcctacctcagcctcctgggtagctagcaccatggcatgcgccaccatgccctattttttttttttaaagacagggtcttgctatattgcccaggctggtcttgaacggggctcaagtgatcctcacgccttggcctcccaaagtgctgggattataggcatgacgccactgtgcttggcccaggatttttttttttttgagatggagtttctctcttgttgtccaggctggagtgcaatggtgtgatctcggctcactgcaacctccgccttccgggttcaagtgactctcctgcctcagcctccccagtagctgggattacagatctgcaccaccatgcccagctaattttgtatttttagtagagacggggtttctccatgttggtcaggctggtctcgaactcctgacctcaagtgatctgtccacctcggcctcccagagtgctgggattacaggcgtgagccactgttcccagcaggaatttcttttttatagtattggataaagtttggtgtttttacagaggagaagcaatgggtcttagctctttctctattatgttatcatcctcccttttttgtacaatatgttgtttacctgaaaggaaggtttctattcgttggttgtggacctggacaaagtccaagtctgtggaacttaaaaccttgaaggtctgtcataggactctggacaatctcacaccttagctattcccagggaaccccagggggcaactgacattgctccaagatgttctcctgatgtagcttgagatataaaggaaaggccctgcacaggtggctgtttcttgtctgttatgtcagaggaacagtcctgttcagaaaggggctcttctgagcagaaatggctaataaactttgtgctgatctggaaaaaaaaaaac

SEQ ID NO: 383333 - DNA, 2699 bp, Homo sapiens
  misc_feature (2699)..(2699): n is a, c, g, or t
acccgagctcatactagggacgggaagtcgcgaccagagccattggagggcgcggggactgcaaccctaatcagagcccaaatggcgcagtgggaaatgctgcagaatcttgacagcccctttcaggatcagctgcaccagctttactcgcacagcctcctgcctgtggacattcgacagtacttggctgtctggattgaagaccagaactggcaggaagctgcacttgggagtgatgattccaaggctaccatgctattcttccacttcttggatcagctgaactatgagtgtggccgttgcagccaggacccagagtccttgttgctgcagcacaatttgcggaaattctgccgggacattcagcccttttcccaggatcctacccagttggctgagatgatctttaacctccttctggaagaaaaaagaattttgatccaggctcagagggcccaattggaacaaggagagccagttctcgaaacacctgtggagagccagcaacatgagattgaatcccggatcctggatttaagggctatgatggaggttagtagatgtggtaggagttagggttgacagcgttcagcctaacacctccctgagaagcagcctcatcggggtcctctcccctctgcagaagctggtaaaatccatcagccaactgaaagaccagcaggatgtcttctgcttccgatataagatccaggccaaaggtaggaagcacattgaggggctggagaaagataagtgcctgctgagaagccggagctggaagtgaacaggagaaagctccgatgagcagtagtcactgtcagacacaccccactgactacagtcctgctgccgtgcaaagctggaagtgctttgtggaggctgagctggaggtgcagctgagagacagtaaatgttgaggaaatgcatggaaaactaacagtgttttatttgagggggtgtctggtccaagcatgaccattcagaatttgcctgagggtcccacaggtgcctgtgctttgcttggtttccctttcttcctccacaaaattcctccttcctgactctgactgagaccccagtcaggaaggagaggaaagaacccctggactgactcctgttcccaccatccagggaagacaccctctctggacccccatcagaccaaagagcagaagattctgcaggaaactctcaatgaactggacaaaaggagaaaggaggtgctggatgcctccaaagcactgctaggccgattaactaccctaatcgagctactgctgccaaagttggaggagtggaaggcccagcagcaaaaagcctgcatcagagctcccattgaccacgggttggaacagctggagacatggttcacagctggagcaaagctgttgtttcacctgaggcagctgctgaaggagctgaagggactgagttgcctggttagctatcaggatgaccctctgaccaaaggggtggacctacgcaacgcccaggtcacagagttgctacagcgtctgctccacagagcctttgtggtagaaacccagccctgcatgccccaaactccccatcgacccctcatcctcaagactggcagcaagttcaccgtccgaacaaggctgctggtgagactccaggaaggcaatgagtcactgactgtggaagtctccattgacaggaatcctcctcaattacaaggcttccggaagttcaacattctgacttcaaaccagaaaactttgacccccgagaaggggcagagtcagggtttgatttgggactttggttacctgactctggtggagcaacgttcaggtggttcaggaaagggcagcaataaggggccactaggtgtgacagaggaactgcacatcatcagcttcacggtcaaatatacctaccagggtctgaagcaggagctgaaagtgagtgaaaatggagggcaaggagagagaaagcagctttggaagaaggcataagaaggggataaacagaagcctcttggggtgggttagcactcctttcctctaacaaatacctgcagctagaaacatcacatccctctctgtgactcctgtcttctccccagacggacaccctccctgtggtgattatttccaacatgaaccagctctcaattgcctgggcttcagttctctggttcaatttgctcagcccaaaccttcaggtaggggagtggggccgacaggtcaaggcgcgagaggaggggtgtggaagcttggtgtgataggttgcttctgagccagcctacactgctcccacccctgcagaaccagcagttcttctccaacccccccaaggccccctggagcttgctgggccctgctctcagttggcagttctcctcctatgttggccgaggcctcaactcagaccagctgagcatgctgagaaacaagctgttcggtacagatttccttttctctcagcctttccccagccttagtcttttctgtccctctgtcctatctatcccaggacccctggcttccctcatcatctgtctgtggctatctgtcccacagggcagaactgtaggactgaggatccattattgtcctgggctgacttcactaaggtaactccctgaatcctgtggagctgctggatctagcccacattccaaatactggcacgttttctggaactagcagtacaatcaagcagacatcctctan

SEQ ID NO: 383334 - DNA, 2333 bp, Homo sapiens
  misc_feature (2098)..(2098): n is a, c, g, or t
  misc_feature (2100)..(2100): n is a, c, g, or t
  misc_feature (2120)..(2120): n is a, c, g, or t
  misc_feature (2125)..(2126): n is a, c, g, or t
  misc_feature (2132)..(2132): n is a, c, g, or t
  misc_feature (2143)..(2145): n is a, c, g, or t
  misc_feature (2148)..(2150): n is a, c, g, or t
acccgagctcatactagggacgggaagtcgcgaccagagccattggagggcgcggggactgcaaccctaatcagagcccaaatggcgcagtgggaaatgctgcagaatcttgacagcccctttcaggatcagctgcaccagctttactcgcacagcctcctgcctgtggacattcgacagtacttggctgtctggattgaagaccagaactggcaggaagctgcacttgggagtgatgattccaaggctaccatgctattcttccacttcttggatcagctgaactatgagtgtggccgttgcagccaggacccagagtccttgttgctgcagcacaatttgcggaaattctgccgggacattcagcccttttcccaggatcctacccagttggctgagatgatctttaacctccttctggaagaaaaaagaattttgatccaggctcagagggcccaattggaacaaggagagccagttctcgaaacacctgtggagagccagcaacatgagattgaatcccggatcctggatttaagggctatgatggaggttagtagatgtggtaggagttagggttgacagcgttcagcctaacacctccctgagaagcagcctcatcggggtcctctcccctctgcagaagctggtaaaatccatcagccaactgaaagaccagcaggatgtcttctgcttccgatataagatccaggccaaaggtaggaagcacattgaggggctggagaaagataagtgcctgctgagaagccggagctggaagtgaacaggagaaagctccgatgagcagtagtcactgtcagacacaccccactgactacagtcctgctgccgtgcaaagctggaagtgctttgtggaggctgagctggaggtgcagctgagagacagtaaatgttgaggaaatgcatggaaaactaacagtgttttatttgagggggtgtctggtccaagcatgaccattcagaatttgcctgagggtcccacaggtgcctgtgctttgcttggtttccctttcttcctccacaaaattcctccttcctgactctgactgagaccccagtcaggaaggagaggaaagaacccctggactgactcctgttcccaccatccagggaagacaccctctctggacccccatcagaccaaagagcagaagattctgcaggaaactctcaatgaactggacaaaaggagaaaggaggtgctggatgcctccaaagcactgctaggccgattaactaccctaatcgagctactgctgccaaagttggaggagtggaaggcccagcagcaaaaagcctgcatcagagctcccattgaccacgggttggaacagctggagacatggttcacagctggagcaaagctgttgtttcacctgaggcagctgctgaaggagctgaagggactgagttgcctggttagctatcaggatgaccctctgaccaaaggggtggacctacgcaacgcccaggtcacagagttgctacagcgtctgctccacagagcctttgtggtagaaacccagccctgcatgccccaaactccccatcgacccctcatcctcaagactggcagcaagttcaccgtccgaacaaggctgctggtgagactccaggaaggcaatgagtcactgactgtggaagtctccattgacaggaatcctcctcaattacaagggtaggtgcttgacaaggacactgcaaacatctgtacagtgtatgacctgcagaaccacattcggcagccctggtggcacaaacaaggaagagggggatttgggatatggacaaagggagatggcgagatctgaaatgaagtggaacttctgtttttttttttctgctgagtttttagaataattccattccttgtctccatgtatcttcctcctggaacagcttccggaagttcaacattctgacttcaaaccagaaaactttgacccccgagaaggggcagagtcagggtttgatttgggactttggttacctgactctggtggagcaacgttcaggtggttcaggaaagggcagcaataaggggccactaggtgtgacagaggaactgcagtgagcngngatcatgccattgcactccngcctnngtgacngagcaagactnnntannnaataataaggtaaaaggagtacctgtggatgaaagcagcagctaacagctctgtgattcagctagacctagatattgtgcccattccttcccctcagtccattttctgtagcccctttaaaaaccaaaaaacaactttgaagtcactttgggtttaaaataaatagtggtaatttgtataatc

SEQ ID NO: 383335 - DNA, 1470 bp, Homo sapiens
acccgagctcatactagggacgggaagtcgcgaccagagccattggagggcgcggggactgcaaccctaatcagagcccaaatggcgcagtgggaaatgctgcagaatcttgacagcccctttcaggatcagctgcaccagctttactcgcacagcctcctgcctgtggacattcgacagtacttggctgtctggattgaagaccagaactggcaggaagctgcacttgggagtgatgattccaaggctaccatgctattcttccacttcttggatcagctgaactatgagtgtggccgttgcagccaggacccagagtccttgttgctgcagcacaatttgcggaaattctgccgggacattcagcccttttcccaggatcctacccagttggctgagatgatctttaacctccttctggaagaaaaaagaattttgatccaggctcagagggcccaattggaacaaggagagccagttctcgaaacacctgtggagagccagcaacatgagattgaatcccggatcctggatttaagggctatgatggaggttagtagatgtggtaggagttagggttgacagcgttcagcctaacacctccctgagaagcagcctcatcggggtcctctcccctctgcagaagctggtaaaatccatcagccaactgaaagaccagcaggatgtcttctgcttccgatataagatccaggccaaaggtaggaagcacattgaggggctggagaaagataagtgcctgctgagaagccggagctggaagtgaacaggagaaagctccgatgagcagtagtcactgtcagacacaccccactgactacagtcctgctgccgtgcaaagctggaagtgctttgtggaggctgagctggaggtgcagctgagagacagtaaatgttgaggaaatgcatggaaaactaacagtgttttatttgagggggtgtctggtccaagcatgaccattcagaatttgcctgagggtcccacaggtgcctgtgctttgcttggtttccctttcttcctccacaaaattcctccttcctgactctgactgagaccccagtcaggaaggagaggaaagaacccctggactgactcctgttcccaccatccagggaagacaccctctctggacccccatcagaccaaagagcagaagattctgcaggaaactctcaatgaactggacaaaaggagaaaggaggtgctggatgcctccaaagcactgctaggccgattaactaccctaatcgagctactgctgccaaagttggaggagtggaaggcccagcagcaaaaagcctgcatcagagctcccattgaccacgggttggaacagctggagacatggtgagaggtaccaccccaaccctcgtcctcgccatgcgctgtgatttgtaagttgcagtgccctgcatatagcaagagatactgttctctattgtctctgctcc

SEQ ID NO: 383336 - DNA, 766 bp, Homo sapiens
tgagttgtacaatgagactgcctgggatcacatacaagcttcatcccttactagttgtatgaccttaagcaagtcacttaacctttctgtgcctcagttttatcatctgtaatgtggggaaaataatagtacctgcctcagagggttgttttgaggattaaatgcattaatatgtggaaagggcttaatataagttgtacatagcatatgaaaactgttatgttaaatctattagcagttttatatgtgaaaatagctttgattttcatttcttggattatgaatcatgttgaataatcctttatatgcttcctggattctttttttttcttccccccagtcagtttctgactcttcacatatttacagagagatcttggaacctggatgggggaatccaggaaactcatggattccttcttcctgaattttatcacccaggttcacagctggagcaaagctgttgtttcacctgaggcagctgctgaaggagctgaagggactgagttgcctggttagctatcaggatgaccctctgaccaaaggggtggacctacgcaacgcccaggtcacagagttgctacagcgtctgctccacaggtctagaggccaggcaggaaccctgggggaaagaaggaacaagggaagccattcttacagatactgagctatatattcttttcacacctctttctcctcagagcctttgtggtagaaacccagccctgcatgccccaaactccccatcgacccctcatcctcaaga

SEQ ID NO: 383337 - DNA, 362 bp, Homo sapiens
gaggatccattattgtcctgggctgacttcactaaggtaactccctgaatcctgtggagctgctggatctagcccacattccaaatactggccttcccacgtccctccttccctacaccagaggcaactcctcagcttttgctacctttccattcctcctccagcgagagagccctcctggcaagttaccattctggacatggctggacaaaattctggagttggtacatgaccacctgaaggatctctggaatgatgggtaaggccttggtcacccttccctcatgggcttgtgctttccgggcttgagagtggagtctctgcaccctcacgtggcaagcagggagagagagcaaagacag

SEQ ID NO: 383338 - DNA, 4026 bp, Homo sapiens
acccgagctcatactagggacgggaagtcgcgaccagagccattggagggcgcggggactgcaaccctaatcagagcccaaatggcgcagtgggaaatgctgcagaatcttgacagcccctttcaggatcagctgcaccagctttactcgcacagcctcctgcctgtggacattcgacagtacttggctgtctggattgaagaccagaactggcaggaagctgcacttgggagtgatgattccaaggctaccatgctattcttccacttcttggatcagctgaactatgagtgtggccgttgcagccaggacccagagtccttgttgctgcagcacaatttgcggaaattctgccgggacattcagcccttttcccaggatcctacccagttggctgagatgatctttaacctccttctggaagaaaaaagaattttgatccaggctcagagggcccaattggaacaaggagagccagttctcgaaacacctgtggagagccagcaacatgagattgaatcccggatcctggatttaagggctatgatggagaagctggtaaaatccatcagccaactgaaagaccagcaggatgtcttctgcttccgatataagatccaggccaaagggaagacaccctctctggacccccatcagaccaaagagcagaagattctgcaggaaactctcaatgaactggacaaaaggagaaaggaggtgctggatgcctccaaagcactgctaggccgattaactaccctaatcgagctactgctgccaaagttggaggagtggaaggcccagcagcaaaaagcctgcatcagagctcccattgaccacgggttggaacagctggagacatggttcacagctggagcaaagctgttgtttcacctgaggcagctgctgaaggagctgaagggactgagttgcctggttagctatcaggatgaccctctgaccaaaggggtggacctacgcaacgcccaggtcacagagttgctacagcgtctgctccacagagcctttgtggtagaaacccagccctgcatgccccaaactccccatcgacccctcatcctcaagactggcagcaagttcaccgtccgaacaaggctgctggtgagactccaggaaggcaatgagtcactgactgtggaagtctccattgacaggaatcctcctcaattacaaggcttccggaagttcaacattctgacttcaaaccagaaaactttgacccccgagaaggggcagagtcagggtttgatttgggactttggttacctgactctggtggagcaacgttcaggtggttcaggaaagggcagcaataaggggccactaggtgtgacagaggaactgcacatcatcagcttcacggtcaaatatacctaccagggtctgaagcaggagctgaaaacggacaccctccctgtggtgattatttccaacatgaaccagctctcaattgcctgggcttcagttctctggttcaatttgctcagcccaaaccttcagaaccagcagttcttctccaacccccccaaggccccctggagcttgctgggccctgctctcagttggcagttctcctcctatgttggccgaggcctcaactcagaccagctgagcatgctgagaaacaagctgttcgggcagaactgtaggactgaggatccattattgtcctgggctgacttcactaagcgagagagccctcctggcaagttaccattctggacatggctggacaaaattctggagttggtacatgaccacctgaaggatctctggaatgatggacgcatcatgggctttgtgagtcggagccaggagcgccggctgctgaagaagaccatgtctggcacctttctactgcgcttcagtgaatcgtcagaagggggcattacctgctcctgggtggagcaccaggatgatgacaaggtgctcatctactctgtgcaaccgtacacgaaggaggtgctgcagtcactcccgctgactgaaatcatccgccattaccagttgctcactgaggagaatatacctgaaaacccactgcgcttcctctatccccgaatcccccgggatgaagcttttgggtgctactaccaggagaaagttaatctccaggaacggaggaaatacctgaaacacaggctcattgtggtctctaatagacaggtggatgaactgcaacaaccgctggagcttaagccagagccagagctggagtcattagagctggaactagggctggtgccagagccagagctcagcctggacttagagccactgctgaaggcagggctggatctggggccagagctagagtctgtgctggagtccactctggagcctgtgatagagcccacactatgcatggtatcacaaacagtgccagagccagaccaaggacctgtatcacagccagtgccagagccagatttgccctgtgatctgagacatttgaacactgagccaatggaaatcttcagaaactgtgtaaagattgaagaaatcatgccgaatggtgacccactgttggctggccagaacaccgtggatgaggtttacgtctcccgccccagccacttctacactgatggacccttgatgccttctgacttctaggaaccacatttcctctgttcttttcatatctcttgcccttcctactcctcatagcatgatattgttctccaaggatgggaatcaggcatgtgtcccttccaagctgtgttaactgttcaaactcaggcctgtgtgactccattggggtgagaggtgaaagcataacatgggtacagaggggacaacaatgaatcagaacagatgctgagccataggtctaaataggatcctggaggctgcctgctgtgctgggaggtataggggtcctgggggcaggccagggcagttgacaggtacttggagggctcagggcagtggcttctttccagtatggaaggatttcaacattttaatagttggttaggctaaactggtgcatactggcattggcccttggtggggagcacagacacaggataggactccatttctttcttccattccttcatgtctaggataacttgctttcttctttcctttactcctggctcaagccctgaatttcttcttttcctgcaggggttgagagctttctgccttagcctaccatgtgaaactctaccctgaagaaagggatggataggaagtagacctctttttcttaccagtctcctcccctactctgcccctaagctggctgtacctgttcctcccccataaaatgatcctgccaatctaatgtgagtgtgaagctttgcacactagtttatgctacctagtctccactttctcggctcactgcaacctccgccttccgggttcaagtgactctcctgcctcagcctccccagtagctgggattacagatctgcaccaccatgcccagctaattttgtatttttagtagagacggggtttctccatgttggtcaggctggtctcgaactcctgacctcaagtgatctgtccacctcggcctcccagagtgctgggattacaggcgtgagccactgttcccagcaggaatttcttttttatagtattggataaagtttggtgtttttacagaggagaagcaatgggtcttagctctttctctattatgttatcatcctcccttttttgtacaatatgttgtttacctgaaaggaaggtttctattcgttggttgtggacctggacaaagtccaagtctgtggaacttaaaaccttgaaggtctgtcataggactctggacaatctcacaccttagctattcccagggaaccccagggggcaactgacattgctccaagatgttctcctgatgtagcttgagatataaaggaaaggccctgcacaggtggctgtttcttgtctgttatgtcagaggaacagtcctgttcagaaaggggctcttctgagcagaaatggctaataaactttgtgctgatctggaaaaaaaaaaac

SEQ ID NO: 383339 - DNA, 3492 bp, Homo sapiens
acccgagctcatactagggacgggaagtcgcgaccagagccattggagggcgcggggactgcaaccctaatcagagcccaaatggcgcagtgggaaatgctgcagaatcttgacagcccctttcaggatcagctgcaccagctttactcgcacagcctcctgcctgtggacattcgacagtacttggctgtctggattgaagaccagaactggcaggaagctgcacttgggagtgatgattccaaggctaccatgctattcttccacttcttggatcagctgaactatgagtgtggccgttgcagccaggacccagagtccttgttgctgcagcacaatttgcggaaattctgccgggacattcagcccttttcccaggatcctacccagttggctgagatgatctttaacctccttctggaagaaaaaagaattttgatccaggctcagagggcccaattggaacaaggagagccagttctcgaaacacctgtggagagccagcaacatgagattgaatcccggatcctggatttaagggctatgatggagaagctggtaaaatccatcagccaactgaaagaccagcaggatgtcttctgcttccgatataagatccaggccaaagggaagacaccctctctggacccccatcagaccaaagagcagaagattctgcaggaaactctcaatgaactggacaaaaggagaaaggaggtgctggatgcctccaaagcactgctaggccgattaactaccctaatcgagctactgctgccaaagttggaggagtggaaggcccagcagcaaaaagcctgcatcagagctcccattgaccacgggttggaacagctggagacatggttcacagctggagcaaagctgttgtttcacctgaggcagctgctgaaggagctgaagggactgagttgcctggttagctatcaggatgaccctctgaccaaaggggtggacctacgcaacgcccaggtcacagagttgctacagcgtctgctccacagagcctttgtggtagaaacccagccctgcatgccccaaactccccatcgacccctcatcctcaagactggcagcaagttcaccgtccgaacaaggctgctggtgagactccaggaaggcaatgagtcactgactgtggaagtctccattgacaggaatcctcctcaattacaaggcttccggaagttcaacattctgacttcaaaccagaaaactttgacccccgagaaggggcagagtcagggtttgatttgggactttggttacctgactctggtggagcaacgttcaggtggttcaggaaagggcagcaataaggggccactaggtgtgacagaggaactgcacatcatcagcttcacggtcaaatatacctaccagggtctgaagcaggagctgaaaacggacaccctccctgtggtgattatttccaacatgaaccagctctcaattgcctgggcttcagttctctggttcaatttgctcagcccaaaccttcagaaccagcagttcttctccaacccccccaaggccccctggagcttgctgggccctgctctcagttggcagttctcctcctatgttggccgaggcctcaactcagaccagctgagcatgctgagaaacaagctgttcgggcagaactgtaggactgaggatccattattgtcctgggctgacttcactaagcgagagagccctcctggcaagttaccattctggacatggctggacaaaattctggagttggtacatgaccacctgaaggatctctggaatgatggacgcatcatgggctttgtgagtcggagccaggagcgccggctgctgaagaagaccatgtctggcacctttctactgcgcttcagtgaatcgtcagaagggggcattacctgctcctgggtggagcaccaggatgatgacaaggtgctcatctactctgtgcaaccgtacacgaaggaggtgctgcagtcactcccgctgactgaaatcatccgccattaccagttgctcactgaggagaatatacctgaaaacccactgcgcttcctctatccccgaatcccccgggatgaagcttttgggtgctactaccaggagaaagttaatctccaggaacggaggaaatacctgaaacacaggctcattgtggtctctaatagacaggtggatgaactgcaacaaccgctggagcttaagccagagccagagctggagtcattagagctggaactagggctggtgccagagccagagctcagcctggacttagagccactgctgaaggcagggctggatctggggccagagctagagtctgtgctggagtccactctggagcctgtgatagagcccacactatgcatggtatcacaaacagtgccagagccagaccaaggacctgtatcacagccagtgccagagccagatttgccctgtgatctgagacatttgaacactgagccaatggaaatcttcagaaactgtgtaaagattgaagaaatcatgccgaatggtgacccactgttggctggccagaacaccgtggatgaggtttacgtctcccgccccagccacttctacactgatggacccttgatgccttctgacttctaggaaccacatttcctctgttcttttcatatctcttgcccttcctactcctcatagcatgatattgttctccaaggatgggaatcaggcatgtgtcccttccaagctgtgttaactgttcaaactcaggcctgtgtgactccattggggtgagaggtgaaagcataacatgggtacagaggggacaacaatgaatcagaacagatgctgagccataggtctaaataggatcctggaggctgcctgctgtgctgggaggtataggggtcctgggggcaggccagggcagttgacaggtacttggagggctcagggcagtggcttctttccagtatggaaggatttcaacattttaatagttggttaggctaaactggtgcatactggcattggcccttggtggggagcacagacacaggataggactccatttctttcttccattccttcatgtctaggataacttgctttcttctttcctttactcctggctcaagccctgaatttcttcttttcctgcaggggttgagagctttctgccttagcctaccatgtgaaactctaccctgaagaaagggatggataggaagtagacctctttttcttaccagtctcctcccctactctgcccctaagctggctgtacctgttcctcccccataaaatgatcctgccaatctaatgtgagtgtgaagctttgcacactagtttatgctacctagtctccactttctcaatgcttaggagacagatcactcctggaggctggggatggtaggattgctggggatttttttttttttaaacagggtctcactctgttgcccaggctagagagaccctgtttaaaaaaaaaaa

SEQ ID NO: 383340 - DNA, 4937 bp, Homo sapiens
acccgagctcatactagggacgggaagtcgcgaccagagccattggagggcgcggggactgcaaccctaatcagagcccaaatggcgcagtgggaaatgctgcagaatcttgacagcccctttcaggatcagctgcaccagctttactcgcacagcctcctgcctgtggacattcgacagtacttggctgtctggattgaagaccagaactggcaggaagctgcacttgggagtgatgattccaaggctaccatgctattcttccacttcttggatcagctgaactatgagtgtggccgttgcagccaggacccagagtccttgttgctgcagcacaatttgcggaaattctgccgggacattcagcccttttcccaggatcctacccagttggctgagatgatctttaacctccttctggaagaaaaaagaattttgatccaggctcagagggcccaattggaacaaggagagccagttctcgaaacacctgtggagagccagcaacatgagattgaatcccggatcctggatttaagggctatgatggaggttagtagatgtggtaggagttagggttgacagcgttcagcctaacacctccctgagaagcagcctcatcggggtcctctcccctctgcagaagctggtaaaatccatcagccaactgaaagaccagcaggatgtcttctgcttccgatataagatccaggccaaaggtaggaagcacattgaggggctggagaaagataagtgcctgctgagaagccggagctggaagtgaacaggagaaagctccgatgagcagtagtcactgtcagacacaccccactgactacagtcctgctgccgtgcaaagctggaagtgctttgtggaggctgagctggaggtgcagctgagagacagtaaatgttgaggaaatgcatggaaaactaacagtgttttatttgagggggtgtctggtccaagcatgaccattcagaatttgcctgagggtcccacaggtgcctgtgctttgcttggtttccctttcttcctccacaaaattcctccttcctgactctgactgagaccccagtcaggaaggagaggaaagaacccctggactgactcctgttcccaccatccagggaagacaccctctctggacccccatcagaccaaagagcagaagattctgcaggaaactctcaatgaactggacaaaaggagaaaggaggtgctggatgcctccaaagcactgctaggccgattaactaccctaatcgagctactgctgccaaagttggaggagtggaaggcccagcagcaaaaagcctgcatcagagctcccattgaccacgggttggaacagctggagacatggttcacagctggagcaaagctgttgtttcacctgaggcagctgctgaaggagctgaagggactgagttgcctggttagctatcaggatgaccctctgaccaaaggggtggacctacgcaacgcccaggtcacagagttgctacagcgtctgctccacagagcctttgtggtagaaacccagccctgcatgccccaaactccccatcgacccctcatcctcaagactggcagcaagttcaccgtccgaacaaggctgctggtgagactccaggaaggcaatgagtcactgactgtggaagtctccattgacaggaatcctcctcaattacaaggcttccggaagttcaacattctgacttcaaaccagaaaactttgacccccgagaaggggcagagtcagggtttgatttgggactttggttacctgactctggtggagcaacgttcaggtggttcaggaaagggcagcaataaggggccactaggtgtgacagaggaactgcacatcatcagcttcacggtcaaatatacctaccagggtctgaagcaggagctgaaaacggacaccctccctgtggtgattatttccaacatgaaccagctctcaattgcctgggcttcagttctctggttcaatttgctcagcccaaaccttcagaaccagcagttcttctccaacccccccaaggccccctggagcttgctgggccctgctctcagttggcagttctcctcctatgttggccgaggcctcaactcagaccagctgagcatgctgagaaacaagctgttcgggcagaactgtaggactgaggatccattattgtcctgggctgacttcactaagcgagagagccctcctggcaagttaccattctggacatggctggacaaaattctggagttggtacatgaccacctgaaggatctctggaatgatggacgcatcatgggctttgtgagtcggagccaggagcgccggctgctgaagaagaccatgtctggcacctttctactgcgcttcagtgaatcgtcagaagggggcattacctgctcctgggtggagcaccaggatgatgacaaggtgctcatctactctgtgcaaccgtacacgaaggaggtgctgcagtcactcccgctgactgaaatcatccgccattaccagttgctcactgaggagaatatacctgaaaacccactgcgcttcctctatccccgaatcccccgggatgaagcttttgggtgctactaccaggagaaagttaatctccaggaacggaggaaatacctgaaacacaggctcattgtggtctctaatagacaggtggatgaactgcaacaaccgctggagcttaagccagagccagagctggagtcattagagctggaactagggctggtgccagagccagagctcagcctggacttagagccactgctgaaggcagggctggatctggggccagagctagagtctgtgctggagtccactctggagcctgtgatagagcccacactatgcatggtatcacaaacagtgccagagccagaccaaggacctgtatcacagccagtgccagagccagatttgccctgtgatctgagacatttgaacactgagccaatggaaatcttcagaaactgtgtaaagattgaagaaatcatgccgaatggtgacccactgttggctggccagaacaccgtggatgaggtttacgtctcccgccccagccacttctacactgatggacccttgatgccttctgacttctaggaaccacatttcctctgttcttttcatatctcttgcccttcctactcctcatagcatgatattgttctccaaggatgggaatcaggcatgtgtcccttccaagctgtgttaactgttcaaactcaggcctgtgtgactccattggggtgagaggtgaaagcataacatgggtacagaggggacaacaatgaatcagaacagatgctgagccataggtctaaataggatcctggaggctgcctgctgtgctgggaggtataggggtcctgggggcaggccagggcagttgacaggtacttggagggctcagggcagtggcttctttccagtatggaaggatttcaacattttaatagttggttaggctaaactggtgcatactggcattggcccttggtggggagcacagacacaggataggactccatttctttcttccattccttcatgtctaggataacttgctttcttctttcctttactcctggctcaagccctgaatttcttcttttcctgcaggggttgagagctttctgccttagcctaccatgtgaaactctaccctgaagaaagggatggataggaagtagacctctttttcttaccagtctcctcccctactctgcccctaagctggctgtacctgttcctcccccataaaatgatcctgccaatctaatgtgagtgtgaagctttgcacactagtttatgctacctagtctccactttctcaatgcttaggagacagatcactcctggaggctggggatggtaggattgctggggatttttttttttttaaacagggtctcactctgttgcccaggctagagtgcaatggtgcaatcacagctcactgcagcctcaacctcctgggttcaagcaatcctcctacctcagcctcctgggtagctagcaccatggcatgcgccaccatgccctattttttttttttaaagacagggtcttgctatattgcccaggctggtcttgaacggggctcaagtgatcctcacgccttggcctcccaaagtgctgggattataggcatgacgccactgtgcttggcccaggatttttttttttttgagatggagtttctctcttgttgtccaggctggagtgcaatggtgtgatctcggctcactgcaacctccgccttccgggttcaagtgactctcctgcctcagcctccccagtagctgggattacagatctgcaccaccatgcccagctaattttgtatttttagtagagacggggtttctccatgttggtcaggctggtctcgaactcctgacctcaagtgatctgtccacctcggcctcccagagtgctgggattacaggcgtgagccactgttcccagcaggaatttcttttttatagtattggataaagtttggtgtttttacagaggagaagcaatgggtcttagctctttctctattatgttatcatcctcccttttttgtacaatatgttgtttacctgaaaggaaggtttctattcgttggttgtggacctggacaaagtccaagtctgtggaacttaaaaccttgaaggtctgtcataggactctggacaatctcacaccttagctattcccagggaaccccagggggcaactgacattgctccaagatgttctcctgatgtagcttgagatataaaggaaaggccctgcacaggtggctgtttcttgtctgttatgtcagaggaacagtcctgttcagaaaggggctcttctgagcagaaatggctaataaactttgtgctgatctggaaaaaaaaaaac

SEQ ID NO: 383341 - DNA, 5323 bp, Homo sapiens
acccgagctcatactagggacgggaagtcgcgaccagagccattggagggcgcggggactgcaaccctaatcagagcccaaatggcgcagtgggaaatgctgcagaatcttgacagcccctttcaggatcagctgcaccagctttactcgcacagcctcctgcctgtggacattcgacagtacttggctgtctggattgaagaccagaactggcaggaagctgcacttgggagtgatgattccaaggctaccatgctattcttccacttcttggatcagctgaactatgagtgtggccgttgcagccaggacccagagtccttgttgctgcagcacaatttgcggaaattctgccgggacattcagcccttttcccaggatcctacccagttggctgagatgatctttaacctccttctggaagaaaaaagaattttgatccaggctcagagggcccaattggaacaaggagagccagttctcgaaacacctgtggagagccagcaacatgagattgaatcccggatcctggatttaagggctatgatggaggttagtagatgtggtaggagttagggttgacagcgttcagcctaacacctccctgagaagcagcctcatcggggtcctctcccctctgcagaagctggtaaaatccatcagccaactgaaagaccagcaggatgtcttctgcttccgatataagatccaggccaaaggtaggaagcacattgaggggctggagaaagataagtgcctgctgagaagccggagctggaagtgaacaggagaaagctccgatgagcagtagtcactgtcagacacaccccactgactacagtcctgctgccgtgcaaagctggaagtgctttgtggaggctgagctggaggtgcagctgagagacagtaaatgttgaggaaatgcatggaaaactaacagtgttttatttgagggggtgtctggtccaagcatgaccattcagaatttgcctgagggtcccacaggtgcctgtgctttgcttggtttccctttcttcctccacaaaattcctccttcctgactctgactgagaccccagtcaggaaggagaggaaagaacccctggactgactcctgttcccaccatccagggaagacaccctctctggacccccatcagaccaaagagcagaagattctgcaggaaactctcaatgaactggacaaaaggagaaaggaggtgctggatgcctccaaagcactgctaggccgattaactaccctaatcgagctactgctgccaaagttggaggagtggaaggcccagcagcaaaaagcctgcatcagagctcccattgaccacgggttggaacagctggagacatggttcacagctggagcaaagctgttgtttcacctgaggcagctgctgaaggagctgaagggactgagttgcctggttagctatcaggatgaccctctgaccaaaggggtggacctacgcaacgcccaggtcacagagttgctacagcgtctgctccacagagcctttgtggtagaaacccagccctgcatgccccaaactccccatcgacccctcatcctcaagactggcagcaagttcaccgtccgaacaaggctgctggtgagactccaggaaggcaatgagtcactgactgtggaagtctccattgacaggaatcctcctcaattacaaggcttccggaagttcaacattctgacttcaaaccagaaaactttgacccccgagaaggggcagagtcagggtttgatttgggactttggttacctgactctggtggagcaacgttcaggtggttcaggaaagggcagcaataaggggccactaggtgtgacagaggaactgcacatcatcagcttcacggtcaaatatacctaccagggtctgaagcaggagctgaaagtgagtgaaaatggagggcaaggagagagaaagcagctttggaagaaggcataagaaggggataaacagaagcctcttggggtgggttagcactcctttcctctaacaaatacctgcagctagaaacatcacatccctctctgtgactcctgtcttctccccagacggacaccctccctgtggtgattatttccaacatgaaccagctctcaattgcctgggcttcagttctctggttcaatttgctcagcccaaaccttcaggtaggggagtggggccgacaggtcaaggcgcgagaggaggggtgtggaagcttggtgtgataggttgcttctgagccagcctacactgctcccacccctgcagaaccagcagttcttctccaacccccccaaggccccctggagcttgctgggccctgctctcagttggcagttctcctcctatgttggccgaggcctcaactcagaccagctgagcatgctgagaaacaagctgttcggtacagatttccttttctctcagcctttccccagccttagtcttttctgtccctctgtcctatctatcccaggacccctggcttccctcatcatctgtctgtggctatctgtcccacagggcagaactgtaggactgaggatccattattgtcctgggctgacttcactaagcgagagagccctcctggcaagttaccattctggacatggctggacaaaattctggagttggtacatgaccacctgaaggatctctggaatgatggacgcatcatgggctttgtgagtcggagccaggagcgccggctgctgaagaagaccatgtctggcacctttctactgcgcttcagtgaatcgtcagaagggggcattacctgctcctgggtggagcaccaggatgatgacaaggtgctcatctactctgtgcaaccgtacacgaaggaggtgctgcagtcactcccgctgactgaaatcatccgccattaccagttgctcactgaggagaatatacctgaaaacccactgcgcttcctctatccccgaatcccccgggatgaagcttttgggtgctactaccaggagaaagttaatctccaggaacggaggaaatacctgaaacacaggctcattgtggtctctaatagacaggtggatgaactgcaacaaccgctggagcttaagccagagccagagctggagtcattagagctggaactagggctggtgccagagccagagctcagcctggacttagagccactgctgaaggcagggctggatctggggccagagctagagtctgtgctggagtccactctggagcctgtgatagagcccacactatgcatggtatcacaaacagtgccagagccagaccaaggacctgtatcacagccagtgccagagccagatttgccctgtgatctgagacatttgaacactgagccaatggaaatcttcagaaactgtgtaaagattgaagaaatcatgccgaatggtgacccactgttggctggccagaacaccgtggatgaggtttacgtctcccgccccagccacttctacactgatggacccttgatgccttctgacttctaggaaccacatttcctctgttcttttcatatctcttgcccttcctactcctcatagcatgatattgttctccaaggatgggaatcaggcatgtgtcccttccaagctgtgttaactgttcaaactcaggcctgtgtgactccattggggtgagaggtgaaagcataacatgggtacagaggggacaacaatgaatcagaacagatgctgagccataggtctaaataggatcctggaggctgcctgctgtgctgggaggtataggggtcctgggggcaggccagggcagttgacaggtacttggagggctcagggcagtggcttctttccagtatggaaggatttcaacattttaatagttggttaggctaaactggtgcatactggcattggcccttggtggggagcacagacacaggataggactccatttctttcttccattccttcatgtctaggataacttgctttcttctttcctttactcctggctcaagccctgaatttcttcttttcctgcaggggttgagagctttctgccttagcctaccatgtgaaactctaccctgaagaaagggatggataggaagtagacctctttttcttaccagtctcctcccctactctgcccctaagctggctgtacctgttcctcccccataaaatgatcctgccaatctaatgtgagtgtgaagctttgcacactagtttatgctacctagtctccactttctcaatgcttaggagacagatcactcctggaggctggggatggtaggattgctggggatttttttttttttaaacagggtctcactctgttgcccaggctagagtgcaatggtgcaatcacagctcactgcagcctcaacctcctgggttcaagcaatcctcctacctcagcctcctgggtagctagcaccatggcatgcgccaccatgccctattttttttttttaaagacagggtcttgctatattgcccaggctggtcttgaacggggctcaagtgatcctcacgccttggcctcccaaagtgctgggattataggcatgacgccactgtgcttggcccaggatttttttttttttgagatggagtttctctcttgttgtccaggctggagtgcaatggtgtgatctcggctcactgcaacctccgccttccgggttcaagtgactctcctgcctcagcctccccagtagctgggattacagatctgcaccaccatgcccagctaattttgtatttttagtagagacggggtttctccatgttggtcaggctggtctcgaactcctgacctcaagtgatctgtccacctcggcctcccagagtgctgggattacaggcgtgagccactgttcccagcaggaatttcttttttatagtattggataaagtttggtgtttttacagaggagaagcaatgggtcttagctctttctctattatgttatcatcctcccttttttgtacaatatgttgtttacctgaaaggaaggtttctattcgttggttgtggacctggacaaagtccaagtctgtggaacttaaaaccttgaaggtctgtcataggactctggacaatctcacaccttagctattcccagggaaccccagggggcaactgacattgctccaagatgttctcctgatgtagcttgagatataaaggaaaggccctgcacaggtggctgtttcttgtctgttatgtcagaggaacagtcctgttcagaaaggggctcttctgagcagaaatggctaataaactttgtgctgatctggaaaaaaaaaaac

SEQ ID NO: 383342 - DNA, 3568 bp, Homo sapiens
tccgcagcaagttcaccgtccgaacaaggctgctggtgagactccaggaaggcaatgagtcactgactgtggaagtctccattgacaggaatcctcctcaattacaagggtaggtgcttgacaaggacactgcaaacatctgtacagtgtatgacctgcagaaccacattcggcagccctggtggcacaaacaaggaagagggggatttgggatatggacaaagggagatggcgagatctgaaatgaagtggaacttctgtttttttttttctgctgagtttttagaataattccattccttgtctccatgtatcttcctcctggaacagcttccggaagttcaacattctgacttcaaaccagaaaactttgacccccgagaaggggcagagtcagggtttgatttgggactttggttacctgactctggtggagcaacgttcaggtggttcaggaaagggcagcaataaggggccactaggtgtgacagaggaactgcacatcatcagcttcacggtcaaatatacctaccagggtctgaagcaggagctgaaaacggacaccctccctgtggtgattatttccaacatgaaccagctctcaattgcctgggcttcagttctctggttcaatttgctcagcccaaaccttcagaaccagcagttcttctccaacccccccaaggccccctggagcttgctgggccctgctctcagttggcagttctcctcctatgttggccgaggcctcaactcagaccagctgagcatgctgagaaacaagctgttcgggcagaactgtaggactgaggatccattattgtcctgggctgacttcactaagcgagagagccctcctggcaagttaccattctggacatggctggacaaaattctggagttggtacatgaccacctgaaggatctctggaatgatggacgcatcatgggctttgtgagtcggagccaggagcgccggctgctgaagaagaccatgtctggcacctttctactgcgcttcagtgaatcgtcagaagggggcattacctgctcctgggtggagcaccaggatgatgacaaggtgctcatctactctgtgcaaccgtacacgaaggaggtgctgcagtcactcccgctgactgaaatcatccgccattaccagttgctcactgaggagaatatacctgaaaacccactgcgcttcctctatccccgaatcccccgggatgaagcttttgggtgctactaccaggagaaagttaatctccaggaacggaggaaatacctgaaacacaggctcattgtggtctctaatagacaggtggatgaactgcaacaaccgctggagcttaagccagagccagagctggagtcattagagctggaactagggctggtgccagagccagagctcagcctggacttagagccactgctgaaggcagggctggatctggggccagagctagagtctgtgctggagtccactctggagcctgtgatagagcccacactatgcatggtatcacaaacagtgccagagccagaccaaggacctgtatcacagccagtgccagagccagatttgccctgtgatctgagacatttgaacactgagccaatggaaatcttcagaaactgtgtaaagattgaagaaatcatgccgaatggtgacccactgttggctggccagaacaccgtggatgaggtttacgtctcccgccccagccacttctacactgatggacccttgatgccttctgacttctaggaaccacatttcctctgttcttttcatatctcttgcccttcctactcctcatagcatgatattgttctccaaggatgggaatcaggcatgtgtcccttccaagctgtgttaactgttcaaactcaggcctgtgtgactccattggggtgagaggtgaaagcataacatgggtacagaggggacaacaatgaatcagaacagatgctgagccataggtctaaataggatcctggaggctgcctgctgtgctgggaggtataggggtcctgggggcaggccagggcagttgacaggtacttggagggctcagggcagtggcttctttccagtatggaaggatttcaacattttaatagttggttaggctaaactggtgcatactggcattggcccttggtggggagcacagacacaggataggactccatttctttcttccattccttcatgtctaggataacttgctttcttctttcctttactcctggctcaagccctgaatttcttcttttcctgcaggggttgagagctttctgccttagcctaccatgtgaaactctaccctgaagaaagggatggataggaagtagacctctttttcttaccagtctcctcccctactctgcccctaagctggctgtacctgttcctcccccataaaatgatcctgccaatctaatgtgagtgtgaagctttgcacactagtttatgctacctagtctccactttctcaatgcttaggagacagatcactcctggaggctggggatggtaggattgctggggatttttttttttttaaacagggtctcactctgttgcccaggctagagtgcaatggtgcaatcacagctcactgcagcctcaacctcctgggttcaagcaatcctcctacctcagcctcctgggtagctagcaccatggcatgcgccaccatgccctattttttttttttaaagacagggtcttgctatattgcccaggctggtcttgaacggggctcaagtgatcctcacgccttggcctcccaaagtgctgggattataggcatgacgccactgtgcttggcccaggatttttttttttttgagatggagtttctctcttgttgtccaggctggagtgcaatggtgtgatctcggctcactgcaacctccgccttccgggttcaagtgactctcctgcctcagcctccccagtagctgggattacagatctgcaccaccatgcccagctaattttgtatttttagtagagacggggtttctccatgttggtcaggctggtctcgaactcctgacctcaagtgatctgtccacctcggcctcccagagtgctgggattacaggcgtgagccactgttcccagcaggaatttcttttttatagtattggataaagtttggtgtttttacagaggagaagcaatgggtcttagctctttctctattatgttatcatcctcccttttttgtacaatatgttgtttacctgaaaggaaggtttctattcgttggttgtggacctggacaaagtccaagtctgtggaacttaaaaccttgaaggtctgtcataggactctggacaatctcacaccttagctattcccagggaaccccagggggcaactgacattgctccaagatgttctcctgatgtagcttgagatataaaggaaaggccctgcacaggtggctgtttcttgtctgttatgtcagaggaacagtcctgttcagaaaggggctcttctgagcagaaatggctaataaactttgtgctgatctggaaaaaaaaaaac

SEQ ID NO: 383343 - DNA, 4783 bp, Homo sapiens
acccgagctcatactagggacgggaagtcgcgaccagagccattggagggcgcggggactgcaaccctaatcagagcccaaatggcgcagtgggaaatgctgcagaatcttgacagcccctttcaggatcagctgcaccagctttactcgcacagcctcctgcctgtggacattcgacagtacttggctgtctggattgaagaccagaactggcaggaagctgcacttgggagtgatgattccaaggctaccatgctattcttccacttcttggatcagctgaactatgagtgtggccgttgcagccaggacccagagtccttgttgctgcagcacaatttgcggaaattctgccgggacattcagcccttttcccaggatcctacccagttggctgagatgatctttaacctccttctggaagaaaaaagaattttgatccaggctcagagggcccaattggaacaaggagagccagttctcgaaacacctgtggagagccagcaacatgagattgaatcccggatcctggatttaagggctatgatggaggttagtagatgtggtaggagttagggttgacagcgttcagcctaacacctccctgagaagcagcctcatcggggtcctctcccctctgcagaagctggtaaaatccatcagccaactgaaagaccagcaggatgtcttctgcttccgatataagatccaggccaaaggtaggaagcacattgaggggctggagaaagataagtgcctgctgagaagccggagctggaagtgaacaggagaaagctccgatgagcagtagtcactgtcagacacaccccactgactacagtcctgctgccgtgcaaagctggaagtgctttgtggaggctgagctggaggtgcagctgagagacagtaaatgttgaggaaatgcatggaaaactaacagtgttttatttgagggggtgtctggtccaagcatgaccattcagaatttgcctgagggtcccacaggtgcctgtgctttgcttggtttccctttcttcctccacaaaattcctccttcctgactctgactgagaccccagtcaggaaggagaggaaagaacccctggactgactcctgttcccaccatccagggaagacaccctctctggacccccatcagaccaaagagcagaagattctgcaggaaactctcaatgaactggacaaaaggagaaaggaggtgctggatgcctccaaagcactgctaggccgattaactaccctaatcgagctactgctgccaaagttggaggagtggaaggcccagcagcaaaaagcctgcatcagagctcccattgaccacgggttggaacagctggagacatggttcacagctggagcaaagctgttgtttcacctgaggcagctgctgaaggagctgaagggactgagttgcctggttagctatcaggatgaccctctgaccaaaggggtggacctacgcaacgcccaggtcacagagttgctacagcgtctgctccacagagcctttgtggtagaaacccagccctgcatgccccaaactccccatcgacccctcatcctcaagactggcagcaagttcaccgtccgaacaaggctgctggtgagactccaggaaggcaatgagtcactgactgtggaagtctccattgacaggaatcctcctcaattacaaggcttccggaagttcaacattctgacttcaaaccagaaaactttgacccccgagaaggggcagagtcagggtttgatttgggactttggttacctgactctggtggagcaacgttcaggtggttcaggaaagggcagcaataaggggccactaggtgtgacagaggaactgcacatcatcagcttcacggtcaaatatacctaccagggtctgaagcaggagctgaaagtgagtgaaaatggagggcaaggagagagaaagcagctttggaagaaggcataagaaggggataaacagaagcctcttgggggcagaactgtaggactgaggatccattattgtcctgggctgacttcactaagcgagagagccctcctggcaagttaccattctggacatggctggacaaaattctggagttggtacatgaccacctgaaggatctctggaatgatggacgcatcatgggctttgtgagtcggagccaggagcgccggctgctgaagaagaccatgtctggcacctttctactgcgcttcagtgaatcgtcagaagggggcattacctgctcctgggtggagcaccaggatgatgacaaggtgctcatctactctgtgcaaccgtacacgaaggaggtgctgcagtcactcccgctgactgaaatcatccgccattaccagttgctcactgaggagaatatacctgaaaacccactgcgcttcctctatccccgaatcccccgggatgaagcttttgggtgctactaccaggagaaagttaatctccaggaacggaggaaatacctgaaacacaggctcattgtggtctctaatagacaggtggatgaactgcaacaaccgctggagcttaagccagagccagagctggagtcattagagctggaactagggctggtgccagagccagagctcagcctggacttagagccactgctgaaggcagggctggatctggggccagagctagagtctgtgctggagtccactctggagcctgtgatagagcccacactatgcatggtatcacaaacagtgccagagccagaccaaggacctgtatcacagccagtgccagagccagatttgccctgtgatctgagacatttgaacactgagccaatggaaatcttcagaaactgtgtaaagattgaagaaatcatgccgaatggtgacccactgttggctggccagaacaccgtggatgaggtttacgtctcccgccccagccacttctacactgatggacccttgatgccttctgacttctaggaaccacatttcctctgttcttttcatatctcttgcccttcctactcctcatagcatgatattgttctccaaggatgggaatcaggcatgtgtcccttccaagctgtgttaactgttcaaactcaggcctgtgtgactccattggggtgagaggtgaaagcataacatgggtacagaggggacaacaatgaatcagaacagatgctgagccataggtctaaataggatcctggaggctgcctgctgtgctgggaggtataggggtcctgggggcaggccagggcagttgacaggtacttggagggctcagggcagtggcttctttccagtatggaaggatttcaacattttaatagttggttaggctaaactggtgcatactggcattggcccttggtggggagcacagacacaggataggactccatttctttcttccattccttcatgtctaggataacttgctttcttctttcctttactcctggctcaagccctgaatttcttcttttcctgcaggggttgagagctttctgccttagcctaccatgtgaaactctaccctgaagaaagggatggataggaagtagacctctttttcttaccagtctcctcccctactctgcccctaagctggctgtacctgttcctcccccataaaatgatcctgccaatctaatgtgagtgtgaagctttgcacactagtttatgctacctagtctccactttctcaatgcttaggagacagatcactcctggaggctggggatggtaggattgctggggatttttttttttttaaacagggtctcactctgttgcccaggctagagtgcaatggtgcaatcacagctcactgcagcctcaacctcctgggttcaagcaatcctcctacctcagcctcctgggtagctagcaccatggcatgcgccaccatgccctattttttttttttaaagacagggtcttgctatattgcccaggctggtcttgaacggggctcaagtgatcctcacgccttggcctcccaaagtgctgggattataggcatgacgccactgtgcttggcccaggatttttttttttttgagatggagtttctctcttgttgtccaggctggagtgcaatggtgtgatctcggctcactgcaacctccgccttccgggttcaagtgactctcctgcctcagcctccccagtagctgggattacagatctgcaccaccatgcccagctaattttgtatttttagtagagacggggtttctccatgttggtcaggctggtctcgaactcctgacctcaagtgatctgtccacctcggcctcccagagtgctgggattacaggcgtgagccactgttcccagcaggaatttcttttttatagtattggataaagtttggtgtttttacagaggagaagcaatgggtcttagctctttctctattatgttatcatcctcccttttttgtacaatatgttgtttacctgaaaggaaggtttctattcgttggttgtggacctggacaaagtccaagtctgtggaacttaaaaccttgaaggtctgtcataggactctggacaatctcacaccttagctattcccagggaaccccagggggcaactgacattgctccaagatgttctcctgatgtagcttgagatataaaggaaaggccctgcacaggtggctgtttcttgtctgttatgtcagaggaacagtcctgttcagaaaggggctcttctgagcagaaatggctaataaactttgtgctgatctggaaaaaaaaaaac

SEQ ID NO: 383344 - DNA, 3808 bp, Homo sapiens
ctcaggtgatccacccgcctcagcctcccaaagtgctgggatcacaggcatgagccaccatagctggcctgcttttagtccaaaggaacaggggttgggggaagttcccagggcttgagaggtcttgaagccaaacaggggttccagggacactagggtgcccactctggcattttctctccttcccttcaattcacagactctggtggagcaacgttcaggtggttcaggaaagggcagcaataaggtgagatctggacagaggactcgaggcagggggagcttgccaaagagccttctgatgactatgtctttggctgtcccaggggccactaggtgtgacagaggaactgcacatcatcagcttcacggtcaaatatacctaccagggtctgaagcaggagctgaaagtgagtgaaaatggagggcaaggagagagaaagcagctttggaagaaggcataagaaggggataaacagaagcctcttggggtgggttagcactcctttcctctaacaaatacctgcagctagaaacatcacatccctctctgtgactcctgtcttctccccagacggacaccctccctgtggtgattatttccaacatgaaccagctctcaattgcctgggcttcagttctctggttcaatttgctcagcccaaaccttcaggtaggggagtggggccgacaggtcaaggcgcgagaggaggggtgtggaagcttggtgtgataggttgcttctgagccagcctacactgctcccacccctgcagaaccagcagttcttctccaacccccccaaggccccctggagcttgctgggccctgctctcagttggcagttctcctcctatgttggccgaggcctcaactcagaccagctgagcatgctgagaaacaagctgttcggtacagatttccttttctctcagcctttccccagccttagtcttttctgtccctctgtcctatctatcccaggacccctggcttccctcatcatctgtctgtggctatctgtcccacagggcagaactgtaggactgaggatccattattgtcctgggctgacttcactaagcgagagagccctcctggcaagttaccattctggacatggctggacaaaattctggagttggtacatgaccacctgaaggatctctggaatgatggacgcatcatgggctttgtgagtcggagccaggagcgccggctgctgaagaagaccatgtctggcacctttctactgcgcttcagtgaatcgtcagaagggggcattacctgctcctgggtggagcaccaggatgatgacaaggtgctcatctactctgtgcaaccgtacacgaaggaggtgctgcagtcactcccgctgactgaaatcatccgccattaccagttgctcactgaggagaatatacctgaaaacccactgcgcttcctctatccccgaatcccccgggatgaagcttttgggtgctactaccaggagaaagttaatctccaggaacggaggaaatacctgaaacacaggctcattgtggtctctaatagacaggtggatgaactgcaacaaccgctggagcttaagccagagccagagctggagtcattagagctggaactagggctggtgccagagccagagctcagcctggacttagagccactgctgaaggcagggctggatctggggccagagctagagtctgtgctggagtccactctggagcctgtgatagagcccacactatgcatggtatcacaaacagtgccagagccagaccaaggacctgtatcacagccagtgccagagccagatttgccctgtgatctgagacatttgaacactgagccaatggaaatcttcagaaactgtgtaaagattgaagaaatcatgccgaatggtgacccactgttggctggccagaacaccgtggatgaggtttacgtctcccgccccagccacttctacactgatggacccttgatgccttctgacttctaggaaccacatttcctctgttcttttcatatctcttgcccttcctactcctcatagcatgatattgttctccaaggatgggaatcaggcatgtgtcccttccaagctgtgttaactgttcaaactcaggcctgtgtgactccattggggtgagaggtgaaagcataacatgggtacagaggggacaacaatgaatcagaacagatgctgagccataggtctaaataggatcctggaggctgcctgctgtgctgggaggtataggggtcctgggggcaggccagggcagttgacaggtacttggagggctcagggcagtggcttctttccagtatggaaggatttcaacattttaatagttggttaggctaaactggtgcatactggcattggcccttggtggggagcacagacacaggataggactccatttctttcttccattccttcatgtctaggataacttgctttcttctttcctttactcctggctcaagccctgaatttcttcttttcctgcaggggttgagagctttctgccttagcctaccatgtgaaactctaccctgaagaaagggatggataggaagtagacctctttttcttaccagtctcctcccctactctgcccctaagctggctgtacctgttcctcccccataaaatgatcctgccaatctaatgtgagtgtgaagctttgcacactagtttatgctacctagtctccactttctcaatgcttaggagacagatcactcctggaggctggggatggtaggattgctggggatttttttttttttaaacagggtctcactctgttgcccaggctagagtgcaatggtgcaatcacagctcactgcagcctcaacctcctgggttcaagcaatcctcctacctcagcctcctgggtagctagcaccatggcatgcgccaccatgccctattttttttttttaaagacagggtcttgctatattgcccaggctggtcttgaacggggctcaagtgatcctcacgccttggcctcccaaagtgctgggattataggcatgacgccactgtgcttggcccaggatttttttttttttgagatggagtttctctcttgttgtccaggctggagtgcaatggtgtgatctcggctcactgcaacctccgccttccgggttcaagtgactctcctgcctcagcctccccagtagctgggattacagatctgcaccaccatgcccagctaattttgtatttttagtagagacggggtttctccatgttggtcaggctggtctcgaactcctgacctcaagtgatctgtccacctcggcctcccagagtgctgggattacaggcgtgagccactgttcccagcaggaatttcttttttatagtattggataaagtttggtgtttttacagaggagaagcaatgggtcttagctctttctctattatgttatcatcctcccttttttgtacaatatgttgtttacctgaaaggaaggtttctattcgttggttgtggacctggacaaagtccaagtctgtggaacttaaaaccttgaaggtctgtcataggactctggacaatctcacaccttagctattcccagggaaccccagggggcaactgacattgctccaagatgttctcctgatgtagcttgagatataaaggaaaggccctgcacaggtggctgtttcttgtctgttatgtcagaggaacagtcctgttcagaaaggggctcttctgagcagaaatggctaataaactttgtgctgatctggaaaaaaaaaaac

SEQ ID NO: 383345 - DNA, 2275 bp, Homo sapiens
acccgagctcatactagggacgggaagtcgcgaccagagccattggagggcgcggggactgcaaccctaatcagagcccaaatggcgcagtgggaaatgctgcagaatcttgacagcccctttcaggatcagctgcaccagctttactcgcacagcctcctgcctgtggacattcgacagtacttggctgtctggattgaagaccagaactggcaggaagctgcacttgggagtgatgattccaaggctaccatgctattcttccacttcttggatcagctgaactatgagtgtggccgttgcagccaggacccagagtccttgttgctgcagcacaatttgcggaaattctgccgggacattcagcccttttcccaggatcctacccagttggctgagatgatctttaacctccttctggaagaaaaaagaattttgatccaggctcagagggcccaattggaacaaggagagccagttctcgaaacacctgtggagagccagcaacatgagattgaatcccggatcctggatttaagggctatgatggaggttagtagatgtggtaggagttagggttgacagcgttcagcctaacacctccctgagaagcagcctcatcggggtcctctcccctctgcagaagctggtaaaatccatcagccaactgaaagaccagcaggatgtcttctgcttccgatataagatccaggccaaaggtaggaagcacattgaggggctggagaaagataagtgcctgctgagaagccggagctggaagtgaacaggagaaagctccgatgagcagtagtcactgtcagacacaccccactgactacagtcctgctgccgtgcaaagctggaagtgctttgtggaggctgagctggaggtgcagctgagagacagtaaatgttgaggaaatgcatggaaaactaacagtgttttatttgagggggtgtctggtccaagcatgaccattcagaatttgcctgagggtcccacaggtgcctgtgctttgcttggtttccctttcttcctccacaaaattcctccttcctgactctgactgagaccccagtcaggaaggagaggaaagaacccctggactgactcctgttcccaccatccagggaagacaccctctctggacccccatcagaccaaagagcagaagattctgcaggaaactctcaatgaactggacaaaaggagaaaggaggtgctggatgcctccaaagcactgctaggccgattaactaccctaatcgagctactgctgccaaagttggaggagtggaaggcccagcagcaaaaagcctgcatcagagctcccattgaccacgggttggaacagctggagacatggttcacagctggagcaaagctgttgtttcacctgaggcagctgctgaaggagctgaagggactgagttgcctggttagctatcaggatgaccctctgaccaaaggggtggacctacgcaacgcccaggtcacagagttgctacagcgtctgctccacagagcctttgtggtagaaacccagccctgcatgccccaaactccccatcgacccctcatcctcaagactggcagcaagttcaccgtccgaacaaggctgctggtgagactccaggaaggcaatgagtcactgactgtggaagtctccattgacaggaatcctcctcaattacaaggcttccggaagttcaacattctgacttcaaaccagaaaactttgacccccgagaaggggcagagtcagggtttgatttgggactttggttacctgactctggtggagcaacgttcaggtggttcaggaaagggcagcaataaggggccactaggtgtgacagaggaactgcacatcatcagcttcacggtcaaatatacctaccagggtctgaagcaggagctgaaagtgagtgaaaatggagggcaaggagagagaaagcagctttggaagaaggcataagaaggggataaacagaagcctcttggggtgggttagcactcctttcctctaacaaatacctgcagctagaaacatcacatccctctctgtgactcctgtcttctccccagacggacaccctccctgtggtgattatttccaacatgaaccagctctcaattgcctgggcttcagttctctggttcaatttgctcagcccaaaccttcaggtaggggagtggggccgacaggtcaaggcgcgagaggaggggtgtggaagcagtgtagctgctcagaacacctataggatccttaga

SEQ ID NO: 383346 - DNA, 2114 bp, Homo sapiens
acccgagctcatactagggacgggaagtcgcgaccagagccattggagggcgcggggactgcaaccctaatcagagcccaaatggcgcagtgggaaatgctgcagaatcttgacagcccctttcaggatcagctgcaccagctttactcgcacagcctcctgcctgtggacattcgacagtacttggctgtctggattgaagaccagaactggcaggaagctgcacttgggagtgatgattccaaggctaccatgctattcttccacttcttggatcagctgaactatgagtgtggccgttgcagccaggacccagagtccttgttgctgcagcacaatttgcggaaattctgccgggacattcagcccttttcccaggatcctacccagttggctgagatgatctttaacctccttctggaagaaaaaagaattttgatccaggctcagagggcccaattggaacaaggagagccagttctcgaaacacctgtggagagccagcaacatgagattgaatcccggatcctggatttaagggctatgatggaggttagtagatgtggtaggagttagggttgacagcgttcagcctaacacctccctgagaagcagcctcatcggggtcctctcccctctgcagaagctggtaaaatccatcagccaactgaaagaccagcaggatgtcttctgcttccgatataagatccaggccaaaggtaggaagcacattgaggggctggagaaagataagtgcctgctgagaagccggagctggaagtgaacaggagaaagctccgatgagcagtagtcactgtcagacacaccccactgactacagtcctgctgccgtgcaaagctggaagtgctttgtggaggctgagctggaggtgcagctgagagacagtaaatgttgaggaaatgcatggaaaactaacagtgttttatttgagggggtgtctggtccaagcatgaccattcagaatttgcctgagggtcccacaggtgcctgtgctttgcttggtttccctttcttcctccacaaaattcctccttcctgactctgactgagaccccagtcaggaaggagaggaaagaacccctggactgactcctgttcccaccatccagggaagacaccctctctggacccccatcagaccaaagagcagaagattctgcaggaaactctcaatgaactggacaaaaggagaaaggaggtgctggatgcctccaaagcactgctaggccgattaactaccctaatcgagctactgctgccaaagttggaggagtggaaggcccagcagcaaaaagcctgcatcagagctcccattgaccacgggttggaacagctggagacatggttcacagctggagcaaagctgttgtttcacctgaggcagctgctgaaggagctgaagggactgagttgcctggttagctatcaggatgaccctctgaccaaaggggtggacctacgcaacgcccaggtcacagagttgctacagcgtctgctccacagagcctttgtggtagaaacccagccctgcatgccccaaactccccatcgacccctcatcctcaagactggcagcaagttcaccgtccgaacaaggctgctggtgagactccaggaaggcaatgagtcactgactgtggaagtctccattgacaggaatcctcctcaattacaagggtaggtgcttgacaaggacactgcaaacatctgtacagtgtatgacctgcagaaccacattcggcagccctggtggcacaaacaaggaagagggggatttgggatatggacaaagggagatggcgagatctgaaatgaagtggaacttctgtttttttttttctgctgagtttttagaataattccattccttgtctccatgtatcttcctcctggaacagcttccggaagttcaacattctgacttcaaaccagaaaactttgacccccgagaaggggcagagtcagggtttgatttgggactttggttacctggtaagaatagtttgtgacctatgcttttattactatttttatttttttgagacggagtctcactctgtcccccaggctggagtgcagtggtgccatcttg

SEQ ID NO: 383347 - DNA, 444 bp, Homo sapiens
gcaagctttttgtcctgagaagactctttaatgtatatttggctatctgttgtattttatattctcagtgtaaaatatcaataaatgtttatatttataaaatctagttgttgttattgtgcaacttgacattcaacataaaagttacttaaaaccttatactgatagctaaaatctacaggtgtaggtgctcaagtagaatactagaatccggatacagatatatattgtgtaactttatgtatattatacatatatgctatatatgtgtatatttttatatacaataaatgtatagttatatattgatgccttgaactgagaaattgaaaatctaaaaatgaaagcatgagccatcatatctggcctgaaagttttattttcatgcttggggcatggtgtatagaaccagctactaagaatgtttattagcattagagattg

SEQ ID NO: 383348 - DNA, 641 bp, Homo sapiens
gcaagctttttgtcctgagaagactctttaatgtatatttggctatctgttgtattttatattctcagtgtaaaatatcaataaatgtttatatttataaaatctagttgttgttattgtgcaacttgacattcaacataaaagttacttaaaaccttatactgatagctaaaatctacaggtgtaggtgctcaagtagaatactagaatccggatacagatatatattgtgtaactttatgtatattatacatatatgctatatatgtgtatatttttatatacaataaatgtatagttatatattgatgccttgaactgagaaattgaaaatctaaaaatgaaagcaggccaggtgcggtggttcatgtctgtgatcccagcactttgggaggccaaggcaggtggatcacgaggtcaggagttgaagaccaacctggttaagatggtgaacctttgtttttgttaaaaatgtaaaaattacccgggcgtggtggcaggtgcctgtaatcacagctactagggaggctgaggcagagaattgcttgaacccaggaggtggaggttgcagtgagctgggattgtgtcacagcactccagcctgggcgacagagtgagactccgtctcaaaaaaaaaaaaa

SEQ ID NO: 383349 - DNA, 278 bp, Homo sapiens
gaggataatcaagatggtactgtttgtacctccgtggataaggaaaataaccaggctcatcctaaggagacaggaccatacttagaagagaacacctgtgatgctggctccttggccactgttcagcccaaaccatgaccagaggtaataaatgaccaaaacagaaaagacagacaaggagtggtaaagtaaaaggcaaagctagagatctaaaagaagggaggggaaatatttctgccctgagtactaaaaagtaaaagaggcaagattcagaaacc

SEQ ID NO: 383350 - DNA, 2136 bp, Homo sapiens
ttcagagcccagctaaattgacagcataactaacttttgtggacaaagtgtggattttgaagccagccaggcctaagtcaaatcctggttccaccacttactacgtatgggcaagttacttctctgaacctggttgttcattcatgtggaaaaggaagattagagataataaatgtaaagcatttggcttaggcagtaagtggcagctataatcagagggatgaggaaacatctttgcttgttggtgtttgataacataaagcgtgtttggtgaggtcttttctaatgttactcaggtgatagtgtgcaggaaatgacaagactgttaatgggaaactgattcatcaaccaaatgtattgataacccatcaacaaaatgtccaccactgtgctaaatgaattgggggaggaggcagaaaacagttctgctcttgaataaattaagcattatgacatgtgcactttgaattaagaaatgtttgctttcgctttaaactctagtaaaacttggaatgatttgcttgaaaagatgtgttgaaatggctttgaagaatagattagagcttgaagtgaagaaatttaggtttctgggaatagtatatgtcgtagttggggctcaggcatggtgacttgtgcctgcaatcccagctgaagtgtgaagattacttcaggccaggagtttgagaccagcctgaccccatctctaagaaaaaaatttttttaattagccacgcgtggtgacactcgcctatagtcctagctacttcagaggatgaggcaggaggatcacttcagcctagcatttcaaggctacagtgagctatgattgtgacactgcactccagtctgggtaacagcaagacccccatctctaataaaataagtacaatgctgactttttttgctttttgatgaatagggaaaaaatatttttttaatgtcataattggtgttgaagacatggtccagtaagaagcaattatgaaaaataataaacaatctagcatggatcaagccttatgaagaatctagaaatttaacaacataaaccagaaacaacgactattagattttacactaaaaattcgaaatcaatgagtaggaattcaaaggctctggaaggaagaagtgagcaacccaaaaggaagatggagcgataagaggaaagagcctttcaggaccctaaatacctgggtggtttttttaaggaactgttcattcttacagttatgctgccaaaccatgatatgcatgaaatgtcattgaaagtcaaggttgaaatgaagtcattttagagtttcaaagacaggtatgacagtcaccaaacagcacacaatatgacctcctggcatcattgaggaatcattacagaggaaaacgacttctgggaagaagaccaatggtaaagatgtatttcaagcaaaaattgcctgtatggcaaaaacgctggagagtctgaaaggaaggagtgagtacaaaagaaaaagcataacttagctacgtatgtaagcttatagtcccctagcagaagggcagtggatctccctactgggaagcatgtttgaacatatctagattgtgattagtaattgaaactcagagtgctgggattacaggcgtgagccaccacgcccggccggaaattttttttgagatggagtctctgtctgttgcccaggctggaatgcagtggcacaatcgtggctcacctcccaggtacaagcgattctgctgcctcagcctcccaagtagctgggattacaggtgtgcaccaccacccccggctaatttttgtattttttgtagaaacggggtttcaccacgttggccagcctggttttgaactcctgacctcaaagtgatctacctcacaaagtgctgggattacaggcgtgagccaccacacctggcctattataatttttttatatggagaaggaccaaaataatccaaagatgtaactctttgcattttgggttttttagttttactttttttcacatacaggtatgggcatgtgcacgcacgcactctgtctctcttcttttctttttttttttttaattaaaaaacccaccggccagttgtggtggctcacgcctataatcccaacactttgggaggccaaggctggc

SEQ ID NO: 383351 - DNA, 1727 bp, Homo sapiens
ttcagagcccagctaaattgacagcataactaacttttgtggacaaagtgtggattttgaagccagccaggcctaagtcaaatcctggttccaccacttactacgtatgggcaagttacttctctgaacctggttgttcattcatgtggaaaaggaagattagagataataaatgtaaagcatttggcttaggcagtaagtggcagctataatcagagggatgaggaaacatctttgcttgttggtgtttgataacataaagcgtgtttggtgaggtcttttctaatgttactcaggtgatagtgtgcaggaaatgacaagactgttaatgggaaactgattcatcaaccaaatgtattgataacccatcaacaaaatgtccaccactgtgctaaatgaattgggggaggaggcagaaaacagttctgctcttgaataaattaagcattatgacatgtgcactttgaattaagaaatgtttgctttcgctttaaactctagtaaaacttggaatgatttgcttgaaaagatgtgttgaaatggctttgaagaatagattagagcttgaagtgaagaaatttaggtttctgggaatagtatatgtcgtagttggggctcaggcatggtgacttgtgcctgcaatcccagctgaagtgtgaagattacttcaggccaggagtttgagaccagcctgaccccatctctaagaaaaaaatttttttaattagccacgcgtggtgacactcgcctatagtcctagctacttcagaggatgaggcaggaggatcacttcagcctagcatttcaaggctacagtgagctatgattgtgacactgcactccagtctgggtaacagcaagacccccatctctaataaaataagtacaatgctgactttttttgctttttgatgaatagggaaaaaatatttttttaatgtcataattggtgttgaagacatggtccagtaagaagcaattatgaaaaataataaacaatctagcatggatcaagccttatgaagaatctagaaatttaacaacataaaccagaaacaacgactattagattttacactaaaaattcgaaatcaatgagtaggaattcaaaggctctggaaggaagaagtgagcaacccaaaaggaagatggagcgataagaggaaagagcctttcaggaccctaaatacctgggtggtttttttaaggaactgttcattcttacagttatgctgccaaaccatgatatgcatgaaatgtcattgaaagtcaaggttgaaatgaagtcattttagagtttcaaagacaggtatgacagtcaccaaacagcacacaatatgacctcctggcatcattgaggaatcattacagaggaaaacgacttctgggaagaagaccaatggtaaagatgtatttcaagcaaaaattgcctgtatggcaaaaacgctggagagtctgaaaggaaggagtgagtacaaaagaaaaagcataacttagctacgtatgtaagcttatagtcccctagcagaagggcagtggatctccctactgggaagcatgtttgaacatatctagattgtgattagtaattgaaactcagaggccgggcgcggtggcctgtaatcccagcactttgggaggccgaggcgggcagatgacgaggtcaggagatcgagaccatcctggttaagacggtgaaaccccgtctctactaaaaatgaaaataa

SEQ ID NO: 383352 - DNA, 1516 bp, Homo sapiens
gccttccccatttgtttctttctgaaaggatttagcttaaggaaaaaaaaagctcttggtaaggccacatatttcaacctttcaaaatgactgcctctgtgaaagagtggttgagaaagaagaaaagagagagagagagagagagagagagagagaaaggtctaaacatctgtgtgaacagctctccagatactgtgaagtcaaaggcccaacattacagagcgcacctctgcctgagattaaggatagagctctatccttaatctcaatgctgactttttttgctttttgatgaatagggaaaaaatatttttttaatgtcataattggtgttgaagacatggtccagtaagaagcaattatgaaaaataataaacaatctagcatggatcaagccttatgaagaatctagaaatttaacaacataaaccagaaacaacgactattagattttacactaaaaattcgaaatcaatgagtaggaattcaaaggctctggaaggaagaagtgagcaacccaaaaggaagatggagcgataagaggaaagagcctttcaggaccctaaatacctgggtggtttttttaaggaactgttcattcttacagttatgctgccaaaccatgatatgcatgaaatgtcattgaaagtcaaggttgaaatgaagtcattttagagtttcaaagacaggtatgacagtcaccaaacagcacacaatatgacctcctggcatcattgaggaatcattacagaggaaaacgacttctgggaagaagaccaatggtaaagatgtatttcaagcaaaaattgcctgtatggcaaaaacgctggagagtctgaaaggaaggagtgagtacaaaagaaaaagcataacttagctacgtatgtaagcttatagtcccctagcagaagggcagtggatctccctactgggaagcatgtttgaacatatctagattgtgattagtaattgaaactcagagtgctgggattacaggcgtgagccaccacgcccggccggaaattttttttgagatggagtctctgtctgttgcccaggctggaatgcagtggcacaatcgtggctcacctcccaggtacaagcgattctgctgcctcagcctcccaagtagctgggattacaggtgtgcaccaccacccccggctaatttttgtattttttgtagaaacggggtttcaccacgttggccagcctggttttgaactcctgacctcaaagtgatctacctcacaaagtgctgggattacaggcgtgagccaccacacctggcctattataatttttttatatggagaaggaccaaaataatccaaagatgtaactctttgcattttgggttttttagttttactttttttcacatacaggtatgggcatgtgcacgcacgcactctgtctctcttcttttctttttttttttttaattaaaaaacccaccggccagttgtggtggctcacgcctataatcccaacactttgggaggccaaggctggc

SEQ ID NO: 383353 - DNA, 409 bp, Homo sapiens
gaacatactcacagtttccttggtcacagtgttgtcagtggttctataaaggtcttatgaatctctacttagttgaccacaagtagtaagcaagaaacaatcctgtaaagagaatggaggtcagaataaagaagccttgagggtttaaatcgcttcttgaaaagaaatgcccgtgtgtcaaggagctaagggagaccagcccaggaggagctgaatcctgccaacaatcacttgagtgaacttgagagtgaatcctctccatgttaagccttgaggtgattgtagctccatcaaataccttcattgtagccttgtgagagatctgagtcagaggatggagttaagccaagcccagattccagaccctcagaaactgtgagataataaatttgttgttctaagctactaa

SEQ ID NO: 383354 - DNA, 720 bp, Homo sapiens
gaacatactcacagtttccttggtcacagtgttgtcagtggttctataaaggtcttatgaatctctacttagttgaccacaagtagtaagcaagaaacaatcctgtaaagagaatggaggtcagaataaagaagccttgagggtttaaatcgcttcttgaaaagaaatgcccgtgtgtcaaggagctaagggagaccagcccaggaggagctgaatcctgccaacaatcacttgagtgaacttgagagtgaatcctctccatgttaagccttgaggtgattgtagctccatcaaataccttcattgtagccttgtgagagatctgagtcagaggatggagttaagccaagcccagattccagaccctcagaaacttgaaagcggaatacctggttatccggaggtcactgtctccacacagagtggtgtccttgatgctagcttggggcaaagaagccagagacacgttctgatttccaacaagctggaacagctctgctggtgaggagtgaaaggaaacccagactacccaacttctcatctctatggtcttggagccagcttgtggttgcaataggaatagaagagacttccttactccaatcccaccctaccccctcatcctgcctcaaccagtcatgcagagagatgctgaatggctgcctgctctcaggggaatgatttgtggaggtttaattaaaataatttaatcaatcaaat

SEQ ID NO: 383355 - DNA, 2591 bp, Homo sapiens
ctcaggccccctccgcctccacccctgccctcctcaggccccctccgcctccacccctgccctcctcaggcccccggcacgaggcccgcctcgtcctcctcaggccccctccgcctccggctccgtcctcctcaggccccctccgcctccggctccgtcctcctctggccccctccgcccccggccccggccccacggcgggatgcgggacaacaccagccccatcagcgtgattctggtgagctcggggagcaggggcaataagctgctgttcaggtaccccttccagagaagccaggagcacccggcgtcccagacaagtaagccgcgtagcagatacgctgccagcaacacgggcgaccatgctgatgagcaggacggcgattccaggccaacgcagacccgtcagtgataaactgtctgcataacctgtcccgtcgtatcgccaccgtgctgcagcacgaggagcgccgctgccagtacctcacccgggaggccaagctgatcctggcgctccaggatgaggtgtccgccatggctgatggaaatgaaggtcctcagtccccattccatcacatcctgcccaagtgcaagctggccagggacctcaaggaagcttatgacagcctgtgcacgtcgggcgtagttcggcttcacatcaacagctggctggaggtgagcttctgcctgccccacaagatccactatgcggcctccagtctgatccccccagaggccatcgaacggagcctgaaagccatccgcccctaccatgccctgctgctgctcagtgatgagaagtccttgctgggtgagcttcctattgactgctcccctgccctagtgcgggtgatcaagaccacatctgctgtgaagaacctgcagcagctagcccaagatgcggacctggccttgctgcaggttttccagcttgcagctcatctggtgtactggggcaaggccatcatcatctacccgctgtgtgagaacaacgtctacatgctgtctcccaatgccagcgtatgtctgtactccccgctggccgagcagttctcccaccagttcccatctcatgacctgccgtccgttcttgccaagttctccttgccggtctccttgtcagaatttaggaatcccctggcccccgctgtgcaggagacccagctcatccagatggtggtgtggatgctgcagcgccggcttctcatccagctgcacacctatgtctgcctgatggcctcacccagcgaggaggagccccgtccgcgagaggacgacgtccccttcactgcccgggtcggcggtcgcagcctcagcacgcccaacgccctcagctttggctccccaaccagcagcgatgacatgaccctcaccagccccagcatggacaactccagcgcagagctacttcccagcggggactcgccactgaaccagaggatgacggagaacctgctggccagcctgtcggagcatgaacgcgcagccatcctcagtgtacccgcagcccagaaccctgaggacctccgcatgtttgccaggctccttcactacttccgcggccgccaccacctggaggagattatgtacaacgagaacacgcggcgctcccagctgctcatgctgtttgacaagttccgcagcgtgctggtggtgaccacccacgaggaccctgtcattgccgtcttccaggctctgctcccctgagcccaggcggagggcggaaggctgctggggtgcgcaggtgggcgctcgcgtctccccaccccagggctccccccgtgctgaggctgagccctcttggccctgaggcctggcattgggtggatgcgggctggccgtggcccagtgaagcctgcagagccccgctgtccttgcccctggtggttccgctgtggggctgctgccctctgtgttcctacgcttccctccagtccttgccgcacgcgtaggcatctccacgctggaggggggcctgccaggactcctgtctctgggtgaggccgcatccttcaaggcccatgtgggctgtgcgtttctcagaccctccttctgtccctacacctgctccttggaccccccagtctgtggccaccctgaagaatgtgcagaaacacttgtgtggcctgtccctgtctctctgacagccttccatttgtgaagtgccctgtggccccctccccagcacctctgtctgccatgcgcttcttcctcccaggctaccctgagcctttcctggcccagtcctcaccacagtccacagaagccacaaacaggctcatagccaagctgtgacctggtcctgaccatctggggcacgagggcctgggctggccctgctaggctggagaagccctgtcacctgtgcacatcttgctggtggaggcatggcccactgtgcaggaccccaccctcgggggctttcggctcccacactgatgattctccccagcatccacaccgggcctggcgctacgtactcaggcccccagctctcgtgtcctggaggaagagctagctccagacatgggttgatcacctagaggagctctggctaaggcacagttttctagaaataaaacatttattcg

SEQ ID NO: 383356 - DNA, 541 bp, Homo sapiens
cagggaccagtgtgagcaaagccgctaaatgcatgaggacaaggaggactaactgagggccaatccagcaggcagcggacaggggttcagggacaactgcagtgacaggcacttcaggagggccctcgctgctatgttcacattacctgtccccagaaatgcccgggccagggggactgccggctggtcgaagaactccaaccccagtcgggtaaggtggccctttgggcttgagaaatagatgctgcggtatgggccccggagtggtgggcggtcccaagcagcgctccctggggcaaaggtgcctgggcctgcatcggacgagctgttgtggctgctctgcaggtgcctgggctgcgtcggacgagctgtgtggctgccctgctctagctggtcgctgcttcttttgccccatccgtcggcaaaactgggccccgctgcgcgcgggcatccggcggctcgggccggggcttcgtgggactcggaccccggcgcggagcccagcagccgccgaccacggaagcacccctaggaccggggc

SEQ ID NO: 383357 - DNA, 4470 bp, Homo sapiens
ttcccatccgcaccagcaagagggcccctgtgccccaaacgcgaaccgtacggctccagacagcaccgcggaactcggtggcttccagaaggccccgcgcctgcgcattccgctgcctgcgcctgcgcctgcgcctgcgccgttctcccggccgccgccttagcacctcctccggacggtgtcgccgaagtctcgcgagcccggagcgtggcacgtgggtaagccgcgtagcagatacgctgccagcaacacgggcgaccatgctgatgagcaggacggcgattccagacaaagtttcactctgtcgcccaaggctggagtgcagtggtgtgatctcggcttgctgcaacctcacctctagggttcaagcgattctcctgcctcagcctcccgagtagctgggattacaggcatccaccaccaagcgagccatgtcctccaaccgatgagcaattggttgcagggttttcagatgttattctggcaacaattttggcaaccaagtctgaaatgtgtggccaaaaatttgaactgaagattgataatgtgcgatttgttgggcacccaacactgctacagcatgctctggggcagatctccaaaacagatccttccccgaagagggaagcacctactatgattctttttaatgtggtgtttgcactgagggccaacgcagacccgtcagtgataaactgtctgcataacctgtcccgtcgtatcgccaccgtgctgcagcacgaggagcgccgctgccagtacctcacccgggaggccaagctgatcctggcgctccaggatgaggtgtccgccatggctgatggaaatgaaggtcctcagtccccattccatcacatcctgcccaagtgcaagctggccagggacctcaaggaagcttatgacagcctgtgcacgtcgggcgtagttcggcttcacatcaacagctggctggaggtgagcttctgcctgccccacaagatccactatgcggcctccagtctgatccccccagaggccatcgaacggagcctgaaagccatccgcccctaccatgccctgctgctgctcagtgatgagaagtccttgctgggtgagcttcctattgactgctcccctgccctagtgcgggtgatcaagaccacatctgctgtgaagaacctgcagcagctagcccaagatgcggacctggccttgctgcaggttttccagcttgcagctcatctggtgtactggggcaaggccatcatcatctacccgctgtgtgagaacaacgtctacatgctgtctcccaatgccagcgtatgtctgtactccccgctggccgagcagttctcccaccagttcccatctcatgacctgccgtccgttcttgccaagttctccttgccggtctccttgtcagaatttaggaatcccctggcccccgctgtgcaggagacccagctcatccagatggtggtgtggatgctgcagcgccggcttctcatccagctgcacacctatgtctgcctgatggcctcacccagcgaggaggagccccgtccgcgagaggacgacgtccccttcactgcccgggtcggcggtcgcagcctcagcacgcccaacgccctcagctttggctccccaaccagcagcgatgacatgaccctcaccagccccagcatggacaactccagcgcagagctacttcccagcggggactcgccactgaaccagaggatgacggagaacctgctggccagcctgtcggagcatgaacgcgcagccatcctcagtgtacccgcagcccagaaccctgaggacctccgcatgtttgccaggctccttcactacttccgcggccgccaccacctggaggagattatgtacaacgagaacacgcggcgctcccagctgctcatgctgtttgacaagttccgcagcgtgctggtggtgaccacccacgaggaccctgtcattgccgtcttccaggctctgctcccctgagcccaggcggagggcggaaggctgctggggtgcgcaggtgggcgctcgcgtctccccaccccagggctccccccgtgctgaggctgagccctcttggccctgaggcctggcattgggtggatgcgggctggccgtggcccagtgaagcctgcagagccccgctgtccttgcccctggtggttccgctgtggggctgctgccctctgtgttcctacgcttccctccagtccttgccgcacgcgtaggcatctccacgctggaggggggcctgccaggactcctgtctctgggtgaggccgcatccttcaaggcccatgtgggctgtgcgtttctcagaccctccttctgtccctacacctgctccttggaccccccagtctgtggccaccctgaagaatgtgcagaaacacttgtgtggcctgtccctgtctctctgacagccttccatttgtgaagtgccctgtggccccctccccagcacctctgtctgccatgcgcttcttcctcccaggctaccctgagcctttcctggcccagtcctcaccacagtccacagaagccacaaacaggctcatagccaagctgtgacctggtcctgaccatctggggcacgagggcctgggctggccctgctaggctggagaagccctgtcacctgtgcacatcttgctggtggaggcatggcccactgtgcaggaccccaccctcgggggctttcggctcccacactgatgattctccccagcatccacaccgggcctggcgctacgtactcaggcccccagctctcgtgtcctggaggaagagctagctccagacatgggttgatcacctagaggagctctggctaaggcacagttttctagaaataaaacatttattcggtttttaaacaattaaaaaatcttgtctgggcaggccctttgctcaggcctgtgtgtcctgctcagccactctgtcgaccacactgacccaggggctgccccggacatagaagcggaggggtttccgggcccactcccctgcatggccgacgcccacccgggctgctgccactacagccggctcactgggctccaggggaccacgctccagccatacagcttcatcctgtgccaggtccctctggtcaaagctcttgttgatggccagggcctggcacagcttggaggggccactgcagagctcgcggtccttgaggacacggctggcggtgcctttccggagggtgctgcgaagctgacgcatggtctccagaccttccaggggctccagtgctcgcagcaagacgcaagccccgtcccctgtgggacggacagtttggaagtggagcctccctaggctcctgtcctctctgccctagtacacatccagacatcctgtgctgcagggagggtgcagctgccttcctgcctgggccagggacctgctctgtgcacctgcaccatctcctgggtctgacctggtgggagggggctgcacctcactgtgtccagacccctctgcctaccttgccatcctccaagcctgcaccatgaggtgtgcctcctgtgggcacctctggcttccaccaccaggcagggcctcccccactgtggccgcccccacaaagccagactgttaaaaacacatgacaaatgctgggtatcagttcctttccacctggcttcccctggtcttgtgactggcagcagctataaagccagcaaaggaagctccagagagccagtcctcgggtgcgatcattcagccaggaagcaggaagccttggcctagccaggccccagcgctccccttctgcctcacccactcagtgtttgtgttggtcaagtggtgggggctaggagttggcttagagcagctgccagtgtgcaccggatgttgggagagcccatgcaatgactcagtggaaggactgactgcaacaccctgcacaggcagggcaggaggaggctgacgaagccccctcacctcccttgggatccctcctccagcctagccccctccctcaccaggccaggccccttgagaaacagagacagcaagcgaaggctcctgggcccaggggctcactcaagcacagatacccgaattccctctgccctgcaggtttggaaaggccccttggattcctggctggggacaatgatgacctggaccctggccagaagagccctggccctccagcaaggcagcacctgctctgatgcacctgtgcacccctggccctcccagccacctgggagcccgaagcttagcctgtaggtggccaagccagtccctactcttgggctgcggccacgtgaggctccgcatcagcagccaggggcgagcactagtggacaaagccagcaaatgcggcgttcctgtgagcagataccctcaaccagccagctgtcaaaagtatttcaagataaaatccaggccaagcaaagcctttaagttcccgtccattctgtgattcccacgctgcttccagctcac

SEQ ID NO: 383358 - DNA, 3724 bp, Homo sapiens
ggcccgatgctccgaccccacactcccgtcgtccttccgctggtgcctgtcggtccaccctcggccctccgctgctgcacccgtccccctcccagataaaccaggagcgcccggcgtcccagacaagtaagccgcgtagcagatacgctgccagcaacacgggcgaccatgctgatgagcaggacggcgattccagacaaagtttcactctgtcgcccaaggctggagtgcagtggtgtgatctcggcttgctgcaacctcacctctagggttcaagcgattctcctgcctcagcctcccgagtagctgggattacaggcatccaccaccaagcgagccatgtcctccaaccgatgagcaattggttgcagggttttcagatgttattctggcaacaattttggcaaccaagtctgaaatgtgtggccaaaaatttgaactgaagattgataatgtgcgatttgttgggcacccaacactgctacagcatgctctggggcaggccaacgcagacccgtcagtgataaactgtctgcataacctgtcccgtcgtatcgccaccgtgctgcagcacgaggagcgccgctgccagtacctcacccgggaggccaagctgatcctggcgctccaggatgaggtgtccgccatggctgatggaaatgaaggtcctcagtccccattccatcacatcctgcccaagtgcaagctggccagggacctcaaggaagcttatgacagcctgtgcacgtcgggcgtagttcggcttcacatcaacagctggctggaggtgagcttctgcctgccccacaagatccactatgcggcctccagtctgatccccccagaggccatcgaacggagcctgaaagccatccgcccctaccatgccctgctgctgctcagtgatgagaagtccttgctgggtgagcttcctattgactgctcccctgccctagtgcgggtgatcaagaccacatctgctgtgaagaacctgcagcagctagcccaagatgcggacctggccttgctgcaggttttccagcttgcagctcatctggtgtactggggcaaggccatcatcatctacccgctgtgtgagaacaacgtctacatgctgtctcccaatgccagcgtatgtctgtactccccgctggccgagcagttctcccaccagttcccatctcatgacctgccgtccgttcttgccaagttctccttgccggtctccttgtcagaatttaggaatcccctggcccccgctgtgcaggagacccagctcatccagatggtggtgtggatgctgcagcgccggcttctcatccagctgcacacctatgtctgcctgatggcctcacccagcgaggaggagccccgtccgcgagaggacgacgtccccttcactgcccgggtcggcggtcgcagcctcagcacgcccaacgccctcagctttggctccccaaccagcagcgatgacatgaccctcaccagccccagcatggacaactccagcgcagagctacttcccagcggggactcgccactgaaccagaggatgacggagaacctgctggccagcctgtcggagcatgaacgcgcagccatcctcagtgtacccgcagcccagaaccctgaggacctccgcatgtttgccaggctccttcactacttccgcggccgccaccacctggaggagattatgtacaacgagaacacgcggcgctcccagctgctcatgctgtttgacaagttccgcagcgtgctggtggtgaccacccacgaggaccctgtcattgccgtcttccaggctctgctcccctgagcccaggcggagggcggaaggctgctggggtgcgcaggtgggcgctcgcgtctccccaccccagggctccccccgtgctgaggctgagccctcttggccctgaggcctggcattgggtggatgcgggctggccgtggcccagtgaagcctgcagagccccgctgtccttgcccctggtggttccgctgtggggctgctgccctctgtgttcctacgcttccctccagtccttgccgcacgcgtaggcatctccacgctggaggggggcctgccaggactcctgtctctgggtgaggccgcatccttcaaggcccatgtgggctgtgcgtttctcagaccctccttctgtccctacacctgctccttggaccccccagtctgtggccaccctgaagaatgtgcagaaacacttgtgtggcctgtccctgtctctctgacagccttccatttgtgaagtgccctgtggccccctccccagcacctctgtctgccatgcgcttcttcctcccaggctaccctgagcctttcctggcccagtcctcaccacagtccacagaagccacaaacaggctcatagccaagctgtgacctggtcctgaccatctggggcacgagggcctgggctggccctgctaggctggagaagccctgtcacctgtgcacatcttgctggtggaggcatggcccactgtgcaggaccccaccctcgggggctttcggctcccacactgatgattctccccagcatccacaccgggcctggcgctacgtactcaggcccccagctctcgtgtcctggaggaagagctagctccagacatgggttgatcacctagaggagctctggctaaggcacagttttctagaaataaaacatttattcggtttttaaacaattaaaaaatcttgtctgggcaggccctttgctcaggcctgtgtgtcctgctcagccactctgtcgaccacactgacccaggggctgccccggacatagaagcggaggggtttccgggcccactcccctgcatggccgacgcccacccgggctgctgccactacagccggctcactgggctccaggggaccacgctccagccatacagcttcatcctgtgccaggtccctctggtcaaagctcttgttgatggccagggcctggcacagcttggaggggccactgcagagctcgcggtccttgaggacacggctggcggtgcctttccggagggtgctgcgaagctgacgcatggtctccagaccttccaggggctccagtgctcgcagcaagacgcaagccccgtccccctggctggagatgttcatgcagaagtacatgccgtaaatgatgtacacgtacagggtccccggcttcatgaacatgcctcggttgcggggggtctgccggccaccccttgagtgggcggcttcatcctctggccccaggtatgcctcggtctccacgatgcggcctcggagttctgtgccattaggaagtcgccggactaggaccctgtccccagaaatgcccgggccagggggactgccggctggtcgaagaactccaaccccagtcgggtaaggtggccctttgggcttgagaaatagatgctgcggtatgggccccggagtggtgggcggtcccaagcagcgctccctggggcaaaggtgcctgggcctgcatcggacgagctgttgtggctgctctgcaggtgcctgggctgcgtcggacgagctgtgtggctgccctgctctagctggtcgctgcttcttttgccccatccgtcggcaaaactgggccccgctgcgcgcgggcatccggcggctcgggccggggcttcgtgggactcggaccccggcgcggagcccagcagccgccgaccacggaagcacccctaggaccggggc

SEQ ID NO: 383359 - DNA, 2913 bp, Homo sapiens
tctagaggatcttaattctgcaccacagccccccagaggcatcgaacggaggctgaaagcatccgcccctaccatgccctgctgctgctcagtgatgagaagtccttgctgggtgagcttcctattgactgctcccctgccctagtgcgggtgatcaagaccacatctgctgtgaagaacctgcagcagctagcccaagatgcggacctggccttgctgcaggttttccagcttgcagctcatctggtgtactggggcaaggccatcatcatctacccgctgtgtgagaacaacgtctacatgctgtctcccaatgccagcgtatgtctgtactccccgctggccgagcagttctcccaccagttcccatctcatgacctgccgtccgttcttgccaagttctccttgccggtctccttgtcagaatttaggaatcccctggcccccgctgtgcaggagacccagctcatccagatggtggtgtggatgctgcagcgccggcttctcatccagctgcacacctatgtctgcctgatggcctcacccagcgaggaggagccccgtccgcgagaggacgacgtccccttcactgcccgggtcggcggtcgcagcctcagcacgcccaacgccctcagctttggctccccaaccagcagcgatgacatgaccctcaccagccccagcatggacaactccagcgcagagctacttcccagcggggactcgccactgaaccagaggatgacggagaacctgctggccagcctgtcggagcatgaacgcgcagccatcctcagtgtacccgcagcccagaaccctgaggacctccgcatgtttgccaggctccttcactacttccgcggccgccaccacctggaggagattatgtacaacgagaacacgcggcgctcccagctgctcatgctgtttgacaagttccgcagcgtgctggtggtgaccacccacgaggaccctgtcattgccgtcttccaggctctgctcccctgagcccaggcggagggcggaaggctgctggggtgcgcaggtgggcgctcgcgtctccccaccccagggctccccccgtgctgaggctgagccctcttggccctgaggcctggcattgggtggatgcgggctggccgtggcccagtgaagcctgcagagccccgctgtccttgcccctggtggttccgctgtggggctgctgccctctgtgttcctacgcttccctccagtccttgccgcacgcgtaggcatctccacgctggaggggggcctgccaggactcctgtctctgggtgaggccgcatccttcaaggcccatgtgggctgtgcgtttctcagaccctccttctgtccctacacctgctccttggaccccccagtctgtggccaccctgaagaatgtgcagaaacacttgtgtggcctgtccctgtctctctgacagccttccatttgtgaagtgccctgtggccccctccccagcacctctgtctgccatgcgcttcttcctcccaggctaccctgagcctttcctggcccagtcctcaccacagtccacagaagccacaaacaggctcatagccaagctgtgacctggtcctgaccatctggggcacgagggcctgggctggccctgctaggctggagaagccctgtcacctgtgcacatcttgctggtggaggcatggcccactgtgcaggaccccaccctcgggggctttcggctcccacactgatgattctccccagcatccacaccgggcctggcgctacgtactcaggcccccagctctcgtgtcctggaggaagagctagctccagacatgggttgatcacctagaggagctctggctaaggcacagttttctagaaataaaacatttattcggtttttaaacaattaaaaaatcttgtctgggcaggccctttgctcaggcctgtgtgtcctgctcagccactctgtcgaccacactgacccaggggctgccccggacatagaagcggaggggtttccgggcccactcccctgcatggccgacgcccacccgggctgctgccactacagccggctcactgggctccaggggaccacgctccagccatacagcttcatcctgtgccaggtccctctggtcaaagctcttgttgatggccagggcctggcacagcttggaggggccactgcagagctcgcggtccttgaggacacggctggcggtgcctttccggagggtgctgcgaagctgacgcatggtctccagaccttccaggggctccagtgctcgcagcaagacgcaagccccgtccccctggctggagatgttcatgcagaagtacatgccgtaaatgatgtacacgtacagggtccccggcttcatgaacatgcctcggttgcggggggtctgccggccaccccttgagtgggcggcttcatcctctggccccaggtatgcctcggtctccacgatgcggcctcggagttctgtgccattaggaagtcgccggactaggaccctgtccccagaaatgcccgggccagggggactgccggctggtcgaagaactccaaccccagtcgggtaaggtggccctttgggcttgagaaatagatgctgcggtatgggccccggagtggtgggcggtcccaagcagcgctccctggggcaaaggtgcctgggcctgcatcggacgagctgttgtggctgctctgcaggtgcctgggctgcgtcggacgagctgtgtggctgccctgctctagctggtcgctgcttcttttgccccatccgtcggcaaaactgggccccgctgcgcgcgggcatccggcggctcgggccggggcttcgtgggactcggaccccggcgcggagcccagcagccgccgaccacggaagcacccctaggaccggggc

SEQ ID NO: 383360 - DNA, 3070 bp, Homo sapiens
ttcccatccgcaccagcaagagggcccctgtgccccaaacgcgaaccgtacggctccagacagcaccgcggaactcggtggcttccagaaggccccgcgcctgcgcattccgctgcctgcgcctgcgcctgcgcctgcgccgttctcccggccgccgccttagcacctcctccggacggtgtcgccgaagtctcgcgagcccggagcgtggcacgtgggtaagccgcgtagcagatacgctgccagcaacacgggcgaccatgctgatgagcaggacggcgattccagacaaagtttcactctgtcgcccaaggctggagtgcagtggtgtgatctcggcttgctgcaacctcacctctagggttcaagcgattctcctgcctcagcctcccgagtagctgggattacaggcatccaccaccaagcgagccatgtcctccaaccgatgagcaattggttgcagggttttcagatgttattctggcaacaattttggcaaccaagtctgaaatgtgtggccaaaaatttgaactgaagattgataatgtgcgatttgttgggcacccaacactgctacagcatgctctggggcagatctccaaaacagatccttccccgaagagggaagcacctactatgattctttttaatgtggtgtttgcactgagggccaacgcagacccgtcagtgataaactgtctgcataacctgtcccgtcgtatcgccaccgtgctgcagcacgaggagcgccgctgccagtacctcacccgggaggccaagctgatcctggcgctccaggatgaggtgtccgccatggctgatggaaatgaaggtcctcagtccccattccatcacatcctgcccaagtgcaagctggccagggacctcaaggaagcttatgacagcctgtgcacgtcgggcgtagttcggcttcacatcaacagctggctggaggtgagcttctgcctgccccacaagatccactatgcggcctccagtctgatccccccagaggccatcgaacggagcctgaaagccatccgcccctaccatgccctgctgctgctcagtgatgagaagtccttgctgggtgagcttcctattgactgctcccctgccctagtgcgggtgatcaagaccacatctgctgtgaagaacctgcagcagctagcccaagatgcggacctggccttgctgcaggttttccagcttgcagctcatctggtgtactggggcaaggccatcatcatctacccgctgtgtgagaacaacgtctacatgctgtctcccaatgccagcgtatgtctgtactccccgctggccgagcagttctcccaccagttcccatctcatgacctgccgtccgttcttgccaagttctccttgccggtctccttgtcagaatttaggaatcccctggcccccgctgtgcaggagacccagctcatccagatggtggtgtggatgctgcagcgccggcttctcatccagctgcacacctatgtctgcctgatggcctcacccagcgaggaggagccccgtccgcgagaggacgacgtccccttcactgcccgggtcggcggtcgcagcctcagcacgcccaacgccctcagctttggctccccaaccagcagcgatgacatgaccctcaccagccccagcatggacaactccagcgcagagctacttcccagcggggactcgccactgaaccagaggatgacggagaacctgctggccagcctgtcggagcatgaacgcgcagccatcctcagtgtacccgcagcccagaaccctgaggacctccgcatgtttgccaggctccttcactacttccgcggccgccaccacctggaggagattatgtacaacgagaacacgcggcgctcccagctgctcatgctgtttgacaagttccgcagcgtgctggtggtgaccacccacgaggaccctgtcattgccgtcttccaggctctgctcccctgagcccaggcggagggcggaaggctgctggggtgcgcaggtgggcgctcgcgtctccccaccccagggctccccccgtgctgaggctgagccctcttggccctgaggcctggcattgggtggatgcgggctggccgtggcccagtgaagcctgcagagccccgctgtccttgcccctggtggttccgctgtggggctgctgccctctgtgttcctacgcttccctccagtccttgccgcacgcgtaggcatctccacgctggaggggggcctgccaggactcctgtctctgggtgaggccgcatccttcaaggcccatgtgggctgtgcgtttctcagaccctccttctgtccctacacctgctccttggaccccccagtctgtggccaccctgaagaatgtgcagaaacacttgtgtggcctgtccctgtctctctgacagccttccatttgtgaagtgccctgtggccccctccccagcacctctgtctgccatgcgcttcttcctcccaggctaccctgagcctttcctggcccagtcctcaccacagtccacagaagccacaaacaggctcatagccaagctgtgacctggtcctgaccatctggggcacgagggcctgggctggccctgctaggctggagaagccctgtcacctgtgcacatcttgctggtggaggcatggcccactgtgcaggaccccaccctcgggggctttcggctcccacactgatgattctccccagcatccacaccgggcctggcgctacgtactcaggcccccagctctcgtgtcctggaggaagagctagctccagacatgggttgatcacctagaggagctctggctaaggcacagttttctagaaataaaacatttattcggtttttaaacaattaaaaaatcttgtctgggcaggccctttgctcaggcctgtgtgtcctgctcagccactctgtcgaccacactgacccaggggctgccccggacatagaagcggaggggtttccgggcccactcccctgcatgtccccgtacatcgttagaagcttgaattcgagcagtagtagtagtaggcggccgc

SEQ ID NO: 383361 - DNA, 3833 bp, Homo sapiens
ttcccatccgcaccagcaagagggcccctgtgccccaaacgcgaaccgtacggctccagacagcaccgcggaactcggtggcttccagaaggccccgcgcctgcgcattccgctgcctgcgcctgcgcctgcgcctgcgccgttctcccggccgccgccttagcacctcctccggacggtgtcgccgaagtctcgcgagcccggagcgtggcacgtgggtaagccgcgtagcagatacgctgccagcaacacgggcgaccatgctgatgagcaggacggcgattccagacaaagtttcactctgtcgcccaaggctggagtgcagtggtgtgatctcggcttgctgcaacctcacctctagggttcaagcgattctcctgcctcagcctcccgagtagctgggattacaggcatccaccaccaagcgagccatgtcctccaaccgatgagcaattggttgcagggttttcagatgttattctggcaacaattttggcaaccaagtctgaaatgtgtggccaaaaatttgaactgaagattgataatgtgcgatttgttgggcacccaacactgctacagcatgctctggggcagatctccaaaacagatccttccccgaagagggaagcacctactatgattctttttaatgtggtgtttgcactgagggccaacgcagacccgtcagtgataaactgtctgcataacctgtcccgtcgtatcgccaccgtgctgcagcacgaggagcgccgctgccagtacctcacccgggaggccaagctgatcctggcgctccaggatgaggtgtccgccatggctgatggaaatgaaggtcctcagtccccattccatcacatcctgcccaagtgcaagctggccagggacctcaaggaagcttatgacagcctgtgcacgtcgggcgtagttcggcttcacatcaacagctggctggaggtgagcttctgcctgccccacaagatccactatgcggcctccagtctgatccccccagaggccatcgaacggagcctgaaagccatccgcccctaccatgccctgctgctgctcagtgatgagaagtccttgctgggtgagcttcctattgactgctcccctgccctagtgcgggtgatcaagaccacatctgctgtgaagaacctgcagcagctagcccaagatgcggacctggccttgctgcaggttttccagcttgcagctcatctggtgtactggggcaaggccatcatcatctacccgctgtgtgagaacaacgtctacatgctgtctcccaatgccagcgtatgtctgtactccccgctggccgagcagttctcccaccagttcccatctcatgacctgccgtccgttcttgccaagttctccttgccggtctccttgtcagaatttaggaatcccctggcccccgctgtgcaggagacacctatgtctgcctgatggcctcacccagcgaggaggagccccgtccgcgagaggacgacgtccccttcactgcccgggtcggcggtcgcagcctcagcacgcccaacgccctcagctttggctccccaaccagcagcgatgacatgaccctcaccagccccagcatggacaactccagcgcagagctacttcccagcggggactcgccactgaaccagaggatgacggagaacctgctggccagcctgtcggagcatgaacgcgcagccatcctcagtgtacccgcagcccagaaccctgaggacctccgcatgtttgccaggctccttcactacttccgcggccgccaccacctggaggagattatgtacaacgagaacacgcggcgctcccagctgctcatgctgtttgacaagttccgcagcgtgctggtggtgaccacccacgaggaccctgtcattgccgtcttccaggctctgctcccctgagcccaggcggagggcggaaggctgctggggtgcgcaggtgggcgctcgcgtctccccaccccagggctccccccgtgctgaggctgagccctcttggccctgaggcctggcattgggtggatgcgggctggccgtggcccagtgaagcctgcagagccccgctgtccttgcccctggtggttccgctgtggggctgctgccctctgtgttcctacgcttccctccagtccttgccgcacgcgtaggcatctccacgctggaggggggcctgccaggactcctgtctctgggtgaggccgcatccttcaaggcccatgtgggctgtgcgtttctcagaccctccttctgtccctacacctgctccttggaccccccagtctgtggccaccctgaagaatgtgcagaaacacttgtgtggcctgtccctgtctctctgacagccttccatttgtgaagtgccctgtggccccctccccagcacctctgtctgccatgcgcttcttcctcccaggctaccctgagcctttcctggcccagtcctcaccacagtccacagaagccacaaacaggctcatagccaagctgtgacctggtcctgaccatctggggcacgagggcctgggctggccctgctaggctggagaagccctgtcacctgtgcacatcttgctggtggaggcatggcccactgtgcaggaccccaccctcgggggctttcggctcccacactgatgattctccccagcatccacaccgggcctggcgctacgtactcaggcccccagctctcgtgtcctggaggaagagctagctccagacatgggttgatcacctagaggagctctggctaaggcacagttttctagaaataaaacatttattcggtttttaaacaattaaaaaatcttgtctgggcaggccctttgctcaggcctgtgtgtcctgctcagccactctgtcgaccacactgacccaggggctgccccggacatagaagcggaggggtttccgggcccactcccctgcatggccgacgcccacccgggctgctgccactacagccggctcactgggctccaggggaccacgctccagccatacagcttcatcctgtgccaggtccctctggtcaaagctcttgttgatggccagggcctggcacagcttggaggggccactgcagagctcgcggtccttgaggacacggctggcggtgcctttccggagggtgctgcgaagctgacgcatggtctccagaccttccaggggctccagtgctcgcagcaagacgcaagccccgtccccctggctggagatgttcatgcagaagtacatgccgtaaatgatgtacacgtacagggtccccggcttcatgaacatgcctcggttgcggggggtctgccggccaccccttgagtgggcggcttcatcctctggccccaggtatgcctcggtctccacgatgcggcctcggagttctgtgccattaggaagtcgccggactaggaccctgtccccagaaatgcccgggccagggggactgccggctggtcgaagaactccaaccccagtcgggtaaggtggccctttgggcttgagaaatagatgctgcggtatgggccccggagtggtgggcggtcccaagcagcgctccctggggcaaaggtgcctgggcctgcatcggacgagctgttgtggctgctctgcaggtgcctgggctgcgtcggacgagctgtgtggctgccctgctctagctggtcgctgcttcttttgccccatccgtcggcaaaactgggccccgctgcgcgcgggcatccggcggctcgggccggggcttcgtgggactcggaccccggcgcggagcccagcagccgccgaccacggaagcacccctaggaccggggc

SEQ ID NO: 383362 - DNA, 2398 bp, Homo sapiens
ttcccatccgcaccagcaagagggcccctgtgccccaaacgcgaaccgtacggctccagacagcaccgcggaactcggtggcttccagaaggccccgcgcctgcgcattccgctgcctgcgcctgcgcctgcgcctgcgccgttctcccggccgccgccttagcacctcctccggacggtgtcgccgaagtctcgcgagcccggagcgtggcacgtgggtaagccgcgtagcagatacgctgccagcaacacgggcgaccatgctgatgagcaggacggcgattccagacaaagtttcactctgtcgcccaaggctggagtgcagtggtgtgatctcggcttgctgcaacctcacctctagggttcaagcgattctcctgcctcagcctcccgagtagctgggattacaggcatccaccaccaagcgagccatgtcctccaaccgatgagcaattggttgcagggttttcagatgttattctggcaacaattttggcaaccaagtctgaaatgtgtggccaaaaatttgaactgaagattgataatgtgcgatttgttgggcacccaacactgctacagcatgctctggggcagatctccaaaacagatccttccccgaagagggaagcacctactatgattctttttaatgtggtgtttgcactgagggccaacgcagacccgtcagtgataaactgtctgcataacctgtcccgtcgtatcgccaccgtgctgcagcacgaggagcgccgctgccagtacctcacccgggaggccaagctgatcctggcgctccaggatgaggtgtccgccatggctgatggaaatgaaggtcctcagtccccattccatcacatcctgcccaagtgcaagctggccagggacctcaaggaagcttatgacagcctgtgcacgtcgggcgtagttcggcttcacatcaacagctggctggaggtgagcttctgcctgccccacaagatccactatgcggcctccagtctgatccccccagaggccatcgaacggagcctgaaagccatccgcccctaccatgccctgctgctgctcagtgatgagaagtccttgctgggtgagcttcctattgactgctcccctgccctagtgcgggtgatcaagaccacatctgctgtgaagaacctgcagcagctagcccaagatgcggacctggccttgctgcaggttttccagcttgcagctcatctggtgtactggggcaaggccatcatcatctacccgctgtgtgagaacaacgtctacatgctgtctcccaatgccagcgtatgtctgtactccccgctggccgagcagttctcccaccagttcccatctcatgacctgccgtccgttcttgccaagttctccttgccggtctccttgtcagaatttaggaatcccctggcccccgctgtgcaggagacccagctcatccagatggtggtgtggatgctgcagcgccggcttctcatccagctgcacacctatgtctgcctgatggcctcacccagcgaggaggagccccgtccgcgagaggacgacgtccccttcactgcccgggtcggcggtcgcagcctcagcacgcccaacgccctcagctttggctccccaaccagcagcgatgacatgaccctcaccagccccagcatggacaactccagcgcagagctacttcccagcggggactcgccactgaaccagaggatgacggagaacctgctggccagcctgtcggagcatgaacgcgcagccatcctcagtgtacccgcagcccagaaccctgaggacctccgcatgtttgccaggctccttcactacttccgcggccgccaccacctggaggagattatgtacaacgagaacacgcggcgctcccagctgctcatgctgtttgacaagttccgcagcgtgctggtggtgaccacccacgaggaccctgtcattgccgtcttccaggctctgctcccctgagcccaggcggagggcggaaggctgctggggtgcgcaggtttggaaaggccccttggattcctggctggggacaatgatgacctggaccctggccagaagagccctggccctccagcaaggcagcacctgctctgatgcacctgtgcacccctggccctcccagccacctgggagcccgaagcttagcctgtaggtggccaagccagtccctactcttgggctgcggccacgtgaggctccgcatcagcagccaggggcgagcactagtggacaaagccagcaaatgcggcgttcctgtgagcagataccctcaaccagccagctgtcaaaagtatttcaagataaaatccaggccaagcaaagcctttaagttcccgtccattctgtgattcccacgctgcttccagctcac

SEQ ID NO: 383363 - DNA, 2660 bp, Homo sapiens
ttcccatccgcaccagcaagagggcccctgtgccccaaacgcgaaccgtacggctccagacagcaccgcggaactcggtggcttccagaaggccccgcgcctgcgcattccgctgcctgcgcctgcgcctgcgcctgcgccgttctcccggccgccgccttagcacctcctccggacggtgtcgccgaagtctcgcgagcccggagcgtggcacgtgggtaagccgcgtagcagatacgctgccagcaacacgggcgaccatgctgatgagcaggacggcgattccagacaaagtttcactctgtcgcccaaggctggagtgcagtggtgtgatctcggcttgctgcaacctcacctctagggttcaagcgattctcctgcctcagcctcccgagtagctgggattacaggcatccaccaccaagcgagccatgtcctccaaccgatgagcaattggttgcagggttttcagatgttattctggcaacaattttggcaaccaagtctgaaatgtgtggccaaaaatttgaactgaagattgataatgtgcgatttgttgggcacccaacactgctacagcatgctctggggcagatctccaaaacagatccttccccgaagagggaagcacctactatgattctttttaatgtggtgtttgcactgagggccaacgcagacccgtcagtgataaactgtctgcataacctgtcccgtcgtatcgccaccgtgctgcagcacgaggagcgccgctgccagtacctcacccgggaggccaagctgatcctggcgctccaggatgaggtgtccgccatggctgatggaaatgaaggtcctcagtccccattccatcacatcctgcccaagtgcaagctggccagggacctcaaggaagcttatgacagcctgtgcacgtcgggcgtagttcggcttcacatcaacagctggctggaggtgagcttctgcctgccccacaagatccactatgcggcctccagtctgatccccccagaggccatcgaacggagcctgaaagccatccgcccctaccatgccctgctgctgctcagtgatgagaagtccttgctgggtgagcttcctattgactgctcccctgccctagtgcgggtgatcaagaccacatctgctgtgaagaacctgcagcagctagcccaagatgcggacctggccttgctgcaggttttccagcttgcagctcatctggtgtactggggcaaggccatcatcatctacccgctgtgtgagaacaacgtctacatgctgtctcccaatgccagcgtatgtctgtactccccgctggccgagcagttctcccaccagttcccatctcatgacctgccgtccgttcttgccaagttctccttgccggtctccttgtcagaatttaggaatcccctggcccccgctgtgcaggagacccagctcatccagatggtggtgtggatgctgcagcgccggcttctcatccagctgcacacctatgtctgcctgatggcctcacccagcgaggaggagccccgtccgcgagaggacgacgtccccttcactgcccgggtcggcggtcgcagcctcagcacgcccaacgccctcagctttggctccccaaccagcagcgatgacatgaccctcaccagccccagcatggacaactccagcgcagagctacttcccagcggggactcgccactgaaccagaggatgacggagaacctgctggccagcctgtcggagcatgaacgcgcagccatcctcagtgtacccgcagcccagaaccctgaggacctccgcatgtttgccaggctccttcactacttccgcggccgccaccacctggaggagattatgtacaacgagaacacgcggcgctcccagctgctcatgctgtttgacaagttccgcagcgtgctggtggtgaccacccacgaggaccctgtcattgccgtcttccaggctctgctcccctgagcccaggcggagggcggaaggctgctggggtgcgcaggtgggcgctcgcgtctccccaccccagggctccccccgtgctgaggctgagccctcttggccctgaggcctggcattgggtggatgcgggctggccgtggcccagtgaagcctgcagagccccgctgtccttgcccctggtggttccgctgtggggctgctgccctctgtgttcctacgcttccctccagtccttgccgcacgcgtaggcatctccacgctggaggggggcctgccaggactcctgtctctgggtgaggccgcatccttcaaggcccatgtgggctgtgcgtttctcagaccctccttctgtccctacacctgctccttggaccccccagtctgtggccaccctgaagaatgtgcagaaacacttgtgtggcctgtccctgtctctctgacagccttccatttgtgaagtgccctgtggaggcatggcccactgtgcaggaccccaccctcgggggctttcggctcccacactgatgattctccccagcatccacaccgggcctggcgctacgtactcaggcccccagctctcgtgtcctggaggaagagctagctccagacatgggttgatcacctagaggagctctggctaaggcacagttttctagaaataaaacatttattcg

SEQ ID NO: 383364 - DNA, 3077 bp, Homo sapiens
ggcccgatgctccgaccccacactcccgtcgtccttccgctggtgcctgtcggtccaccctcggccctccgctgctgcacccgtccccctcccagataaaccaggagcgcccggcgtcccagacaagtaagccgcgtagcagatacgctgccagcaacacgggcgaccatgctgatgagcaggacggcgattccagacaaagtttcactctgtcgcccaaggctggagtgcagtggtgtgatctcggcttgctgcaacctcacctctagggttcaagcgattctcctgcctcagcctcccgagtagctgggattacaggcatccaccaccaagcgagccatgtcctccaaccgatgagcaattggttgcagggttttcagatgttattctggcaacaattttggcaaccaagtctgaaatgtgtggccaaaaatttgaactgaagattgataatgtgcgatttgttgggcacccaacactgctacagcatgctctggggcagatctccaaaacagatccttccccgaagagggaagcacctactatgattctttttaatgtggtgtttgcactgagggccaacgcagacccgtcagtgataaactgtctgcataacctgtcccgtcgtatcgccaccgtgctgcagcacgaggagcgccgctgccagtacctcacccgggaggccaagctgatcctggcgctccaggatgaggtgtccgccatggctgatggaaatgaaggtcctcagtccccattccatcacatcctgcccaagtgcaagctggccagggacctcaaggaagcttatgacagccagcagcgatgacatgaccctcaccagccccagcatggacaactccagcgcagagctacttcccagcggggactcgccactgaaccagaggatgacggagaacctgctggccagcctgtcggagcatgaacgcgcagccatcctcagtgtacccgcagcccagaaccctgaggacctccgcatgtttgccaggctccttcactacttccgcggccgccaccacctggaggagattatgtacaacgagaacacgcggcgctcccagctgctcatgctgtttgacaagttccgcagcgtgctggtggtgaccacccacgaggaccctgtcattgccgtcttccaggctctgctcccctgagcccaggcggagggcggaaggctgctggggtgcgcaggtgggcgctcgcgtctccccaccccagggctccccccgtgctgaggctgagccctcttggccctgaggcctggcattgggtggatgcgggctggccgtggcccagtgaagcctgcagagccccgctgtccttgcccctggtggttccgctgtggggctgctgccctctgtgttcctacgcttccctccagtccttgccgcacgcgtaggcatctccacgctggaggggggcctgccaggactcctgtctctgggtgaggccgcatccttcaaggcccatgtgggctgtgcgtttctcagaccctccttctgtccctacacctgctccttggaccccccagtctgtggccaccctgaagaatgtgcagaaacacttgtgtggcctgtccctgtctctctgacagccttccatttgtgaagtgccctgtggccccctccccagcacctctgtctgccatgcgcttcttcctcccaggctaccctgagcctttcctggcccagtcctcaccacagtccacagaagccacaaacaggctcatagccaagctgtgacctggtcctgaccatctggggcacgagggcctgggctggccctgctaggctggagaagccctgtcacctgtgcacatcttgctggtggaggcatggcccactgtgcaggaccccaccctcgggggctttcggctcccacactgatgattctccccagcatccacaccgggcctggcgctacgtactcaggcccccagctctcgtgtcctggaggaagagctagctccagacatgggttgatcacctagaggagctctggctaaggcacagttttctagaaataaaacatttattcggtttttaaacaattaaaaaatcttgtctgggcaggccctttgctcaggcctgtgtgtcctgctcagccactctgtcgaccacactgacccaggggctgccccggacatagaagcggaggggtttccgggcccactcccctgcatggccgacgcccacccgggctgctgccactacagccggctcactgggctccaggggaccacgctccagccatacagcttcatcctgtgccaggtccctctggtcaaagctcttgttgatggccagggcctggcacagcttggaggggccactgcagagctcgcggtccttgaggacacggctggcggtgcctttccggagggtgctgcgaagctgacgcatggtctccagaccttccaggggctccagtgctcgcagcaagacgcaagccccgtccccctggctggagatgttcatgcagaagtacatgccgtaaatgatgtacacgtacagggtccccggcttcatgaacatgcctcggttgcggggggtctgccggccaccccttgagtgggcggcttcatcctctggccccaggtatgcctcggtctccacgatgcggcctcggagttctgtgccattaggaagtcgccggactaggaccctgtccccagaaatgcccgggccagggggactgccggctggtcgaagaactccaaccccagtcgggtaaggtggccctttgggcttgagaaatagatgctgcggtatgggccccggagtggtgggcggtcccaagcagcgctccctggggcaaaggtgcctgggcctgcatcggacgagctgttgtggctgctctgcaggtgcctgggctgcgtcggacgagctgtgtggctgccctgctctagctggtcgctgcttcttttgccccatccgtcggcaaaactgggccccgctgcgcgcgggcatccggcggctcgggccggggcttcgtgggactcggaccccggcgcggagcccagcagccgccgaccacggaagcacccctaggaccggggc

SEQ ID NO: 383365 - DNA, 2255 bp, Homo sapiens
acagaggaggtggacagccacagagcatggacaactccagcgcagagctacttcccagcggggactcgccactgaaccagaggatgacggagaacctgctggccagcctgtcggagcatgaacgcgcagccatcctcagtgtacccgcagcccagaaccctgaggacctccgcatgtttgccaggctccttcactacttccgcggccgccaccacctggaggagattatgtacaacgagaacacgcggcgctcccagctgctcatgctgtttgacaagttccgcagcgtgctggtggtgaccacccacgaggaccctgtcattgccgtcttccaggctctgctcccctgagcccaggcggagggcggaaggctgctggggtgcgcaggtgggcgctcgcgtctccccaccccagggctccccccgtgctgaggctgagccctcttggccctgaggcctggcattgggtggatgcgggctggccgtggcccagtgaagcctgcagagccccgctgtccttgcccctggtggttccgctgtggggctgctgccctctgtgttcctacgcttccctccagtccttgccgcacgcgtaggcatctccacgctggaggggggcctgccaggactcctgtctctgggtgaggccgcatccttcaaggcccatgtgggctgtgcgtttctcagaccctccttctgtccctacacctgctccttggaccccccagtctgtggccaccctgaagaatgtgcagaaacacttgtgtggcctgtccctgtctctctgacagccttccatttgtgaagtgccctgtggccccctccccagcacctctgtctgccatgcgcttcttcctcccaggctaccctgagcctttcctggcccagtcctcaccacagtccacagaagccacaaacaggctcatagccaagctgtgacctggtcctgaccatctggggcacgagggcctgggctggccctgctaggctggagaagccctgtcacctgtgcacatcttgctggtggaggcatggcccactgtgcaggaccccaccctcgggggctttcggctcccacactgatgattctccccagcatccacaccgggcctggcgctacgtactcaggcccccagctctcgtgtcctggaggaagagctagctccagacatgggttgatcacctagaggagctctggctaaggcacagttttctagaaataaaacatttattcggtttttaaacaattaaaaaatcttgtctgggcaggccctttgctcaggcctgtgtgtcctgctcagccactctgtcgaccacactgacccaggggctgccccggacatagaagcggaggggtttccgggcccactcccctgcatggccgacgcccacccgggctgctgccactacagccggctcactgggctccaggggaccacgctccagccatacagcttcatcctgtgccaggtccctctggtcaaagctcttgttgatggccagggcctggcacagcttggaggggccactgcagagctcgcggtccttgaggacacggctggcggtgcctttccggagggtgctgcgaagctgacgcatggtctccagaccttccaggggctccagtgctcgcagcaagacgcaagccccgtccccctggctggagatgttcatgcagaagtacatgccgtaaatgatgtacacgtacagggtccccggcttcatgaacatgcctcggttgcggggggtctgccggccaccccttgagtgggcggcttcatcctctggccccaggtatgcctcggtctccacgatgcggcctcggagttctgtgccattaggaagtcgccggactaggaccctgtccccagaaatgcccgggccagggggactgccggctggtcgaagaactccaaccccagtcgggtaaggtggccctttgggcttgagaaatagatgctgcggtatgggccccggagtggtgggcggtcccaagcagcgctccctggggcaaaggtgcctgggcctgcatcggacgagctgttgtggctgctctgcaggtgcctgggctgcgtcggacgagctgtgtggctgccctgctctagctggtcgctgcttcttttgccccatccgtcggcaaaactgggccccgctgcgcgcgggcatccggcggctcgggccggggcttcgtgggactcggaccccggcgcggagcccagcagccgccgaccacggaagcacccctaggaccggggc

SEQ ID NO: 383366 - DNA, 345 bp, Homo sapiens
ggccctcgctgctatgttcacattacctgtccccagaaatgcccgggccagggggactgccggctggtcgaagaactccaaccccagtcgggtaaggtggccctttgggcttgagaaatagatgctgcggtatgggccccggagtggtgggcggtcccaagcagcgctccctggggcaaaggtgcctgggcctgcatcggacgagctgttgtggctgctctgcaggtgcctgggctgcgtcggacgagctgtgtggctgccctgctctagctggtcgctgcttcttttgccccatccgtcggcaaaactgtaatgggaaaaaaaataaataagcatccgaatagg

SEQ ID NO: 383367 - DNA, 3891 bp, Homo sapiens
ttcccatccgcaccagcaagagggcccctgtgccccaaacgcgaaccgtacggctccagacagcaccgcggaactcggtggcttccagaaggccccgcgcctgcgcattccgctgcctgcgcctgcgcctgcgcctgcgccgttctcccggccgccgccttagcacctcctccggacggtgtcgccgaagtctcgcgagcccggagcgtggcacgtgggtaagccgcgtagcagatacgctgccagcaacacgggcgaccatgctgatgagcaggacggcgattccagacaaagtttcactctgtcgcccaaggctggagtgcagtggtgtgatctcggcttgctgcaacctcacctctagggttcaagcgattctcctgcctcagcctcccgagtagctgggattacaggcatccaccaccaagcgagccatgtcctccaaccgatgagcaattggttgcagggttttcagatgttattctggcaacaattttggcaaccaagtctgaaatgtgtggccaaaaatttgaactgaagattgataatgtgcgatttgttgggcacccaacactgctacagcatgctctggggcagatctccaaaacagatccttccccgaagagggaagcacctactatgattctttttaatgtggtgtttgcactgagggccaacgcagacccgtcagtgataaactgtctgcataacctgtcccgtcgtatcgccaccgtgctgcagcacgaggagcgccgctgccagtacctcacccgggaggccaagctgatcctggcgctccaggatgaggtgtccgccatggctgatggaaatgaaggtcctcagtccccattccatcacatcctgcccaagtgcaagctggccagggacctcaaggaagcttatgacagcctgtgcacgtcgggcgtagttcggcttcacatcaacagctggctggaggtgagcttctgcctgccccacaagatccactatgcggcctccagtctgatccccccagaggccatcgaacggagcctgaaagccatccgcccctaccatgccctgctgctgctcagtgatgagaagtccttgctgggtgagcttcctattgactgctcccctgccctagtgcgggtgatcaagaccacatctgctgtgaagaacctgcagcagctagcccaagatgcggacctggccttgctgcaggttttccagcttgcagctcatctggtgtactggggcaaggccatcatcatctacccgctgtgtgagaacaacgtctacatgctgtctcccaatgccagcgtatgtctgtactccccgctggccgagcagttctcccaccagttcccatctcatgacctgccgtccgttcttgccaagttctccttgccggtctccttgtcagaatttaggaatcccctggcccccgctgtgcaggagacccagctcatccagatggtggtgtggatgctgcagcgccggcttctcatccagctgcacacctatgtctgcctgatggcctcacccagcgaggaggagccccgtccgcgagaggacgacgtccccttcactgcccgggtcggcggtcgcagcctcagcacgcccaacgccctcagctttggctccccaaccagcagcgatgacatgaccctcaccagccccagcatggacaactccagcgcagagctacttcccagcggggactcgccactgaaccagaggatgacggagaacctgctggccagcctgtcggagcatgaacgcgcagccatcctcagtgtacccgcagcccagaaccctgaggacctccgcatgtttgccaggctccttcactacttccgcggccgccaccacctggaggagattatgtacaacgagaacacgcggcgctcccagctgctcatgctgtttgacaagttccgcagcgtgctggtggtgaccacccacgaggaccctgtcattgccgtcttccaggctctgctcccctgagcccaggcggagggcggaaggctgctggggtgcgcaggtgggcgctcgcgtctccccaccccagggctccccccgtgctgaggctgagccctcttggccctgaggcctggcattgggtggatgcgggctggccgtggcccagtgaagcctgcagagccccgctgtccttgcccctggtggttccgctgtggggctgctgccctctgtgttcctacgcttccctccagtccttgccgcacgcgtaggcatctccacgctggaggggggcctgccaggactcctgtctctgggtgaggccgcatccttcaaggcccatgtgggctgtgcgtttctcagaccctccttctgtccctacacctgctccttggaccccccagtctgtggccaccctgaagaatgtgcagaaacacttgtgtggcctgtccctgtctctctgacagccttccatttgtgaagtgccctgtggccccctccccagcacctctgtctgccatgcgcttcttcctcccaggctaccctgagcctttcctggcccagtcctcaccacagtccacagaagccacaaacaggctcatagccaagctgtgacctggtcctgaccatctggggcacgagggcctgggctggccctgctaggctggagaagccctgtcacctgtgcacatcttgctggtggaggcatggcccactgtgcaggaccccaccctcgggggctttcggctcccacactgatgattctccccagcatccacaccgggcctggcgctacgtactcaggcccccagctctcgtgtcctggaggaagagctagctccagacatgggttgatcacctagaggagctctggctaaggcacagttttctagaaataaaacatttattcggtttttaaacaattaaaaaatcttgtctgggcaggccctttgctcaggcctgtgtgtcctgctcagccactctgtcgaccacactgacccaggggctgccccggacatagaagcggaggggtttccgggcccactcccctgcatggccgacgcccacccgggctgctgccactacagccggctcactgggctccaggggaccacgctccagccatacagcttcatcctgtgccaggtccctctggtcaaagctcttgttgatggccagggcctggcacagcttggaggggccactgcagagctcgcggtccttgaggacacggctggcggtgcctttccggagggtgctgcgaagctgacgcatggtctccagaccttccaggggctccagtgctcgcagcaagacgcaagccccgtccccctggctggagatgttcatgcagaagtacatgccgtaaatgatgtacacgtacagggtccccggcttcatgaacatgcctcggttgcggggggtctgccggccaccccttgagtgggcggcttcatcctctggccccaggtatgcctcggtctccacgatgcggcctcggagttctgtgccattaggaagtcgccggactaggaccctgtccccagaaatgcccgggccagggggactgccggctggtcgaagaactccaaccccagtcgggtaaggtggccctttgggcttgagaaatagatgctgcggtatgggccccggagtggtgggcggtcccaagcagcgctccctggggcaaaggtgcctgggcctgcatcggacgagctgttgtggctgctctgcaggtgcctgggctgcgtcggacgagctgtgtggctgccctgctctagctggtcgctgcttcttttgccccatccgtcggcaaaactgggccccgctgcgcgcgggcatccggcggctcgggccggggcttcgtgggactcggaccccggcgcggagcccagcagccgccgaccacggaagcacccctaggaccggggc

SEQ ID NO: 383368 - DNA, 3418 bp, Homo sapiens
ggcccgatgctccgaccccacactcccgtcgtccttccgctggtgcctgtcggtccaccctcggccctccgctgctgcacccgtccccctcccagataaaccaggagcgcccggcgtcccagacaagtaagccgcgtagcagatacgctgccagcaacacgggcgaccatgctgatgagcaggacggcgattccaggccaacgcagacccgtcagtgataaactgtctgcataacctgtcccgtcgtatcgccaccgtgctgcagcacgaggagcgccgctgccagtacctcacccgggaggccaagctgatcctggcgctccaggatgaggtgtccgccatggctgatggaaatgaaggtcctcagtccccattccatcacatcctgcccaagtgcaagctggccagggacctcaaggaagcttatgacagcctgtgcacgtcgggcgtagttcggcttcacatcaacagctggctggaggtgagcttctgcctgccccacaagatccactatgcggcctccagtctgatccccccagaggccatcgaacggagcctgaaagccatccgcccctaccatgccctgctgctgctcagtgatgagaagtccttgctgggtgagcttcctattgactgctcccctgccctagtgcgggtgatcaagaccacatctgctgtgaagaacctgcagcagctagcccaagatgcggacctggccttgctgcaggttttccagcttgcagctcatctggtgtactggggcaaggccatcatcatctacccgctgtgtgagaacaacgtctacatgctgtctcccaatgccagcgtatgtctgtactccccgctggccgagcagttctcccaccagttcccatctcatgacctgccgtccgttcttgccaagttctccttgccggtctccttgtcagaatttaggaatcccctggcccccgctgtgcaggagacccagctcatccagatggtggtgtggatgctgcagcgccggcttctcatccagctgcacacctatgtctgcctgatggcctcacccagcgaggaggagccccgtccgcgagaggacgacgtccccttcactgcccgggtcggcggtcgcagcctcagcacgcccaacgccctcagctttggctccccaaccagcagcgatgacatgaccctcaccagccccagcatggacaactccagcgcagagctacttcccagcggggactcgccactgaaccagaggatgacggagaacctgctggccagcctgtcggagcatgaacgcgcagccatcctcagtgtacccgcagcccagaaccctgaggacctccgcatgtttgccaggctccttcactacttccgcggccgccaccacctggaggagattatgtacaacgagaacacgcggcgctcccagctgctcatgctgtttgacaagttccgcagcgtgctggtggtgaccacccacgaggaccctgtcattgccgtcttccaggctctgctcccctgagcccaggcggagggcggaaggctgctggggtgcgcaggtgggcgctcgcgtctccccaccccagggctccccccgtgctgaggctgagccctcttggccctgaggcctggcattgggtggatgcgggctggccgtggcccagtgaagcctgcagagccccgctgtccttgcccctggtggttccgctgtggggctgctgccctctgtgttcctacgcttccctccagtccttgccgcacgcgtaggcatctccacgctggaggggggcctgccaggactcctgtctctgggtgaggccgcatccttcaaggcccatgtgggctgtgcgtttctcagaccctccttctgtccctacacctgctccttggaccccccagtctgtggccaccctgaagaatgtgcagaaacacttgtgtggcctgtccctgtctctctgacagccttccatttgtgaagtgccctgtggccccctccccagcacctctgtctgccatgcgcttcttcctcccaggctaccctgagcctttcctggcccagtcctcaccacagtccacagaagccacaaacaggctcatagccaagctgtgacctggtcctgaccatctggggcacgagggcctgggctggccctgctaggctggagaagccctgtcacctgtgcacatcttgctggtggaggcatggcccactgtgcaggaccccaccctcgggggctttcggctcccacactgatgattctccccagcatccacaccgggcctggcgctacgtactcaggcccccagctctcgtgtcctggaggaagagctagctccagacatgggttgatcacctagaggagctctggctaaggcacagttttctagaaataaaacatttattcggtttttaaacaattaaaaaatcttgtctgggcaggccctttgctcaggcctgtgtgtcctgctcagccactctgtcgaccacactgacccaggggctgccccggacatagaagcggaggggtttccgggcccactcccctgcatggccgacgcccacccgggctgctgccactacagccggctcactgggctccaggggaccacgctccagccatacagcttcatcctgtgccaggtccctctggtcaaagctcttgttgatggccagggcctggcacagcttggaggggccactgcagagctcgcggtccttgaggacacggctggcggtgcctttccggagggtgctgcgaagctgacgcatggtctccagaccttccaggggctccagtgctcgcagcaagacgcaagccccgtccccctggctggagatgttcatgcagaagtacatgccgtaaatgatgtacacgtacagggtccccggcttcatgaacatgcctcggttgcggggggtctgccggccaccccttgagtgggcggcttcatcctctggccccaggtatgcctcggtctccacgatgcggcctcggagttctgtgccattaggaagtcgccggactaggaccctgtccccagaaatgcccgggccagggggactgccggctggtcgaagaactccaaccccagtcgggtaaggtggccctttgggcttgagaaatagatgctgcggtatgggccccggagtggtgggcggtcccaagcagcgctccctggggcaaaggtgcctgggcctgcatcggacgagctgttgtggctgctctgcaggtgcctgggctgcgtcggacgagctgtgtggctgccctgctctagctggtcgctgcttcttttgccccatccgtcggcaaaactgggccccgctgcgcgcgggcatccggcggctcgggccggggcttcgtgggactcggaccccggcgcggagcccagcagccgccgaccacggaagcacccctaggaccggggc

SEQ ID NO: 383369 - DNA, 3681 bp, Homo sapiens
ttcccatccgcaccagcaagagggcccctgtgccccaaacgcgaaccgtacggctccagacagcaccgcggaactcggtggcttccagaaggccccgcgcctgcgcattccgctgcctgcgcctgcgcctgcgcctgcgccgttctcccggccgccgccttagcacctcctccggacggtgtcgccgaagtctcgcgagcccggagcgtggcacgtgggtaagccgcgtagcagatacgctgccagcaacacgggcgaccatgctgatgagcaggacggcgattccagacaaagtttcactctgtcgcccaaggctggagtgcagtggtgtgatctcggcttgctgcaacctcacctctagggttcaagcgattctcctgcctcagcctcccgagtagctgggattacaggcatccaccaccaagcgagccatgtcctccaaccgatgagcaattggttgcagggttttcagatgttattctggcaacaattttggcaaccaagtctgaaatgtgtggccaaaaatttgaactgaagattgataatgtgcgatttgttgggcacccaacactgctacagcatgctctggggcagatctccaaaacagatccttccccgaagagggaagcacctactatgattctttttaatgtggtgtttgcactgagggccaacgcagacccgtcagtgataaactgtctgcataacctgtcccgtcgtatcgccaccgtgctgcagcacgaggagcgccgctgccagtacctcacccgggaggccaagctgatcctggcgctccaggatgaggtgtccgccatggctgatggaaatgaaggtcctcagtccccattccatcacatcctgcccaagtgcaagctggccagggacctcaaggaagcttatgacagcctgtgcacgtcgggcgtagttcggcttcacatcaacagctggctggaggtgagcttctgcctgccccacaagatccactatgcggcctccagtctgatccccccagaggccatcgaacggagcctgaaagccatccgcccctaccatgccctgctgctgctcagtgatgagaagtccttgctgggtgagcttcctattgactgctcccctgccctagtgcgggtgatcaagaccacatctgctgtgaagaacctgcagcagctagcccaagatgcggacctggccttgctgcaggttttccagcttgcagctcatctggtgtactggggcaaggccatcatcatctacccgctgtgtgagaacaacgtctacatgctgtctcccaatgccagcgtatgtctgtactccccgctggccgagcagttctcccaccagttcccatctcatgacctgccgtccgttcttgccaagttctccttgccggtctccttgtcagaatttaggaatcccctggcccccgctgtgcaggagacccagctcatccagatggtggtgtggatgctgcagcgccggcttctcatccagctgcacacctatgtctgcctgatggcctcacccagcgaggaggagccccgtccgcgagaggacgacgtccccttcactgcccgggtcggcggtcgcagcctcagcacgcccaacgccctcagctttggctccccaaccagcagcgatgacatgaccctcaccagccccagcatggacaactccagcgcagagctacttcccagcggggactcgccactgaaccagaggatgacggagaacctgctggccagcctgtcggagcatgaacgcgcagccatcctcagtgtacccgcagcccagaaccctgaggacctccgcatgtttgccaggctccttcactacttccgcggccgccaccacctggaggagattatgtacaacgagaacacgcggcgctcccagctgctcatgctgtttgacaagttccgcagcgtgctggtggtgaccacccacgaggaccctgtcattgccgtcttccaggctctgctcccctgagcccaggcggagggcggaaggctgctggggtgcgcaggtgggcgctcgcgtctccccaccccagggctccccccgtgctgaggctgagccctcttggccctgaggcctggcattgggtggatgcgggctggccgtggcccagtgaagcctgcagagccccgctgtccttgcccctggtggttccgctgtggggctgctgccctctgtgttcctacgcttccctccagtccttgccgcacgcgtaggcatctccacgctggaggggggcctgccaggactcctgtctctgggtgaggccgcatccttcaaggcccatgtgggctgtgcgtttctcagaccctccttctgtccctacacctgctccttggaccccccagtctgtggccaccctgaagaatgtgcagaaacacttgtgtggcctgtccctgtctctctgacagccttccatttgtgaagtgccctgtggaggcatggcccactgtgcaggaccccaccctcgggggctttcggctcccacactgatgattctccccagcatccacaccgggcctggcgctacgtactcaggcccccagctctcgtgtcctggaggaagagctagctccagacatgggttgatcacctagaggagctctggctaaggcacagttttctagaaataaaacatttattcggtttttaaacaattaaaaaatcttgtctgggcaggccctttgctcaggcctgtgtgtcctgctcagccactctgtcgaccacactgacccaggggctgccccggacatagaagcggaggggtttccgggcccactcccctgcatggccgacgcccacccgggctgctgccactacagccggctcactgggctccaggggaccacgctccagccatacagcttcatcctgtgccaggtccctctggtcaaagctcttgttgatggccagggcctggcacagcttggaggggccactgcagagctcgcggtccttgaggacacggctggcggtgcctttccggagggtgctgcgaagctgacgcatggtctccagaccttccaggggctccagtgctcgcagcaagacgcaagccccgtccccctggctggagatgttcatgcagaagtacatgccgtaaatgatgtacacgtacagggtccccggcttcatgaacatgcctcggttgcggggggtctgccggccaccccttgagtgggcggcttcatcctctggccccaggtatgcctcggtctccacgatgcggcctcggagttctgtgccattaggaagtcgccggactaggaccctgtccccagaaatgcccgggccagggggactgccggctggtcgaagaactccaaccccagtcgggtaaggtggccctttgggcttgagaaatagatgctgcggtatgggccccggagtggtgggcggtcccaagcagcgctccctggggcaaaggtgcctgggcctgcatcggacgagctgttgtggctgctctgcaggtgcctgggctgcgtcggacgagctgtgtggctgccctgctctagctggtcgctgcttcttttgccccatccgtcggcaaaactgggccccgctgcgcgcgggcatccggcggctcgggccggggcttcgtgggactcggaccccggcgcggagcccagcagccgccgaccacggaagcacccctaggaccggggc

SEQ ID NO: 383370 - DNA, 3689 bp, Homo sapiens
ttcccatccgcaccagcaagagggcccctgtgccccaaacgcgaaccgtacggctccagacagcaccgcggaactcggtggcttccagaaggccccgcgcctgcgcattccgctgcctgcgcctgcgcctgcgcctgcgccgttctcccggccgccgccttagcacctcctccggacggtgtcgccgaagtctcgcgagcccggagcgtggcacgtgggtaagccgcgtagcagatacgctgccagcaacacgggcgaccatgctgatgagcaggacggcgattccagacaaagtttcactctgtcgcccaaggctggagtgcagtggtgtgatctcggcttgctgcaacctcacctctagggttcaagcgattctcctgcctcagcctcccgagtagctgggattacaggcatccaccaccaagcgagccatgtcctccaaccgatgagcaattggttgcagggttttcagatgttattctggcaacaattttggcaaccaagtctgaaatgtgtggccaaaaatttgaactgaagattgataatgtgcgatttgttgggcacccaacactgctacagcatgctctggggcagatctccaaaacagatccttccccgaagagggaagcacctactatgattctttttaatgtggtgtttgcactgagggccaacgcagacccgtcagtgataaactgtctgcataacctgtcccgtcgtatcgccaccgtgctgcagcacgaggagcgccgctgccagtacctcacccgggaggccaagctgatcctggcgctccaggatgaggtgtccgccatggctgatggaaatgaaggtcctcagtccccattccatcacatcctgcccaagtgcaagctggccagggacctcaaggaagcttatgacagcctgtgcacgtcgggcgtagttcggcttcacatcaacagctggctggaggtgagcttctgcctgccccacaagatccactatgcggcctccagtctgatccccccagaggccatcgaacggagcctgaaagccatccgcccctaccatgccctgctgctgctcagtgatgagaagtccttgctgggtgagcttcctattgactgctcccctgccctagtgcgggtgatcaagaccacatctgctgtgaagaacctgcagcagctagcccaagatgcggacctggccttgctgcaggttttccagcttgcagctcatctggtgtactggggcaaggccatcatcatctacccgctgtgtgagaacaacgtctacatgctgtctcccaatgccagcgtatgtctgtactccccgctggccgagcagttctcccaccagttcccatctcatgacctgccgtccgttcttgccaagttctccttgccggtctccttgtcagaatttaggaatcccctggcccccgctgtgcaggagacccagctcatccagatggtggtgtggatgctgcagcgccggcttctcatccagctgcacacctatgtctgcctgatggcctcacccagcgaggaggagccccgtccgcgagaggacgacgtccccttcactgcccgggtcggcggtcgcagcctcagcacgcccaacgccctcagctttggctccccaaccagcagcgatgacatgaccctcaccagccccagcatggacaactccagcgcagagctacttcccagcggggactcgccactgaaccagaggatgacggagaacctgctggccagcctgtcggagcatgaacgcgcagccatcctcagtgtacccgcagcccagaaccctgaggacctccgcatgtttgccaggctccttcactacttccgcggccgccaccacctggaggagattatgtacaacgagaacacgcggcgctcccagctgctcatgctgtttgacaagttccgcagcgtgctggtggtgaccacccacgaggaccctgtcattgccgtcttccaggctctgctccccctgaggcctggcattgggtggatgcgggctggccgtggcccagtgaagcctgcagagccccgctgtccttgcccctggtggttccgctgtggggctgctgccctctgtgttcctacgcttccctccagtccttgccgcacgcgtaggcatctccacgctggaggggggcctgccaggactcctgtctctgggtgaggccgcatccttcaaggcccatgtgggctgtgcgtttctcagaccctccttctgtccctacacctgctccttggaccccccagtctgtggccaccctgaagaatgtgcagaaacacttgtgtggcctgtccctgtctctctgacagccttcacagtccacagaagccacaaacaggctcatagccaagctgtgacctggtcctgaccatctggggcacgagggcctgggctggccctgctaggctggagaagccctgtcacctgtgcacatcttgctggtggaggcatggcccactgtgcaggaccccaccctcgggggctttcggctcccacactgatgattctccccagcatccacaccgggcctggcgctacgtactcaggcccccagctctcgtgtcctggaggaagagctagctccagacatgggttgatcacctagaggagctctggctaaggcacagttttctagaaataaaacatttattcggtttttaaacaattaaaaaatcttgtctgggcaggccctttgctcaggcctgtgtgtcctgctcagccactctgtcgaccacactgacccaggggctgccccggacatagaagcggaggggtttccgggcccactcccctgcatggccgacgcccacccgggctgctgccactacagccggctcactgggctccaggggaccacgctccagccatacagcttcatcctgtgccaggtccctctggtcaaagctcttgttgatggccagggcctggcacagcttggaggggccactgcagagctcgcggtccttgaggacacggctggcggtgcctttccggagggtgctgcgaagctgacgcatggtctccagaccttccaggggctccagtgctcgcagcaagacgcaagccccgtccccctggctggagatgttcatgcagaagtacatgccgtaaatgatgtacacgtacagggtccccggcttcatgaacatgcctcggttgcggggggtctgccggccaccccttgagtgggcggcttcatcctctggccccaggtatgcctcggtctccacgatgcggcctcggagttctgtgccattaggaagtcgccggactaggaccctgtccccagaaatgcccgggccagggggactgccggctggtcgaagaactccaaccccagtcgggtaaggtggccctttgggcttgagaaatagatgctgcggtatgggccccggagtggtgggcggtcccaagcagcgctccctggggcaaaggtgcctgggcctgcatcggacgagctgttgtggctgctctgcaggtgcctgggctgcgtcggacgagctgtgtggctgccctgctctagctggtcgctgcttcttttgccccatccgtcggcaaaactgggccccgctgcgcgcgggcatccggcggctcgggccggggcttcgtgggactcggaccccggcgcggagcccagcagccgccgaccacggaagcacccctaggaccggggc

SEQ ID NO: 383371 - DNA, 2870 bp, Homo sapiens
ttcccatccgcaccagcaagagggcccctgtgccccaaacgcgaaccgtacggctccagacagcaccgcggaactcggtggcttccagaaggccccgcgcctgcgcattccgctgcctgcgcctgcgcctgcgcctgcgccgttctcccggccgccgccttagcacctcctccggacggtgtcgccgaagtctcgcgagcccggagcgtggcacgtgggtaagccgcgtagcagatacgctgccagcaacacgggcgaccatgctgatgagcaggacggcgattccagacaaagtttcactctgtcgcccaaggctggagtgcagtggtgtgatctcggcttgctgcaacctcacctctagggttcaagcgattctcctgcctcagcctcccgagtagctgggattacaggcatccaccaccaagcgagccatgtcctccaaccgatgagcaattggttgcagggttttcagatgttattctggcaacaattttggcaaccaagtctgaaatgtgtggccaaaaatttgaactgaagattgataatgtgcgatttgttgggcacccaacactgctacagcatgctctggggcagatctccaaaacagatccttccccgaagagggaagcacctactatgattctttttaatgtggtgtttgcactgagggccaacgcagacccgtcagtgataaactgtctgcataacctgtcccgtcgtatcgccaccgtgctgcagcacgaggagcgccgctgccagtacctcacccgggaggccaagctgatcctggcgctccaggatgaggtgtccgccatggctgatggaaatgaaggtcctcagtccccattccatcacatcctgcccaagtgcaagctggccagggacctcaaggaagcttatgacagcctgtgcacgtcgggcgtagttcggcttcacatcaacagctggctggaggtgagcttctgcctgccccacaagatccactatgcggcctccagtctgatccccccagaggccatcgaacggagcctgaaagccatccgcccctaccatgccctgctgctgctcagtgatgagaagtccttgctgggtgagcttcctattgactgctcccctgccctagtgcgggtgatcaagaccacatctgctgtgaagaacctgcagcagctagcccaagatgcggacctggccttgctgcaggttttccagcttgcagctcatctggtgtactggggcaaggccatcatcatctacccgctgtgtgagaacaacgtctacatgctgtctcccaatgccagcgtatgtctgtactccccgctggccgagcagttctcccaccagttcccatctcatgacctgccgtccgttcttgccaagttctccttgccggtctccttgtcagaatttaggaatcccctggcccccgctgtgcaggagacccagctcatccagatggtggtgtggatgctgcagcgccggcttctcatccagctgcacacctatgtctgcctgatggcctcacccagcgaggaggagccccgtccgcgagaggacgacgtccccttcactgcccgggtcggcggtcgcagcctcagcacgcccaacgccctcagctttggctccccaaccagcagcgatgacatgaccctcaccagccccagcatggacaactccagcgcagagctacttcccagcggggactcgccactgaaccagaggatgacggagaacctgctggccagcctgtcggagcatgaacgcgcagccatcctcagtgtacccgcagcccagaaccctgaggacctccgcatgtttgccaggctccttcactacttccgcggccgccaccacctggaggagattatgtacaacgagaacacgcggcgctcccagctgctcatgctgtttgacaagttccgcagcgtgctggtggtgaccacccacgaggaccctgtcattgccgtcttccaggctctgctcccctgagcccaggcggagggcggaaggctgctggggtgcgcaggtgggcgctcgcgtctccccaccccagggctccccccgtgctgaggctgagccctcttggccctgaggcctggcattgggtggatgcgggctggccgtggcccagtgaagcctgcagagccccgctgtccttgcccctggtggttccgctgtggggctgctgccctctgtgttcctacgcttccctccagtccttgccgcacgcgtaggcatctccacgctggaggggggcctgccaggactcctgtctctgggtgaggccgcatccttcaaggcccatgtgggctgtgcgtttctcagaccctccttctgtccctacacctgctccttggaccccccagtctgtggccaccctgaagaatgtgcagaaacacttgtgtggcctgtccctgtctctctgacagccttccatttgtgaagtgccctgtggccccctccccagcacctctgtctgccatgcgcttcttcctcccaggctaccctgagcctttcctggcccagtcctcaccacagtccacagaagccacaaacaggctcatagccaagctgtgacctggtcctgaccatctggggcacgagggcctgggctggccctgctaggctggagaagccctgtcacctgtgcacatcttgctggtggaggcatggcccactgtgcaggaccccaccctcgggggctttcggctcccacactgatgattctccccagcatccacaccgggcctggcgctacgtactcaggcccccagctctcgtgtcctggaggaagagctagctccagacatgggttgatcacctagaggagctctggctaaggcacagttttctagaaataaaacatttattcg

SEQ ID NO: 383372 - DNA, 2578 bp, Homo sapiens
  misc_feature (2364)..(2364): n is a, c, g, or t
ttcccatccgcaccagcaagagggcccctgtgccccaaacgcgaaccgtacggctccagacagcaccgcggaactcggtggcttccagaaggccccgcgcctgcgcattccgctgcctgcgcctgcgcctgcgcctgcgccgttctcccggccgccgccttagcacctcctccggacggtgtcgccgaagtctcgcgagcccggagcgtggcacgtgggtaagccgcgtagcagatacgctgccagcaacacgggcgaccatgctgatgagcaggacggcgattccagacaaagtttcactctgtcgcccaaggctggagtgcagtggtgtgatctcggcttgctgcaacctcacctctagggttcaagcgattctcctgcctcagcctcccgagtagctgggattacaggcatccaccaccaagcgagccatgtcctccaaccgatgagcaattggttgcagggttttcagatgttattctggcaacaattttggcaaccaagtctgaaatgtgtggccaaaaatttgaactgaagattgataatgtgcgatttgttgggcacccaacactgctacagcatgctctggggcagatctccaaaacagatccttccccgaagagggaagcacctactatgattctttttaatgtggtgtttgcactgagggccaacgcagacccgtcagtgataaactgtctgcataacctgtcccgtcgtatcgccaccgtgctgcagcacgaggagcgccgctgccagtacctcacccgggaggccaagctgatcctggcgctccaggatgaggtgtccgccatggctgatggaaatgaaggtcctcagtccccattccatcacatcctgcccaagtgcaagctggccagggacctcaaggaagcttatgacagcctgtgcacgtcgggcgtagttcggcttcacatcaacagctggctggaggtgagcttctgcctgccccacaagatccactatgcggcctccagtctgatccccccagaggccatcgaacggagcctgaaagccatccgcccctaccatgccctgctgctgctcagtgatgagaagtccttgctgggtgagcttcctattgactgctcccctgccctagtgcgggtgatcaagaccacatctgctgtgaagaacctgcagcagctagcccaagatgcggacctggccttgctgcaggttttccagcttgcagctcatctggtgtactggggcaaggccatcatcatctacccgctgtgtgagaacaacgtctacatgctgtctcccaatgccagcgtatgtctgtactccccgctggccgagcagttctcccaccagttcccatctcatgacctgccgtccgttcttgccaagttctccttgccggtctccttgtcagaatttaggaatcccctggcccccgctgtgcaggagacccagctcatccagatggtggtgtggatgctgcagcgccggcttctcatccagctgcacacctatgtctgcctgatggcctcacccagcgaggaggagccccgtccgcgagaggacgacgtccccttcactgcccgggtcggcggtcgcagcctcagcacgcccaacgccctcagctttggctccccaaccagcagcgatgacatgaccctcaccagccccagcatggacaactccagcgcagagctacttcccagcggggactcgccactgaaccagaggatgacggagaacctgctggccagcctgtcggagcatgaacgcgcagccatcctcagtgtacccgcagcccagaaccctgaggacctccgcatgtttgccaggctccttcactacttccgcggccgccaccacctggaggagattatgtacaacgagaacacgcggcgctcccagctgctcatgctgtttgacaagttccgcagcgtgctggtggtgaccacccacgaggaccctgtcattgccgtcttccaggctctgctcccctgagcccaggcggagggcggaaggctgctggggtgcgcaggtttggaaaggccccttggattcctggctggggacaatgatgacctggaccctggccagaagagccctggccctccagcaaggcagcacctgctctgatgcacctgtgcacccctggccctcccagccacctgggagcccgaagcttagcctgtaggtggccaagccagtccctactcttgggctgcggccacgtgaggctccgcatcagcagccaggggcgagcactagtggacaaagccagcaaatgcggcgttcctgtgagcagataccctcaaccagccagctgtcaaaagtatttcaagataaaatccaggccaagcaaaaaaaaaaaaccaaatngaaaaaaaaaaaaaactcgaggggggcccgtaccaattcgcctatagtgagtcgatacaattactgccgccgttttacaacgcggacttggaaaccttgcgtacccactaaatggctgagacatccccttttgcagttggcgaatacgaaaaggccgaccgatggctttccacagtggcaacctaatggcaaggaaaaggaacgctaaacttgt

SEQ ID NO: 383373 - DNA, 3795 bp, Homo sapiens
ttcccatccgcaccagcaagagggcccctgtgccccaaacgcgaaccgtacggctccagacagcaccgcggaactcggtggcttccagaaggccccgcgcctgcgcattccgctgcctgcgcctgcgcctgcgcctgcgccgttctcccggccgccgccttagcacctcctccggacggtgtcgccgaagtctcgcgagcccggagcgtggcacgtgggtaagccgcgtagcagatacgctgccagcaacacgggcgaccatgctgatgagcaggacggcgattccagacaaagtttcactctgtcgcccaaggctggagtgcagtggtgtgatctcggcttgctgcaacctcacctctagggttcaagcgattctcctgcctcagcctcccgagtagctgggattacaggcatccaccaccaagcgagccatgtcctccaaccgatgagcaattggttgcagggttttcagatgttattctggcaacaattttggcaaccaagtctgaaatgtgtggccaaaaatttgaactgaagattgataatgtgcgatttgttgggcacccaacactgctacagcatgctctggggcagatctccaaaacagatccttccccgaagagggaagcacctactatgattctttttaatgtggtgtttgcactgagggccaacgcagacccgtcagtgataaactgtctgcataacctgtcccgtcgtatcgccaccgtgctgcagcacgaggagcgccgctgccagtacctcacccgggaggccaagctgatcctggcgctccaggatgaggtgtccgccatggctgatggaaatgaaggtcctcagtccccattccatcacatcctgcccaagtgcaagctggccagggacctcaaggaagcttatgacagcctgtgcacgtcgggcgtagttcggcttcacatcaacagctggctggaggtgagcttctgcctgccccacaagatccactatgcggcctccagtctgatccccccagaggccatcgaacggagcctgaaagccatccgcccctaccatgccctgctgctgctcagtgatgagaagtccttgctgggtgagcttcctattgactgctcccctgccctagtgcgggtgatcaagaccacatctgctgtgaagaacctgcagcagctagcccaagatgcggacctggccttgctgcaggttttccagcttgcagctcatctggtgtactggggcaaggccatcatcatctacccgctgtgtgagaacaacgtctacatgctgtctcccaatgccagcgtatgtctgtactccccgctggccgagcagttctcccaccagttcccatctcatgacctgccgtccgttcttgccaagttctccttgccggtctccttgtcagaatttaggaatcccctggcccccgctgtgcaggagacccagctcatccagatggtggtgtggatgctgcagcgccggcttctcatccagctgcacacctatgtctgcctgatggcctcacccagcgaggaggagccccgtccgcgagaggacgacgtccccagcatggacaactccagcgcagagctacttcccagcggggactcgccactgaaccagaggatgacggagaacctgctggccagcctgtcggagcatgaacgcgcagccatcctcagtgtacccgcagcccagaaccctgaggacctccgcatgtttgccaggctccttcactacttccgcggccgccaccacctggaggagattatgtacaacgagaacacgcggcgctcccagctgctcatgctgtttgacaagttccgcagcgtgctggtggtgaccacccacgaggaccctgtcattgccgtcttccaggctctgctcccctgagcccaggcggagggcggaaggctgctggggtgcgcaggtgggcgctcgcgtctccccaccccagggctccccccgtgctgaggctgagccctcttggccctgaggcctggcattgggtggatgcgggctggccgtggcccagtgaagcctgcagagccccgctgtccttgcccctggtggttccgctgtggggctgctgccctctgtgttcctacgcttccctccagtccttgccgcacgcgtaggcatctccacgctggaggggggcctgccaggactcctgtctctgggtgaggccgcatccttcaaggcccatgtgggctgtgcgtttctcagaccctccttctgtccctacacctgctccttggaccccccagtctgtggccaccctgaagaatgtgcagaaacacttgtgtggcctgtccctgtctctctgacagccttccatttgtgaagtgccctgtggccccctccccagcacctctgtctgccatgcgcttcttcctcccaggctaccctgagcctttcctggcccagtcctcaccacagtccacagaagccacaaacaggctcatagccaagctgtgacctggtcctgaccatctggggcacgagggcctgggctggccctgctaggctggagaagccctgtcacctgtgcacatcttgctggtggaggcatggcccactgtgcaggaccccaccctcgggggctttcggctcccacactgatgattctccccagcatccacaccgggcctggcgctacgtactcaggcccccagctctcgtgtcctggaggaagagctagctccagacatgggttgatcacctagaggagctctggctaaggcacagttttctagaaataaaacatttattcggtttttaaacaattaaaaaatcttgtctgggcaggccctttgctcaggcctgtgtgtcctgctcagccactctgtcgaccacactgacccaggggctgccccggacatagaagcggaggggtttccgggcccactcccctgcatggccgacgcccacccgggctgctgccactacagccggctcactgggctccaggggaccacgctccagccatacagcttcatcctgtgccaggtccctctggtcaaagctcttgttgatggccagggcctggcacagcttggaggggccactgcagagctcgcggtccttgaggacacggctggcggtgcctttccggagggtgctgcgaagctgacgcatggtctccagaccttccaggggctccagtgctcgcagcaagacgcaagccccgtccccctggctggagatgttcatgcagaagtacatgccgtaaatgatgtacacgtacagggtccccggcttcatgaacatgcctcggttgcggggggtctgccggccaccccttgagtgggcggcttcatcctctggccccaggtatgcctcggtctccacgatgcggcctcggagttctgtgccattaggaagtcgccggactaggaccctgtccccagaaatgcccgggccagggggactgccggctggtcgaagaactccaaccccagtcgggtaaggtggccctttgggcttgagaaatagatgctgcggtatgggccccggagtggtgggcggtcccaagcagcgctccctggggcaaaggtgcctgggcctgcatcggacgagctgttgtggctgctctgcaggtgcctgggctgcgtcggacgagctgtgtggctgccctgctctagctggtcgctgcttcttttgccccatccgtcggcaaaactgggccccgctgcgcgcgggcatccggcggctcgggccggggcttcgtgggactcggaccccggcgcggagcccagcagccgccgaccacggaagcacccctaggaccggggc

SEQ ID NO: 383374 - DNA, 2384 bp, Homo sapiens
ttcccatccgcaccagcaagagggcccctgtgccccaaacgcgaaccgtacggctccagacagcaccgcggaactcggtggcttccagaaggccccgcgcctgcgcattccgctgcctgcgcctgcgcctgcgcctgcgccgttctcccggccgccgccttagcacctcctccggacggtgtcgccgaagtctcgcgagcccggagcgtggcacgtgggtaagccgcgtagcagatacgctgccagcaacacgggcgaccatgctgatgagcaggacggcgattccagacaaagtttcactctgtcgcccaaggctggagtgcagtggtgtgatctcggcttgctgcaacctcacctctagggttcaagcgattctcctgcctcagcctcccgagtagctgggattacaggcatccaccaccaagcgagccatgtcctccaaccgatgagcaattggttgcagggttttcagatgttattctggcaacaattttggcaaccaagtctgaaatgtgtggccaaaaatttgaactgaagattgataatgtgcgatttgttgggcacccaacactgctacagcatgctctggggcagatctccaaaacagatccttccccgaagagggaagcacctactatgattctttttaatgtggtgtttgcactgagggccaacgcagacccgtcagtgataaactgtctgcataacctgtcccgtcgtatcgccaccgtgctgcagcacgaggagcgccgctgccagtacctcacccgggaggccaagctgatcctggcgctccaggatgaggtgtccgccatggctgatggaaatgaaggtcctcagtccccattccatcacatcctgcccaagtgcaagctggccagggacctcaaggaagcttatgacagcctgtgcacgtcgggcgtagttcggcttcacatcaacagctggctggaggtgagcttctgcctgccccacaagatccactatgcggcctccagtctgatccccccagaggccatcgaacggagcctgaaagccatccgcccctaccatgccctgctgctgctcagtgatgagaagtccttgctgggtgagcttcctattgactgctcccctgccctagtgcgggtgatcaagaccacatctgctgtgaagaacctgcagcagctagcccaagatgcgcttcttcctcccaggctaccctgagcctttcctggcccagtcctcaccacagtccacagaagccacaaacaggctcatagccaagctgtgacctggaggaagagctagctccagacatgggttgatcacctagaggagctctggctaaggcacagttttctagaaataaaacatttattcggtttttaaacaattaaaaaatcttgtctgggcaggccctttgctcaggcctgtgtgtcctgctcagccactctgtcgaccacactgacccaggggctgccccggacatagaagcggaggggtttccgggcccactcccctgcatggccgacgcccacccgggctgctgccactacagccggctcactgggctccaggggaccacgctccagccatacagcttcatcctgtgccaggtccctctggtcaaagctcttgttgatggccagggcctggcacagcttggaggggccactgcagagctcgcggtccttgaggacacggctggcggtgcctttccggagggtgctgcgaagctgacgcatggtctccagaccttccaggggctccagtgctcgcagcaagacgcaagccccgtccccctggctggagatgttcatgcagaagtacatgccgtaaatgatgtacacgtacagggtccccggcttcatgaacatgcctcggttgcggggggtctgccggccaccccttgagtgggcggcttcatcctctggccccaggtatgcctcggtctccacgatgcggcctcggagttctgtgccattaggaagtcgccggactaggaccctgtccccagaaatgcccgggccagggggactgccggctggtcgaagaactccaaccccagtcgggtaaggtggccctttgggcttgagaaatagatgctgcggtatgggccccggagtggtgggcggtcccaagcagcgctccctggggcaaaggtgcctgggcctgcatcggacgagctgttgtggctgctctgcaggtgcctgggctgcgtcggacgagctgtgtggctgccctgctctagctggtcgctgcttcttttgccccatccgtcggcaaaactgggccccgctgcgcgcgggcatccggcggctcgggccggggcttcgtgggactcggaccccggcgcggagcccagcagccgccgaccacggaagcacccctaggaccggggc

SEQ ID NO: 383375 - DNA, 508 bp, Homo sapiens
aagctgacgcaggagaatcgcttgaatctgggaggcgggaggttgcagtgagctgagatcgagccactgcaatctagcctgggtgactgagtgagactccgtctctcaaaaaaaggaaaaaaaaaagcagtgaccatttggctccagagctacgtgggactcactgtagcacgaaaaagaagccaccagcagaaccctggtcccaacatcaggacgcaggcttgggcacctctgggtttgaacagccgtctgccgtcctgaacccactccgcccacctggtggtcagcgggaccgtggtgggcatggggtccaggaggcctgcccacccttgttggggggctgtggtggctgcctccctggccttcaccaccagctctgttcaggcctgtgggcagctcagagctgattcccagcagtggctcttcagcagaggcctctgggggctggtgtcaggttgggctcacacccacccatcccttccaggctccttcactacttccgcggccg

SEQ ID NO: 383376 - DNA, 376 bp, Homo sapiens
attctgttcaagggacagccacccagcttgtgttagaagtcattaactatactcagactcagttttcctgataccgtatgctatttcatgtggtttgaaataatttcaaggaagtgatcttcctagcattttcaaggaaaaacaccaaagcgcttagtagtctctgattttaactttgggagttgaaggttgctttctgcctcactgtcggtctgtcttctcctgatccaaagtgggaaagaatttggttcacccaaagtgtgcccccaccttttgtgttgttcccagagcttgtgtttcagcaccacttagcataactccatacttaaaacacagtgtggagcctgatacgctagtgacctcttggcattgttga

SEQ ID NO: 383377 - DNA, 182 bp, Homo sapiens
tcaaatgggaaagtggggtggttgcgtcaaacaagagaccatcagttcaccatttcaccagttcaggctgggcacttggcacagtttgtctcttctgaccctccaacaagcccctgaagtggggactatgaagctttacagaagatgatgctcaaactctgagaccaaatgtcagtttcccc

SEQ ID NO: 383378 - DNA, 390 bp, Homo sapiens
ctcagatcttagtggctgaaccaagagatggcacctgggaccttagccagtaaaacccgtccccttttttttgagacagtgtcttactccggcctgggcgacagagcgagactgtctcaaaaaaacaaaaaagaaaaaaaaactggggcctgtgtagccagtgggtgctattctgtgaaactaatcataagctgcctaggcagccagctacaggcttgagctttaaattcatggttttaaagctaaacgtaatttccacttgggactagatcacaactgaagataacaagagatttaagttttaagggcatttaatcaggaggaaaggtttggaaaactaactcaggtgtatttattgtttaagcagaaataaagtttaatttttgcttg

SEQ ID NO: 383379 - DNA, 3648 bp, Homo sapiens
ctcatatctagaattttgggtaggtactttgaatcattacgatctatctacttcttaggtgaggaaatagaggtttaaaatttagtccacagtctcgcaaggatggagcctggatcaaattttgggttatcagattccaatcacgtttcttagcttttcttttttttttccaactccagtttctgtcttgctccaaaaaaggggaaggagcggctgcggcgctcggtttcccgcctcctagggaagggaagggagacgagcaacgcggaggctggggcccccttccgggcggggcctactagtgggcggggcctgtcagtgagcggcccctgcccggaaggagccagtccggggcggagccgatggccttacaggggccggaagtggcctgcgggcggagaagtgcctcaggagtcctgacgcagtgtcttgggcgctaacggcggcggcggccttgtgtttagactccagaactccccacttgccgcgttctcgccgccgcaggctcccgggacgatggtgccccgcctgctgctgcgcgcctggccccggggccccgcggttggtccgggagcccccagtcggcccctcagcgccggctccgggcccggccagtacctgcagcgcagcatcgtgcccaccatgcactaccaggacagcctgcccaggctgcctattcccaaacttgaagacaccattaggagatacctcagtgcacagaagcctctcttgaatgatggccagttcaggaaaacagaacaattttgcaagagttttgaaaatgggattggaaaagaactgcatgagcagctggttgctctggacaaacagaataaacatacaagctacatttcgggaccctggtttgatatgtacctatctgctcgagactccgttgttctgaactttaatccatttatggctttcaatcctgacccaaaatctgagtataatgaccagctcacccgggcaaccaacatgactgtttctgccatccggtttctgaagacactccgggctggccttctggagccagaagtgttccacttgaaccctgcaaaaagtgacactatcaccttcaagagactcatacgctttgtgccttcctctctgtcctggtatggggcctacctggtcaatgcgtatcccctggatatgtcccagtattttcggcttttcaactcaactcgtttacccaaacccagtcgggatgaactcttcactgatgacaaggccagacacctcctggtcctaaggaaaggaaatttttatatctttgatgtcctggatcaagatgggaacattgtgagcccctcggaaatccaggcacatctgaagtacattctctcagacagcagccccgcccccgagtttcccctggcatacctgaccagtgagaaccgagacatctgggcagagctcaggcagaagctgatgagtagtggcaatgaggagagcctgaggaaagtggactcggcagtgttctgtctctgcctagatgacttccccattaaggaccttgtccacttgtcccacaatatgctgcatggggatggcacaaaccgctggtttgataaatcctttaacctcattatcgccaaggatggctctactgccatccactttgagcactcttggggtgatggtgtggcagtgctcagattttttaatgaagtatttaaagacagcactcagacccctgccgtcactccacagagccagccagctaccactgactctactgtcacggtgcagaaactcaacttcgagctgactgatgccttaaagactggcatcacagctgctaaggaaaagtttgatgccaccatgaaaaccctcactattgactgcgtccagtttcagagaggaggcaaagaattcctgaagaagcaaaagctgagccctgacgcagttgcccagctggcattccagatggccttcctgcggcagtacgggcagacagtggccacctacgagtcctgtagcactgccgcattcaagcacggccgcactgagaccatccgcccggcctccgtctatacaaagaggtgctctgaggcctttgtcagggagccctccaggcacagtgctggtgagcttcagcagatgatggttgagtgctccaagtaccatggccagctgaccaaagaagcagcaatgggccagggctttgaccgacacttgtttgctctgcggcatctggcagcagccaaagggatcatcttgcctgagctctacctggaccctgcatacgggcagataaaccacaatgtcctgtccacgagcacactgagcagcccagcagtgaaccttgggggctttgcccctgtggtctctgatggctttggtgttgggtatgctgttcatgacaactggataggctgcaatgtctcttcctacccaggccgcaatgcccgggagtttctccaatgtgtggagaaggccttagaagacatgtttgatgccttagaaggcaaatccatcaaaagttaacttctgggcagatgaaaagctaccatcacttcctcatcatgaaaactgggaggccgggcatggtggctcatgcctgtaatcccagcattttgagaggctgaggcgggtggatcacttgaggtcaggagtttgagaccaacctggccaacatggtgaaaccttgtctctactaaaaatacaaaaattagctgggtgtggtggcatgtgcctataatcccagctacttgggaggttgaagcagaattgcttgaacccaggaggtggaggttgcagtgagctgagatcacaccactgcactccggcctgggcgacagagcgagactgtctcaaaaaaacaaaaaagaaaaaaaaactggggcctgtgtagccagtgggtgctattctgtgaaactaatcataagctgcctaggcagccagctacaggcttgagctttaaattcatggttttaaagctaaacgtaatttccacttgggactagatcacaactgaagataacaagagatttaagttttaagggcatttaatcaggaggaaaggtttggaaaactaactcaggtgtatttattgtttaagcagaaataaagtttaatttttgcttgaagatggttcttaatttcttttaacctaattcctaatcctcacaaagatctttccaacagcaagttcagtaagttcaggtaacagtacgtcaccattggcttctggctcattgagtgatggtgggatcgcggtttcatctctgtaaacttgcccttgactggggagataccatctccttaaaaatactcttcattttcctaaggagtgaactgctgctgcacgaattcttatttgtggagggagtagctgcctccttacttcaccttcatgcaccagtgcagcgtgaacaggggctttattgatggggcttgggaagctgtaataaagtccagcatgcagattgtgaaggtttcgtatagccaccaggagacaagggtcaaaggaacgagcctctgtgggctctgctgcttagagtactttgtcctttctcagttcttaagggcaactgggaaggaagagggatcagcacttcacaaactgtctcataccttctcctgcagattaatgtcactgaaggctgtccctgactccacaccttcagcagcaaacccagc

SEQ ID NO: 383380 - DNA, 2818 bp, Homo sapiens
  misc_feature (2674)..(2676): n is a, c, g, or t
  misc_feature (2679)..(2679): n is a, c, g, or t
  misc_feature (2689)..(2690): n is a, c, g, or t
  misc_feature (2699)..(2700): n is a, c, g, or t
  misc_feature (2716)..(2716): n is a, c, g, or t
ctcatatctagaattttgggtaggtactttgaatcattacgatctatctacttcttaggtgaggaaatagaggtttaaaatttagtccacagtctcgcaaggatggagcctggatcaaattttgggttatcagattccaatcacgtttcttagcttttcttttttttttccaactccagtttctgtcttgctccaaaaaaggggaaggagcggctgcggcgctcggtttcccgcctcctagggaagggaagggagacgagcaacgcggaggctggggcccccttccgggcggggcctactagtgggcggggcctgtcagtgagcggcccctgcccggaaggagccagtccggggcggagccgatggccttacaggggccggaagtggcctgcgggcggagaagtgcctcaggagtcctgacgcagtgtcttgggcgctaacggcggcggcggccttgtgtttagactccagaactccccacttgccgcgttctcgccgccgcaggctcccgggacgatggtgccccgcctgctgctgcgcgcctggccccggggccccgcggttggtccgggagcccccagtcggcccctcagcgccggctccgggcccggccagtacctgcagcgcagcatcgtgcccaccatgcactaccaggacagcctgcccaggctgcctattcccaaacttgaagacaccattaggagatacctcagtgcacagaagcctctcttgaatgatggccagttcaggaaaacagaacaattttgcaagagttttgaaaatgggattggaaaagaactgcatgagcagctggttgctctggacaaacagaataaacatacaagctacatttcgggaccctggtttgatatgtacctatctgctcgagactccgttgttctgaactttaatccatttatggctttcaatcctgacccaaaatctgagtataatgaccagctcacccgggcaaccaacatgactgtttctgccatccggtttctgaagacactccgggctggccttctggagccagaagtgttccacttgaaccctgcaaaaagtgacactatcaccttcaagagactcatacgctttgtgccttcctctctgtcctggtatggggcctacctggtcaatgcgtatcccctggatatgtcccagtattttcggcttttcaactcaactcgtttacccaaacccagtcgggatgaactcttcactgatgacaaggccagacacctcctggtcctaaggaaaggaaatttttatatctttgatgtcctggatcaagatgggaacattgtgagcccctcggaaatccaggcacatctgaagtacattctctcagacagcagccccgcccccgagtttcccctggcatacctgaccagtgagaaccgagacatctgggcagagctcaggcagaagctgatgagtagtggcaatgaggagagcctgaggaaagtggactcggcagtgttctgtctctgcctagatgacttccccattaaggaccttgtccacttgtcccacaatatgctgcatggggatggcacaaaccgctggtttgataaatcctttaacctcattatcgccaaggatggctctactgccatccactttgagcactcttggggtgatggtgtggcagtgctcagattttttaatgaagtatttaaagacagcactcagacccctgccgtcactccacagagccagccagctaccactgactctactgtcacggtgcagaaactcaacttcgagctgactgatgccttaaagactggcatcacagctgctaaggaaaagtttgatgccaccatgaaaaccctcactattgactgcgtccagtttcagagaggaggcaaagaattcctgaagaagcaaaagctgagccctgacgcagttgcccagctggcattccagatggccttcctgcggcagtacgggcagacagtggccacctacgagtcctgtagcactgccgcattcaagcacggccgcactgagaccatccgcccggcctccgtctatacaaagaggtgctctgaggcctttgtcagggagccctccaggcacagtgctggtgagcttcagcagatgatggttgagtgctccaagtaccatggccagctgaccaaagaagcagcaatgggccagggctttgaccgacacttgtttgctctgcggcatctggcagcagccaaagggatcatcttgcctgagctctacctggaccctgcatacgggcagataaaccacaatgtcctgtccacgagcacactgagcagcccagcagtgaaccttgggggctttgcccctgtggtctctgatggctttggtgttgggtatgctgttcatgacaactggataggctgcaatgtctcttcctacccaggccgcaatgcccgggagtttctccaatgtgtggagaaggccttagaagacatgtttgatgccttagaaggcaaatccatcaaaagttaacttctgggcagatgaaaagctaccatcacttcctcatcatgaaaactgggaggccgggcatggtggctcatgcctgtaatcccagcattttgagaggctgaggcgggtggatcacttgaggtcaggagtttgagaccaacctggccaacatggtgaaaccttgtctctactaaaaatactnnnggngtggggtgtnnatatccagnntggggtgacgaatgtngaccggggggtgggggggatcaaccggcccgcggggaagggggtcaaacaaaaaaggcggcgcgggggggcgaacacgcggaggggttttgccggcccaaaa

SEQ ID NO: 383381 - DNA, 3039 bp, Homo sapiens
ctcatatctagaattttgggtaggtactttgaatcattacgatctatctacttcttaggtgaggaaatagaggtttaaaatttagtccacagtctcgcaaggatggagcctggatcaaattttgggttatcagattccaatcacgtttcttagcttttcttttttttttccaactccagtttctgtcttgctccaaaaaaggggaaggagcggctgcggcgctcggtttcccgcctcctagggaagggaagggagacgagcaacgcggaggctggggcccccttccgggcggggcctactagtgggcggggcctgtcagtgagcggcccctgcccggaaggagccagtccggggcggagccgatggccttacaggggccggaagtggcctgcgggcggagaagtgcctcaggagtcctgacgcagtgtcttgggcgctaacggcggcggcggccttgtgtttagactccagaactccccacttgccgcgttctcgccgccgcaggctcccgggacgatggtgccccgcctgctgctgcgcgcctggccccggggccccgcggttggtccgggagcccccagtcggcccctcagcgccggctccgggcccggccagtacctgcagcgcagcatcgtgcccaccatgcactaccaggacagcctgcccaggctgcctattcccaaacttgaagacaccattaggagatacctcagtgcacagaagcctctcttgaatgatggccagttcaggaaaacagaacaattttgcaagagttttgaaaatgggattggaaaagaactgcatgagcagctggttgctctggacaaacagaataaacatacaagctacatttcgggaccctggtttgatatgtacctatctgctcgagactccgttgttctgaactttaatccatttatggctttcaatcctgacccaaaatctgagtataatgaccagctcacccgggcaaccaacatgactgtttctgccatccggtttctgaagacactccgggctggccttctggagccagaagtgttccacttgaaccctgcaaaaagtgacactatcaccttcaagagactcatacgctttgtgccttcctctctgtcctggtatggggcctacctggtcaatgcgtatcccctggatatgtcccagtattttcggcttttcaactcaactcgtttacccaaacccagtcgggatgaactcttcactgatgacaaggccagacacctcctggtcctaaggaaaggaaatttttatatctttgatgtcctggatcaagatgggaacattgtgagcccctcggaaatccaggcacatctgaagtacattctctcagacagcagccccgcccccgagtttcccctggcatacctgaccagtgagaaccgagacatctgggcagagctcaggcagaagctgatgagtagtggcaatgaggagagcctgaggaaagtggactcggcagtgttctgtctctgcctagatgacttccccattaaggaccttgtccacttgtcccacaatatgctgcatggggatggcacaaaccgctggtttgataaatcctttaacctcattatcgccaaggatggctctactgccatccactttgagcactcttggggtgatggtgtggcagtgctcagattttttaatgaagtatttaaagacagcactcagacccctgccgtcactccacagagccagccagctaccactgactctactgtcacggtgcagaaactcaacttcgagctgactgatgccttaaagactggcatcacagctgctaaggaaaagtttgatgccaccatgaaaaccctcactattgactgcgtccagtttcagagaggaggcaaagaattcctgaagaagcggcagtacgggcagacagtggccacctacgagtcctgtagcactgccgcattcaagcacggccgcactgagaccatccgcccggcctccgtctatacaaagaggtgctctgaggcctttgtcagggagccctccaggcacagtgctggtgagcttcagcagatgatggttgagtgctccaagtaccatggccagctgaccaaagaagcagcaatgggccagggctttgaccgacacttgtttgctctgcggcatctggcagcagccaaagggatcatcttgcctgagctctacctggaccctgcatacgggcagataaaccacaatgtcctgtccacgagcacactgagcagcccagcagtgaaccttgggggctttgcccctgtggtctctgatggctttggtgttgggtatgctgttcatgacaactggataggctgcaatgtctcttcctacccaggccgcaatgcccgggagtttctccaatgtgtggagaaggccttagaagacatgtttgatgccttagaaggcaaatccatcaaaagttaacttctgggcagatgaaaagctaccatcacttcctcatcatgaaaactgggaggccgggcatggtggctcatgcctgtaatcccagcattttgagaggctgaggcgggtggatcacttgaggtcaggagtttgagaccaacctggccaacatggtgaaaccttgtctctactaaaaatacaaaaattagctgggtgtggtggcatgtgcctataatcccagctacttgggaggttgaagcagaattgcttgaacccaggaggtggaggttgcagtgagctgagatcacaccactgcactccggcctgggcgacagagcgagactgtctcaaaaaaacaaaaaagaaaaaaaaactggggcctgtgtagccagtgggtgctattctgtgaaactaatcataagctgcctaggcagccagctacaggcttgagctttaaattcatggttttaaagctaaacgtaatttccacttgggactagatcacaactgaagataacaagagatttaagttttaagggcatttaatcaggaggaaaggtttggaaaactaactcaggtgtatttattgtttaagcagaaataaagtttaatttttgcttg

SEQ ID NO: 383382 - DNA, 2635 bp, Homo sapiens
  misc_feature (2)..(2): n is a, c, g, or t
  misc_feature (8)..(8): n is a, c, g, or t
  misc_feature (22)..(22): n is a, c, g, or t
  misc_feature (33)..(33): n is a, c, g, or t
anctttcnggattgccctgttnggctaccgggnccggtaattcccgggtcgcacccacgcgtccgcccgcctgctgctgcgcgcctggccccggggccccgcggttggtccgggagcccccagtcggcccctcagcgccggctccgggcccggccagtacctgcagcgcagcatcgtgcccaccatgcactaccaggacagcctgcccaggctgcctattcccaaacttgaagacaccattaggagatacctcagtgcacagaagcctctcttgaatgatggccagttcaggaaaacagaacaattttgcaagagttttgaaaatgggattggaaaagaactgcatgagcagctggttgctctggacaaacagaataaacatacaagctacatttcgggaccctggtttgatatgtacctatctgctcgagactccgttgttctgaactttaatccatttatggctttcaatcctgacccaaaatctgagtataatgaccagctcacccgggcaaccaacatgactgtttctgccatccggtttctgaagacactccgggctggccttctggagccagaagtgttccacttgaaccctgcaaaaagtgacactatcaccttcaagagactcatacgctttgtgccttcctctctgtcctggtatggggcctacctggtcaatgcgtatcccctggatatgtcccagtattttcggcttttcaactcaactcgtttacccaaacccagtcgggatgaactcttcactgatgacaaggccagacacctcctggtcctaaggaaaggaaatttttatatctttgatgtcctggatcaagatgggaacattgtgagcccctcggaaatccaggcacatctgaagtacattctctcagacagcagccccgcccccgagtttcccctggcatacctgaccagtgagaaccgagacatctgggcagagctcaggcagaagctgatgagtagtggcaatgaggagagcctgaggaaagtggactcggcagtgttctgtctctgcctagatgacttccccattaaggaccttgtccacttgtcccacaatatgctgcatggggatggcacaaaccgctggtttgataaatcctttaacctcattatcgccaaggatggctctactgccatccactttgagcactcttggggtgatggtgtggcagtgctcagattttttaatgaagtatttaaagacagcactcagacccctgccgtcactccacagagccagccagctaccactgactctactgtcacggtgcagaaactcaacttcgagctgactgatgccttaaagactggcatcacagctgctaaggaaaagtttgatgccaccatgaaaaccctcactattgactgcgtccagtttcagagaggaggcaaagaattcctgaagaagcaaaagctgagccctgacgcagttgcccagctggcattccagatggccttcctgcggcagtacgggcagacagtggccacctacgagtcctgtagcactgccgcattcaagcacggccgcactgagaccatccgcccggcctccgtctatacaaagaggtgctctgaggcctttgtcagggagccctccaggcacagtgctggtgagcttcagcagatgatggttgagtgctccaagtaccatggccagctgaccaaagaagcagcaatgggccagggctttgaccgacacttgtttgctctgcggcatctggcagcagccaaagggatcatcttgcctgagctctacctggaccctgcatacgggcagataaaccacaatgtcctgtccacgagcacactgagcagcccagcagtgaaccttgggggctttgcccctgtggtctctgatggctttggtgttgggtatgctgttcatgacaactggataggctgcaatgtctcttcctacccaggccgcaatgcccgggagtttctccaatgtgtggagaaggccttagaagacatgtttgatgccttagaaggcaaatccatcaaaagttaacttctgggcagatgaaaagctaccatcacttcctcatcatgaaaactgggaggccgggcatggtggctcatgcctgtaatcccagcattttgagaggctgaggcgggtggatcacttgaggtcaggagtttgagaccaacctggccaacatggtgaaaccttgtctctactaaaaatacaaaaattagctgggtgtggtggcatgtgcctataatcccagctacttgggaggttgaagcagaattgcttgaacccaggaggtggaggttgcagtgagctgagatcacaccactgcactccggcctgggcgacagagcgagactgtctcaaaaaaacaaaaaagaaaaaaaaactggggcctgtgtagccagtgggtgctattctgtgaaactaatcataagctgcctaggcagccagctacaggcttgagctttaaattcatggttttaaagctaaacgtaatttccacttgggactagatcacaactgaagataacaagagatttaagttttaagggcatttaatcaggaggaaaggtttggaaaactaactcaggtgtatttattgtttaagcagaaataaagtttaatttttgcttg

SEQ ID NO: 383383 - DNA, 2986 bp, Homo sapiens
ctcatatctagaattttgggtaggtactttgaatcattacgatctatctacttcttaggtgaggaaatagaggtttaaaatttagtccacagtctcgcaaggatggagcctggatcaaattttgggttatcagattccaatcacgtttcttagcttttcttttttttttccaactccagtttctgtcttgctccaaaaaaggggaaggagcggctgcggcgctcggtttcccgcctcctagggaagggaagggagacgagcaacgcggaggctggggcccccttccgggcggggcctactagtgggcggggcctgtcagtgagcggcccctgcccggaaggagccagtccggggcggagccgatggccttacaggggccggaagtggcctgcgggcggagaagtgcctcaggagtcctgacgcagtgtcttgggcgctaacggcggcggcggccttgtgtttagactccagaactccccacttgccgcgttctcgccgccgcaggctcccgggacgatggtgccccgcctgctgctgcgcgcctggccccggggccccgcggttggtccgggagcccccagtcggcccctcagcgccggctccgggcccggccagtacctgcagcgcagcatcgtgcccaccatgcactaccaggacagcctgcccaggctgcctattcccaaacttgaagacaccattaggagatacctcagtgcacagaagcctctcttgaatgatggccagttcaggaccctggtttgatatgtacctatctgctcgagactccgttgttctgaactttaatccatttatggctttcaatcctgacccaaaatctgagtataatgaccagctcacccgggcaaccaacatgactgtttctgccatccggtttctgaagacactccgggctggccttctggagccagaagtgttccacttgaaccctgcaaaaagtgacactatcaccttcaagagactcatacgctttgtgccttcctctctgtcctggtatggggcctacctggtcaatgcgtatcccctggatatgtcccagtattttcggcttttcaactcaactcgtttacccaaacccagtcgggatgaactcttcactgatgacaaggccagacacctcctggtcctaaggaaaggaaatttttatatctttgatgtcctggatcaagatgggaacattgtgagcccctcggaaatccaggcacatctgaagtacattctctcagacagcagccccgcccccgagtttcccctggcatacctgaccagtgagaaccgagacatctgggcagagctcaggcagaagctgatgagtagtggcaatgaggagagcctgaggaaagtggactcggcagtgttctgtctctgcctagatgacttccccattaaggaccttgtccacttgtcccacaatatgctgcatggggatggcacaaaccgctggtttgataaatcctttaacctcattatcgccaaggatggctctactgccatccactttgagcactcttggggtgatggtgtggcagtgctcagattttttaatgaagtatttaaagacagcactcagacccctgccgtcactccacagagccagccagctaccactgactctactgtcacggtgcagaaactcaacttcgagctgactgatgccttaaagactggcatcacagctgctaaggaaaagtttgatgccaccatgaaaaccctcactattgactgcgtccagtttcagagaggaggcaaagaattcctgaagaagcaaaagctgagccctgacgcagttgcccagctggcattccagatggccttcctgcggcagtacgggcagacagtggccacctacgagtcctgtagcactgccgcattcaagcacggccgcactgagaccatccgcccggcctccgtctatacaaagaggtgctctgaggcctttgtcagggagccctccaggcacagtgctggtgagcttcagcagatgatggttgagtgctccaagtaccatggccagctgaccaaagaagcagcaatgggccagggctttgaccgacacttgtttgctctgcggcatctggcagcagccaaagggatcatcttgcctgagctctacctggaccctgcatacgggcagataaaccacaatgtcctgtccacgagcacactgagcagcccagcagtgaaccttgggggctttgcccctgtggtctctgatggctttggtgttgggtatgctgttcatgacaactggataggctgcaatgtctcttcctacccaggccgcaatgcccgggagtttctccaatgtgtggagaaggccttagaagacatgtttgatgccttagaaggcaaatccatcaaaagttaacttctgggcagatgaaaagctaccatcacttcctcatcatgaaaactgggaggccgggcatggtggctcatgcctgtaatcccagcattttgagaggctgaggcgggtggatcacttgaggtcaggagtttgagaccaacctggccaacatggtgaaaccttgtctctactaaaaatacaaaaattagctgggtgtggtggcatgtgcctataatcccagctacttgggaggttgaagcagaattgcttgaacccaggaggtggaggttgcagtgagctgagatcacaccactgcactccggcctgggcgacagagcgagactgtctcaaaaaaacaaaaaagaaaaaaaaactggggcctgtgtagccagtgggtgctattctgtgaaactaatcataagctgcctaggcagccagctacaggcttgagctttaaattcatggttttaaagctaaacgtaatttccacttgggactagatcacaactgaagataacaagagatttaagttttaagggcatttaatcaggaggaaaggtttggaaaactaactcaggtgtatttattgtttaagcagaaataaagtttaatttttgcttg

SEQ ID NO: 383384 - DNA, 1804 bp, Homo sapiens
gtcccactgtattgcccaaggtggtctcaaactcctgggctcaagcaatcctcctgccttggcctcccaaagcactaggattataggcatgcaccactgcacccaacctttttctattactgattggttatcagactcacttttgaaaatttaggatttctaaacttacggccccactagcttcacctcagttgtaatgtgtctgctctctgtaaacaggttatctcagaagctcttctcaattgtcatccgtcattacctttttttgataaaattcaagacctggaaaggacctggagggtcatagttgtcctttcatgttgctatgaagtgctggaagtgaaagggacctccaagacattctaatcttctcttcctccattttatagggagaaaaccaagccactggccccgttacacagcaagttagtagtaagactgagattcgaaccctggtcaaacagactttccattttgttccactgactcaatcttctcttttacacttgaatcagacttttagttttattgtagtttttgagtccatagctgtcttcctgtactgtcttgactctttgactaaactgatttcacatctttaaaattatgctttccttttaggctcatttttagctcagctgttgacagctatttttaaatgtaacatgacataatatatttcctaaataatttacaataatctagcttgagctgctctgaaggttagtcagttggtggtgtgcatagaggtagagccttcccccactctcaaggatgctgtgaggggtattcctaccatgtggtgagttgggaggttttcctgaggtccttttccatcctgagactctggttttccattttgtttctcacaggccagggctttgaccgacacttgtttgctctgcggcatctggcagcagccaaagggatcatcttgcctgagctctacctggaccctgcatacgggcagataaaccacaatgtcctgtccacgagcacactgagcagcccagcagtgaaccttgggggctttgcccctgtggtctctgatggctttggtgttgggtatgctgttcatgacaactggataggctgcaatgtctcttcctacccaggccgcaatgcccgggagtttctccaatgtgtggagaaggccttagaagacatgtttgatgccttagaaggcaaatccatcaaaagttaacttctgggcagatgaaaagctaccatcacttcctcatcatgaaaactgggaggccgggcatggtggctcatgcctgtaatcccagcattttgagaggctgaggcgggtggatcacttgaggtcaggagtttgagaccaacctggccaacatggtgaaaccttgtctctactaaaaatacaaaaattagctgggtgtggtggcatgtgcctataatcccagctacttgggaggttgaagcagaattgcttgaacccaggaggtggaggttgcagtgagctgagatcacaccactgcactccggcctgggcgacagagcgagactgtctcaaaaaaacaaaaaagaaaaaaaaactggggcctgtgtagccagtgggtgctattctgtgaaactaatcataagctgcctaggcagccagctacaggcttgagctttaaattcatggttttaaagctaaacgtaatttccacttgggactagatcacaactgaagataacaagagatttaagttttaagggcatttaatcaggaggaaaggtttggaaaactaactcaggtgtatttattgtttaagcagaaataaagtttaatttttgcttg

SEQ ID NO: 383385 - DNA, 3093 bp, Homo sapiens
ctcatatctagaattttgggtaggtactttgaatcattacgatctatctacttcttaggtgaggaaatagaggtttaaaatttagtccacagtctcgcaaggatggagcctggatcaaattttgggttatcagattccaatcacgtttcttagcttttcttttttttttccaactccagtttctgtcttgctccaaaaaaggggaaggagcggctgcggcgctcggtttcccgcctcctagggaagggaagggagacgagcaacgcggaggctggggcccccttccgggcggggcctactagtgggcggggcctgtcagtgagcggcccctgcccggaaggagccagtccggggcggagccgatggccttacaggggccggaagtggcctgcgggcggagaagtgcctcaggagtcctgacgcagtgtcttgggcgctaacggcggcggcggccttgtgtttagactccagaactccccacttgccgcgttctcgccgccgcaggctcccgggacgatggtgccccgcctgctgctgcgcgcctggccccggggccccgcggttggtccgggagcccccagtcggcccctcagcgccggctccgggcccggccagtacctgcagcgcagcatcgtgcccaccatgcactaccaggacagcctgcccaggctgcctattcccaaacttgaagacaccattaggagatacctcagtgcacagaagcctctcttgaatgatggccagttcaggaaaacagaacaattttgcaagagttttgaaaatgggattggaaaagaactgcatgagcagctggttgctctggacaaacagaataaacatacaagctacatttcgggaccctggtttgatatgtacctatctgctcgagactccgttgttctgaactttaatccatttatggctttcaatcctgacccaaaatctgagtataatgaccagctcacccgggcaaccaacatgactgtttctgccatccggtttctgaagacactccgggctggccttctggagccagaagtgttccacttgaaccctgcaaaaagtgacactatcaccttcaagagactcatacgctttgtgccttcctctctgtcctggtatggggcctacctggtcaatgcgtatcccctggatatgtcccagtattttcggcttttcaactcaactcgtttacccaaacccagtcgggatgaactcttcactgatgacaaggccagacacctcctggtcctaaggaaaggaaatttttatatctttgatgtcctggatcaagatgggaacattgtgagcccctcggaaatccaggcacatctgaagtacattctctcagacagcagccccgcccccgagtttcccctggcatacctgaccagtgagaaccgagacatctgggcagagctcaggcagaagctgatgagtagtggcaatgaggagagcctgaggaaagtggactcggcagtgttctgtctctgcctagatgacttccccattaaggaccttgtccacttgtcccacaatatgctgcatggggatggcacaaaccgctggtttgataaatcctttaacctcattatcgccaaggatggctctactgccatccactttgagcactcttggggtgatggtgtggcagtgctcagattttttaatgaagtatttaaagacagcactcagacccctgccgtcactccacagagccagccagctaccactgactctactgtcacggtgcagaaactcaacttcgagctgactgatgccttaaagactggcatcacagctgctaaggaaaagtttgatgccaccatgaaaaccctcactattgactgcgtccagtttcagagaggaggcaaagaattcctgaagaagcaaaagctgagccctgacgcagttgcccagctggcattccagatggccttcctgcggcagtacgggcagacagtggccacctacgagtcctgtagcactgccgcattcaagcacggccgcactgagaccatccgcccggcctccgtctatacaaagaggtgctctgaggcctttgtcagggagccctccaggcacagtgctggtgagcttcagcagatgatggttgagtgctccaagtaccatggccagctgaccaaagaagcagcaatgggccagggctttgaccgacacttgtttgctctgcggcatctggcagcagccaaagggatcatcttgcctgagctctacctggaccctgcatacgggcagataaaccacaatgtcctgtccacgagcacactgagcagcccagcagtgaaccttgggggctttgcccctgtggtctctgatggctttggtgttgggtatgctgttcatgacaactggataggctgcaatgtctcttcctacccaggccgcaatgcccgggagtttctccaatgtgtggagaaggccttagaagacatgtttgatgccttagaaggcaaatccatcaaaagttaacttctgggcagatgaaaagctaccatcacttcctcatcatgaaaactgggaggccgggcatggtggctcatgcctgtaatcccagcattttgagaggctgaggcgggtggatcacttgaggtcaggagtttgagaccaacctggccaacatggtgaaaccttgtctctactaaaaatacaaaaattagctgggtgtggtggcatgtgcctataatcccagctacttgggaggttgaagcagaattgcttgaacccaggaggtggaggttgcagtgagctgagatcacaccactgcactccggcctgggcgacagagcgagactgtctcaaaaaaacaaaaaagaaaaaaaaactggggcctgtgtagccagtgggtgctattctgtgaaactaatcataagctgcctaggcagccagctacaggcttgagctttaaattcatggttttaaagctaaacgtaatttccacttgggactagatcacaactgaagataacaagagatttaagttttaagggcatttaatcaggaggaaaggtttggaaaactaactcaggtgtatttattgtttaagcagaaataaagtttaatttttgcttg

SEQ ID NO: 383386 - DNA, 3117 bp, Homo sapiens
ctcatatctagaattttgggtaggtactttgaatcattacgatctatctacttcttaggtgaggaaatagaggtttaaaatttagtccacagtctcgcaaggatggagcctggatcaaattttgggttatcagattccaatcacgtttcttagcttttcttttttttttccaactccagtttctgtcttgctccaaaaaaggggaaggagcggctgcggcgctcggtttcccgcctcctagggaagggaagggagacgagcaacgcggaggctggggcccccttccgggcggggcctactagtgggcggggcctgtcagtgagcggcccctgcccggaaggagccagtccggggcggagccgatggccttacaggggccggaagtggcctgcgggcggagaagtgcctcaggagtcctgacgcagtgtcttgggcgctaacggcggcggcggccttgtgtttagactccagaactccccacttgccgcgttctcgccgccgcaggctcccgggacgatggtgccccgcctgctgctgcgcgcctggccccggggccccgcggttggtccgggagcccccagtcggcccctcagcgccggctccgggcccggccagtacctgcagcgcagcatcgtgcccaccatgcactaccaggacagcctgcccagtgctgccatattctcggcaagaacttgtaagagacacctagttaggtagatagcctcaagctgccgatgaggaagcctctcttgtaatgatggcctagttccaaggaaaacagaacaattttgcaagagttttgaaaatgggattggaaaagaactgcatgagcagctggttgctctggacaaacagaataaacatacaagctacatttcgggaccctggtttgatatgtacctatctgctcgagactccgttgttctgaactttaatccatttatggctttcaatcctgacccaaaatctgagtataatgaccagctcacccgggcaaccaacatgactgtttctgccatccggtttctgaagacactccgggctggccttctggagccagaagtgttccacttgaaccctgcaaaaagtgacactatcaccttcaagagactcatacgctttgtgccttcctctctgtcctggtatggggcctacctggtcaatgcgtatcccctggatatgtcccagtattttcggcttttcaactcaactcgtttacccaaacccagtcgggatgaactcttcactgatgacaaggccagacacctcctggtcctaaggaaaggaaatttttatatctttgatgtcctggatcaagatgggaacattgtgagcccctcggaaatccaggcacatctgaagtacattctctcagacagcagccccgcccccgagtttcccctggcatacctgaccagtgagaaccgagacatctgggcagagctcaggcagaagctgatgagtagtggcaatgaggagagcctgaggaaagtggactcggcagtgttctgtctctgcctagatgacttccccattaaggaccttgtccacttgtcccacaatatgctgcatggggatggcacaaaccgctggtttgataaatcctttaacctcattatcgccaaggatggctctactgccatccactttgagcactcttggggtgatggtgtggcagtgctcagattttttaatgaagtatttaaagacagcactcagacccctgccgtcactccacagagccagccagctaccactgactctactgtcacggtgcagaaactcaacttcgagctgactgatgccttaaagactggcatcacagctgctaaggaaaagtttgatgccaccatgaaaaccctcactattgactgcgtccagtttcagagaggaggcaaagaattcctgaagaagcaaaagctgagccctgacgcagttgcccagctggcattccagatggccttcctgcggcagtacgggcagacagtggccacctacgagtcctgtagcactgccgcattcaagcacggccgcactgagaccatccgcccggcctccgtctatacaaagaggtgctctgaggcctttgtcagggagccctccaggcacagtgctggtgagcttcagcagatgatggttgagtgctccaagtaccatggccagctgaccaaagaagcagcaatgggccagggctttgaccgacacttgtttgctctgcggcatctggcagcagccaaagggatcatcttgcctgagctctacctggaccctgcatacgggcagataaaccacaatgtcctgtccacgagcacactgagcagcccagcagtgaaccttgggggctttgcccctgtggtctctgatggctttggtgttgggtatgctgttcatgacaactggataggctgcaatgtctcttcctacccaggccgcaatgcccgggagtttctccaatgtgtggagaaggccttagaagacatgtttgatgccttagaaggcaaatccatcaaaagttaacttctgggcagatgaaaagctaccatcacttcctcatcatgaaaactgggaggccgggcatggtggctcatgcctgtaatcccagcattttgagaggctgaggcgggtggatcacttgaggtcaggagtttgagaccaacctggccaacatggtgaaaccttgtctctactaaaaatacaaaaattagctgggtgtggtggcatgtgcctataatcccagctacttgggaggttgaagcagaattgcttgaacccaggaggtggaggttgcagtgagctgagatcacaccactgcactccggcctgggcgacagagcgagactgtctcaaaaaaacaaaaaagaaaaaaaaactggggcctgtgtagccagtgggtgctattctgtgaaactaatcataagctgcctaggcagccagctacaggcttgagctttaaattcatggttttaaagctaaacgtaatttccacttgggactagatcacaactgaagataacaagagatttaagttttaagggcatttaatcaggaggaaaggtttggaaaactaactcaggtgtatttattgtttaagcagaaataaagtttaatttttgcttg

SEQ ID NO: 383387 - DNA, 481 bp, Homo sapiens
ctgcaaccctcacatcgtcctttgaccttgcctacatgacctcgggtcaccctgcaaccgccacatcgtcctttgaccttgcctacatgacctcgggtcaccctgcaacccccacatcgtcctttgaccttccctacgtgacctcgggtcaccctgcaacccccacatcgtcctttgaccttccctacgtgacctcgggtcaccctgcaaccgccacatcgtcctttgaccttgcctacgtgacctcgggtcaccctgcaacccccacatcgtcctttgaccttccctacgtgacctcgggtcaccctgcaaccgccacatcgtcctttgaccttccctacgtgacctcgggtcaccctgcaaccgccacatcgtcctttgaccttgcctacgtgacctcgggtcaccctgcaaccgccacatcgtcctttgaccttccctacgtgacctcgggtcaccctgcaacccccacatcgtcctt

SEQ ID NO: 383388 - DNA, 2135 bp, Homo sapiens
ggagaccgctgggcggggacgcgaggagggaaggggcgtctgtgggcgggacctcccgggattggagtgaagagggtatctgcttgacagtggatccctggggatctacgctgagttcggagatgctccagctcgggccgcccctgtctgagcggagctttgcggcgctgaagcttacaggggaaggaaaagcctcgcccggcgtctgattggcggaaccgcgctgccgcagcctgggattccccagggacccccccggagccgccgcgtctcccatggacttgcccggggactccagcccgcctggccagccgcgtctgtgccgccagcctctgactcgagcattatggggagccaggagcccgaaacggccgaggctgcagctcccgggggccccttctcccctggaaaaggcctctcggcgggtcctggccgtggtgctagaagatgtcatggctgttcacatggtccccgtggtgccctcaaagcagacctccataccacagcaccacagctaccatcaggatcctgtccacaggcagccgcctgcctcgccaccccggcaggccgggtggtcctcgcaggccaggcctcccgaccctctgtgtttgtgtcgcgagcccttgagccgcatccaccggacctcttccaccctgaggcggcgatcaaggacaacccctggcccagaggagggcccttcacaaaaggtggaccgggccccccagcccaccctggtggtgatgctggaagacatcgccagtcctagaccccccgctgagggcttcattgatgagacccccaacttcatcatcccagcacaaagagctgagcccatgaggatagttcgccagccaacgcctccacctggggacctagaacccccattccagccatctgctctgcctgcagaccctctggagagcccaccaacagccccagatcctgctctggagctcccatccaccccaccaccgtccagccttttacgcccccgcctcagtccctggggcttggccccgctcttccgttccgtccgctccaagctggagagctttgctgacatcttcctcacgcccaacaaaaacccacagcccccacccccgtcccccccaatgaagctggagttgaagatcgccatctcagaggccgagcagtctggggctgctgagggcactgcgtctgtcagcccccggcccccaatccgccagtggcgaactcaggaccacaataccccagcacttctccctaagccctctctgggccgaagctactcctgccctgatctggggccccctggcccaggtacctgcacctggccacctgctccaccccaaccaagccgaccacggccgcggcggcacactgtgggtggtggggaaatggcccgagccccgccaccccctcggccctgtctccggaaagaggtcttccctctcggaggagtgggagcctccccttctctcaccacatcttgctcgtccacggcatccacttccttctccgaaccagcagaacccaggttgggttcaaccaaagggaaggagccaagagcctcaaaggaccaggtgctttcagaacctgagaccaagaccatgggaaaggtttctcgattcagaatacgcagaacaccagcccgtcctcagctaaaccttacaccaatgggactgcctcgaccaatcaggttgaacaagaaggagttcagcttggaagaaatttacaccaacaagaattaccaatcacccacaaccaggaggacctttgagaccatctttgaggaaccccgggagcgcaatgggactctgattttcaccagctcaaggaagctccggcgggctgtggaatttcgggacagcagccttcctcgatcacgaagaccgtcccgtggggtccgggctgcagggggcaggactgttcctcccaatgtggcccccagccctgatgtgggccccctgctccagcagcggctggaggagctagatgccttgctcctggaggaagaaacagtagatcgggagcagccccactggacctaggtgccccatctgttggtcatccatcctgaagggacaggaaacctcccaggcagttatttttttttctctatatttctagtaaagttttcgatatgtttctga

SEQ ID NO: 383389 - DNA, 2206 bp, Homo sapiens
ggagaccgctgggcggggacgcgaggagggaaggggcgtctgtgggcgggacctcccgggattggagtgaagagggtatctgcttgacagtggatccctggggatctacgctgagttcggagatgctccagctcgggccgcccctgtctgagcggagctttgcggcgctgaagcttacaggggaaggaaaagcctcgcccggcgtctgattggcggaaccgcgctgccgcagcctgggattccccagggacccccccggagccgccgcgtctcccatggacttgcccggggactccagcccgcctggccagccgcgtctgtgccgccagcctctgactcgagcattatggggagccaggagcccgaaacggccgaggctgcagctcccgggggccccttctcccctggaaaaggcctctcggcgggtcctggccgtggtgctagaagatgtcatggctgttcacatggtccccgtggtgccctcaaagcagacctccataccacagcaccacagctaccatcaggatcctgtccacaggcagccgcctgcctcgccaccccggcaggccgggtggtcctcgcaggccaggtgagcatggcaggatgggggtaagccgagggcccagctgagccattttaatcttcctgttccctcgctaggcctcccgaccctctgtgtttgtgtcgcgagcccttgagccgcatccaccggacctcttccaccctgaggcggcgatcaaggacaacccctggcccagaggagggcccttcacaaaaggtggaccgggccccccagcccaccctggtggtgatgctggaagacatcgccagtcctagaccccccgctgagggcttcattgatgagacccccaacttcatcatcccagcacaaagagctgagcccatgaggatagttcgccagccaacgcctccacctggggacctagaacccccattccagccatctgctctgcctgcagaccctctggagagcccaccaacagccccagatcctgctctggagctcccatccaccccaccaccgtccagccttttacgcccccgcctcagtccctggggcttggccccgctcttccgttccgtccgctccaagctggagagctttgctgacatcttcctcacgcccaacaaaaacccacagcccccacccccgtcccccccaatgaagctggagttgaagatcgccatctcagaggccgagcagtctggggctgctgagggcactgcgtctgtcagcccccggcccccaatccgccagtggcgaactcaggaccacaataccccagcacttctccctaagccctctctgggccgaagctactcctgccctgatctggggccccctggcccaggtacctgcacctggccacctgctccaccccaaccaagccgaccacggccgcggcggcacactgtgggtggtggggaaatggcccgagccccgccaccccctcggccctgtctccggaaagaggtcttccctctcggaggagtgggagcctccccttctctcaccacatcttgctcgtccacggcatccacttccttctccgaaccagcagaacccaggttgggttcaaccaaagggaaggagccaagagcctcaaaggaccaggtgctttcagaacctgagaccaagaccatgggaaaggtttctcgattcagaatacgcagaacaccagcccgtcctcagctaaaccttacaccaatgggactgcctcgaccaatcaggttgaacaagaaggagttcagcttggaagaaatttacaccaacaagaattaccaatcacccacaaccaggaggacctttgagaccatctttgaggaaccccgggagcgcaatgggactctgattttcaccagctcaaggaagctccggcgggctgtggaatttcgggacagcagccttcctcgatcacgaagaccgtcccgtggggtccgggctgcagggggcaggactgttcctcccaatgtggcccccagccctgatgtgggccccctgctccagcagcggctggaggagctagatgccttgctcctggaggaagaaacagtagatcgggagcagccccactggacctaggtgccccatctgttggtcatccatcctgaagggacaggaaacctcccaggcagttatttttttttctctatatttctagtaaagttttcgatatgtttctga

SEQ ID NO: 383390 - DNA, 2017 bp, Homo sapiens
gctccgagaagaaggccatcggcggttgggcagcgttgggtaagcttggtttttaaaggagccggaggtgggagctgcggaagacccgggatccacgggaggcggcggccgcagcctgggattccccagggacccccccggagccgccgcgtctcccatggacttgcccggggactccagcccgcctggccagccgcgtctgtgccgccagcctctgactcgagcattatggggagccaggagcccgaaacggccgaggctgcagctcccgggggccccttctcccctggaaaaggcctctcggcgggtcctggccgtggtgctagaagatgtcatggctgttcacatggtccccgtggtgccctcaaagcagacctccataccacagcaccacagctaccatcaggatcctgtccacaggcagccgcctgcctcgccaccccggcaggccgggtggtcctcgcaggccaggcctcccgaccctctgtgtttgtgtcgcgagcccttgagccgcatccaccggacctcttccaccctgaggcggcgatcaaggacaacccctggcccagaggagggcccttcacaaaaggtggaccgggccccccagcccaccctggtggtgatgctggaagacatcgccagtcctagaccccccgctgagggcttcattgatgagacccccaacttcatcatcccagcacaaagagctgagcccatgaggatagttcgccagccaacgcctccacctggggacctagaacccccattccagccatctgctctgcctgcagaccctctggagagcccaccaacagccccagatcctgctctggagctcccatccaccccaccaccgtccagccttttacgcccccgcctcagtccctggggcttggccccgctcttccgttccgtccgctccaagctggagagctttgctgacatcttcctcacgcccaacaaaaacccacagcccccacccccgtcccccccaatgaagctggagttgaagatcgccatctcagaggccgagcagtctggggctgctgagggcactgcgtctgtcagcccccggcccccaatccgccagtggcgaactcaggaccacaataccccagcacttctccctaagccctctctgggccgaagctactcctgccctgatctggggccccctggcccaggtacctgcacctggccacctgctccaccccaaccaagccgaccacggccgcggcggcacactgtgggtggtggggaaatggcccgagccccgccaccccctcggccctgtctccggaaagaggtcttccctctcggaggagtgggagcctccccttctctcaccacatcttgctcgtccacggcatccacttccttctccgaaccagcagaacccaggttgggttcaaccaaagggaaggagccaagagcctcaaaggaccaggtgctttcagaacctgagaccaagaccatgggaaaggtttctcgattcagaatacgcagaacaccagcccgtcctcagctaaaccttacaccaatgggactgcctcgaccaatcaggttgaacaagaaggagttcagcttggaagaaatttacaccaacaagaattaccaatcacccacaaccaggaggacctttgagaccatctttgaggaaccccgggagcgcaatgggactctgattttcaccagctcaaggaagctccggcgggctgtggaatttcgggacagcagccttcctcgatcacgaagaccgtcccgtggggtccgggctgcagggggcaggactgttcctcccaatgtggcccccagccctgatgtgggccccctgctccagcagcggctggaggagctagatgccttgctcctggaggaagaaacagtagatcgggagcagccccactggacctaggtgccccatctgttggtcatccatcctgaagggacaggaaacctcccaggcagttatttttttttctctatatttctagtaaagttttcgatatgtttctga

SEQ ID NO: 383391 - DNA, 2058 bp, Homo sapiens
gctccgagaagaaggccatcggcggttgggcagcgttgggtaagcttggtttttaaaggagccggaggtgggagctgcggaagacccgggatccacgggaggcggcggccgcagcctgggattccccagggacccccccggagccgccgcgtctcccatggacttgcccggggactccagcccgcctggccagccgcgtctgtgccgccagcctctgactcgagcattatggggagccaggagcccgaaacggccgaggctgcagctcccgggggccccttctcccctggaaaaggcctctcggcgggtcctggccgtggtgctagaagatgtcatggctgttcacatggtccccgtggtgccctcaaagcagacctccataccacagcaccacagctaccatcaggatcctgtccacaggcagccgcctgcctcgccaccccggcaggccgggtggtcctcgcaggccaggcctcccgaccctctgtgtttgtgtcgcgagcccttgagccgcatccaccggacctcttccaccctgaggcggcgatcaaggacaacccctggcccagaggagggcccttcacaaaaggtggaccgggccccccagcccaccctggtggtgatgctggaagacatcgccagtcctagaccccccgctgagggcttcattgatgagacccccaacttcatcatcccagcacaaagagctgagcccatgaggatagttcgccagccaacgcctccacctggggacctagaacccccattccagccatctgctctgcctgcagaccctctggagagcccaccaacagccccagatcctgctctggagctcccatccaccccaccaccgtccagccttttacgcccccgcctcagtccctggggcttggccccgctcttccgttccgtccgctccaagctggagagctttgctgacatcttcctcacgcccaacaaaaacccacagcccccacccccgtcccccccaatgaagctggagttgaagatcgccatctcagaggccgagcagtctggggctgctgagggcactgcgtctgtcagcccccggcccccaatccgccagtggcgaactcaggaccacaataccccagcacttctccctaagccctctctgggccgaagctactcctgccctgatctggggccccctggcccaggtacctgcacctggccacctgctccaccccaaccaagccgaccacggccgcggcggcacactgtgggtggtggggaaatggcccgagccccgccaccccctcggccctgtctccggaaagaggtcttccctctcggaggagtgggagcctccccttctctcaccacatcttgctcgtccacggcatccacttccttctccgaaccagcagaacccaggttgggttcaaccaaagggaaggagccaagagcctcaaaggaccaggtgctttcagaacctgagaccaagaccatgggaaaggtttctcgattcagaatacgcagaacaccagcccgtcctcagctaaaccttacaccaatgggactgcctcgaccaatcaggttgaacaagaaggagttcagcttggaagaaatttacaccaacaagaattaccaatcacccacaaccaggaggacctttgagaccatctttgaggaaccccgggagcgcaatgggactctgattttcaccagctcaaggaagctccggcgggctgtggaatttcgggacagcagccttcctcgatcacgaagaccgtcccgtggggtccgggctgcagggggcaggactgttcctcccaatgtggcccccagccctgatgtgggccccctgctccagcagcggctggaggagctagatgccttgctcctggaggaagaaacagtagatcgggagcagccccactggacctaggtgccccatctgttggtcatccatcctgaagggacaggaaacctcccaggcagttatttttttttctctatatttctagtaaagttttcgatatgtttctgaaaaaaaaaaaacaagggcggccgctctagagtatccctcaa

SEQ ID NO: 383392 - DNA, 2049 bp, Homo sapiens
gctccgagaagaaggccatcggcggttgggcagcgttgggtaagcttggtttttaaaggagccggaggtgggagctgcggaagacccgggatccacgggaggcggcggccgcagcctgggattccccagggacccccccggagccgccgcgtctcccatggacttgcccggggactccagcccgcctggccagccgcgtctgtgccgccagcctctgactcgagcattatggggagccaggagcccgaaacggccgaggctgcagctcccgggggccccttctcccctggaaaaggcctctcggcgggtcctggccgtggtgctagaagatgtcatggctgttcacatggtccccgtggtgccctcaaagcagacctccataccacagcaccacagctaccatcaggatcctgtccacaggcagccgcctgcctcgccaccccggcaggccgggtggtcctcgcaggccaggcctcccgaccctctgtgtttgtgtcgcgagcccttgagccgcatccaccggacctcttccaccctgaggcggcgatcaaggacaacccctggcccagaggagggcccttcacaaaaggtggaccgggccccccagcccaccctggtggtgatgctggaagacatcgccagtcctagaccccccgctgagggcttcattgatgagacccccaacttcatcatcccagcacaaagagctgagcccatgaggatagttcgccagccaacgcctccacctggggacctagaacccccattccagccatctgctctgcctgcagaccctctggagagcccaccaacagccccagatcctgctctggagctcccatccaccccaccaccgtccagccttttacgcccccgcctcagtccctggggcttggccccgctcttccgttccgtccgctccaagctggagagctttgctgacatcttcctcacgcccaacaaaaacccacagcccccacccccgtcccccccaatgaagctggagttgaagatcgccatctcagaggccgagcagtctggggctgctgagggcactgcgtctgtcagcccccggcccccaatccgccagtggcgaactcaggaccacaataccccagcacttctccctaagccctctctgggccgaagctactcctgccctgatctggggccccctggcccaggtacctgcacctggccacctgctccaccccaaccaagccgaccacggccgcggcggcacactgtgggtggtggggaaatggcccgagccccgccaccccctcggccctgtctccggaaagaggtcttccctctcggaggagtgggagcctccccttctctcaccacatcttgctcgtccacggcatccacttccttctccgaaccagcagaacccaggttgggttcaaccaaagggaaggagccaagagcctcaaaggaccaggtgctttcagaacctgagaccaagaccatgggaaaggtttctcgattcagaatacgcagaacaccagcccgtcctcagctaaaccttacaccaatgggactgcctcgaccaatcaggttgaacaagaaggagttcagcttggaagaaatttacaccaacaagaattaccaatcacccacaaccaggaggacctttgagaccatctttgaggaaccccgggagcgcaatgggactctgattttcaccagctcaaggaagctccggcgggctgtggaatttcgggacagcagccttcctcgatcacgaagaccgtcccgtggggtccgggctgcagggggcaggactgttcctcccaatgtggcccccagccctgatgtgggccccctgctccagcagcggctggaggagctagatgccttgctcctggaggaagaaacagtagatcgggagcagccccactggacctaggtgccccatctgttggtcatccatcctgaagggacaggaaacctcccaggcagttatttttttttctctatatttctagtaaagttttcgatatgtttctgattcttttgtatctctagctgagtttaaaaaaa

SEQ ID NO: 383393 - DNA, 2801 bp, Homo sapiens
ggagaccgctgggcggggacgcgaggagggaaggggcgtctgtgggcgggacctcccgggattggagtgaagagggtatctgcttgacagtggatccctggggatctacgctgagttcggagatgctccagctcgggccgcccctgtctgagcggagctttgcggcgctgaagcttacaggggaaggaaaagcctcgcccggcgtctgattggcggaaccgcgctgtaggattctttcctcagggatccagtctaggggatctggtgggatggagggtcgtcgatgtatggagtattgctttggagtcctcggccactcgctgggagaggaggaggatcgcagagggatccagcggaaatagcctcccaggaccgggatccccgtggatcccgggggatctcggggcataatctgcagggacaaaggcctcgggaggctcgggccgcgggagaactggggccgctgcattctgggttctggcggcaggtgccaggcagggcgcgagtgatccgctgatcgaggcggtggcagcgggaggacacccgctccgggcgaccggccgggggcgccctttcgcgccccagggctgcggccgctgggctacggggagccgcgggcggaccatgaagggcggagccccagggaaggggccggccctcaccccccgctcccccgctccccccttaccccaggccgcagcctgggattccccagggacccccccggagccgccgcgtctcccatggacttgcccggggactccaggtgagagcgtacccgggcggcccgcctgtcttgaccccgggagatggggatcctggcgaccgtgccgggaaactacagagccagcgacaggttcgggcgaccgtcctctgcttctttcaccctccagcccgcctggccagccgcgtctgtgccgccagcctctgactcgagcattatggggagccaggagcccgaaacggccgaggctgcagctcccgggggccccttctcccctggaaaaggcctctcggcgggtcctggccgtggtgctagaagatgtcatggctgttcacatggtccccgtggtgccctcaaagcagacctccataccacagcaccacagctaccatcaggatcctgtccacaggcagccgcctgcctcgccaccccggcaggccgggtggtcctcgcaggccaggtgagcatggcaggatgggggtaagccgagggcccagctgagccattttaatcttcctgttccctcgctaggcctcccgaccctctgtgtttgtgtcgcgagcccttgagccgcatccaccggacctcttccaccctgaggcggcgatcaaggacaacccctggcccagaggagggcccttcacaaaaggtggaccgggccccccagcccaccctggtggtgatgctggaagacatcgccagtcctagaccccccgctgagggcttcattgatgagacccccaacttcatcatcccagcacaaagagctgagcccatgaggatagttcgccagccaacgcctccacctggggacctagaacccccattccagccatctgctctgcctgcagaccctctggagagcccaccaacagccccagatcctgctctggagctcccatccaccccaccaccgtccagccttttacgcccccgcctcagtccctggggcttggccccgctcttccgttccgtccgctccaagctggagagctttgctgacatcttcctcacgcccaacaaaaacccacagcccccacccccgtcccccccaatgaagctggagttgaagatcgccatctcagaggccgagcagtctggggctgctgagggcactgcgtctgtcagcccccggcccccaatccgccagtggcgaactcaggaccacaataccccagcacttctccctaagccctctctgggccgaagctactcctgccctgatctggggccccctggcccaggtacctgcacctggccacctgctccaccccaaccaagccgaccacggccgcggcggcacactgtgggtggtggggaaatggcccgagccccgccaccccctcggccctgtctccggaaagaggtcttccctctcggaggagtgggagcctccccttctctcaccacatcttgctcgtccacggcatccacttccttctccgaaccagcagaacccaggttgggttcaaccaaagggaaggagccaagagcctcaaaggaccaggtgctttcagaacctgagaccaagaccatgggaaaggtttctcgattcagaatacgcagaacaccagcccgtcctcagctaaaccttacaccaatgggactgcctcgaccaatcaggttgaacaagaaggagttcagcttggaagaaatttacaccaacaagaattaccaatcacccacaaccaggaggacctttgagaccatctttgaggaaccccgggagcgcaatgggactctgattttcaccagctcaaggaagctccggcgggctgtggaatttcgggacagcagccttcctcgatcacgaagaccgtcccgtggggtccgggctgcagggggcaggactgttcctcccaatgtggcccccagccctgatgtgggccccctgctccagcagcggctggaggagctagatgccttgctcctggaggaagaaacagtagatcgggagcagccccactggacctaggtgccccatctgttggtcatccatcctgaagggacaggaaacctcccaggcagttatttttttttctctatatttctagtaaagttttcgatatgtttctga

SEQ ID NO: 383394 - DNA, 2088 bp, Homo sapiens
gctccgagaagaaggccatcggcggttgggcagcgttgggtaagcttggtttttaaaggagccggaggtgggagctgcggaagacccgggatccacgggaggcggcggccgcagcctgggattccccagggacccccccggagccgccgcgtctcccatggacttgcccggggactccagcccgcctggccagccgcgtctgtgccgccagcctctgactcgagcattatggggagccaggagcccgaaacggccgaggctgcagctcccgggggccccttctcccctggaaaaggcctctcggcgggtcctggccgtggtgctagaagatgtcatggctgttcacatggtccccgtggtgccctcaaagcagacctccataccacagcaccacagctaccatcaggatcctgtccacaggcagccgcctgcctcgccaccccggcaggccgggtggtcctcgcaggccaggtgagcatggcaggatgggggtaagccgagggcccagctgagccattttaatcttcctgttccctcgctaggcctcccgaccctctgtgtttgtgtcgcgagcccttgagccgcatccaccggacctcttccaccctgaggcggcgatcaaggacaacccctggcccagaggagggcccttcacaaaaggtggaccgggccccccagcccaccctggtggtgatgctggaagacatcgccagtcctagaccccccgctgagggcttcattgatgagacccccaacttcatcatcccagcacaaagagctgagcccatgaggatagttcgccagccaacgcctccacctggggacctagaacccccattccagccatctgctctgcctgcagaccctctggagagcccaccaacagccccagatcctgctctggagctcccatccaccccaccaccgtccagccttttacgcccccgcctcagtccctggggcttggccccgctcttccgttccgtccgctccaagctggagagctttgctgacatcttcctcacgcccaacaaaaacccacagcccccacccccgtcccccccaatgaagctggagttgaagatcgccatctcagaggccgagcagtctggggctgctgagggcactgcgtctgtcagcccccggcccccaatccgccagtggcgaactcaggaccacaataccccagcacttctccctaagccctctctgggccgaagctactcctgccctgatctggggccccctggcccaggtacctgcacctggccacctgctccaccccaaccaagccgaccacggccgcggcggcacactgtgggtggtggggaaatggcccgagccccgccaccccctcggccctgtctccggaaagaggtcttccctctcggaggagtgggagcctccccttctctcaccacatcttgctcgtccacggcatccacttccttctccgaaccagcagaacccaggttgggttcaaccaaagggaaggagccaagagcctcaaaggaccaggtgctttcagaacctgagaccaagaccatgggaaaggtttctcgattcagaatacgcagaacaccagcccgtcctcagctaaaccttacaccaatgggactgcctcgaccaatcaggttgaacaagaaggagttcagcttggaagaaatttacaccaacaagaattaccaatcacccacaaccaggaggacctttgagaccatctttgaggaaccccgggagcgcaatgggactctgattttcaccagctcaaggaagctccggcgggctgtggaatttcgggacagcagccttcctcgatcacgaagaccgtcccgtggggtccgggctgcagggggcaggactgttcctcccaatgtggcccccagccctgatgtgggccccctgctccagcagcggctggaggagctagatgccttgctcctggaggaagaaacagtagatcgggagcagccccactggacctaggtgccccatctgttggtcatccatcctgaagggacaggaaacctcccaggcagttatttttttttctctatatttctagtaaagttttcgatatgtttctga

SEQ ID NO: 383395 - DNA, 1400 bp, Homo sapiens
cggactactatgaggatccctcggcttggtatataaagatgggatgttgatgtcagaggcttgaagttcaattcttaaatgcagaacttagtgttttaagggtgggctaattcccctgtgcacaaagttgagcatgtggggaggggctgagacactgcagccaaggaatatccacctgtgaccctctcctttcctcagccccagatcctgctctggagctcccatccaccccaccaccgtccagccttttacgcccccgcctcagtccctggggcttggccccgctcttccgttccgtccgctccaagctggagagctttgctgacatcttcctcacgcccaacaaaaacccacagcccccacccccgtcccccccaatgaagctggagttgaagatcgccatctcagaggccgagcagtctggggctgctgagggcactgcgtctgtcagcccccggcccccaatccgccagtggcgaactcaggaccacaataccccagcacttctccctaagccctctctgggccgaagctactcctgccctgatctggggccccctggcccaggtacctgcacctggccacctgctccaccccaaccaagccgaccacggccgcggcggcacactgtgggtggtggggaaatggcccgagccccgccaccccctcggccctgtctccggaaagaggtcttccctctcggaggagtgggagcctccccttctctcaccacatcttgctcgtccacggcatccacttccttctccgaaccagcagaacccaggttgggttcaaccaaagggaaggagccaagagcctcaaaggaccaggtgctttcagaacctgagaccaagaccatgggaaaggtttctcgattcagaatacgcagaacaccagcccgtcctcagctaaaccttacaccaatgggactgcctcgaccaatcaggttgaacaagaaggagttcagcttggaagaaatttacaccaacaagaattaccaatcacccacaaccaggaggacctttgagaccatctttgaggaaccccgggagcgcaatgggactctgattttcaccagctcaaggaagctccggcgggctgtggaatttcgggacagcagccttcctcgatcacgaagaccgtcccgtggggtccgggctgcagggggcaggactgttcctcccaatgtggcccccagccctgatgtgggccccctgctccagcagcggctggaggagctagatgccttgctcctggaggaagaaacagtagatcgggagcagccccactggacctaggtgccccatctgttggtcatccatcctgaagggacaggaaacctcccaggcagttatttttttttctctatatttctagtaaagttttcgatatgtttctga

SEQ ID NO: 383396 - DNA, 775 bp, Homo sapiens
cctgagtatccagtgggcaggagacgggggataatgcagtgaatcctgtttgtccctgagccttgaccttcttggcaggttgggttcaaccaaagggaaggagccaagagcctcaaaggaccaggtgctttcagaacctgagaccaaggtaggcattcagatcgggtagaagagactagtgggggcctgagcccatgtcactctttcaccctctgccccatttttgcagaccatgggaaaggtttctcgattcagaatacgcagaacaccagcccgtcctcagctaaaccttacaccaatgggactgcctcgaccaatcaggttgaacaagaaggagttcagcttggaagaaatttacaccaacaagaattaccaatcacccacaaccaggaggacctttgagaccatctttgaggaaccccgggagcgcaatgggactctgattttcaccagctcaaggaagctccggcgggctgtggaatttcgggacagcagccttcctcgatcacgaagaccgtcccgtggggtccgggctgcagggggcaggactgttcctcccaatgtggcccccagccctgatgtgggccccctgctccagcagcggctggaggagctagatgccttgctcctggaggaagaaacagtagatcgggagcagccccactggacctaggtgccccatctgttggtcatccatcctgaagggacaggaaacctcccaggcagttatttttttttctctatatttctagtaaagttttcgatatgtttctga

SEQ ID NO: 383397 - DNA, 1699 bp, Homo sapiens
gctccgagaagaaggccatcggcggttgggcagcgttgggtaagcttggtttttaaaggagccggaggtgggagctgcggaagacccgggatccacgggaggcggcggccgcagcctgggattccccagggacccccccggagccgccgcgtctcccatggacttgcccggggactccagcccgcctggccagccgcgtctgtgccgccagcctctgactcgagcattatggggagccaggagcccgaaacggccgaggctgcagctcccgggggccccttctcccctggaaaaggcctctcggcgggtcctggccgtggtgctagaagatgtcatggctgttcacatggtccccgtggtgccctcaaagcagacctccataccacagcaccacagctaccatcaggatcctgtccacaggcagccgcctgcctcgccaccccggcaggccgggtggtcctcgcaggccaggcctcccgaccctctgtgtttgtgtcgcgagcccttgagccgcatccaccggacctcttccaccctgaggcggcgatcaaggacaacccctggcccagaggagggcccttcacaaaaggtggaccgggccccccagcccaccctggtggtgatgctggaagacatcgccagtcctagaccccccgctgagggcttcattgatgagacccccaacttcatcatcccagcacaaagagctgagcccatgaggatagttcgccagccaacgcctccacctggggacctagaacccccattccagccatctgctctgcctgcagaccctctggagagcccaccaacagccccagatcctgctctggagctcccatccaccccaccaccgtccagccttttacgcccccgcctcagtccctggggcttggccccgctcttccgttccgtccgctccaagctggagagctttgctgacatcttcctcacgcccaacaaaaacccacagccagaaaacacaacaagacaaaaacgccaatgaccgcagacaccacgcacccaccgacacatccaagaaaaaccacacagaccgccagcagcgcaaagaaagagacacagaaacgaaccaacagcgacacaaaccacagacacaccgccacaaaccaccaacccacaacacaacaaagaaagaaagcaacaaaagaaaacaacagacgccgcaaacacaaaaccagcaccagaaaccacgacacacacccaaacaaaaacaacgaacacaacacaaaggcaaacgaacgacgcacacacaacagaacaaagaacagaaggaacagacacagcgaaacaacaaaagcacaaggaaggacaagagacaaccagcgagcaaaacaaaaacaaaaccacagacagaacacaccgcaacggaacatacacacagcaaaccacaacagacaacggacaacagaacaacgcaccacagacaacagccaaccaaaccaaaacaacacaaaaaaccaaaaacaagaaaacacccaaagaacccgaaaacaagaagagagaagaagacgaagagacaacacagaacgaaacgacgacaccagaacagacaacaggacaaaaaaatcagaccaccaggcgcaacacaaagaacaaagagccaaaacaaaacgaaagaaaacgaacacagcacaccaaaaagacaacaaagagaaaagcgagaacccaccacacacgc

SEQ ID NO: 383398 - DNA, 1091 bp, Homo sapiens
aggctggtaccggtctgggatgttaaggcatgggagttgctggctcaggtgggatacctggaagttcccctagcctttaccttgcccttcaccccagagctgagcccatgaggatagttcgccagccaacgcctccacctggggacctagaacccccattccagccatctgctctgcctgcagaccctctggagagcccaccaacagccccagatcctgctctggagctcccatccaccccaccaccgtccagccttttacgcccccgcctcagtccctggggcttggccccgctcttccgttccgtccgctccaagctggagagctttgctgacatcttcctcacgcccaacaaaaacccacagccagaaaacacaacaagacaaaaacgccaatgaccgcagacaccacgcacccaccgacacatccaagaaaaaccacacagaccgccagcagcgcaaagaaagagacacagaaacgaaccaacagcgacacaaaccacagacacaccgccacaaaccaccaacccacaacacaacaaagaaagaaagcaacaaaagaaaacaacagacgccgcaaacacaaaaccagcaccagaaaccacgacacacacccaaacaaaaacaacgaacacaacacaaaggcaaacgaacgacgcacacacaacagaacaaagaacagaaggaacagacacagcgaaacaacaaaagcacaaggaaggacaagagacaaccagcgagcaaaacaaaaacaaaaccacagacagaacacaccgcaacggaacatacacacagcaaaccacaacagacaacggacaacagaacaacgcaccacagacaacagccaaccaaaccaaaacaacacaaaaaaccaaaaacaagaaaacacccaaagaacccgaaaacaagaagagagaagaagacgaagagacaacacagaacgaaacgacgacaccagaacagacaacaggacaaaaaaatcagaccaccaggcgcaacacaaagaacaaagagccaaaacaaaacgaaagaaaacgaacacagcacaccaaaaagacaacaaagagaaaagcgagaacccaccacacacgc

SEQ ID NO: 383399 - DNA, 2603 bp, Homo sapiens
ggagaccgctgggcggggacgcgaggagggaaggggcgtctgtgggcgggacctcccgggattggagtgaagagggtatctgcttgacagtggatccctggggatctacgctgagttcggagatgctccagctcgggccgcccctgtctgagcggagctttgcggcgctgaagcttacaggggaaggaaaagcctcgcccggcgtctgattggcggaaccgcgctgtaggattctttcctcagggatccagtctaggggatctggtgggatggagggtcgtcgatgtatggagtattgctttggagtcctcggccactcgctgggagaggaggaggatcgcagagggatccagcggaaatagcctcccaggaccgggatccccgtggatcccgggggatctcggggcataatctgcagggacaaaggcctcgggaggctcgggccgcgggagaactggggccgctgcattctgggttctggcggcaggtgccaggcagggcgcgagtgatccgctgatcgaggcggtggcagcgggaggacacccgctccgggcgaccggccgggggcgccctttcgcgccccagggctgcggccgctgggctacggggagccgcgggcggaccatgaagggcggagccccagggaaggggccggccctcaccccccgctcccccgctccccccttaccccaggccgcagcctgggattccccagggacccccccggagccgccgcgtctcccatggacttgcccggggactccagcccgcctggccagccgcgtctgtgccgccagcctctgactcgagcattatggggagccaggagcccgaaacggccgaggctgcagctcccgggggccccttctcccctggaaaaggcctctcggcgggtcctggccgtggtgctagaagatgtcatggctgttcacatggtccccgtggtgccctcaaagcagacctccataccacagcaccacagctaccatcaggatcctgtccacaggcagccgcctgcctcgccaccccggcaggccgggtggtcctcgcaggccaggcctcccgaccctctgtgtttgtgtcgcgagcccttgagccgcatccaccggacctcttccaccctgaggcggcgatcaaggacaacccctggcccagaggagggcccttcacaaaaggtggaccgggccccccagcccaccctggtggtgatgctggaagacatcgccagtcctagaccccccgctgagggcttcattgatgagacccccaacttcatcatcccagcacaaagagctgagcccatgaggatagttcgccagccaacgcctccacctggggacctagaacccccattccagccatctgctctgcctgcagaccctctggagagcccaccaacagccccagatcctgctctggagctcccatccaccccaccaccgtccagccttttacgcccccgcctcagtccctggggcttggccccgctcttccgttccgtccgctccaagctggagagctttgctgacatcttcctcacgcccaacaaaaacccacagcccccacccccgtcccccccaatgaagctggagttgaagatcgccatctcagaggccgagcagtctggggctgctgagggcactgcgtctgtcagcccccggcccccaatccgccagtggcgaactcaggaccacaataccccagcacttctccctaagccctctctgggccgaagctactcctgccctgatctggggccccctggcccaggtacctgcacctggccacctgctccaccccaaccaagccgaccacggccgcggcggcacactgtgggtggtggggaaatggcccgagccccgccaccccctcggccctgtctccggaaagaggtcttccctctcggaggagtgggagcctccccttctctcaccacatcttgctcgtccacggcatccacttccttctccgaaccagcagaacccaggttgggttcaaccaaagggaaggagccaagagcctcaaaggaccaggtgctttcagaacctgagaccaagaccatgggaaaggtttctcgattcagaatacgcagaacaccagcccgtcctcagctaaaccttacaccaatgggactgcctcgaccaatcaggttgaacaagaaggagttcagcttggaagaaatttacaccaacaagaattaccaatcacccacaaccaggaggacctttgagaccatctttgaggaaccccgggagcgcaatgggactctgattttcaccagctcaaggaagctccggcgggctgtggaatttcgggacagcagccttcctcgatcacgaagaccgtcccgtggggtccgggctgcagggggcaggactgttcctcccaatgtggcccccagccctgatgtgggccccctgctccagcagcggctggaggagctagatgccttgctcctggaggaagaaacagtagatcgggagcagccccactggacctaggtgccccatctgttggtcatccatcctgaagggacaggaaacctcccaggcagttatttttttttctctatatttctagtaaagttttcgatatgtttctga

SEQ ID NO: 383400 - DNA, 1800 bp, Homo sapiens
gctccgagaagaaggccatcggcggttgggcagcgttgggtaagcttggtttttaaaggagccggaggtgggagctgcggaagacccgggatccacgggaggcggcggccgcagcctgggattccccagggacccccccggagccgccgcgtctcccatggacttgcccggggactccagcccgcctggccagccgcgtctgtgccgccagcctctgactcgagcattatggggagccaggagcccgaaacggccgaggctgcagctcccgggggccccttctcccctggaaaaggcctctcggcgggtcctggccgtggtgctagaagatgtcatggctgttcacatggtccccgtggtgccctcaaagcagacctccataccacagcaccacagctaccatcaggatcctgtccacaggcagccgcctgcctcgccaccccggcaggccgggtggtcctcgcaggccaggcctcccgaccctctgtgtttgtgtcgcgagcccttgagccgcatccaccggacctcttccaccctgaggcggcgatcaaggacaacccctggcccagaggagggcccttcacaaaaggtggaccgggccccccagcccaccctggtggtgatgctggaagacatcgccagtcctagaccccccgctgagggcttcattgatgagacccccaacttcatcatcccagcacaaagagctgagcccatgaggatagttcgccagccaacgcctccacctggggacctagaacccccattccagccatctgctctgcctgcagaccctctggagagcccaccaacagccccagatcctgctctggagctcccatccaccccaccaccgtccagccttttacgcccccgcctcagtccctggggcttggccccgctcttccgttccgtccgctccaagctggagagctttgctgacatcttcctcacgcccaacaaaaacccacagcccccacccccgtcccccccaatgaagctggagttgaagatcgccatctcagaggccgagcagtctggggctgctgagggcactgcgtctgtcagcccccggcccccaatccgccagtggcgaactcaggaccacaataccccagcacttctccctaagccctctctgggccgaagctactcctgccctgatctggggccccctggcccaggttgggttcaaccaaagggaaggagccaagagcctcaaaggaccaggtgctttcagaacctgagaccaagaccatgggaaaggtttctcgattcagaatacgcagaacaccagcccgtcctcagctaaaccttacaccaatgggactgcctcgaccaatcaggttgaacaagaaggagttcagcttggaagaaatttacaccaacaagaattaccaatcacccacaaccaggaggacctttgagaccatctttgaggaaccccgggagcgcaatgggactctgattttcaccagctcaaggaagctccggcgggctgtggaatttcgggacagcagccttcctcgatcacgaagaccgtcccgtggggtccgggctgcagggggcaggactgttcctcccaatgtggcccccagccctgatgtgggccccctgctccagcagcggctggaggagctagatgccttgctcctggaggaagaaacagtagatcgggagcagccccactggacctaggtgccccatctgttggtcatccatcctgaagggacaggaaacctcccaggcagttatttttttttctctatatttctagtaaagttttcgatatgtttctga

SEQ ID NO: 383401 - DNA, 1432 bp, Homo sapiens
agagcaaggctctgtctcaaaaaaaaaaaaaaaagaagaagccttaagggataggggagttgctggctcaggtgggatacctggaagttcccctagcctttaccttgcccttcaccccagagctgagcccatgaggatagttcgccagccaacgcctccacctggggacctagaacccccattccagccatctgctctgcctgcagaccctctggagagcccaccaacagccccagatcctgctctggagctcccatccaccccaccaccgtccagccttttacgcccccgcctcagtccctggggcttggccccgctcttccgttccgtccgctccaagctggagagctttgctgacatcttcctcacgcccaacaaaaacccacagcccccacccccgtcccccccaatgaagctggagttgaagatcgccatctcagaggccgagcagtctggggctgctgagggcactgcgtctgtcagcccccggcccccaatccgccagtggcgaactcaggaccacaataccccagcacttctccctaagccctctctgggccgaagctactcctgccctgatctggggccccctggcccaggtacctgcacctggccacctgctccaccccaaccaagccgaccacggccgcggcggcacactgtgggtggtggggaaatggcccgagccccgccaccccctcggccctgtctccggaaagaggtcttccctctcggaggagtgggagcctccccttctctcaccacatcttgctcgtccacggcatccacttccttctccgaaccagcagaacccaggttgggttcaaccaaagggaaggagccaagagcctcaaaggaccaggtgctttcagaacctgagaccaagaccatgggaaaggtttctcgattcagaatacgcagaacaccagcccgtcctcagctaaaccttacaccaatgggactgcctcgaccaatcaggttgaacaagaaggagttcagcttggaagaaatttacaccaacaagaattaccaatcacccacaaccaggaggacctttgagaccatctttgaggaaccccgggagcgcaatgggactctgattttcaccagctcaaggaagctccggcgggctgtggaatttcgggacagcagccttcctcgatcacgaagaccgtcccgtggggtccgggctgcagggggcaggactgttcctcccaatgtggcccccagccctgatgtgggccccctgctccagcagcggctggaggagctagatgccttgctcctggaggaagaaacagtagatcgggagcagccccactggacctaggtgccccatctgttggtcatccatcctgaagggacaggaaacctcccaggcagttatttttttttctctatatttctagtaaagttttcgatatgtttctga

SEQ ID NO: 383402 - DNA, 1780 bp, Homo sapiens
ggagaccgctgggcggggacgcgaggagggaaggggcgtctgtgggcgggacctcccgggattggagtgaagagggtatctgcttgacagtggatccctggggatctacgctgagttcggagatgctccagctcgggccgcccctgtctgagcggagctttgcggcgctgaagcttacaggggaaggaaaagcctctcgccaccccggcaggccgggtggtcctcgcaggccaggcctcccgaccctctgtgtttgtgtcgcgagcccttgagccgcatccaccggacctcttccaccctgaggcggcgatcaaggacaacccctggcccagaggagggcccttcacaaaaggtggaccgggccccccagcccaccctggtggtgatgctggaagacatcgccagtcctagaccccccgctgagggcttcattgatgagacccccaacttcatcatcccagcacaaagagctgagcccatgaggatagttcgccagccaacgcctccacctggggacctagaacccccattccagccatctgctctgcctgcagaccctctggagagcccaccaacagccccagatcctgctctggagctcccatccaccccaccaccgtccagccttttacgcccccgcctcagtccctggggcttggccccgctcttccgttccgtccgctccaagctggagagctttgctgacatcttcctcacgcccaacaaaaacccacagcccccacccccgtcccccccaatgaagctggagttgaagatcgccatctcagaggccgagcagtctggggctgctgagggcactgcgtctgtcagcccccggcccccaatccgccagtggcgaactcaggaccacaataccccagcacttctccctaagccctctctgggccgaagctactcctgccctgatctggggccccctggcccaggtacctgcacctggccacctgctccaccccaaccaagccgaccacggccgcggcggcacactgtgggtggtggggaaatggcccgagccccgccaccccctcggccctgtctccggaaagaggtcttccctctcggaggagtgggagcctccccttctctcaccacatcttgctcgtccacggcatccacttccttctccgaaccagcagaacccaggttgggttcaaccaaagggaaggagccaagagcctcaaaggaccaggtgctttcagaacctgagaccaagaccatgggaaaggtttctcgattcagaatacgcagaacaccagcccgtcctcagctaaaccttacaccaatgggactgcctcgaccaatcaggttgaacaagaaggagttcagcttggaagaaatttacaccaacaagaattaccaatcacccacaaccaggaggacctttgagaccatctttgaggaaccccgggagcgcaatgggactctgattttcaccagctcaaggaagctccggcgggctgtggaatttcgggacagcagccttcctcgatcacgaagaccgtcccgtggggtccgggctgcagggggcaggactgttcctcccaatgtggcccccagccctgatgtgggccccctgctccagcagcggctggaggagctagatgccttgctcctggaggaagaaacagtagatcgggagcagccccactggacctaggtgccccatctgttggtcatccatcctgaagggacaggaaacctcccaggcagttatttttttttctctatatttctagtaaagttttcgatatgtttctga

SEQ ID NO: 383403 - DNA, 682 bp, Homo sapiens
aaaaccaagcttacccaacgctgcccaaccgccgatggccttcttctcggagccagcagaacccaggttgggttcaaccaaagggaaggagccaagagcctcaaaggaccaggtgctttcagaacctgagaccaagaccatgggaaaggtttctcgattcagaatacgcagaacaccagcccgtcctcagctaaaccttacaccaatgggactgcctcgaccaatcaggttgaacaagaaggagttcagcttggaagaaatttacaccaacaagaattaccaatcacccacaaccaggaggacctttgagaccatctttgaggaaccccgggagcgcaatgggactctgattttcaccagctcaaggaagctccggcgggctgtggaatttcgggacagcagccttcctcgatcacgaagaccgtcccgtggggtccgggctgcagggggcaggactgttcctcccaatgtggcccccagccctgatgtgggccccctgctccagcagcggctggaggagctagatgccttgctcctggaggaagaaacagtagatcgggagcagccccactggacctaggtgccccatctgttggtcatccatcctgaagggacaggaaacctcccaggcagttatttttttttctctatatttctagtaaagttttcgatatgtttctga

SEQ ID NO: 383404 - DNA, 829 bp, Homo sapiens
cggactactatgaggatccctcggcttggtatataaagatgggatgttgatgtcagaggcttgaagttcaattcttaaatgcagaacttagtgttttaagggtgggctaattcccctgtgcacaaagttgagcatgtggggaggggctgagacactgcagccaaggaatatccacctgtgaccctctcctttcctcagccccagatcctgctctggagctcccatccaccccaccaccgtccagccttttacgcccccgcctcagtccctggggcttggccccgctcttccgttccgtccgctccaagctggagagctttgctgacatcttcctcacgcccaacaaaaacccacagcccccacccccgtcccccccaatgaagctggagttgaagatcgccatctcagaggccgagcagtctggggctgctgagggcactgcgtctgtcagcccccggcccccaatccgccagtggcgaactcaggaccacaataccccagcacttctccctaagccctctctgggccgaagctactcctgccctgatctggggccccctggcccaggtacctgcacctggccacctgctccaccccaaccaagccgaccacggccgcggcggcacactgtgggtggtggggaaatggcccgagccccgccaccccctcggccctgtctccggaaagaggtcttccctctcggaggagtgggagcctccccttctctcaccacatcttgctcgtccacggcatccacttccttctccgaaccagcagaacccaggtagtgctctcaaaaaacccccttgaagcctggctgcagcctggt

SEQ ID NO: 383405 - DNA, 379 bp, Homo sapiens
aacctcgctctgttcttgaagagctcatcttctagtgggaaggcagatgaggggatccagactcacaatccgtgaggggagacagagggctgcggtgtgatggcagtctaggaagattgagtggaggagcgccatgttggaagcatctcgaagacagaatgcaattccttctcgtgcatgaggggtgtcagaggaagtcccagtagaatgaacagcctgtgcaaaaggcgacactgagtatctcagtgctgggaacctggcaggtgctcagtggacatagctaagtgactgaagggtggaaggaagggagagcccagagaggtcaactgccttgctcaaggtcacacagcaggtttaggtcagagtcaggctcagcctc

SEQ ID NO: 383406 - DNA, 315 bp, Homo sapiens
aaacaacccaaatatctatcaacttatgcatgaataaccacaacgtgttatatccatacaatggaatattactcagccttaaaaatgaatgaagtactgatacacacttcaacatggatgaaccttgaaaacatcgtgctaagtgaaaaaagcccatcacaaagggacacatattgtatgattccgtttatgtgaaatgtccaaaacaggcagatttatagagacagaaaatacataagtattcaccaggggctgagtgtgggaagaatgagaacaactgtgaataggtacaggattctgggatcttcctaaaac

SEQ ID NO: 383407 - DNA, 1920 bp, Homo sapiens
caaagtatacaaatgttggcagggagcattcattttacaggtaaacatactggcatagaaggattttaggcaacctcatcagggtcacatagctaataaatgtcagaatgggattgaacctgggactgttagattctacgcctcctcattcattcatttattctctcactcattcacatgctctgttatgctgtatggtgttgagtaccatatttcagatattggcacattcggcttgtataaggggagacgcttttttgcagttggacggccattgaagacaagttggtcaccccaagttttctttccagttcttctgaaaaactcactaaagaaaaagaaagcaagaaatacagaaaagtatagaaaaataatccttattcccaccacctagaattaagttgttaacaagatgaaaacttcatactgaaaaaccaccctttctagaggcgatttaccacttattccttgcctttcaaaatatttacttttcaaggtaatctctccttattaatttgaaaaaaaaaatgtttcttttaaatagagattgttaacttggggtctggctaggctgtgaatcctctgatattaaacaaaagattttgttgaaggtgcttataaggctttatttttcttcctttctgctctagccccatatgtgcaggattttcattagatcctcaaagagttctgtgacccccaccctctccctcctaccttgttactttgaaacattctcactacagatttagtggggaatttggtcatttatttggattattaagagtttggaaactgcttctaactaagcagatgatgtggtaacaaagaaggcttatttgtgaaatagtgggtccaagattgatcacatctttctggtaaaccagccttatgcctactctcttttctcttatatcttcatgttttgccctttaattaatgaagcagtttacattgtgtgctgtggactgtcatatctgaaagcaaaagccttgtcttactcatctgtatatctcctgctatacagtaccatgtgtcttatgtaagtctttgtatctctgctaggttctcatgaagtcccatctctgtagtaagaataactcataaatatttctttattagccacctactgtgggaaatctttgggacttcaagtcttgaggtaacagaacttggttgcagctattatttacagtagatccctgtgggatgttttaattgaaccattatttttagtttagtcatttttaacctcaccaacttaactggagttagtattgtgaaagttttcagtgtttaataagcatcaaagtagcatattttgactctcggaaattcactagactatctgtttctgctgttacctgattatgccatctagttgattaggaaaacagtttttaggtccttgaggcagtgcagttgcatttatgacagtagtttatctgaatttttataaggataatttaatgggttaaaaaatgtggatttaatgaggaccttcataatttttccatacttgaccacagatgaaagggaatttttacttcacattggtatgcgaagtagtgcctgctggtaccacttatatttttgttaggaccagtaggaggcaccaacatccatggtgtaacctacaccaaacctaacttttttcagctttcatcttttcaaaaaaaaaaaaaagtaagtcattagggaattgaaggtggtgggtaaatacgaatacccttctagtcccttgaatcttacctatctggtacagttatgtccatccacttcttacccagaagcaaaataccctttctgacttaacagtgcttcacttcttaacatttttttgtctttagaaattattattattcattcctgaagggatgtagagttgtgggatgccttcagtagcttacaacaaaacca

SEQ ID NO: 383408 - DNA, 1896 bp, Homo sapiens
caaagtatacaaatgttggcagggagcattcattttacaggtaaacatactggcatagaaggattttaggcaacctcatcagggtcacatagctaataaatgtcagaatgggattgaacctgggactgttagattctacgcctcctcattcattcatttattctctcactcattcacatgctctgttatgctgtatggtgttgagtaccatatttcagatattggcacattcggcttgtataaggggagacgcttttttgcagttggacggccattgaagacaagttggtcaccccaagttttctttccagttcttctgaaaaactcactaaagaaaaagaaagcaagaaatacagaaaagtatagaaaaataatccttattcccaccacctagaattaagttgttaacaagatgaaaacttcatactgaaaaaccaccctttctagaggcgatttaccacttattccttgcctttcaaaatatttacttttcaaggtaatctctccttattaatttgaaaaaaaaaatgtttcttttaaatagagattgttaacttggggtctggctaggctgtgaatcctctgatattaaacaaaagattttgttgaaggtgcttataaggctttatttttcttcctttctgctctagccccatatgtgcaggattttcattagatcctcaaagagttctgtgacccccaccctctccctcctaccttgttactttgaaacattctcactacagatttagtggggaatttggtcatttatttggattattaagagtttggaaactgcttctaactaagcagatgatgtggtaacaaagaaggcttatttgtgaaatagtgggtccaagattgatcacatctttctggtaaaccagccttatgcctactctcttttctcttatatcttcatgttttgccctttaattaatgaagcagtttacattgtgtgctgtggactgtcatatctgaaagcaaaagccttgtcttactcatctgtatatctcctgctatacagtaccatgtgtcttatgtaagtctttgtatctctgctaggttctcatgaagtcccatctctgtagtaagaataactcataaatatttctttattagccacctactgtgggaaatctttgggacttcaagtcttgaggtaacagaacttggttgcagctattatttacagtagatccctgtgggatgttttaattgaaccattatttttagtttagtcatttttaacctcaccaacttaactggagttagtattgtgaaagttttcagtgtttaataagcatcaaagtagcatattttgactctcggaaattcactagactatctgtttctgctgttacctgattatgccatctagttgattaggaaaacagtttttaggtccttgaggcagtgcagttgcatttatgacagtagtttatctgaatttttataaggataatttaatgggttaaaaaatgtggatttaatgaggaccttcataatttttccatacttgaccacagatgaaagggaatttttacttcacattggtatgcgaagtagtgcctgctggtaccacttatatttttgttaggaccagtaacctacaccaaacctaacttttttcagctttcatcttttcaaaaaaaaaaaaaagtaagtcattagggaattgaaggtggtgggtaaatacgaatacccttctagtcccttgaatcttacctatctggtacagttatgtccatccacttcttacccagaagcaaaataccctttctgacttaacagtgcttcacttcttaacatttttttgtctttagaaattattattattcattcctgaagggatgtagagttgtgggatgccttcagtagcttacaacaaaacca

SEQ ID NO: 383409 - DNA, 631 bp, Homo sapiens
acagcccaaaatattggtagatggagaaacatctggttcccctttccacaaccaccttttcgttttagaaccagggtactttgtatgcagttgcttggattgttgatttccctcattctttgtagactcatctcaagtattctcagtaacttagattcccttgctcttcattcagaaatatttgttaaggtccattaaatgaaagtcaccacagttgatcatgtgaacagtgtcaagaatcaggccgaaccttcaaggagtttatgttctaaaacggaagcatggtggtacctgcttgtggaggctgaggcggaaggatcgcttgagcccaggactttgaggctgcataattgcattgacgctatccatagagtgcctgcaatttcaaatatcagaaaggatcgtacgagctatgatcatgccactgcactccagcctgaaccacagagcaagaccctttctctcaataaagtggaagtttgttcatttattcagtaaatatttattgattgccttctgtgtgccaagcactgttctaggtactgggattacagcagtgaacagataaatctcttccttcctggaacttacattttattgaagggaggagacatacaataaatgagtgaat

SEQ ID NO: 383410 - DNA, 204 bp, Homo sapiens
tcccagtcccaggggtgagtgatgtgtcccggcaagaaactgggctgttttacaaaataattttataggtgggagtttcctactcaaacacttctattttctcctatttcaggctgttcctcaagatgtgtcaggcttataaaaattaaatcttcagttgtaagaccagctaaaaggaaacataagtaccagtgagacagggga

SEQ ID NO: 383411 - DNA, 222 bp, Homo sapiens
ctgtccccagagaagtctcttcagcaatcacctctaccactctcgtgacctcttttatgtatgcttgatttcgtagttgggcccacaagatctagaaccatctctggagaacacttcctttatacttatgtattgggaacactgagggtgtctgtctcccactctggtgtcctgatacccattttactagtacctgagtgaaagcattacagtacgatggag

SEQ ID NO: 383412 - DNA, 513 bp, Homo sapiens
tgggcttgtcctgcccacacacactgtgaccgccggtattaaccgtagaaactagatgctttattcataggatttttctctgcacagtaaagctctcagagcaaaacacaggctgatctgagcttgagagaaagggattcctatcctaggatgtgaacatgggaaggagaccaggcccaggtacctgaagcttacacccgcctagtcttagatttcttgatggattctgggcttgccttcacctcaacaccacgccattcagcctgtcccgtctcctaaagtgtagaaggctggagattatatgatacagcctgcaagactctgagtggtgctgttcaaaccagcaagaaggacttctctggcatgagggaaagcaatacacctgtctctctcccagataaaaggaagaggcgagctcacagaacagacgtggcaggagctccacctgcagcagccaacctcccccttgtctgagtactggagccctcagttgtcccagataccaacgtgagc

SEQ ID NO: 383413 - DNA, 367 bp, Homo sapiens
ctactactactaaattcgcggccgcgtcgacaaacagataacctaaatatttgaggcactaggtcagaatgcatagggtgggccgagcacagtggcttatgcctggaatcccagaacttctggaggctgaggtgggcagattgcttgagcacaggagttcaagaccagcctggctaacacagtgaaaccccatctctacaaaaaatacaaaaattagccaggcatggtggcatgcgcctaaagtcccagctacttgggggctgaggtgggaagattgcttgaacctggaagctcaaggatacagtgagctgagatcatgccactgtactccagcctagaaggcaaagtgagactctgtctcaaaaaa

SEQ ID NO: 383414 - DNA, 279 bp, Homo sapiens
agacagtagaaatcatgactcacaggccagcaagtatacatgtttttagagatgaaacaagtgattgcaaacaggccgggtacatgagacagcctgctgcaggcacatgggggtcatctctggctggcaggaaggtgagggagtcctctcttctctggtcctggctgactctgcctcagcaggacttcacttgaccattctcaccttctgtcacctcatccttaaagtgacagagtaaattaactctaaggccccatccaggactcaagctgtgtgatt

SEQ ID NO: 383415 - DNA, 574 bp, Homo sapiens
  misc_feature (447)..(447): n is a, c, g, or t
  misc_feature (485)..(485): n is a, c, g, or t
cggccgccgccggcacccacagcgccaagagcggcggctccgaggcggctctcaaggagggtggaagcgccgccgcgctgtcctcctcctcctcctcctccgcggcggcagcggcggcatcctcttcctcctcgtcgggcccgggctcggccatggagacggggctgctccccaaccacaaactgaaaaccgttggcgaagcccccgccgcgccgccccaccagcagcaccaccaccaccaccatgcccaccaccaccaccaccatgcccaccacctccaccaccaccacgcactacagcagcagctaaaccagttccagcagcagcagcagcagcagcaacagcagcagcagcagcagcagcaacagcaacatcccatttccaacaacaacagcttgggcggcgcgggcggcggcgcgcctcagcccggccccgacatggagcagncgcaacatggaggcgccaaggacagtgctgcgggcggncaggccgaccccccgggcccgccgctgctgagcaagccgggcgacgaggacgacgcgccgcccaagatgggggagccggcgggcggccg

SEQ ID NO: 383416 - DNA, 2845 bp, Homo sapiens
  misc_feature (528)..(528): n is a, c, g, or t
  misc_feature (531)..(531): n is a, c, g, or t
  misc_feature (550)..(550): n is a, c, g, or t
  misc_feature (552)..(552): n is a, c, g, or t
  misc_feature (559)..(559): n is a, c, g, or t
  misc_feature (564)..(566): n is a, c, g, or t
  misc_feature (568)..(568): n is a, c, g, or t
gagcggcttggttccttgtacgcagaggcggtagtgacacaggcacaactgacagtggcagaagctcagctgacaaggactggggacggcggtgtccttgtcttgcctttgtcgcccccgcccctctcttccctggctggacttgcggagtccccgccgaagaacccgaggagccatatattgaagaccatgtctgggagcttctactttgtaattgttggccaccatgataatccagtttttgaaatggagtttttgccagctgggaaggcagaatccaaagacgaccatcgtcatctgaaccagttcatagctcatgctgctctcgacctcgtagatgagaacatgtggctatcgaacaacatgtacttgaaaactgtggacaagttcaacgagtggtttgtgtcggcatttgtcactgcggggcatatgaggtttattatgcttcatgacataagacaagaagatggaataaagaacttctttactgatgtttatgatttatatataaaggacaagaagatggantanagaacttctttactgatgntnatgattnatatnnnancattttcaatgaatccattttatgaacccaattctcctattcgatcaagtgcatttgacagaaaagttcagtttcttgggaagaaacaccttttaagctgaatgcagaaaattccaaaataaatgatgtcaccacaatggtgtatactcaggaatgtgtacattgtaagttacttgattaaatagcctggaaaacttttgtgtattctcagcttatctaaacctaatgaaattccttttatatttaacaaatagtacattctgtctcatgtcacgtatcaattagatcaattggtatttccttgtgaacagtgttatttataaagagttcattatcaataatcatgttttttttttttttttttttctgatacagagtctcactctgttgccaggctggagtgcagtggcgcaatcttggctcactgcaacctccgcctcccaggttcaggcgattctcctgcctcagcctccaagtagctgggactacaggcgcgtgccaccacgcccggctaatttttgtatttttagtagagacagggtttcaccatattggtcaggctggtcttgaactcctgacctcgtgatctgcccgccttggcctcccaaagtactgggattacaggcgtgagccaccgtgcccaaccatgaaatatttttacttaaaaattgggaataagctcgctttttttttttttgagatggagtcttgctcctgttgtgcaggctgtagtgcagtggcacgatcttggctcactgcaacctccacctcccgggttcaagcaattctccttcttcagcctcccgagtagctgagattataggcgtgcaccaccacacctggctaatttttgtatttttagtagagacagggtttcaccatattggtcaggctggtcttgaactcctgacctcgtgatccacccacctcaggaagtgctgggattacaggcgtgtgagccaccacgcccggccatgaaatatttttacttaaaaattgggaataagctttttggttttttgtgggtttttgtttttgttttttgttttttgtttttttgagatggagtcttgctcctgttgtgcaggctggagtgcagtggcacagtcttggctcactgcaacctccacctcctgggttcaagcaattctccttcttcagcctcccgagtagctgggattacaggcatgcaccaccacacctggctaatttttgtgtttttagtagagacggggtttcgctattttggccgggctggtttcaaactcctgacctcagttgatccacccgcctcagcctcccaaagtgctaggattacaggcatgaaccaccgtgcccggccaggaataagcttttgacttacccaattcagataggttgatctttggggttttttttttttttttgagatggagtttcgctctgttgtccaggctggagtgcaatggcagttgtttcaccgtaacctctgcctcctgacttcaagcaattctcctgcctcagcctcccaaagtgctgggattacaggtgtgagccaccgtgcccggcccagataggttgatcttaatgtaacaacccaaaaataaatgtcatagtcaagatttggtagataaatttaaaattaaaatattctgcagttgggagtgaaatgtgatagcacatacgttgacattatgcatttagagatgttataaaaatgtataggcagtatacacagcactactcaagaagccaaagaaacacttgtgcagtgctaagtgtcacatgtctgcttccaccagaggctaggaatagtgatcctgctataatgtgagaacccaaatcatgtttataaaataggacgctgggagcagttgcaggccacagtgaagtgtgttgcttctgtcactttatattcttatatttcctttccctcagacagtaaactgttgatactcgtacttgtaaaaaattgtaaggcaatttttagtattgttgtcaaagaaaagcttggattacattaacatttgtattcagtcttttaggtgatacaccagagggggctgggaattgtctctttgttcctataagtagatcttaatgtaaaatagtaaatgtccattgaaaagcaagtaatacagcctgtgctaattgggagcacttgaacaattttgttccattctgagtaacttttgagcaagtaattctaagctttgtcttgtatccttgtgtgaaattgcataatttttaccctatttgatttcttaaataaagatgtttgctcaagatagtggtagt

SEQ ID NO: 383417 - DNA, 331 bp, Homo sapiens
tccgggttgagatccacagagctaaacgttttagagtaccaaccattgtgtgctgtgaggtaaaggtgagccagtcctcatgatgcttaaatgtaattagaaaggaaaggaaccaaacctctcagaagcgataatgaaaatgttacagccagagaattgaacaagaactaagatacattgtagactggataaagagtttaaaggggaggtggttgaagatggaagtgatccagatcatctctgtggaaaaagtgtgtctttatcggggccttgatgggtaggattcgggtggtgagcaaaaaggagaacatcacaggaaggggaaaaatga

SEQ ID NO: 383418 - DNA, 633 bp, Homo sapiens
aatataatatgaaaacagatcttttataagtctcatgacaataacaaagtataaaagcaaactgttttttccccacaagaaaaccatctatagaatttacagaatgaaatgtcagcattctcgatgccatatgcaaatgttaatctgtggttgctcacactgtcatctaggacgaccatcgtcatctgaaccagttcatagctcatgctgctctcgacctcgtagatgagaacatgtggctatcgaacaacatgtacttgaaaactgtggacaagttcaacgagtggtttgtgtcggcatttgtcactgcggggcatatccttaccttcttagtaaaggtaactaactaaagtttgggctcacaaaccagaagaacatggaacatagatgccaggctctgagtctgtagacttcacagtcaggtgaaaatgtaagtttccatttatggggctacttttctttttttaggggggaaaaacattttgtttaatagctaattttaaaactaagtctcatacacaaaaagagtttatctggaccctatcaagggtgattttactttattttacagttattttctaactttgaaagcttatgttctctttatgataaaactaagctaattttaaaccc

SEQ ID NO: 383419 - DNA, 2844 bp, Homo sapiens
tcggcgttctggctacaggttcggggcgcgggtctcttccgcggaaactgacattgcgtttccgttgtcggcctcccactgcagtatcaccttctcccccaagtgtgacaaccaaagatgtctccagatattgccagatgtcctcttggaagcaagatcgctccgggttgagatccacagagctaaacgttttagagtaccaaccattgtgtgctgtgaggtaaaggagccatatattgaagaccatgtctgggagcttctactttgtaattgttggccaccatgataatccagtttttgaaatggagtttttgccagctgggaaggcagaatccaaagacgaccatcgtcatctgaaccagttcatagctcatgctgctctcgacctcgtagatgagaacatgtggctatcgaacaacatgtacttgaaaactgtggacaagttcaacgagtggtttgtgtcggcatttgtcactgcggggcatatgaggtttattatgcttcatgacataagacaagaagatggaataaagaacttctttactgatgtttatgatttatatataaagttttcaatgaatccattttatgaacccaattctcctattcgatcaagtgcatttgacagaaaagttcagtttcttgggaagaaacaccttttaagctgaatgcagaaaattccaaaataaatgatgtcaccacaatggtgtatactcaggaatgtgtacattgtaagttacttgattaaatagcctggaaaacttttgtgtattctcagcttatctaaacctaatgaaattccttttatatttaacaaatagtacattctgtctcatgtcacgtatcaattagatcaattggtatttccttgtgaacagtgttatttataaagagttcattatcaataatcatgttttttttttttttttttttctgatacagagtctcactctgttgccaggctggagtgcagtggcgcaatcttggctcactgcaacctccgcctcccaggttcaggcgattctcctgcctcagcctccaagtagctgggactacaggcgcgtgccaccacgcccggctaatttttgtatttttagtagagacagggtttcaccatattggtcaggctggtcttgaactcctgacctcgtgatctgcccgccttggcctcccaaagtactgggattacaggcgtgagccaccgtgcccaaccatgaaatatttttacttaaaaattgggaataagctcgctttttttttttttgagatggagtcttgctcctgttgtgcaggctgtagtgcagtggcacgatcttggctcactgcaacctccacctcccgggttcaagcaattctccttcttcagcctcccgagtagctgagattataggcgtgcaccaccacacctggctaatttttgtatttttagtagagacagggtttcaccatattggtcaggctggtcttgaactcctgacctcgtgatccacccacctcaggaagtgctgggattacaggcgtgtgagccaccacgcccggccatgaaatatttttacttaaaaattgggaataagctttttggttttttgtgggtttttgtttttgttttttgttttttgtttttttgagatggagtcttgctcctgttgtgcaggctggagtgcagtggcacagtcttggctcactgcaacctccacctcctgggttcaagcaattctccttcttcagcctcccgagtagctgggattacaggcatgcaccaccacacctggctaatttttgtgtttttagtagagacggggtttcgctattttggccgggctggtttcaaactcctgacctcagttgatccacccgcctcagcctcccaaagtgctaggattacaggcatgaaccaccgtgcccggccaggaataagcttttgacttacccaattcagataggttgatctttggggttttttttttttttttgagatggagtttcgctctgttgtccaggctggagtgcaatggcagttgtttcaccgtaacctctgcctcctgacttcaagcaattctcctgcctcagcctcccaaagtgctgggattacaggtgtgagccaccgtgcccggcccagataggttgatcttaatgtaacaacccaaaaataaatgtcatagtcaagatttggtagataaatttaaaattaaaatattctgcagttgggagtgaaatgtgatagcacatacgttgacattatgcatttagagatgttataaaaatgtataggcagtatacacagcactactcaagaagccaaagaaacacttgtgcagtgctaagtgtcacatgtctgcttccaccagaggctaggaatagtgatcctgctataatgtgagaacccaaatcatgtttataaaataggacgctgggagcagttgcaggccacagtgaagtgtgttgcttctgtcactttatattcttatatttcctttccctcagacagtaaactgttgatactcgtacttgtaaaaaattgtaaggcaatttttagtattgttgtcaaagaaaagcttggattacattaacatttgtattcagtcttttaggtgatacaccagagggggctgggaattgtctctttgttcctataagtagatcttaatgtaaaatagtaaatgtccattgaaaagcaagtaatacagcctgtgctaattgggagcacttgaacaattttgttccattctgagtaacttttgagcaagtaattctaagctttgtcttgtatccttgtgtgaaattgcataatttttaccctatttgatttcttaaataaagatgtttgctcaagatagtggtagt

SEQ ID NO: 383420 - DNA, 2702 bp, Homo sapiens
tcggcgttctggctacaggttcggggcgcgggtctcttccgcggaaactgacattgcgtttccgttgtcggcctcccactgcaggagccatatattgaagaccatgtctgggagcttctactttgtaattgttggccaccatgataatccagtttttgaaatggagtttttgccagctgggaaggcagaatccaaagacgaccatcgtcatctgaaccagttcatagctcatgctgctctcgacctcgtagatgagaacatgtggctatcgaacaacatgtacttgaaaactgtggacaagttcaacgagtggtttgtgtcggcatttgtcactgcggggcatatgaggtttattatgcttcatgacataagacaagaagatggaataaagaacttctttactgatgtttatgatttatatataaagttttcaatgaatccattttatgaacccaattctcctattcgatcaagtgcatttgacagaaaagttcagtttcttgggaagaaacaccttttaagctgaatgcagaaaattccaaaataaatgatgtcaccacaatggtgtatactcaggaatgtgtacattgtaagttacttgattaaatagcctggaaaacttttgtgtattctcagcttatctaaacctaatgaaattccttttatatttaacaaatagtacattctgtctcatgtcacgtatcaattagatcaattggtatttccttgtgaacagtgttatttataaagagttcattatcaataatcatgttttttttttttttttttttctgatacagagtctcactctgttgccaggctggagtgcagtggcgcaatcttggctcactgcaacctccgcctcccaggttcaggcgattctcctgcctcagcctccaagtagctgggactacaggcgcgtgccaccacgcccggctaatttttgtatttttagtagagacagggtttcaccatattggtcaggctggtcttgaactcctgacctcgtgatctgcccgccttggcctcccaaagtactgggattacaggcgtgagccaccgtgcccaaccatgaaatatttttacttaaaaattgggaataagctcgctttttttttttttgagatggagtcttgctcctgttgtgcaggctgtagtgcagtggcacgatcttggctcactgcaacctccacctcccgggttcaagcaattctccttcttcagcctcccgagtagctgagattataggcgtgcaccaccacacctggctaatttttgtatttttagtagagacagggtttcaccatattggtcaggctggtcttgaactcctgacctcgtgatccacccacctcaggaagtgctgggattacaggcgtgtgagccaccacgcccggccatgaaatatttttacttaaaaattgggaataagctttttggttttttgtgggtttttgtttttgttttttgttttttgtttttttgagatggagtcttgctcctgttgtgcaggctggagtgcagtggcacagtcttggctcactgcaacctccacctcctgggttcaagcaattctccttcttcagcctcccgagtagctgggattacaggcatgcaccaccacacctggctaatttttgtgtttttagtagagacggggtttcgctattttggccgggctggtttcaaactcctgacctcagttgatccacccgcctcagcctcccaaagtgctaggattacaggcatgaaccaccgtgcccggccaggaataagcttttgacttacccaattcagataggttgatctttggggttttttttttttttttgagatggagtttcgctctgttgtccaggctggagtgcaatggcagttgtttcaccgtaacctctgcctcctgacttcaagcaattctcctgcctcagcctcccaaagtgctgggattacaggtgtgagccaccgtgcccggcccagataggttgatcttaatgtaacaacccaaaaataaatgtcatagtcaagatttggtagataaatttaaaattaaaatattctgcagttgggagtgaaatgtgatagcacatacgttgacattatgcatttagagatgttataaaaatgtataggcagtatacacagcactactcaagaagccaaagaaacacttgtgcagtgctaagtgtcacatgtctgcttccaccagaggctaggaatagtgatcctgctataatgtgagaacccaaatcatgtttataaaataggacgctgggagcagttgcaggccacagtgaagtgtgttgcttctgtcactttatattcttatatttcctttccctcagacagtaaactgttgatactcgtacttgtaaaaaattgtaaggcaatttttagtattgttgtcaaagaaaagcttggattacattaacatttgtattcagtcttttaggtgatacaccagagggggctgggaattgtctctttgttcctataagtagatcttaatgtaaaatagtaaatgtccattgaaaagcaagtaatacagcctgtgctaattgggagcacttgaacaattttgttccattctgagtaacttttgagcaagtaattctaagctttgtcttgtatccttgtgtgaaattgcataatttttaccctatttgatttcttaaataaagatgtttgctcaagatagtggtagt

SEQ ID NO: 383421 - DNA, 2826 bp, Homo sapiens
agggtatgggctatcgtcgacccacgcgctccgattgcgtctccgtgcgtcggactcccactgcagtatcaccttctcccccaagtgtgacaaccaaagatgtctccagatattgccagatgtcctcttggaagcaagatcgctccgggttgagatccacagagctaaacgttttagagtaccaaccattgtgtgctgtgaggtaaaggagccatatattgaagaccatgtctgggagcttctactttgtaattgttggccaccatgataatccagtttttgaaatggagtttttgccagctgggaaggcagaatccaaagacgaccatcgtcatctgaaccagttcatagctcatgctgctctcgacctcgtagatgagaacatgtggctatcgaacaacatgtacttgaaaactgtggacaagttcaacgagtggtttgtgtcggcatttgtcactgcggggcatatgaggtttattatgcttcatgacataagacaagaagatggaataaagaacttctttactgatgtttatgatttatatataaagttttcaatgaatccattttatgaacccaattctcctattcgatcaagtgcatttgacagaaaagttcagtttcttgggaagaaacaccttttaagctgaatgcagaaaattccaaaataaatgatgtcaccacaatggtgtatactcaggaatgtgtacattgtaagttacttgattaaatagcctggaaaacttttgtgtattctcagcttatctaaacctaatgaaattccttttatatttaacaaatagtacattctgtctcatgtcacgtatcaattagatcaattggtatttccttgtgaacagtgttatttataaagagttcattatcaataatcatgttttttttttttttttttttctgatacagagtctcactctgttgccaggctggagtgcagtggcgcaatcttggctcactgcaacctccgcctcccaggttcaggcgattctcctgcctcagcctccaagtagctgggactacaggcgcgtgccaccacgcccggctaatttttgtatttttagtagagacagggtttcaccatattggtcaggctggtcttgaactcctgacctcgtgatctgcccgccttggcctcccaaagtactgggattacaggcgtgagccaccgtgcccaaccatgaaatatttttacttaaaaattgggaataagctcgctttttttttttttgagatggagtcttgctcctgttgtgcaggctgtagtgcagtggcacgatcttggctcactgcaacctccacctcccgggttcaagcaattctccttcttcagcctcccgagtagctgagattataggcgtgcaccaccacacctggctaatttttgtatttttagtagagacagggtttcaccatattggtcaggctggtcttgaactcctgacctcgtgatccacccacctcaggaagtgctgggattacaggcgtgtgagccaccacgcccggccatgaaatatttttacttaaaaattgggaataagctttttggttttttgtgggtttttgtttttgttttttgttttttgtttttttgagatggagtcttgctcctgttgtgcaggctggagtgcagtggcacagtcttggctcactgcaacctccacctcctgggttcaagcaattctccttcttcagcctcccgagtagctgggattacaggcatgcaccaccacacctggctaatttttgtgtttttagtagagacggggtttcgctattttggccgggctggtttcaaactcctgacctcagttgatccacccgcctcagcctcccaaagtgctaggattacaggcatgaaccaccgtgcccggccaggaataagcttttgacttacccaattcagataggttgatctttggggttttttttttttttttgagatggagtttcgctctgttgtccaggctggagtgcaatggcagttgtttcaccgtaacctctgcctcctgacttcaagcaattctcctgcctcagcctcccaaagtgctgggattacaggtgtgagccaccgtgcccggcccagataggttgatcttaatgtaacaacccaaaaataaatgtcatagtcaagatttggtagataaatttaaaattaaaatattctgcagttgggagtgaaatgtgatagcacatacgttgacattatgcatttagagatgttataaaaatgtataggcagtatacacagcactactcaagaagccaaagaaacacttgtgcagtgctaagtgtcacatgtctgcttccaccagaggctaggaatagtgatcctgctataatgtgagaacccaaatcatgtttataaaataggacgctgggagcagttgcaggccacagtgaagtgtgttgcttctgtcactttatattcttatatttcctttccctcagacagtaaactgttgatactcgtacttgtaaaaaattgtaaggcaatttttagtattgttgtcaaagaaaagcttggattacattaacatttgtattcagtcttttaggtgatacaccagagggggctgggaattgtctctttgttcctataagtagatcttaatgtaaaatagtaaatgtccattgaaaagcaagtaatacagcctgtgctaattgggagcacttgaacaattttgttccattctgagtaacttttgagcaagtaattctaagctttgtcttgtatccttgtgtgaaattgcataatttttaccctatttgatttcttaaataaagatgtttgctcaagatagtggtagt

SEQ ID NO: 383422 - DNA, 2676 bp, Homo sapiens
agcggccgctcgcgatctagaactagattgcgtttccgttgtcggcctcccactgcaggagccatatattgaagaccatgtctgggagcttctactttgtaattgttggccaccatgataatccagtttttgaaatggagtttttgccagctgggaaggcagaatccaaagacgaccatcgtcatctgaaccagttcatagctcatgctgctctcgacctcgtagatgagaacatgtggctatcgaacaacatgtacttgaaaactgtggacaagttcaacgagtggtttgtgtcggcatttgtcactgcggggcatatgaggtttattatgcttcatgacataagacaagaagatggaataaagaacttctttactgatgtttatgatttatatataaagttttcaatgaatccattttatgaacccaattctcctattcgatcaagtgcatttgacagaaaagttcagtttcttgggaagaaacaccttttaagctgaatgcagaaaattccaaaataaatgatgtcaccacaatggtgtatactcaggaatgtgtacattgtaagttacttgattaaatagcctggaaaacttttgtgtattctcagcttatctaaacctaatgaaattccttttatatttaacaaatagtacattctgtctcatgtcacgtatcaattagatcaattggtatttccttgtgaacagtgttatttataaagagttcattatcaataatcatgttttttttttttttttttttctgatacagagtctcactctgttgccaggctggagtgcagtggcgcaatcttggctcactgcaacctccgcctcccaggttcaggcgattctcctgcctcagcctccaagtagctgggactacaggcgcgtgccaccacgcccggctaatttttgtatttttagtagagacagggtttcaccatattggtcaggctggtcttgaactcctgacctcgtgatctgcccgccttggcctcccaaagtactgggattacaggcgtgagccaccgtgcccaaccatgaaatatttttacttaaaaattgggaataagctcgctttttttttttttgagatggagtcttgctcctgttgtgcaggctgtagtgcagtggcacgatcttggctcactgcaacctccacctcccgggttcaagcaattctccttcttcagcctcccgagtagctgagattataggcgtgcaccaccacacctggctaatttttgtatttttagtagagacagggtttcaccatattggtcaggctggtcttgaactcctgacctcgtgatccacccacctcaggaagtgctgggattacaggcgtgtgagccaccacgcccggccatgaaatatttttacttaaaaattgggaataagctttttggttttttgtgggtttttgtttttgttttttgttttttgtttttttgagatggagtcttgctcctgttgtgcaggctggagtgcagtggcacagtcttggctcactgcaacctccacctcctgggttcaagcaattctccttcttcagcctcccgagtagctgggattacaggcatgcaccaccacacctggctaatttttgtgtttttagtagagacggggtttcgctattttggccgggctggtttcaaactcctgacctcagttgatccacccgcctcagcctcccaaagtgctaggattacaggcatgaaccaccgtgcccggccaggaataagcttttgacttacccaattcagataggttgatctttggggttttttttttttttttgagatggagtttcgctctgttgtccaggctggagtgcaatggcagttgtttcaccgtaacctctgcctcctgacttcaagcaattctcctgcctcagcctcccaaagtgctgggattacaggtgtgagccaccgtgcccggcccagataggttgatcttaatgtaacaacccaaaaataaatgtcatagtcaagatttggtagataaatttaaaattaaaatattctgcagttgggagtgaaatgtgatagcacatacgttgacattatgcatttagagatgttataaaaatgtataggcagtatacacagcactactcaagaagccaaagaaacacttgtgcagtgctaagtgtcacatgtctgcttccaccagaggctaggaatagtgatcctgctataatgtgagaacccaaatcatgtttataaaataggacgctgggagcagttgcaggccacagtgaagtgtgttgcttctgtcactttatattcttatatttcctttccctcagacagtaaactgttgatactcgtacttgtaaaaaattgtaaggcaatttttagtattgttgtcaaagaaaagcttggattacattaacatttgtattcagtcttttaggtgatacaccagagggggctgggaattgtctctttgttcctataagtagatcttaatgtaaaatagtaaatgtccattgaaaagcaagtaatacagcctgtgctaattgggagcacttgaacaattttgttccattctgagtaacttttgagcaagtaattctaagctttgtcttgtatccttgtgtgaaattgcataatttttaccctatttgatttcttaaataaagatgtttgctcaagatagtggtagt

SEQ ID NO: 383423 - DNA, 359 bp, Homo sapiens
atttagatgtcaagccagaaatctaggatgtaactctatactgctttcttttatccatgtcatcttcattaccttaaaagaagtaattctaggtcaggcacagaatctcagcactttaggaggctgagatgggaggattgcttgagcccaggagttcaagaacagcttgggcaacatagtgagacctcgtctctacattaaatagaaaaattagctgggcatggtggcgtgcacctatattcccagctacttgggagactgaggttggggatggcttgagcctgggaggtggaggttgcagtgagccaagattgtgccattgaactccagcctgggcaacaacagagtaagaccctgtc

SEQ ID NO: 383424 - DNA, 836 bp, Homo sapiens
  misc_feature (18)..(18): n is a, c, g, or t
tacggctaggtacgaggnctgggtggtgggaacatcattgtggccactccaggccgcttggaggacatgttccggaggaaggccgaaggcttggatctggccagctgtgtgcgatccctggatgtcctggtgttggatgaggcagacagacttctggacatggggtttgaggcaagcatcaacaccattctggagtttttgccaaagcagaggagaacaggccttttctctgccactcagacgcaggaagtggagaacctggtgagagcgggcctccggaaccctgtccgggtctcagtgaaggagaagggcgtggcagccagcagtgcccagaagaccccctcccgcctggaaaactactacatggtatgcaaggcagatgagaaatttaatcagctggtccattttcttcgcaatcataagcaggagaaacacctggtcttcttcagcacctgtgcctgtgtggaatactatgggaaggctctggaagtgctggtgaagggcgtgaagattatgtgcattcacggaaagatgaaatataaacgcaataagatcttcatggagttccgcaaattgcaaagtgggattttagtgtgcactgatgtgatggcccggggaattgatattcctgaagtcaactgggttttgcagtatgaccctcccagcaatgcaagtgccttcgtgcatcgctgcggtcgcacagctcgcattggccacgggggcagcgctctggtgttcctcctgcccatggaagagtcatactcatactgcaataccaaatccctgtgaattagcccaaaacagggacttggcatcagtcatgctgttacatttta

SEQ ID NO: 383425 - DNA, 1334 bp, Homo sapiens
gcaggagttcatgggccatctctttagggcatatctttattgggatgactgccaacccctttttgtctttggatgactcagctccaagtcccaaatatctgggagaagggatctgactggcctagcttgggttatttgctgagcccttgggaatcctgctaattgggaaagaagcagttccctaaacggaaagcagaaatgtttttaaatcttgtaacactatttgtggctaagatgtcattgcttttgttctgaatgactgtttcactttaattcctttctcggggtcagggagatttcccgtgagaacatctttagacagtaaaatatgtccttgggggttttaattcatgtttaagggattttgtcaaaagattggcctttcattggctgagaggattacagattgagaactcagttgtggatgatttccactgccattttccttgtcattcccctagggagggcttgtagttaggttgcgtctgctgcagctattgctcactgttcccctctcccggttgtagaaggaccaaagtggccaatgactctaagccctctgtccctcttgcagcacctgtgcctgtgtggaatactatgggaaggctctggaagtgctggtgaagggcgtgaagattatgtgcattcacggaaagatgaaatataaacgcaataagatcttcatggagttccgcaaattgcaaaggtgggtgggcttcattgaaggtagcagctctcctgccacactgctctttcaggtccccaaatgccccattctctagtagcctgtgctgtccgcatgtgttgtctttcctgcctggaaccctcttccctctctaatctggttatcacatctctgtaaacaccccgagcctccattgccctgttccaattgctttgccttttgctatgtcatttccctagttactgaacttctgtgctagacagcaggctccgtgacacaggagtcctgtgtattgtcttcactcccagattgccctgtgcccggtccagggaaaggttgtgatgactgtcaagcagcaaggagcaaatccatttgtcctgtctgggtagaaactgtctgtggcttaaggccggacacggtggctcacgcctgtaatcccagcactttgggaggccgaggcgggtggatcacgaggtcaggagatcaagaccatcctggctaacgtggtgaaaccctgtctctactaaaaacaaaaaattagtcgggcatggtggctggcgcctgtagtcccagctactccagaggctgaggcaggagaatggtgtgaacccaggaggcggagcttgcagtgagccgagactgcgccagt

SEQ ID NO: 383426 - DNA, 4502 bp, Homo sapiens
  misc_feature (291)..(291): n is a, c, g, or t
  misc_feature (416)..(416): n is a, c, g, or t
gaaacttgaaaaaaaaagacagttaatcctcattatttgtggattctgtatttgtgaatttgcctgctcgttaaaatttagaacaccccagtggatcctcggtgcttctgtggtcatgggcgtgggcagagctgcctttgttttcactgctcaggtgtaaacagtgtccttttcgtcatttatttagtgccatgttttttaccttttttttttttttcttttttccctgagacagggttttgctctgtcacccaggctggagtgcagtggtgtgatctcatctcactgcancctccacctcccaggcttaagctgtcctcctgcctcagccttccaagtagctgggactacaggtgtggaccatcatgtctgggtcattttttgtattttttgacatgttacccaggctggtcttnaactcctgggctcaagtgatccttccgcctcggcctcccaaagtgctgggattacaggtgtgagctaccgcgcccggccattttgcacatttttgtgctttatgttggtgattttgatttttgaaatggccccgtgatgtagtgcagtctagtgttcctgggtgcaagaaggttatgacgtgcagagaaaatccccgtgctagagaagcacaagctaaggcatgagttaatgtgctgttggccacgagttcaatgagaatgaatcaatagtatatgttaaatagagtcttttaagcacaaacagacataaaataggtttatgtattgattggttgacaaaaatgtcatgcccaaagactggcaggaacctaaccctgtgtttcccctgtgagcagtggttcagcattgactaattcactgttcttcatgacttgaaagagcataactgcagtatatgatgacgagtaaccgtaattcaaagtagttgatatgtgctcagagatgctgctgagaaagtctgggaactactgtttctctggaactttcctttgtgtggtagagggcggagggcctatgagttcctctctgggagtcccttgtgctgctgactgtgtcccttccttccatgtgggtaggttggagccataatcatcacccccactcgagagctggccattcaaatagacgaggtcctgtcgcatttcacgaagcacttccccgagttcaggtgaattggatgcagtgtccctgttagtcatgggctgttttgtcgaacttaatcaaaggctgttttcttgttgtagcccagattctttggatcggaggcaggaatcctggagaagatgttgagaggtttaagcaacaagggtgagtttgctcgtgtctgcttgtttctttgcttgcttttggcattgaacctaagaatcgatgtgtgatctcagcctaactgtgggtccccctttcagcagcctcctccccctgcaaaaaggtgttttctccaggccagcttcccattgtgctttgctggctccttcccataaggccctgatgagaacttcacaaactcaggttcttacagaggtcaagagaacgacgtgaagataaatgagtggtcaggggctgggggatggtgaggaactggccagcagctgccttgaatactcagctccagctggtagttgcctgggaggactcggctcagtagtggcaggttttgaattttttaaaaagaagatggaattccagatttgtgtgtgtaatctcctgattttttaactgttggcgtgtaatccacatttgaaaaacatatcttgtaggtgagccagtctgagggagccacatctggccctgagtctgccagtttgtgatctttacataggattctctaattctgtcaacatttccattttacaagtgagttacctgggacctacaatggttgagtaacttgcgtaagtcagaggttggtaagctttttttttataaaggagcagatggtaaatgttttcggctttgtgaaccatatggtctccatcgcacttactcaactgctgttgtagtgtgaaggcagcgatagacaacatgtgaataaatgggcgtggttttctgccaataaaatacttggcaaggacaggcagcagcccaggtttggtccgggagctggagtttgccaaccttgcctaggtcatagcccagaacccagatcccgtctcaccacagccctcagtctttctaccctgcagcactcttctactctcatgctcttcgttctcttcactagggcttaaatgactttggggggatataaaacttggtattttggtaatcatcaaccacattcccaagatccagagagtttggtaaatgttaactttctttccaaagtgggaacatcattgtggccactccaggccgcttggaggacatgttccggaggaaggccgaaggcttggatctggccagctgtgtgcgatccctggatgtcctggtgttggatgaggcagacagacttctggacatggggtttgaggcaagcatcaacaccattctggagtttttgccaaagcagaggagaacaggccttttctctgccactcagacgcaggaagtggagaacctggtgagagcgggcctccggaaccctgtccgggtctcagtgaaggagaagggcgtggcagccagcagtgcccagaagaccccctcccgcctggaaaactactacatggtatgcaaggcagatgagaaatttaatcagctggtccattttcttcgcaatcataagcaggagaaacacctggtcttcttcagcacctgtgcctgtgtggaatactatgggaaggctctggaagtgctggtgaagggcgtgaagattatgtgcattcacggaaagatgaaatataaacgcaataagatcttcatggagttccgcaaattgcaaagtgggattttagtgtgcactgatgtgatggcccggggaattgatattcctgaagtcaactgggttttgcagtatgaccctcccagcaatgcaagtgccttcgtgcatcgctgcggtcgcacagctcgcattggccacgggggcagcgctctggtgttcctcctgcccatggaagagtcatacatcaatttccttgcaattaaccaaaaatgccccctgcaggagatgaagccccagagaaacacagcggaccttctgccaaaactcaagtccatggccctggctgacagagctgtgtttgaaaagggcatgaaagcttttgtgtcatatgtccaagcttatgcaaagcatgaatgcaacctgattttcagattaaaggatcttgattttgccagccttgctcgaggttttgccctgctgaggatgcccaagatgccagaattgagaggaaagcagtttccagattttgtgcccgtggacgttaataccgacacgattccatttaaagataaaatcagagaaaagcagaggcagaaactcctggagcaacaaagaagagagaaaacagaaaatgaagggagaagaaaattcataaaaaataaagcttggtcaaagcagaaggccaaaaaagaaaagaagaaaaaaatgaatgagaaaaggaaaagggaagagggttctgatattgaagatgaggacatggaagaacttcttaatgacacaagactcttgaaaaaacttaagaaaggcaaaataactgaagaagaatttgagaagggcttgttgacaactggcaaaagaacaatcaagacagtggatttagggatctcagatttggaagatgactgctgattccagtgccacagatgaacccacaaggacatagctgttccctaacttggtggatggctccagtttgcttttaacgaaaatcacaacttcaggagacatctgaaaagaatgatgtctctgaaagctgtcctttcagatgagggagaaatgaaggatttcacacttcagaatattttactaaaaacattccagtcttggccgggtgcggtggctcctgcctataatcccagcactttgggaggctgaggcaggaggatcacttgagcccaggagttcaagaccagcctgggaacacagcgagaccctctcattaaaaacaacaaaacaaaacaattccagtcttggagtagtctaacagaagaaaatgtaaaattatttgagtgtaaataatagatgtcagtatttatcatgatgggtcacatatagacatatgtacatatatatatatatatatatatatatatatatatatatatatatatatatataagctcttttttctgaggctattttatagttatttttaaacataaagatacagaagtcttcttgacttctgattttcaaaaccattcctcagtatcttcaggcatttgacctcctgaatgtgcttggccctgggcttcagttatcctttgatgtcctgcaggggtggctaatgtgctggggtttttctgtgttaatagtcacagtattgttttattggtgaatagctgaaaaacagagggattaagtcatattccgggaaagagaattatagtttttatgcctcctgttgaataaatggtgtcctgattgcc

SEQ ID NO: 383427 - DNA, 4469 bp, Homo sapiens
  misc_feature (291)..(291): n is a, c, g, or t
  misc_feature (416)..(416): n is a, c, g, or t
gaaacttgaaaaaaaaagacagttaatcctcattatttgtggattctgtatttgtgaatttgcctgctcgttaaaatttagaacaccccagtggatcctcggtgcttctgtggtcatgggcgtgggcagagctgcctttgttttcactgctcaggtgtaaacagtgtccttttcgtcatttatttagtgccatgttttttaccttttttttttttttcttttttccctgagacagggttttgctctgtcacccaggctggagtgcagtggtgtgatctcatctcactgcancctccacctcccaggcttaagctgtcctcctgcctcagccttccaagtagctgggactacaggtgtggaccatcatgtctgggtcattttttgtattttttgacatgttacccaggctggtcttnaactcctgggctcaagtgatccttccgcctcggcctcccaaagtgctgggattacaggtgtgagctaccgcgcccggccattttgcacatttttgtgctttatgttggtgattttgatttttgaaatggccccgtgatgtagtgcagtctagtgttcctgggtgcaagaaggttatgacgtgcagagaaaatccccgtgctagagaagcacaagctaaggcatgagttaatgtgctgttggccacgagttcaatgagaatgaatcaatagtatatgttaaatagagtcttttaagcacaaacagacataaaataggtttatgtattgattggttgacaaaaatgtcatgcccaaagactggcaggaacctaaccctgtgtttcccctgtgagcagtggttcagcattgactaattcactgttcttcatgacttgaaagagcataactgcagtatatgatgacgagtaaccgtaattcaaagtagttgatatgtgctcagagatgctgctgagaaagtctgggaactactgtttctctggaactttcctttgtgtggtagagggcggagggcctatgagttcctctctgggagtcccttgtgctgctgactgtgtcccttccttccatgtgggtaggttggagccataatcatcacccccactcgagagctggccattcaaatagacgaggtcctgtcgcatttcacgaagcacttccccgagttcaggtgaattggatgcagtgtccctgttagtcatgggctgttttgtcgaacttaatcaaaggctgttttcttgttgtagcccagattctttggatcggaggcaggaatcctggagaagatgttgagaggtttaagcaacaagggtgagtttgctcgtgtctgcttgtttctttgcttgcttttggcattgaacctaagaatcgatgtgtgatctcagcctaactgtgggtccccctttcagcagcctcctccccctgcaaaaaggtgttttctccaggccagcttcccattgtgctttgctggctccttcccataaggccctgatgagaacttcacaaactcaggttcttacagaggtcaagagaacgacgtgaagataaatgagtggtcaggggctgggggatggtgaggaactggccagcagctgccttgaatactcagctccagctggtagttgcctgggaggactcggctcagtagtggcaggttttgaattttttaaaaagaagatggaattccagatttgtgtgtgtaatctcctgattttttaactgttggcgtgtaatccacatttgaaaaacatatcttgtaggtgagccagtctgagggagccacatctggccctgagtctgccagtttgtgatctttacataggattctctaattctgtcaacatttccattttacaagtgagttacctgggacctacaatggttgagtaacttgcgtaagtcagaggttggtaagctttttttttataaaggagcagatggtaaatgttttcggctttgtgaaccatatggtctccatcgcacttactcaactgctgttgtagtgtgaaggcagcgatagacaacatgtgaataaatgggcgtggttttctgccaataaaatacttggcaaggacaggcagcagcccaggtttggtccgggagctggagtttgccaaccttgcctaggtcatagcccagaacccagatcccgtctcaccacagccctcagtctttctaccctgcagcactcttctactctcatgctcttcgttctcttcactagggcttaaatgactttggggggatataaaacttggtattttggtaatcatcaaccacattcccaagatccagagagtttggtaaatgttaactttctttccaaagtgggaacatcattgtggccactccaggccgcttggaggacatgttccggaggaaggccgaaggcttggatctggccagctgtgtgcgatccctggatgtcctggtgttggatgaggcagacagacttctggacatggggtttgaggcaagcatcaacaccattctggagtttttgccaaagcagaggagaacaggccttttctctgccactcagacgcaggaagtggagaacctggtgagagcgggcctccggaaccctgtccgggtctcagtgaaggagaagggcgtggcagccagcagtgcccagaagaccccctcccgcctggaaaactactacatggtatgcaaggcagatgagaaatttaatcagctggtccattttcttcgcaatcataagcaggagaaacacctggtcttcttcagcacctgtgcctgtgtggaatactatgggaaggctctggaagtgctggtgaagggcgtgaagattatgtgcattcacggaaagatgaaatataaacgcaataagatcttcatggagttccgcaaattgcaaagtgggattttagtgtgcactgatgtgatggcccggggaattgatattcctgaagtcaactgggttttgcagtatgaccctcccagcaatgcaagtgccttcgtgcatcgctgcggtcgcacagctcgcattggccacgggggcagcgctctggtgttcctcctgcccatggaagagtcatacatcaatttccttgcaattaaccaaaaatgccccctgcaggagatgaagccccagagaaacacagcggaccttctgccaaaactcaagtccatggccctggctgacagagctgtgtttgaaaagggcatgaaagcttttgtgtcatatgtccaagcttatgcaaagcatgaatgcaacctgattttcagattaaaggatcttgattttgccagccttgctcgaggttttgccctgctgaggatgcccaagatgccagaattgagaggaaagcagtttccagattttgtgcccgtggacgttaataccgacacgattccatttaaagataaaatcagagaaaagcagaggcagaaactcctggagcaacaaagaagagagaaaacagaaaatgaagggagaagaaaattcataaaaaataaagcttggtcaaagcagaaggccaaaaaagaaaagaagaaaaaaatgaatgagaaaaggaaaagggaagagggttctgatattgaagatgaggacatggaagaacttcttaatgacacaagactcttgaaaaaacttaagaaaggcaaaataactgaagaagaatttgagaagggcttgttgacaactggcaaaagaacaatcaagacagtggatttagggatctcagatttggaagatgactgctgattccagtgccacagatgaacccacaaggacatagctgttccctaacttggtggatggctccagtttgcttttaacgaaaatcacaacttcaggagacatctgaaaagaatgatgtctctgaaagctgtcctttcagatgagggagaaatgaaggatttcacacttcagaatattttactaaaaacattccagtcttggccgggtgcggtggctcctgcctataatcccagcactttgggaggctgaggcaggaggatcacttgagcccaggagttcaagaccagcctgggaacacagcgagaccctctcattaaaaacaacaaaacaaaacaattccagtcttggagtagtctaacagaagaaaatgtaaaattatttgagtgtaaataatagatgtcagtatttatcatgatgggtcacatatagacatatgtacatattatatatatatatataagctcttttttctgaggctattttatagttatttttaaacataaagatacagaagtcttcttgacttctgattttcaaaaccattcctcagtatcttcaggcatttgacctcctgaatgtgcttggccctgggcttcagttatcctttgatgtcctgcaggggtggctaatgtgctggggtttttctgtgttaatagtcacagtattgttttattggtgaatagctgaaaaacagagggattaagtcatattccgggaaagagaattatagtttttatgcctcctgttgaataaatggtgtcctgattgcc

SEQ ID NO: 383428 - DNA, 2640 bp, Homo sapiens
tcgagcagcggcgaccgacgcggcgaaggagcgcgccatggagcatgtgacagagggctcctgggagtcgctgcctgtgccgctgcacccgcaggtgctgggcgcgctgcgggagctgggcttcccgtacatgacgccggtgcagtccgcaaccatccctctgttcatgcgaaacaaagatgtcgctgcagaagcggtcacaggtagtggcaaaacactcgcttttgtcatccccatcctggaaattcttctgagaagagaagagaagttaaaaaagagtcaggttggagccataatcatcacccccactcgagagctggccattcaaatagacgaggtcctgtcgcatttcacgaagcacttccccgagttcagccagattctttggatcggaggcaggaatcctggagaagatgttgagaggtttaagcaacaaggtgggaacatcattgtggccactccaggccgcttggaggacatgttccggaggaaggccgaaggcttggatctggccagctgtgtgcgatccctggatgtcctggtgttggatgaggcagacagacttctggacatggggtttgaggcaagcatcaacaccattctggagtttttgccaaagcagaggagaacaggccttttctctgccactcagacgcaggaagtggagaacctggtgagagcgggcctccggaaccctgtccgggtctcagtgaaggagaagggcgtggcagccagcagtgcccagaagaccccctcccgcctggaaaactactacatggtatgcaaggcagatgagaaatttaatcagctggtccattttcttcgcaatcataagcaggagaaacacctggtcttcttcagcacctgtgcctgtgtggaatactatgggaaggctctggaagtgctggtgaagggcgtgaagattatgtgcattcacggaaagatgaaatataaacgcaataagatcttcatggagttccgcaaattgcaaagtgggattttagtgtgcactgatgtgatggcccggggaattgatattcctgaagtcaactgggttttgcagtatgaccctcccagcaatgcaagtgccttcgtgcatcgctgcggtcgcacagctcgcattggccacgggggcagcgctctggtgttcctcctgcccatggaagagtcatacatcaatttccttgcaattaaccaaaaatgccccctgcaggagatgaagccccagagaaacacagcggaccttctgccaaaactcaagtccatggccctggctgacagagctgtgtttgaaaagggcatgaaagcttttgtgtcatatgtccaagcttatgcaaagcatgaatgcaacctgattttcagattaaaggatcttgattttgccagccttgctcgaggttttgccctgctgaggatgcccaagatgccagaattgagaggaaagcagtttccagattttgtgcccgtggacgttaataccgacacgattccatttaaagataaaatcagagaaaagcagaggcagaaactcctggagcaacaaagaagagagaaaacagaaaatgaagggagaagaaaattcataaaaaataaagcttggtcaaagcagaaggccaaaaaagaaaagaagaaaaaaatgaatgagaaaaggaaaagggaagagggttctgatattgaagatgaggacatggaagaacttcttaatgacacaagactcttgaaaaaacttaagaaaggcaaaataactgaagaagaatttgagaagggcttgttgacaactggcaaaagaacaatcaagacagtggatttagggatctcagatttggaagatgactgctgattccagtgccacagatgaacccacaaggacatagctgttccctaacttggtggatggctccagtttgcttttaacgaaaatcacaacttcaggagacatctgaaaagaatgatgtctctgaaagctgtcctttcagatgagggagaaatgaaggatttcacacttcagaatattttactaaaaacattccagtcttggccgggtgcggtggctcctgcctataatcccagcactttgggaggctgaggcaggaggatcacttgagcccaggagttcaagaccagcctgggaacacagcgagaccctctcattaaaaacaacaaaacaaaacaattccagtcttggagtagtctaacagaagaaaatgtaaaattatttgagtgtaaataatagatgtcagtatttatcatgatgggtcacatatagacatatgtacatatatatatatatatatatatatatatatatatatatatatatatatatataagctcttttttctgaggctattttatagttatttttaaacataaagatacagaagtcttcttgacttctgattttcaaaaccattcctcagtatcttcaggcatttgacctcctgaatgtgcttggccctgggcttcagttatcctttgatgtcctgcaggggtggctaatgtgctggggtttttctgtgttaatagtcacagtattgttttattggtgaatagctgaaaaacagagggattaagtcatattccgggaaagagaattatagtttttatgcctcctgttgaataaatggtgtcctgattgcc

SEQ ID NO: 383429 - DNA, 2203 bp, Homo sapiens
tcgagcagcggcgaccgacgcggcgaaggagcgcgccatggagcatgtgacagagggctcctgggagtcgctgcctgtgccgctgcacccgcaggtgctgggcgcgctgcgggagctgggcttcccgtacatgacgccggtgcagtccgcaaccatccctctgttcatgcgaaacaaagatgtcgctgcagaagcggtcacaggtagtggcaaaacactcgcttttgtcatccccatcctggaaattcttctgagaagagaagagaagttaaaaaagagtcaggttggagccataatcatcacccccactcgagagctggccattcaaatagacgaggtcctgtcgcatttcacgaagcacttccccgagttcagccagattctttggatcggaggcaggaatcctggagaagatgttgagaggtttaagcaacaaggtgggaacatcattgtggccactccaggccgcttggaggacatgttccggaggaaggccgaaggcttggatctggccagctgtgtgcgatccctggatgtcctggtgttggatgaggcagacagacttctggacatggggtttgaggcaagcatcaacaccattctggagtttttgccaaagcagaggagaacaggccttttctctgccactcagacgcaggaagtggagaacctggtgagagcgggcctccggaaccctgtccgggtctcagtgaaggagaagggcgtggcagccagcagtgcccagaagaccccctcccgcctggaaaactactacatggtatgcaaggcagatgagaaatttaatcagctggtccattttcttcgcaatcataagcaggagaaacacctggtcttcttcagcacctgtgcctgtgtggaatactatgggaaggctctggaagtgctggtgaagggcgtgaagattatgtgcattcacggaaagatgaaatataaacgcaataagatcttcatggagttccgcaaattgcaaagtgggattttagtgtgcactgatgtgatggcccggggaattgatattcctgaagtcaactgggttttgcagtatgaccctcccagcaatgcaagtgccttcgtgcatcgctgcggtcgcacagctcgcattggccacgggggcagcgctctggtgttcctcctgcccatggaagagtcatacatcaatttccttgcaattaaccaaaaatgccccctgcaggagatgaagccccagagaaacacagcggaccttctgccaaaactcaagtccatggccctggctgacagagctgtgtttgaaaagggcatgaaagcttttgtgtcatatgtccaagcttatgcaaagcatgaatgcaacctgattttcagattaaaggatcttgattttgccagccttgctcgaggttttgccctgctgaggatgcccaagatgccagaattgagaggaaagcagtttccagattttgtgcccgtggacgttaataccgacacgattccatttaaagataaaatcagagaaaagcagaggcagaaactcctggagcaacaaagaagagagaaaacagaaaatgaagggagaagaaaattcataaaaaataaagcttggtcaaagcagaaggccaaaaaagaaaagaagaaaaaaatgaatgagaaaaggaaaagggaagagggttctgatattgaagatgaggacatggaagaacttcttaatgacacaagactcttgaaaaaacttaagaaaggcaaaataactgaagaagaatttgagaagggcttgttgacaactggcaaaagaacaatcaagacagtggatttagggatctcagatttggaagatgactgctgattccagtgccacagatgaacccacaaggacatagctgttccctaacttggtggatggctccagtttgcttttaacgaaaatcacaacttcaggagacatctgaaaagaatgatgtctctgaaagctgtcctttcagatgagggagaaatgaaggatttcacacttcagaatattttactaaaaacattccagtcttggcctcccaaagtgctgggattacaggtgtgagctaccgcgcccggccattttgcacatttttgtgctttatgttggtgattttgatttttgaaatggccccgtgatgtagtgcagtctagtgttcctgggtgcaagaaggtcaaagtatgccggggaactctagag

SEQ ID NO: 383430 - DNA, 2706 bp, Homo sapiens
tcgagcagcggcgaccgacgcggcgaaggagcgcgccatggagcatgtgacagagggctcctgggagtcgctgcctgtgccgctgcacccgcaggtgctgggcgcgctgcgggagctgggcttcccgtacatgacgccggtgcagggcttcgggtctcacctgtgaattgatggcatcctttaaccagtgctttgcaatctctctctttagtccgcaaccatccctctgttcatgcgaaacaaagatgtcgctgcagaagcggtcacaggtagtggcaaaacactcgcttttgtcatccccatcctggaaattcttctgagaagagaagagaagttaaaaaagagtcaggttggagccataatcatcacccccactcgagagctggccattcaaatagacgaggtcctgtcgcatttcacgaagcacttccccgagttcagccagattctttggatcggaggcaggaatcctggagaagatgttgagaggtttaagcaacaaggtgggaacatcattgtggccactccaggccgcttggaggacatgttccggaggaaggccgaaggcttggatctggccagctgtgtgcgatccctggatgtcctggtgttggatgaggcagacagacttctggacatggggtttgaggcaagcatcaacaccattctggagtttttgccaaagcagaggagaacaggccttttctctgccactcagacgcaggaagtggagaacctggtgagagcgggcctccggaaccctgtccgggtctcagtgaaggagaagggcgtggcagccagcagtgcccagaagaccccctcccgcctggaaaactactacatggtatgcaaggcagatgagaaatttaatcagctggtccattttcttcgcaatcataagcaggagaaacacctggtcttcttcagcacctgtgcctgtgtggaatactatgggaaggctctggaagtgctggtgaagggcgtgaagattatgtgcattcacggaaagatgaaatataaacgcaataagatcttcatggagttccgcaaattgcaaagtgggattttagtgtgcactgatgtgatggcccggggaattgatattcctgaagtcaactgggttttgcagtatgaccctcccagcaatgcaagtgccttcgtgcatcgctgcggtcgcacagctcgcattggccacgggggcagcgctctggtgttcctcctgcccatggaagagtcatacatcaatttccttgcaattaaccaaaaatgccccctgcaggagatgaagccccagagaaacacagcggaccttctgccaaaactcaagtccatggccctggctgacagagctgtgtttgaaaagggcatgaaagcttttgtgtcatatgtccaagcttatgcaaagcatgaatgcaacctgattttcagattaaaggatcttgattttgccagccttgctcgaggttttgccctgctgaggatgcccaagatgccagaattgagaggaaagcagtttccagattttgtgcccgtggacgttaataccgacacgattccatttaaagataaaatcagagaaaagcagaggcagaaactcctggagcaacaaagaagagagaaaacagaaaatgaagggagaagaaaattcataaaaaataaagcttggtcaaagcagaaggccaaaaaagaaaagaagaaaaaaatgaatgagaaaaggaaaagggaagagggttctgatattgaagatgaggacatggaagaacttcttaatgacacaagactcttgaaaaaacttaagaaaggcaaaataactgaagaagaatttgagaagggcttgttgacaactggcaaaagaacaatcaagacagtggatttagggatctcagatttggaagatgactgctgattccagtgccacagatgaacccacaaggacatagctgttccctaacttggtggatggctccagtttgcttttaacgaaaatcacaacttcaggagacatctgaaaagaatgatgtctctgaaagctgtcctttcagatgagggagaaatgaaggatttcacacttcagaatattttactaaaaacattccagtcttggccgggtgcggtggctcctgcctataatcccagcactttgggaggctgaggcaggaggatcacttgagcccaggagttcaagaccagcctgggaacacagcgagaccctctcattaaaaacaacaaaacaaaacaattccagtcttggagtagtctaacagaagaaaatgtaaaattatttgagtgtaaataatagatgtcagtatttatcatgatgggtcacatatagacatatgtacatatatatatatatatatatatatatatatatatatatatatatatatatataagctcttttttctgaggctattttatagttatttttaaacataaagatacagaagtcttcttgacttctgattttcaaaaccattcctcagtatcttcaggcatttgacctcctgaatgtgcttggccctgggcttcagttatcctttgatgtcctgcaggggtggctaatgtgctggggtttttctgtgttaatagtcacagtattgttttattggtgaatagctgaaaaacagagggattaagtcatattccgggaaagagaattatagtttttatgcctcctgttgaataaatggtgtcctgattgcc

SEQ ID NO: 383431 - DNA, 2591 bp, Homo sapiens
tcgagcagcggcgaccgacgcggcgaaggagcgcgccatggagcatgtgacagagggctcctgggagtcgctgcctgtgccgctgcacccgcaggtgctgggcgcgctgcgggagctgggcttcccgtacatgacgccggtgcagtccgcaaccatccctctgttcatgcgaaacaaagatgtcgctgcagaagcggtcacaggtagtggcaaaacactcgcttttgtcatccccatcctggaaattcttctgagaagagaagagaagttaaaaaagagtcagacgaggtcctgtcgcatttcacgaagcacttccccgagttcagccagattctttggatcggaggcaggaatcctggagaagatgttgagaggtttaagcaacaaggtgggaacatcattgtggccactccaggccgcttggaggacatgttccggaggaaggccgaaggcttggatctggccagctgtgtgcgatccctggatgtcctggtgttggatgaggcagacagacttctggacatggggtttgaggcaagcatcaacaccattctggagtttttgccaaagcagaggagaacaggccttttctctgccactcagacgcaggaagtggagaacctggtgagagcgggcctccggaaccctgtccgggtctcagtgaaggagaagggcgtggcagccagcagtgcccagaagaccccctcccgcctggaaaactactacatggtatgcaaggcagatgagaaatttaatcagctggtccattttcttcgcaatcataagcaggagaaacacctggtcttcttcagcacctgtgcctgtgtggaatactatgggaaggctctggaagtgctggtgaagggcgtgaagattatgtgcattcacggaaagatgaaatataaacgcaataagatcttcatggagttccgcaaattgcaaagtgggattttagtgtgcactgatgtgatggcccggggaattgatattcctgaagtcaactgggttttgcagtatgaccctcccagcaatgcaagtgccttcgtgcatcgctgcggtcgcacagctcgcattggccacgggggcagcgctctggtgttcctcctgcccatggaagagtcatacatcaatttccttgcaattaaccaaaaatgccccctgcaggagatgaagccccagagaaacacagcggaccttctgccaaaactcaagtccatggccctggctgacagagctgtgtttgaaaagggcatgaaagcttttgtgtcatatgtccaagcttatgcaaagcatgaatgcaacctgattttcagattaaaggatcttgattttgccagccttgctcgaggttttgccctgctgaggatgcccaagatgccagaattgagaggaaagcagtttccagattttgtgcccgtggacgttaataccgacacgattccatttaaagataaaatcagagaaaagcagaggcagaaactcctggagcaacaaagaagagagaaaacagaaaatgaagggagaagaaaattcataaaaaataaagcttggtcaaagcagaaggccaaaaaagaaaagaagaaaaaaatgaatgagaaaaggaaaagggaagagggttctgatattgaagatgaggacatggaagaacttcttaatgacacaagactcttgaaaaaacttaagaaaggcaaaataactgaagaagaatttgagaagggcttgttgacaactggcaaaagaacaatcaagacagtggatttagggatctcagatttggaagatgactgctgattccagtgccacagatgaacccacaaggacatagctgttccctaacttggtggatggctccagtttgcttttaacgaaaatcacaacttcaggagacatctgaaaagaatgatgtctctgaaagctgtcctttcagatgagggagaaatgaaggatttcacacttcagaatattttactaaaaacattccagtcttggccgggtgcggtggctcctgcctataatcccagcactttgggaggctgaggcaggaggatcacttgagcccaggagttcaagaccagcctgggaacacagcgagaccctctcattaaaaacaacaaaacaaaacaattccagtcttggagtagtctaacagaagaaaatgtaaaattatttgagtgtaaataatagatgtcagtatttatcatgatgggtcacatatagacatatgtacatatatatatatatatatatatatatatatatatatatatatatatatatataagctcttttttctgaggctattttatagttatttttaaacataaagatacagaagtcttcttgacttctgattttcaaaaccattcctcagtatcttcaggcatttgacctcctgaatgtgcttggccctgggcttcagttatcctttgatgtcctgcaggggtggctaatgtgctggggtttttctgtgttaatagtcacagtattgttttattggtgaatagctgaaaaacagagggattaagtcatattccgggaaagagaattatagtttttatgcctcctgttgaataaatggtgtcctgattgcc

SEQ ID NO: 383432 - DNA, 2712 bp, Homo sapiens
tcgagcagcggcgaccgacgcggcgaaggagcgcgccatggagcatgtgacagagggctcctgggagtcgctgcctgtgccgctgcacccgcaggtgctgggcgcgctgcgggagctgggcttcccgtacatgacgccggtgcagtccgcaaccatccctctgttcatgcgaaacaaagatgtcgctgcagaagcggtcacaggtagtggcaaaacactcgcttttgtcatccccatcctggaaattcttctgagaagagaagagaagttaaaaaagagtcaggttggagccataatcatcacccccactcgagagctggccattcaaatagacgaggtcctgtcgcatttcacgaagcacttccccgagttcagccagattctttggatcggaggcaggaatcctggagaagatgttgagaggtttaagcaacaaggtgggaacatcattgtggccactccaggccgcttggaggacatgttccggaggaaggccgaaggcttggatctggccagctgtgtgcgatccctggatgtcctggtgttggatgaggcagacagacttctggacatggggtttgaggcaagcatcaacaccattctggagtttttgccaaagcagaggagaacaggccttttctctgccactcagacgcaggaagtggagaacctggtgagagcgggcctccggaaccctgtccgggtctcagtgaaggagaagggcgtggcagccagcagtgcccagaagaccccctcccgcctggaaaactactacatggtatgcaaggcagatgagaaatttaatcagctggtccattttcttcgcaatcataagcaggagaaacacctggtcttcttcagcacctgtgcctgtgtggaatactatgggaaggctctggaagtgctggtgaagggcgtgaagattatgtgcattcacggaaagatgaaatataaacgcaataagatcttcatggagttccgcaaattgcaaagtgggattttagtgtgcactgatgtgatggcccggggaattgatattcctgaagtcaactgggttttgcagtatgaccctcccagcaatgcaagtgccttcgtgcatcgctgcggtcgcacagctcgcattggccacgggggcagcgctctggtgttcctcctgcccatggaagagtcatacatcaatttccttgcaattaaccaaaaagttgtgatggggagccctggggatatgatgccagccagggaaggtgagaatgtggtatgtgtgtgtgtgtagtgccccctgcaggagatgaagccccagagaaacacagcggaccttctgccaaaactcaagtccatggccctggctgacagagctgtgtttgaaaagggcatgaaagcttttgtgtcatatgtccaagcttatgcaaagcatgaatgcaacctgattttcagattaaaggatcttgattttgccagccttgctcgaggttttgccctgctgaggatgcccaagatgccagaattgagaggaaagcagtttccagattttgtgcccgtggacgttaataccgacacgattccatttaaagataaaatcagagaaaagcagaggcagaaactcctggagcaacaaagaagagagaaaacagaaaatgaagggagaagaaaattcataaaaaataaagcttggtcaaagcagaaggccaaaaaagaaaagaagaaaaaaatgaatgagaaaaggaaaagggaagagggttctgatattgaagatgaggacatggaagaacttcttaatgacacaagactcttgaaaaaacttaagaaaggcaaaataactgaagaagaatttgagaagggcttgttgacaactggcaaaagaacaatcaagacagtggatttagggatctcagatttggaagatgactgctgattccagtgccacagatgaacccacaaggacatagctgttccctaacttggtggatggctccagtttgcttttaacgaaaatcacaacttcaggagacatctgaaaagaatgatgtctctgaaagctgtcctttcagatgagggagaaatgaaggatttcacacttcagaatattttactaaaaacattccagtcttggccgggtgcggtggctcctgcctataatcccagcactttgggaggctgaggcaggaggatcacttgagcccaggagttcaagaccagcctgggaacacagcgagaccctctcattaaaaacaacaaaacaaaacaattccagtcttggagtagtctaacagaagaaaatgtaaaattatttgagtgtaaataatagatgtcagtatttatcatgatgggtcacatatagacatatgtacatatatatatatatatatatatatatatatatatatatatatatatatatataagctcttttttctgaggctattttatagttatttttaaacataaagatacagaagtcttcttgacttctgattttcaaaaccattcctcagtatcttcaggcatttgacctcctgaatgtgcttggccctgggcttcagttatcctttgatgtcctgcaggggtggctaatgtgctggggtttttctgtgttaatagtcacagtattgttttattggtgaatagctgaaaaacagagggattaagtcatattccgggaaagagaattatagtttttatgcctcctgttgaataaatggtgtcctgattgcc

SEQ ID NO: 383433 - DNA, 1613 bp, Homo sapiens
aaaaatttaacatactttacagagcatgtgaaatatttgggttggagttgggcttcagacctcaacagttgaaaaggaattgtttcgcttttgtttttcttggttgtgatggggagccctggggatatgatgccagccagggaaggtgagaatgtggtatgtgtgtgtgtgtagtgccccctgcaggagatgaagccccagagaaacacagcggaccttctgccaaaactcaagtccatggccctggctgacagagctgtgtttgaaaagggcatgaaagcttttgtgtcatatgtccaagcttatgcaaagcatgaatgcaacctgattttcagattaaaggatcttgattttgccagccttgctcgaggttttgccctgctgaggatgcccaagatgccagaattgagaggaaagcagtttccagattttgtgcccgtggacgttaataccgacacgattccatttaaagataaaatcagagaaaagcagaggcagaaactcctggagcaacaaagaagagagaaaacagaaaatgaagggagaagaaaattcataaaaaataaagcttggtcaaagcagaaggccaaaaaagaaaagaagaaaaaaatgaatgagaaaaggaaaagggaagagggttctgatattgaagatgaggacatggaagaacttcttaatgacacaagactcttgaaaaaacttaagaaaggcaaaataactgaagaagaatttgagaagggcttgttgacaactggcaaaagaacaatcaagacagtggatttagggatctcagatttggaagatgactgctgattccagtgccacagatgaacccacaaggacatagctgttccctaacttggtggatggctccagtttgcttttaacgaaaatcacaacttcaggagacatctgaaaagaatgatgtctctgaaagctgtcctttcagatgagggagaaatgaaggatttcacacttcagaatattttactaaaaacattccagtcttggccgggtgcggtggctcctgcctataatcccagcactttgggaggctgaggcaggaggatcacttgagcccaggagttcaagaccagcctgggaacacagcgagaccctctcattaaaaacaacaaaacaaaacaattccagtcttggagtagtctaacagaagaaaatgtaaaattatttgagtgtaaataatagatgtcagtatttatcatgatgggtcacatatagacatatgtacatatatatatatatatatatatatatatatatatatatatatatatatatataagctcttttttctgaggctattttatagttatttttaaacataaagatacagaagtcttcttgacttctgattttcaaaaccattcctcagtatcttcaggcatttgacctcctgaatgtgcttggccctgggcttcagttatcctttgatgtcctgcaggggtggctaatgtgctggggtttttctgtgttaatagtcacagtattgttttattggtgaatagctgaaaaacagagggattaagtcatattccgggaaagagaattatagtttttatgcctcctgttgaataaatggtgtcctgattgcc

SEQ ID NO: 383434 - DNA, 1176 bp, Homo sapiens
tcgagcagcggcgaccgacgcggcgaaggagcgcgccatggagcatgtgacagagggctcctgggagtcgctgcctgtgccgctgcacccgcaggtgctgggcgcgctgcgggagctgggcttcccgtacatgacgccggtgcagtccgcaaccatccctctgttcatgcgaaacaaagatgtcgctgcagaagcggtcacaggtagtggcaaaacactcgcttttgtcatccccatcctggaaattcttctgagaagagaagagaagttaaaaaagagtcaggttggagccataatcatcacccccactcgagagctggccattcaaatagacgaggtcctgtcgcatttcacgaagcacttccccgagttcagccagattctttggatcggaggcaggaatcctggagaagatgttgagaggtttaagcaacaaggtgggaacatcattgtggccactccaggccgcttggaggacatgttccggaggaaggccgaaggcttggatctggccagctgtgtgcgatccctggatgtcctggtgttggatgaggcagacagacttctggacatggggtttgaggcaagcatcaacaccattctggagtttttgccaaagcagaggagaacaggccttttctctgccactcagacgcaggaagtggagaacctggtgagagcgggcctccggaaccctgtccgggtctcagtgaaggagaagggcgtggcagccagcagtgcccagaagaccccctcccgcctggaaaactactacatggtatgcaaggcagatgagaaatttaatcagctggtccattttcttcgcaatcataagcaggagaaacacctggtcttcttcagcacctgtgcctgtgtggaatactatgggaaggctctggaagtgctggtgaagggcgtgaagattatgtgcattcacggaaagatgaaatataaacgcaataagatcttcatggagttccgcaaattgcaaagtgggattttagtgtgcactgatgtgatggcccggggaattgatattcctgaagtcaactgggttttgcagtatgaccctcccagcaatgcaagattttccactggggactatgtcccacctgtatgatcagagagaaagatacaagttttacttaagagttcacattaaatgtttcttacaga

SEQ ID NO: 383435 - DNA, 1011 bp, Homo sapiens
  misc_feature (24)..(24): n is a, c, g, or t
  misc_feature (29)..(30): n is a, c, g, or t
gatctgcacccctctctcccaganaaggnnagagggttctgatattgaagatgaggacatggaagaacttcttaatgacacaagactcttgaaaaaacttaagaaaggcaaaataactgaagaagaatttgagaagggcttgttgacaactggcaaaagaacaatcaagacagtggatttagggatctcagatttggaagatgactgctgattccagtgccacagatgaacccacaaggacatagctgttccctaacttggtggatggctccagtttgcttttaacgaaaatcacaacttcaggagacatctgaaaagaatgatgtctctgaaagctgtcctttcagatgagggagaaatgaaggatttcacacttcagaatattttactaaaaacattccagtcttggccgggtgcggtggctcctgcctataatcccagcactttgggaggctgaggcaggaggatcacttgagcccaggagttcaagaccagcctgggaacacagcgagaccctctcattaaaaacaacaaaacaaaacaattccagtcttggagtagtctaacagaagaaaatgtaaaattatttgagtgtaaataatagatgtcagtatttatcatgatgggtcacatatagacatatgtacatatatatatatatatatatatatatatatatatatatatatatatatatataagctcttttttctgaggctattttatagttatttttaaacataaagatacagaagtcttcttgacttctgattttcaaaaccattcctcagtatcttcaggcatttgacctcctgaatgtgcttggccctgggcttcagttatcctttgatgtcctgcaggggtggctaatgtgctggggtttttctgtgttaatagtcacagtattgttttattggtgaatagctgaaaaacagagggattaagtcatattccgggaaagagaattatagtttttatgcctcctgttgaataaatggtgtcctgattgcc

SEQ ID NO: 383436 - DNA, 191 bp, Homo sapiens
ttcaggactcccacctcccagctcagctcactgtccccacacgccgtccacatagacacagttgccacgtttgattcaacttctctatggtgacttggttactcagagccccttttgtggtgggacccactgtgaccttagctgcccattatgttcctagggcttcgggtctcacctgtgaattgatggca

SEQ ID NO: 383437 - DNA, 329 bp, Homo sapiens
agatgaagccccagagaaacacagcggaccttctgccaaaactcaagtccatggccctggctgacagagctgtgtttgaaaagggcatgaaagcttttgtgtcatatgtccaagcttatgcaaagcatgaatgcaacctgattttcagattaaagggtaagttggacttcttcatgtgataatgtctccatcttaactatgtggtggtcttacaagtatgagattgctttgtctcataaaaggaagtgttcccaggttttgagtagacacagaataaactggccactggctgctgagtattccttttaactttgtaaaaatgtaatttt

SEQ ID NO: 383438 - DNA, 3371 bp, Homo sapiens
tcgagcagcggcgaccgacgcggcgaaggagcgcgccatggagcatgtgacagagggctcctgggagtcgctgcctgtgccgctgcacccgcaggtgctgggcgcgctgcgggagctgggcttcccgtacatgacgccggtgcagtccgcaaccatccctctgttcatgcgaaacaaagatgtcgctgcagaagcggtcacaggtagtggcaaaacactcgcttttgtcatccccatcctggaaattcttctgagaagagaagagaagttaaaaaagagtcagaggtgaggacaacaaaagtgatttattttcacctagtcatcagagagttcacattggattaagaagctggctacaaatgtgagctaccgcgcccggccattttgcacatttttgtgctttatgttggtgattttgatttttgaaatggccccgtgatgtagtgcagtctagtgttcctgggtgcaagaaggttatgacgtgcagagaaaatccccgtgctagagaagcacaagctaaggcatgagttaatgtgctgttggccacgagttcaatgagaatgaatcaatagtatatgttaaatagagtcttttaagcacaaacagacataaaataggtttatgtattgattggttgacaaaaatgtcatgcccaaagactggcaggaacctaaccctgtgtttcccctgtgagcagtggttcagcattgactaattcactgttcttcatgacttgaaagagcataactgcagtatatgatgacgagtaaccgtaattcaaagtagttgatatgtgctcagagatgctgctgagaaagtctgggaactactgtttctctggaactttcctttgtgtggtagagggcggagggcctatgagttcctctctgggagtcccttgtgctgctgactgtgtcccttccttccatgtgggtaggttggagccataatcatcacccccactcgagagctggccattcaaatagacgaggtcctgtcgcatttcacgaagcacttccccgagttcaggtgaattggatgcagtgtccctgttagtcatgggctgttttgtcgaacttaatcaaaggctgttttcttgttgtagcccagattctttggatcggaggcaggaatcctggagaagatgttgagaggtttaagcaacaaggtgggaacatcattgtggccactccaggccgcttggaggacatgttccggaggaaggccgaaggcttggatctggccagctgtgtgcgatccctggatgtcctggtgttggatgaggcagacagacttctggacatggggtttgaggcaagcatcaacaccattctggagtttttgccaaagcagaggagaacaggccttttctctgccactcagacgcaggaagtggagaacctggtgagagcgggcctccggaaccctgtccgggtctcagtgaaggagaagggcgtggcagccagcagtgcccagaagaccccctcccgcctggaaaactactacatggtatgcaaggcagatgagaaatttaatcagctggtccattttcttcgcaatcataagcaggagaaacacctggtcttcttcagcacctgtgcctgtgtggaatactatgggaaggctctggaagtgctggtgaagggcgtgaagattatgtgcattcacggaaagatgaaatataaacgcaataagatcttcatggagttccgcaaattgcaaagtgggattttagtgtgcactgatgtgatggcccggggaattgatattcctgaagtcaactgggttttgcagtatgaccctcccagcaatgcaagtgccttcgtgcatcgctgcggtcgcacagctcgcattggccacgggggcagcgctctggtgttcctcctgcccatggaagagtcatacatcaatttccttgcaattaaccaaaaatgccccctgcaggagatgaagccccagagaaacacagcggaccttctgccaaaactcaagtccatggccctggctgacagagctgtgtttgaaaagggcatgaaagcttttgtgtcatatgtccaagcttatgcaaagcatgaatgcaacctgattttcagattaaaggatcttgattttgccagccttgctcgaggttttgccctgctgaggatgcccaagatgccagaattgagaggaaagcagtttccagattttgtgcccgtggacgttaataccgacacgattccatttaaagataaaatcagagaaaagcagaggcagaaactcctggagcaacaaagaagagagaaaacagaaaatgaagggagaagaaaattcataaaaaataaagcttggtcaaagcagaaggccaaaaaagaaaagaagaaaaaaatgaatgagaaaaggaaaagggaagagggttctgatattgaagatgaggacatggaagaacttcttaatgacacaagactcttgaaaaaacttaagaaaggcaaaataactgaagaagaatttgagaagggcttgttgacaactggcaaaagaacaatcaagacagtggatttagggatctcagatttggaagatgactgctgattccagtgccacagatgaacccacaaggacatagctgttccctaacttggtggatggctccagtttgcttttaacgaaaatcacaacttcaggagacatctgaaaagaatgatgtctctgaaagctgtcctttcagatgagggagaaatgaaggatttcacacttcagaatattttactaaaaacattccagtcttggccgggtgcggtggctcctgcctataatcccagcactttgggaggctgaggcaggaggatcacttgagcccaggagttcaagaccagcctgggaacacagcgagaccctctcattaaaaacaacaaaacaaaacaattccagtcttggagtagtctaacagaagaaaatgtaaaattatttgagtgtaaataatagatgtcagtatttatcatgatgggtcacatatagacatatgtacatatatatatatatatatatatatatatatatatatatatatatatatatataagctcttttttctgaggctattttatagttatttttaaacataaagatacagaagtcttcttgacttctgattttcaaaaccattcctcagtatcttcaggcatttgacctcctgaatgtgcttggccctgggcttcagttatcctttgatgtcctgcaggggtggctaatgtgctggggtttttctgtgttaatagtcacagtattgttttattggtgaatagctgaaaaacagagggattaagtcatattccgggaaagagaattatagtttttatgcctcctgttgaataaatggtgtcctgattgcc

SEQ ID NO: 383439 - DNA, 2410 bp, Homo sapiens
tcgagcagcggcgaccgacgcggcgaaggagcgcgccatggagcatgtgacagagggctcctgggagtcgctgcctgtgccgctgcacccgcaggtgctgggcgcgctgcgggagctgggcttcccgtacatgacgccggtgcagccagattctttggatcggaggcaggaatcctggagaagatgttgagaggtttaagcaacaaggtgggaacatcattgtggccactccaggccgcttggaggacatgttccggaggaaggccgaaggcttggatctggccagctgtgtgcgatccctggatgtcctggtgttggatgaggcagacagacttctggacatggggtttgaggcaagcatcaacaccattctggagtttttgccaaagcagaggagaacaggccttttctctgccactcagacgcaggaagtggagaacctggtgagagcgggcctccggaaccctgtccgggtctcagtgaaggagaagggcgtggcagccagcagtgcccagaagaccccctcccgcctggaaaactactacatggtatgcaaggcagatgagaaatttaatcagctggtccattttcttcgcaatcataagcaggagaaacacctggtcttcttcagcacctgtgcctgtgtggaatactatgggaaggctctggaagtgctggtgaagggcgtgaagattatgtgcattcacggaaagatgaaatataaacgcaataagatcttcatggagttccgcaaattgcaaagtgggattttagtgtgcactgatgtgatggcccggggaattgatattcctgaagtcaactgggttttgcagtatgaccctcccagcaatgcaagtgccttcgtgcatcgctgcggtcgcacagctcgcattggccacgggggcagcgctctggtgttcctcctgcccatggaagagtcatacatcaatttccttgcaattaaccaaaaatgccccctgcaggagatgaagccccagagaaacacagcggaccttctgccaaaactcaagtccatggccctggctgacagagctgtgtttgaaaagggcatgaaagcttttgtgtcatatgtccaagcttatgcaaagcatgaatgcaacctgattttcagattaaaggatcttgattttgccagccttgctcgaggttttgccctgctgaggatgcccaagatgccagaattgagaggaaagcagtttccagattttgtgcccgtggacgttaataccgacacgattccatttaaagataaaatcagagaaaagcagaggcagaaactcctggagcaacaaagaagagagaaaacagaaaatgaagggagaagaaaattcataaaaaataaagcttggtcaaagcagaaggccaaaaaagaaaagaagaaaaaaatgaatgagaaaaggaaaagggaagagggttctgatattgaagatgaggacatggaagaacttcttaatgacacaagactcttgaaaaaacttaagaaaggcaaaataactgaagaagaatttgagaagggcttgttgacaactggcaaaagaacaatcaagacagtggatttagggatctcagatttggaagatgactgctgattccagtgccacagatgaacccacaaggacatagctgttccctaacttggtggatggctccagtttgcttttaacgaaaatcacaacttcaggagacatctgaaaagaatgatgtctctgaaagctgtcctttcagatgagggagaaatgaaggatttcacacttcagaatattttactaaaaacattccagtcttggccgggtgcggtggctcctgcctataatcccagcactttgggaggctgaggcaggaggatcacttgagcccaggagttcaagaccagcctgggaacacagcgagaccctctcattaaaaacaacaaaacaaaacaattccagtcttggagtagtctaacagaagaaaatgtaaaattatttgagtgtaaataatagatgtcagtatttatcatgatgggtcacatatagacatatgtacatatatatatatatatatatatatatatatatatatatatatatatatatataagctcttttttctgaggctattttatagttatttttaaacataaagatacagaagtcttcttgacttctgattttcaaaaccattcctcagtatcttcaggcatttgacctcctgaatgtgcttggccctgggcttcagttatcctttgatgtcctgcaggggtggctaatgtgctggggtttttctgtgttaatagtcacagtattgttttattggtgaatagctgaaaaacagagggattaagtcatattccgggaaagagaattatagtttttatgcctcctgttgaataaatggtgtcctgattgcc

SEQ ID NO: 383440 - DNA, 2228 bp, Homo sapiens
  misc_feature (18)..(18): n is a, c, g, or t
tacggctaggtacgaggnctgggtggtgggaacatcattgtggccactccaggccgcttggaggacatgttccggaggaaggccgaaggcttggatctggccagctgtgtgcgatccctggatgtcctggtgttggatgaggcagacagacttctggacatggggtttgaggcaagcatcaacaccattctggagtttttgccaaagcagaggagaacaggccttttctctgccactcagacgcaggaagtggagaacctggtgagagcgggcctccggaaccctgtccgggtctcagtgaaggagaagggcgtggcagccagcagtgcccagaagaccccctcccgcctggaaaactactacatggtatgcaaggcagatgagaaatttaatcagctggtccattttcttcgcaatcataagcaggagaaacacctggtcttcttcagcacctgtgcctgtgtggaatactatgggaaggctctggaagtgctggtgaagggcgtgaagattatgtgcattcacggaaagatgaaatataaacgcaataagatcttcatggagttccgcaaattgcaaagtgggattttagtgtgcactgatgtgatggcccggggaattgatattcctgaagtcaactgggttttgcagtatgaccctcccagcaatgcaagtgccttcgtgcatcgctgcggtcgcacagctcgcattggccacgggggcagcgctctggtgttcctcctgcccatggaagagtcatacatcaatttccttgcaattaaccaaaaatgccccctgcaggagatgaagccccagagaaacacagcggaccttctgccaaaactcaagtccatggccctggctgacagagctgtgtttgaaaagggcatgaaagcttttgtgtcatatgtccaagcttatgcaaagcatgaatgcaacctgattttcagattaaaggatcttgattttgccagccttgctcgaggttttgccctgctgaggatgcccaagatgccagaattgagaggaaagcagtttccagattttgtgcccgtggacgttaataccgacacgattccatttaaagataaaatcagagaaaagcagaggcagaaactcctggagcaacaaagaagagagaaaacagaaaatgaagggagaagaaaattcataaaaaataaagcttggtcaaagcagaaggccaaaaaagaaaagaagaaaaaaatgaatgagaaaaggaaaagggaagagggttctgatattgaagatgaggacatggaagaacttcttaatgacacaagactcttgaaaaaacttaagaaaggcaaaataactgaagaagaatttgagaagggcttgttgacaactggcaaaagaacaatcaagacagtggatttagggatctcagatttggaagatgactgctgattccagtgccacagatgaacccacaaggacatagctgttccctaacttggtggatggctccagtttgcttttaacgaaaatcacaacttcaggagacatctgaaaagaatgatgtctctgaaagctgtcctttcagatgagggagaaatgaaggatttcacacttcagaatattttactaaaaacattccagtcttggccgggtgcggtggctcctgcctataatcccagcactttgggaggctgaggcaggaggatcacttgagcccaggagttcaagaccagcctgggaacacagcgagaccctctcattaaaaacaacaaaacaaaacaattccagtcttggagtagtctaacagaagaaaatgtaaaattatttgagtgtaaataatagatgtcagtatttatcatgatgggtcacatatagacatatgtacatatatatatatatatatatatatatatatatatatatatatatatatatataagctcttttttctgaggctattttatagttatttttaaacataaagatacagaagtcttcttgacttctgattttcaaaaccattcctcagtatcttcaggcatttgacctcctgaatgtgcttggccctgggcttcagttatcctttgatgtcctgcaggggtggctaatgtgctggggtttttctgtgttaatagtcacagtattgttttattggtgaatagctgaaaaacagagggattaagtcatattccgggaaagagaattatagtttttatgcctcctgttgaataaatggtgtcctgattgcc

SEQ ID NO: 383441 - DNA, 2356 bp, Homo sapiens
tcgagcagcggcgaccgacgcggcgaaggagcgcgccatggagcatgtgacagagggctcctgggagtcgctgcctgtgccgctgcacccgcaggtgctgggcgcgctgcgggagctgggcttcccgtacatgacgccggtgcagtccgcaaccatccctctgttcatgcgaaacaaagatgtcgctgcagaagcggtcacaggtagtggcaaaacactcgcttttgtcatccccatcctggaaattcttctgagaagagaagagaagttaaaaaagagtcaggttggagccataatcatcacccccactcgagagctggccattcaaatagacgaggtcctgtcgcatttcacgaagcacttccccgagttcagccagattctttggatcggaggcaggaatcctggagaagatgttgagaggtttaagcaacaaggtgggaacatcattgtggccactccaggccgcttggaggacatgttccggaggaaggccgaaggcttggatctggccagctgtgtgcgatccctggatgtcctggtgttggatgaggcagacagacttctggacatggggtttgaggcaagcatcaacaccattctggagtttttgccaaagcagaggagaacaggccttttctctgccactcagacgcaggaagtggagaacctggtgagagcgggcctccggaaccctgtccgggtctcagtgaaggagaagggcgtggcagccagcagtgcccagaagaccccctcccgcctggaaaactactacatggtatgcaaggcagatgagaaatttaatcagctggtccattttcttcgcaatcataagcaggagaaacacctggtcttcttcagcacctgtgcctgtgtggaatactatgggaaggctctggaagtgctggtgaagggcgtgaagattatgtgcattcacggaaagatgaaatataaacgcaataagatcttcatggagttccgcaaattgcaaagtgggattttagtgtgcactgatgtgatggcccggggaattgatattcctgaagtcaactgggttttgcagtatgaccctcccagcaatgcaagatcttgattttgccagccttgctcgaggttttgccctgctgaggatgcccaagatgccagaattgagaggaaagcagtttccagattttgtgcccgtggacgttaataccgacacgattccatttaaagataaaatcagagaaaagcagaggcagaaactcctggagcaacaaagaagagagaaaacagaaaatgaagggagaagaaaattcataaaaaataaagcttggtcaaagcagaaggccaaaaaagaaaagaagaaaaaaatgaatgagaaaaggaaaagggaagagggttctgatattgaagatgaggacatggaagaacttcttaatgacacaagactcttgaaaaaacttaagaaaggcaaaataactgaagaagaatttgagaagggcttgttgacaactggcaaaagaacaatcaagacagtggatttagggatctcagatttggaagatgactgctgattccagtgccacagatgaacccacaaggacatagctgttccctaacttggtggatggctccagtttgcttttaacgaaaatcacaacttcaggagacatctgaaaagaatgatgtctctgaaagctgtcctttcagatgagggagaaatgaaggatttcacacttcagaatattttactaaaaacattccagtcttggccgggtgcggtggctcctgcctataatcccagcactttgggaggctgaggcaggaggatcacttgagcccaggagttcaagaccagcctgggaacacagcgagaccctctcattaaaaacaacaaaacaaaacaattccagtcttggagtagtctaacagaagaaaatgtaaaattatttgagtgtaaataatagatgtcagtatttatcatgatgggtcacatatagacatatgtacatatatatatatatatatatatatatatatatatatatatatatatatatataagctcttttttctgaggctattttatagttatttttaaacataaagatacagaagtcttcttgacttctgattttcaaaaccattcctcagtatcttcaggcatttgacctcctgaatgtgcttggccctgggcttcagttatcctttgatgtcctgcaggggtggctaatgtgctggggtttttctgtgttaatagtcacagtattgttttattggtgaatagctgaaaaacagagggattaagtcatattccgggaaagagaattatagtttttatgcctcctgttgaataaatggtgtcctgattgcc

SEQ ID NO: 383442 - DNA, 1621 bp, Homo sapiens
tcgagcagcggcgaccgacgcggcgaaggagcgcgccatggagcatgtgacagagggctcctgggagtcgctgcctgtgccgctgcacccgcaggtgctgggcgcgctgcgggagctgggcttcccgtacatgacgccggtgcagtccgcaaccatccctctgttcatgcgaaacaaagatgtcgctgcagaagcggtcacaggtagtggcaaaacactcgcttttgtcatccccatcctggaaattcttctgagaagagaagagaagttaaaaaagagtcaggttggagccataatcatcacccccactcgagagctggccattcaaatagacgaggtcctgtcgcatttcacgaagcacttccccgagttcagccagattctttggatcggaggcaggaatcctggagaagatgttgagaggtttaagcaacaaggtgggaacatcattgtggccactccaggccgcttggaggacatgttccggaggaaggccgaaggcttggatctggccagctgtgtgcgatccctggatgtcctggtgttggatgaggcagacagacttctggacatggggtttgaggcaagcatcaacaccattctggagtttttgccaaagcagaggagaacaggccttttctctgccactcagacgcaggaagtggagaacctggtgagagcgggcctccggaaccctgtccgggtctcagtgaaggagaagggcgtggcagccagcagtgcccagaagaccccctcccgcctggaaaactactacatggtatgcaaggcagatgagaaatttaatcagctggtccattttcttcgcaatcataagcaggagaaacacctggtcttcttcagcacctgtgcctgtgtggaatactatgggaaggctctggaagtgctggtgaagggcgtgaagattatgtgcattcacggaaagatgaaatataaacgcaataagatcttcatggagttccgcaaattgcaaaggtgggtgggcttcattgaaggtagcagctctcctgccacactgctctttcaggtccccaaatgccccattctctagtagcctgtgctgtccgcatgtgttgtctttcctgcctggaaccctcttccctctctaatctggttatcacatctctgtaaacaccccgagcctccattgccctgttccaattgctttgccttttgctatgtcatttccctagttactgaacttctgtgctagacagcaggctccgtgacacaggagtcctgtgtattgtcttcactcccagattgccctgtgcccggtccagggaaaggttgtgatgactgtcaagcagcaaggagcaaatccatttgtcctgtctgggtagaaactgtctgtggcttaaggccggacacggtggctcacgcctgtaatcccagcactttgggaggccgaggcgggtggatcacgaggtcaggagatcaagaccatcctggctaacgtggtgaaaccctgtctctactaaaaacaaaaaattagtcgggcatggtggctggcgcctgtagtcccagctactccagaggctgaggcaggagaatggtgtgaacccaggaggcggagcttgcagtgagccgagactgcgccagt

SEQ ID NO: 383443 - DNA, 412 bp, Homo sapiens
atagccatggggattattattgccaaatatgttttttattagtttccctttttattttgcaggtatgcaaggcagatgagaaatttaatcagctggtccattttcttcgcaatcataagcaggagaaacacctggtcttcttcaggtactcctctggtctctgtggtagaggcatcagggattcagccagaatgtgcaggtgcatgcggcctttgggttttggattccatctagcatggttctctccggaatgcttttggctgcaaataactgaaaacccaacttttgttgtccgaacaaggttggctttatttttctcccgtaaaaagtcgtccaaaggcaggcagtttctcacatgggtttcatgtgtcagtcatgtcaaggtcaatgttgatgtgattggtcttctctt

SEQ ID NO: 383444 - DNA, 2502 bp, Homo sapiens
tgatagagcagagacagtagttgtggggccacctaggagagtctgggtatagacaacatccccagccactccccttccctgaaggaggtctcagctgcagcaggagagaaggctgcctctgcctctctccttagacttcccttcttcccccctcatttcccttctagacgctgacagaggcaaaaatctgctaactcagggggcagactcaaccaagactgtgagcaggcctggggaatgaccccccgatctccaaccagtgccttccgcagctgcacggctgtctccagctgtctctgcccctcttcctggccctggctccatctctctgtcacctcacccttccctgtgccacatgggccctctctctcctgccaggacgctgcggctctggggacctcggagcctgggggtggctctgggagtcttcatgaccattggctttgcactccagctcttgggagggcccttccagaggaggctacctgggctacagctccgacagccctcggccccatccctacgaccagcccttccgtcctgcccaccccggcagcgactggtgttcctgaagacacataaatccgggagcagctctgtgctgagcctgcttcaccgctatggggaccagcacgggctgcgcttcgccctccctgcccgctaccagtttggctacccaaagctcttccaggcctctagggtaaaaggctaccgcccacagggtggaggcacccagctccccttccacatcctctgtcaccacatgaggttcaacctgaaagaggtacttcaggtcatgccttctgacagcttctttttttccattgtccgagacccagcggctctggctcgctctgccttctcctactataaatccacctcatcagccttccgcaagtcaccatctttggctgccttcctggccaatcctcgaggcttctacaggcctggggcccgtggggaccactacgctcgcaacttactatggtttgactttggcctgccctttcccccagagaagagggccaagagagggaatattcatccccccagagaccccaaccccccacagctgcaggtcttgccttctggtgctggccctcgagcccaaaccctcaatcccaatgccctcatccatcctgtttccactgttactgatcatcgcagccagatatcaagccctgcctctttcgatttggggtcttcatccttcatccagtggggtctggcatggctggactctgtctttgacctggtcatggtggctgagtacttcgatgagtcattggttctgctggcagatgccctgtgctggggtctagatgacgtggtgggcttcatgcacaatgcccaggctggacataagcagggcctcagcactgtcagcaacagtggactgactgcggaggaccggcagctgactgcacgggcccgagcctggaacaacctggactgggctctctatgtccacttcaaccgcagtctctgggcacggatagagaaatacggccagggccggctgcagacagctgtggccgagctccgggctcgccgagaggccctagcgaaacattgtctggtagggggtgaggcttctgaccccaaatacatcactgatcgccggttccgccccttccagtttgggtcagctaaggttttgggctatatacttcggagtggattgagcccccaagaccaagaggaatgtgagcgcctagctacccctgagctccagtacaaggacaagctggatgccaagcagttcccccctaccgtctcactgcccctcaagacttcaaggccactctccccataaacatcagactacagatttaggtggaagagcagccatgtttgaagggcacatgtgatgagtggggggcagcaagatgccatttctgcatctcccagaagggatgagtctttgtcccgatgcaagccccctcttcgctgggctcccagcagtgcttccctcctccaccctccactcattttgttctttccccccaactttttttttttttgaaacggagtcttgctctgtcccccaggctggagtgcagtggcatgatctcggctcactgcaacctctgcctcccaggttcaagcgattctcctgcctcagcctccagagtagctaggattacagatacgtgccaccatacccggctaatttttatatttttagagacagggattcaacatgttggttaggctggtcttgaactcctcacctcaggtgatccacatgactctgcctcccaaagtgctgccattacaggcgtgagccactaggcctgacctccccttcccctttcctgccccaaggcagatccacatcaccgaagctccctagaggggcaaaagatggagtgagccacaggaagtttggggcgtggtgagttggaatgatacgtccatttctctatgaaatatttgctactagactgttcatttctctctgacatgtttgttgaatgaataaataatttgaaacttcta

SEQ ID NO: 383445 - DNA, 2383 bp, Homo sapiens
ggcgggagggcccggcccgatttcccttgctgctccccttgtggcctgacgctgacagaggcaaaaatctgctaactcagggggcagactcaaccaagactgtgagcaggcctggggaatgaccccccgatctccaaccagtgccttccgcagctgcacggctgtctccagctgtctctgcccctcttcctggccctggctccatctctctgtcacctcacccttccctgtgccacatgggccctctctctcctgccaggacgctgcggctctggggacctcggagcctgggggtggctctgggagtcttcatgaccattggctttgcactccagctcttgggagggcccttccagaggaggctacctgggctacagctccgacagccctcggccccatccctacgaccagcccttccgtcctgcccaccccggcagcgactggtgttcctgaagacacataaatccgggagcagctctgtgctgagcctgcttcaccgctatggggaccagcacgggctgcgcttcgccctccctgcccgctaccagtttggctacccaaagctcttccaggcctctagggtaaaaggctaccgcccacagggtggaggcacccagctccccttccacatcctctgtcaccacatgaggttcaacctgaaagaggtacttcaggtcatgccttctgacagcttctttttttccattgtccgagacccagcggctctggctcgctctgccttctcctactataaatccacctcatcagccttccgcaagtcaccatctttggctgccttcctggccaatcctcgaggcttctacaggcctggggcccgtggggaccactacgctcgcaacttactatggtttgactttggcctgccctttcccccagagaagagggccaagagagggaatattcatccccccagagaccccaaccccccacagctgcaggtcttgccttctggtgctggccctcgagcccaaaccctcaatcccaatgccctcatccatcctgtttccactgttactgatcatcgcagccagatatcaagccctgcctctttcgatttggggtcttcatccttcatccagtggggtctggcatggctggactctgtctttgacctggtcatggtggctgagtacttcgatgagtcattggttctgctggcagatgccctgtgctggggtctagatgacgtggtgggcttcatgcacaatgcccaggctggacataagcagggcctcagcactgtcagcaacagtggactgactgcggaggaccggcagctgactgcacgggcccgagcctggaacaacctggactgggctctctatgtccacttcaaccgcagtctctgggcacggatagagaaatacggccagggccggctgcagacagctgtggccgagctccgggctcgccgagaggccctagcgaaacattgtctggtagggggtgaggcttctgaccccaaatacatcactgatcgccggttccgccccttccagtttgggtcagctaaggttttgggctatatacttcggagtggattgagcccccaagaccaagaggaatgtgagcgcctagctacccctgagctccagtacaaggacaagctggatgccaagcagttcccccctaccgtctcactgcccctcaagacttcaaggccactctccccataaacatcagactacagatttaggtggaagagcagccatgtttgaagggcacatgtgatgagtggggggcagcaagatgccatttctgcatctcccagaagggatgagtctttgtcccgatgcaagccccctcttcgctgggctcccagcagtgcttccctcctccaccctccactcattttgttctttccccccaactttttttttttttgaaacggagtcttgctctgtcccccaggctggagtgcagtggcatgatctcggctcactgcaacctctgcctcccaggttcaagcgattctcctgcctcagcctccagagtagctaggattacagatacgtgccaccatacccggctaatttttatatttttagagacagggattcaacatgttggttaggctggtcttgaactcctcacctcaggtgatccacatgactctgcctcccaaagtgctgccattacaggcgtgagccactaggcctgacctccccttcccctttcctgccccaaggcagatccacatcaccgaagctccctagaggggcaaaagatggagtgagccacaggaagtttggggcgtggtgagttggaatgatacgtccatttctctatgaaatatttgctactagactgttcatttctctctgacatgtttgttgaatgaataaataatttgaaacttcta

SEQ ID NO: 383446 - DNA, 2484 bp, Homo sapiens
gtctctctgtccctctgtctctctctctctgtttctctgtgtgtgtgtgtgtgtgtgtgtgtgtctctctctctttctgtctccctctccagccccaccctttcagtctcctccgggtgcactgataaggttggaaagtggaatggtggacgctgacagaggcaaaaatctgctaactcagggggcagactcaaccaagactgtgagcaggcctggggaatgaccccccgatctccaaccagtgccttccgcagctgcacggctgtctccagctgtctctgcccctcttcctggccctggctccatctctctgtcacctcacccttccctgtgccacatgggccctctctctcctgccaggacgctgcggctctggggacctcggagcctgggggtggctctgggagtcttcatgaccattggctttgcactccagctcttgggagggcccttccagaggaggctacctgggctacagctccgacagccctcggccccatccctacgaccagcccttccgtcctgcccaccccggcagcgactggtgttcctgaagacacataaatccgggagcagctctgtgctgagcctgcttcaccgctatggggaccagcacgggctgcgcttcgccctccctgcccgctaccagtttggctacccaaagctcttccaggcctctagggtaaaaggctaccgcccacagggtggaggcacccagctccccttccacatcctctgtcaccacatgaggttcaacctgaaagaggtacttcaggtcatgccttctgacagcttctttttttccattgtccgagacccagcggctctggctcgctctgccttctcctactataaatccacctcatcagccttccgcaagtcaccatctttggctgccttcctggccaatcctcgaggcttctacaggcctggggcccgtggggaccactacgctcgcaacttactatggtttgactttggcctgccctttcccccagagaagagggccaagagagggaatattcatccccccagagaccccaaccccccacagctgcaggtcttgccttctggtgctggccctcgagcccaaaccctcaatcccaatgccctcatccatcctgtttccactgttactgatcatcgcagccagatatcaagccctgcctctttcgatttggggtcttcatccttcatccagtggggtctggcatggctggactctgtctttgacctggtcatggtggctgagtacttcgatgagtcattggttctgctggcagatgccctgtgctggggtctagatgacgtggtgggcttcatgcacaatgcccaggctggacataagcagggcctcagcactgtcagcaacagtggactgactgcggaggaccggcagctgactgcacgggcccgagcctggaacaacctggactgggctctctatgtccacttcaaccgcagtctctgggcacggatagagaaatacggccagggccggctgcagacagctgtggccgagctccgggctcgccgagaggccctagcgaaacattgtctggtagggggtgaggcttctgaccccaaatacatcactgatcgccggttccgccccttccagtttgggtcagctaaggttttgggctatatacttcggagtggattgagcccccaagaccaagaggaatgtgagcgcctagctacccctgagctccagtacaaggacaagctggatgccaagcagttcccccctaccgtctcactgcccctcaagacttcaaggccactctccccataaacatcagactacagatttaggtggaagagcagccatgtttgaagggcacatgtgatgagtggggggcagcaagatgccatttctgcatctcccagaagggatgagtctttgtcccgatgcaagccccctcttcgctgggctcccagcagtgcttccctcctccaccctccactcattttgttctttccccccaactttttttttttttgaaacggagtcttgctctgtcccccaggctggagtgcagtggcatgatctcggctcactgcaacctctgcctcccaggttcaagcgattctcctgcctcagcctccagagtagctaggattacagatacgtgccaccatacccggctaatttttatatttttagagacagggattcaacatgttggttaggctggtcttgaactcctcacctcaggtgatccacatgactctgcctcccaaagtgctgccattacaggcgtgagccactaggcctgacctccccttcccctttcctgccccaaggcagatccacatcaccgaagctccctagaggggcaaaagatggagtgagccacaggaagtttggggcgtggtgagttggaatgatacgtccatttctctatgaaatatttgctactagactgttcatttctctctgacatgtttgttgaatgaataaataatttgaaacttcta

SEQ ID NO: 383447 - DNA, 524 bp, Homo sapiens
ggaaatggggcccacagaccaatgcttctcagccccctggattcagcccccttcctaggggtatgtacggacctcccgtcttgctgaagatcctgagccaaaggaattattggctgcagcatcatcaaatcactaatgtattaccaatgaagagccggcatcttgggcttttaccctgatgggaaccatcaagcagaaccttctggacctgtacttccgagttcactagggctgggagaactcagcccagggatcagcaacgcatgtacgagtctctccagaagagttttggagactgagaagtccaagatcaagtggtcagcatctgatgaagcctggacacactgttaacaacacatgtgatggaaatgcatcaggatggggtatatttttagctacagcaaatcatcattcctttatgcgttcagattttcatctctgcagattaattatctggttcttacatttttcagagtaaattgaaactgatttttcctaataaagaaggaagatagactctaaga

SEQ ID NO: 383448 - DNA, 825 bp, Homo sapiens
ggaaatggggcccacagaccaatgcttctcagccccctggattcagcccccttcctaggggtatgtacggacctcccgtcttgctgaagatcctgagccaaaggaattattggctgcagcatcatcaaatcactaatgtattaccaatgaagagccggcatcttgggcttccaggccttgcgtttgtgagtataggaagttcctgctgcaatgtcagaagtccaggctccttttcttggaagaaagaccatgtgaagaagcgtgttgtcagatgtgatgaagaagccattgcggatactcagccctgttgagacttcacatggctccagcctcagcagctatatgaccacaacagcacgagagaccccaaatgaggactgcccagatgagttcatttaccctgcaaaactaagagggataatactaatgaagcgttgcctcaagccactaagttttaccctgatgggaaccatcaagcagaaccttctggacctgtacttccgagttcactagggctgggagaactcagcccagggatcagcaacgcatgtacgagtctctccagaagagacataacactgactgtatgctctacaactaactaatcttcagtttgcagaagaggaaactaaaggacaggaagttggctgattcctacaatgagcagaagttacagcaaaggtcaatgccaggactgagttccctgtttttctcactcacattctttaagttggtacctgggcccctggtgcaggatgggttcttcataaacctttattaaataagtgttcaataaatcaatactcagttttctccattgtaaag

SEQ ID NO: 383449 - DNA, 808 bp, Homo sapiens
ggaaatggggcccacagaccaatgcttctcagccccctggattcagcccccttcctaggggtatgtacggacctcccgtcttgctgaagatcctgagccaaaggaattattggctgcagcatcatcaaatcactaatgtattaccaatgaagagccggcatcttgggcttccaggccttgcgtttgtgagtataggaagttcctgctgcaatgtcagaagtccaggctccttttcttggaagaaagaccatgtgaagaagcgtgttgtcagatgtgatgaagaagccattgcggatactcagccctgttgagacttcacatggctccagcctcagcagctatatgaccacaacagcacgagagaccccaaatgaggactgcccagatgagttcatttaccctgcaaaactaagagggataatactaatgaagcgttgcctcaagccactaagttttaccctgatgggaaccatcaagcagaaccttctggacctgtacttccgagttcactagggctgggagaactcagcccagggatcagcaacgcatgtacgagtctctccagaagagttttggagactgagaagtccaagatcaagtggtcagcatctgatgaagcctggacacactgttaacaacacatgtgatggaaatgcatcaggatggggtatatttttagctacagcaaatcatcattcctttatgcgttcagattttcatctctgcagattaattatctggttcttacatttttcagagtaaattgaaactgatttttcctaataaagaaggaagatagactctaaga

SEQ ID NO: 383450 - DNA, 539 bp, Homo sapiens
ggaaatggggcccacagaccaatgcttctcagccccctggattcagcccccttcctaggggtatgtacggacctcccgtcttgctgaagatcctgagccaaaggaattattggctgcagcatcatcaaatcactaatgtattaccaatgaagagccggcatcttgggcttccaggccttgcgtttgtgagtataggaagttcctgctgcaatgtcagaagtccaggctccttttcttggaagaaagaccatgtgaagaagcgtgttgtcagatgtgatgaagaagccattgcggatactcagccctgttgagacttcacatggctccagcctcagcagctatatgaccacaacagcacgagagaccccaaatgaggactgcccagatgagttcatttaccctgcaaaactaagagggataatactaatgaagcgttgcctcaagccactaagcagtgccacaatcaaggccttgggtgagactgtgcctggagttgccgaaagcctttgcccataaaagttgcttttctctgttaataa

SEQ ID NO: 383451 - DNA, 1169 bp, Homo sapiens
tgaattttgaccaaatgaagtaggagatagcagtaagctgtatttgtgtactttcccctctcctggctgtttgcctctgaataatgaattttcctagaaaatgctatctgcaggcggacagattgtacctgtttagaaaaatgtaatcctgctgaggatatggctccttcctggtttgcatattttgctgttttcttttttagcttgtagacacagtggcctctgtctagactgctggccctgcctttctcttatataattcatgccatgggcctggagcacccacgagagtcagagccattttttaaaattgttttatctgagatgttgtggttgaaaccattactcttaagttttttatttttgtcttggaggctaagcagctttatatgtttgcttttaaatttatttaaagtttcctgacatccatatttcttagctatctttcttactgtatttgttatttttctcttctacctgtatgttttaatgcagtctgttaaaattttaatgtatttttttaaaaatccaaaaaaaattgattcctggtagaattttaaagaataaaacttcataggcagtttctcaattaatgtaggaatactaaaatcatgtaatttcctgttcatcaatactagaaatggcaggcatagaactttaatctagacattagttttgttttcctgaatattaatttgtctttgtataattaggggaaaaaggctttcggctggattcaccccaaagccagtgctctttggggattttcagagggaacaccgtggaccactgaggatagagggctgcagttggctgctcccttacttttcttccccagtggcatgaatttaaaacttatgaaagcaaaatgcccatctagcttgtcaagtcgagagtgacttcagtatgaagaaagccaaagtgccccctctaaacagtggcacttgcccgtgaaagacacatgcttctcagcctcagagctgggctgtggtgagacagcgctgtctgttaatgtgaacttctatgatgtgacatgtgtaactgcacataactgcgtatgataagacacatagggcccaaagggagaagccacaggcacagccccagagcgtctctgtccttcaggccttgagtttctccctctgaaaaagcagcaacaagttctggtt

SEQ ID NO: 383452 - DNA, 136 bp, Homo sapiens
  misc_feature (5)..(6): n is a, c, g, or t
  misc_feature (44)..(44): n is a, c, g, or t
  misc_feature (122)..(122): n is a, c, g, or t
  misc_feature (125)..(125): n is a, c, g, or t
  misc_feature (129)..(132): n is a, c, g, or t
  misc_feature (136)..(136): n is a, c, g, or t
aaganngactttggttttaacaggatttctctggctcctgtgtngattgagggggcggggggcagtatacagcagggagaactttgggaaactcttgaaattattgaagtaagagacatggngtntggnnnntggn

SEQ ID NO: 383453 - DNA, 8502 bp, Homo sapiens
  misc_feature (3552)..(3552): n is a, c, g, or t
tgtcttaaagtaaatcttgttgtggagcggagccctcagctgagggtgcgctctgaaataatacaccattgcagccggggaaagcagagcggcgcaaaagagctctcgccgggtccgcctgctccctctccgcttcgctcctcttctcttctttacccttctcctctctcctcctctgctgctctctcctctcctccgctcttctctctcctcctctcctgctctctcctcttcccttagctcctcttcttttcttctcctcttcttccctctcctcgcctctcccctgctcctcttctctcgtctcccctcccctcccgcctctctctcccctctccctctcccactcgccccgctcgctcgctcgtctgtcgcacagactcaccgtcccttgtccaattatcatattcatcacccgcaagatatcaccgtgtgtgcactcgcgtgttttcctctctctgccgggggaaaaaaaagagagagagagggatagagagagagagagagagagagagagagaggctcggtcccactgctccctgcaccgcggtcccgggattcttgagctgtgcccagctgacgagcttttgaagatggcacaataaccgtccagtgatgcctgaccatgacagcacagccctcttaagccggcaaaccaagaggagaagagttgacattggagtgaaaaggacggtagggacagcatctgcattttttgctaaggcaagagcaacgttttttagtgccatgaatccccaaggttctgagcaggatgttgagtattcagtggtgcagcatgcagatggggaaaagtcaaatgtactccgcaagctgctgaagagggcgaactcgtatgaagatgccatgatgccttttccaggagcaaccataatttcccagctgttgaaaaataacatgaacaaaaatggtggcacggagcccagtttccaagccagcggtctctctagtacaggctccgaagtacatcaggaggatatatgcagcaactcttcaagagacagccccccagagtgtctttccccttttggcaggcctactatgagccagtttgatatggatcgcttatgtgatgagcacctgagagcaaagcgcgcccgggttgagaatataattcggggtatgagccattcccccagtgtggcattaaggggcaatgaaaatgaaagagagatggccccgcagtctgtgagtccccgagaaagttacagagaaaacaaacgcaagcaaaagcttccccagcagcagcaacagagtttccagcagctggtttcagcccgaaaagaacagaagcgagaggagcgccgacagctgaaacagcagctggaggacatgcagaaacagctgctccacgtgcaggaaaagttctaccaaatctatgacagcactgattcggaaaatgatgaagatggtaacctgtctgaagacagcatgcgctcggagatcctggatgccagggcccaggactctgtcggaaggtcagataatgagatgtgcgagctagacccaggacagtttattgaccgagctcgagccctgatcagagagcaggaaatggctgaaaacaagccgaagcgagaaggcaacaacaaagaaagagaccatgggccaaactccttacaaccggaaggcaaacatttggctgagaccttgaaacaggaactgaacactgccatgtcgcaagttgtggacactgtggtcaaagtcttttcggccaagccctcccgccaggttcctcaggtcttcccacctctccagatcccccaggccagatttgcagtcaatggggaaaaccacaatttccacaccgccaaccagcgcctgcagtgctttggcgacgtcatcattccgaaccccctggacacctttggcaatgtgcagatggccagttccactgaccagacagaagcactgcccctggttgtccgcaaaaactcctctgaccagtctgcctccggcctggtgggcggccaccaccagcccctgcaccagtcgcctctctctgccaccacgggcttcaccacgtccaccttccgccaccccttcccccttcccttgatggcctatccatttcagagcccattaggtgctccctccggctccttctctggaaaagacagagcctctcctgaatccttagacttaactagggataccacgagtctgaggaccaagatgtcatctcaccacctgagccaccacccttgttcaccagcacacccgcccagcaccgccgaagggctctccttgtcgctcataaagtccgagtgcggcgatcttcaagatatgtctgaaatatcaccttattcgggaagtgcaatgcaggaaggattgtcacccaatcacttgaaaaaagcaaagctcatgtttttttatacccgttatcccagctccaatatgctgaagacctacttctccgacgtaaagttcaacagatgcattacctctcagctcatcaagtggtttagcaatttccgtgagttttactacattcagatggagaagtacgcacgtcaagccatcaacgatggggtcaccagtactgaagagctgtctataaccagagactgtgagctgtacagggctctgaacatgcactacaataaagcaaatgactttgaggttccagagagattcctggaagtggctcagatcacattacgggagtttttcaatgccattatcgcaggcaaagatgttgatccttcctggaagaaggccatatacaaggtcatctgcaagctggatagtgaagtccctgagtttttcaaatccccgaactgcctacaagagctgcttcatgagtagaaatttcaacaactctttttgaatgtatgaagagtagcagtcccctttggatgtccaagttatatgtgtctagattttgatttcatatatatgtgtatgggaggcatggatatgttatgaaatcagctggtaattcctcctcatcacgtttctctcattttcttttgttttccattgcaaggggatggttgttttctttctgcctttagtttgcttttgcccaaggcccttaacatttggacacttaaaatagggttaattttcagggaaaaagaatgttggcgtgtgtaaagtctctattagcaatgaagggaatttgttaacgatgcatccacttgattgatgacttattgcaaatggcggttggctgaggaaaacccatgacacagcacaactctacagacagtgatgtgtctcttgtttctactgctaagaaggtctgaaaatttaatgaaaccacttcatacatttaagtattttgtttggtttgaactcaatcagtagcttttccttacatgtttaaaaataattccaatgacagatgagcagctcacttttccaaagtaccccaaaaggccaaattaaaaaagaaaaataatcactctcaagccttgtctaagaaaagaggcaaactctgaaagtcgtaccagtttcttctggaggcaaagcaattttgcacaaaaccagctctctcaagatgagactagaaattcatacctggtcttntagccacctctctaaacttgaaaataggttcttcttcataagtgagcttacatcattcttcataaagaaaaatcctataacttgttatcatttttgcttcagatactaaaaggcactaagtttccaatttacgctgctcaactttgtttatatgcttaaaaggattctgtttacttaacaattttttcccctaaaatactattttctgaatacttccttccagtaaggaataaaggaaagcccaacttggccataaaattcttgcctacactagaagtttgttgacagccattagctgacttgatcgtcatctcctaagaggaacacatatattttcacaagcaattccacactatcctgatgggtatgcaaagtggtgacagtctaactcagtgtttcttcattttaggtataacattttaaagcaattgataatgcctcttccaattcagaagctagtattgaccaaaatgtgagaagagtgtatagcataggaaaatttggggttaacccaaaagacacaattccagcacacataagaaagctagctgctattttatgctttcttccatggttctcctcttttttcccttttatttttccctgtttttcaatgatgtacagtgttccctacttgcattgaaaaaactcgtatggcattcacactttttttcttaggtgggtttttgtgtccagatgcagtaagaattcattgttcatcctaaaactgttttccagacccttccttccccttaggtaatttgatatacacctcctaaaatgacacagtaacaaatctggtatttagaacatatagaacataaatgccattttttaattcaactttaataagaattacatttgactttggagaatacaggtcttgacccatgtgactgactagctgacccgatcgctgtaatttaacgtcatttataaattctgctgatggacaggaatgtatgaactcaattattgtcagcacaaagccttaaaacctgctgactttaaattaaatggtgcagtcctatgatgccctgcaccatccaggggactaacagggcctcgcagtgtagacagagggtgcagccacacgggcgggggcaccagccacctcactctgcacccgcggcctcacacatctcccagctcacactctactaatgcacagagtcattagatccaatttgttatttttctcacttgctttaaaaaaaagcagtttggataatcatgacattggaataaagtgggaaggaaaaattccatcagcacaaaatagggaagtaatcccaacttgtagtcacagttttctgactggctttgttttaaaagaggatggcagtccttgttcgtgtcagtgtgccactgggtttttgctgttccgtgtaattcatatcaactttgtgttgccatttgcaaggtaaaaggcaaagctgtagtgtattcacctatgtagacagattgctagatatctttttgatctggggcgagttcaatattgattccagacttatttggatttttttagtattattttcccctccctttctaatttaaatagacaaattaagcaaaagtgtgtgttcacaaccaaatgttgatgcccttatctactgataatatcctctcaatgttcactgaggcatagaaattatttcagagtagaaattgcagcatgaggataaactcacctctttgttctgaaaatagaactttatcactatgctttccggtggttttcccttttacaatcgaaatcttgtgcctcccaagtgcattggaaaatgacaaaagcctgtctctccaaattcctatttaacagtttgattttttttttttaatcaccatctttcaaatcttagctcaactctcaccaagtgaaaattggctacttgggagaaagttaactttctatggtgggatggtgaaggatgagggacagtttacataggaaaagaaaaaaaaaagtctaaagtccatgttgaaaaaccacactaccacttattttctgctaaccctaaattatttttgcgtatacgcttgaggttatagtctgtgcctagacctaaaatgcaccagcgggggggattttaaaaaatccttcaaaataccagttttttcccaacaagtacaattgttcttgtgccttctgtggctttcgatttcatctttttgactttatttccaattactacagctgcaataaacactagattttttttctggctgtttgacataacgttgatagctatgcatattttgtgtctttttaaaacaaagcgggagaatacgtttttgaagaagagaatttttagaacagtttgataccgcaaattattttttcctcaattgtttgagcagcattcgagttttgaaaattcttgtagaagccaattttttgtaactgtggtgcaaatcttgtgttttcttagcctaatgaaaagtagtatagaagcaatatttcataccatgtgctatatatgtgtgcgcagatgtgtgaacataaaatcacatacacacatatacacacatgtaaaaatatacatatatatatatgcgtgtgaagtggaaagcttaccttttcctatctagatttaagaacctattttagacatttgttatgttttgtgaaaagaatgttctatttgcaacaaaacatttaattcttactgtatctctggctgtttaatgaggacgtttcacattaaatggtaaaacacatggaagatgttagaatgtagtaattatttaagtaaacgttcacccacatattcctgaagtttgctttgtgcctccgagtattatttaattaaagaagtgttttatgtttgcagaatctttgtcactgtactagggatgtgggtgaatatcatttaaaaaaatttaaaacaacaaaaaaaaagcaaaacagaaacactaaagcaagaggggaacttttataaagcaatgtaaatatttaacctcatggctgtcattatgtaagacatgagattttaataaataactacattctcacgacatctgttgaatttactaggaacactacagtgactgtatagacagttgaaagcattcttgaaaatcctgctctctccttttaaaagttaacaatctcttttatcagatgtcaagggcaagggtaatgcagtttctgtaaatttatgaaatttctttttctatgtacatgaagacatttagtaagtaacacccccccttcccatgcgcacatgtgcgcatacacacacacacacacacacacacacacacaaacacacacactgtcataaagctaatgatttggggactttaaaaaataggatgtcctccaggaacaatcataaatttatgaaagaaagagtagtttacagactcccctgaaagaagcagtgtatatgtgaagacagtgcaaaaatctctttgccatgtatattatagcgtattcattggtgtgaatagtacaaatgtttccttctggtacaaactctgtgtttgcaaatttacaagaagcattgttttcaaaaagctccccttaaaaaatgtaactggtttatatgagtaagcagttaccgtattgcacttaaatgttatgttgaaggaaatgcagttttgttttctgtagatctgttggttgtaaaccatctataaaactaaagctaaaatgctcatattcagagctgggatcaaaactggtatttaacctttgcatcttcttataattatccttctaagaatataacagaatgtggaagtgtctggactttgagtcttttcaactgagccttctctcaaatctgacaccccctcagaatgcacaaacataagcagaaaaggcaaacaagcttaccttcttttgtgaaaacgtattcattctgtatttttttaaatattcaattcccctaaaaatggggagaaaatattttaaaattgtatattacgacttcaaatttagaactaagaaaaaaatgtatttgggattggtctcagcgctacctagaagaatcaaaggtcatggcttccctcaatattgtcccagccatttctcatatgtatatagtataaaccgtgacaaaacactgcctttatattatttagcaatatgttgtaaatagcattattaagctcttttttgtaataaagaccctttgatttgaatatagtacaataactgaactgataaagtcaatttttgatttttgtttgttttttttagctagaggcaatttcaattgtgaatttttgttgttgtctattgttctgaagactttgcataatttattggtttaatttatcctaatttatttgatgaaggtgtacaattttgtattaccaaggatgtactgtaatattaattgatatgataaacacaatgagactccctgtccatattaaaaagaaaataaaaaggtgcagtagacaattgattttaaaggaaaagttaaaaaaattagtttggcagctactaaattttaaaacaggaaaaaaaaaagttgttgtggggagggtgggaaaggggttttactttgtgtgttttaagcttttgtatactctccaaacttttaccttttgctttgtaccacttaaaggatacagtagtccaattgccttgtgtgccttccatctcctcttaaactgaatgtatgtgcagtatatatgcaagcttgtgcaaaataaaatatacattacaagctcagtgccgtttgattttcttaaagaaagagtgacttttaatttttggacctgtatccaattgtaggacagtaggctagttgtgccagtaatgtcaagtatggagattttctttcactacaattcttcattctgttagcctaacgtgcagctcctagaaacaacctcttttactttagatgcttggaataattgcttggatttctctctctgaaacatctttcaggcttaactttatttagccctgaaacttaaaaaaaa

SEQ ID NO: 383454 - DNA, 8043 bp, Homo sapiens
  misc_feature (3093)..(3093): n is a, c, g, or t
ctggagaggagattcccagccttcctgcccaacccgaaacttttccaacacacgcaggcgtattcctcgcaggattcggcggtcccgagtcgcagtcagggaggaggctcgggaagcacacgtgccctggcacactggaggagggtcccgggattcttgagctgtgcccagctgacgagcttttgaagatggcacaataaccgtccagtgatgcctgaccatgacagcacagccctcttaagccggcaaaccaagaggagaagagttgacattggagtgaaaaggacggtagggacagcatctgcattttttgctaaggcaagagcaacgttttttagtgccatgaatccccaaggttctgagcaggatgttgagtattcagtggtgcagcatgcagatggggaaaagtcaaatgtactccgcaagctgctgaagagggcgaactcgtatgaagatgccatgatgccttttccaggagcaaccataatttcccagctgttgaaaaataacatgaacaaaaatggtggcacggagcccagtttccaagccagcggtctctctagtacaggctccgaagtacatcaggaggatatatgcagcaactcttcaagagacagccccccagagtgtctttccccttttggcaggcctactatgagccagtttgatatggatcgcttatgtgatgagcacctgagagcaaagcgcgcccgggttgagaatataattcggggtatgagccattcccccagtgtggcattaaggggcaatgaaaatgaaagagagatggccccgcagtctgtgagtccccgagaaagttacagagaaaacaaacgcaagcaaaagcttccccagcagcagcaacagagtttccagcagctggtttcagcccgaaaagaacagaagcgagaggagcgccgacagctgaaacagcagctggaggacatgcagaaacagctgctccacgtgcaggaaaagttctaccaaatctatgacagcactgattcggaaaatgatgaagatggtaacctgtctgaagacagcatgcgctcggagatcctggatgccagggcccaggactctgtcggaaggtcagataatgagatgtgcgagctagacccaggacagtttattgaccgagctcgagccctgatcagagagcaggaaatggctgaaaacaagccgaagcgagaaggcaacaacaaagaaagagaccatgggccaaactccttacaaccggaaggcaaacatttggctgagaccttgaaacaggaactgaacactgccatgtcgcaagttgtggacactgtggtcaaagtcttttcggccaagccctcccgccaggttcctcaggtcttcccacctctccagatcccccaggccagatttgcagtcaatggggtcattccgaaccccctggacacctttggcaatgtgcagatggccagttccactgaccagacagaagcactgcccctggttgtccgcaaaaactcctctgaccagtctgcctccggcctggtgggcggccaccaccagcccctgcaccagtcgcctctctctgccaccacgggcttcaccacgtccaccttccgccaccccttcccccttcccttgatggcctatccatttcagagcccattaggtgctccctccggctccttctctggaaaagacagagcctctcctgaatccttagacttaactagggataccacgagtctgaggaccaagatgtcatctcaccacctgagccaccacccttgttcaccagcacacccgcccagcaccgccgaagggctctccttgtcgctcataaagtccgagtgcggcgatcttcaagatatgtctgaaatatcaccttattcgggaagtgcaatgcaggaaggattgtcacccaatcacttgaaaaaagcaaagctcatgtttttttatacccgttatcccagctccaatatgctgaagacctacttctccgacgtaaagttcaacagatgcattacctctcagctcatcaagtggtttagcaatttccgtgagttttactacattcagatggagaagtacgcacgtcaagccatcaacgatggggtcaccagtactgaagagctgtctataaccagagactgtgagctgtacagggctctgaacatgcactacaataaagcaaatgactttgaggttccagagagattcctggaagtggctcagatcacattacgggagtttttcaatgccattatcgcaggcaaagatgttgatccttcctggaagaaggccatatacaaggtcatctgcaagctggatagtgaagtccctgagtttttcaaatccccgaactgcctacaagagctgcttcatgagtagaaatttcaacaactctttttgaatgtatgaagagtagcagtcccctttggatgtccaagttatatgtgtctagattttgatttcatatatatgtgtatgggaggcatggatatgttatgaaatcagctggtaattcctcctcatcacgtttctctcattttcttttgttttccattgcaaggggatggttgttttctttctgcctttagtttgcttttgcccaaggcccttaacatttggacacttaaaatagggttaattttcagggaaaaagaatgttggcgtgtgtaaagtctctattagcaatgaagggaatttgttaacgatgcatccacttgattgatgacttattgcaaatggcggttggctgaggaaaacccatgacacagcacaactctacagacagtgatgtgtctcttgtttctactgctaagaaggtctgaaaatttaatgaaaccacttcatacatttaagtattttgtttggtttgaactcaatcagtagcttttccttacatgtttaaaaataattccaatgacagatgagcagctcacttttccaaagtaccccaaaaggccaaattaaaaaagaaaaataatcactctcaagccttgtctaagaaaagaggcaaactctgaaagtcgtaccagtttcttctggaggcaaagcaattttgcacaaaaccagctctctcaagatgagactagaaattcatacctggtcttntagccacctctctaaacttgaaaataggttcttcttcataagtgagcttacatcattcttcataaagaaaaatcctataacttgttatcatttttgcttcagatactaaaaggcactaagtttccaatttacgctgctcaactttgtttatatgcttaaaaggattctgtttacttaacaattttttcccctaaaatactattttctgaatacttccttccagtaaggaataaaggaaagcccaacttggccataaaattcttgcctacactagaagtttgttgacagccattagctgacttgatcgtcatctcctaagaggaacacatatattttcacaagcaattccacactatcctgatgggtatgcaaagtggtgacagtctaactcagtgtttcttcattttaggtataacattttaaagcaattgataatgcctcttccaattcagaagctagtattgaccaaaatgtgagaagagtgtatagcataggaaaatttggggttaacccaaaagacacaattccagcacacataagaaagctagctgctattttatgctttcttccatggttctcctcttttttcccttttatttttccctgtttttcaatgatgtacagtgttccctacttgcattgaaaaaactcgtatggcattcacactttttttcttaggtgggtttttgtgtccagatgcagtaagaattcattgttcatcctaaaactgttttccagacccttccttccccttaggtaatttgatatacacctcctaaaatgacacagtaacaaatctggtatttagaacatatagaacataaatgccattttttaattcaactttaataagaattacatttgactttggagaatacaggtcttgacccatgtgactgactagctgacccgatcgctgtaatttaacgtcatttataaattctgctgatggacaggaatgtatgaactcaattattgtcagcacaaagccttaaaacctgctgactttaaattaaatggtgcagtcctatgatgccctgcaccatccaggggactaacagggcctcgcagtgtagacagagggtgcagccacacgggcgggggcaccagccacctcactctgcacccgcggcctcacacatctcccagctcacactctactaatgcacagagtcattagatccaatttgttatttttctcacttgctttaaaaaaaagcagtttggataatcatgacattggaataaagtgggaaggaaaaattccatcagcacaaaatagggaagtaatcccaacttgtagtcacagttttctgactggctttgttttaaaagaggatggcagtccttgttcgtgtcagtgtgccactgggtttttgctgttccgtgtaattcatatcaactttgtgttgccatttgcaaggtaaaaggcaaagctgtagtgtattcacctatgtagacagattgctagatatctttttgatctggggcgagttcaatattgattccagacttatttggatttttttagtattattttcccctccctttctaatttaaatagacaaattaagcaaaagtgtgtgttcacaaccaaatgttgatgcccttatctactgataatatcctctcaatgttcactgaggcatagaaattatttcagagtagaaattgcagcatgaggataaactcacctctttgttctgaaaatagaactttatcactatgctttccggtggttttcccttttacaatcgaaatcttgtgcctcccaagtgcattggaaaatgacaaaagcctgtctctccaaattcctatttaacagtttgattttttttttttaatcaccatctttcaaatcttagctcaactctcaccaagtgaaaattggctacttgggagaaagttaactttctatggtgggatggtgaaggatgagggacagtttacataggaaaagaaaaaaaaaagtctaaagtccatgttgaaaaaccacactaccacttattttctgctaaccctaaattatttttgcgtatacgcttgaggttatagtctgtgcctagacctaaaatgcaccagcgggggggattttaaaaaatccttcaaaataccagttttttcccaacaagtacaattgttcttgtgccttctgtggctttcgatttcatctttttgactttatttccaattactacagctgcaataaacactagattttttttctggctgtttgacataacgttgatagctatgcatattttgtgtctttttaaaacaaagcgggagaatacgtttttgaagaagagaatttttagaacagtttgataccgcaaattattttttcctcaattgtttgagcagcattcgagttttgaaaattcttgtagaagccaattttttgtaactgtggtgcaaatcttgtgttttcttagcctaatgaaaagtagtatagaagcaatatttcataccatgtgctatatatgtgtgcgcagatgtgtgaacataaaatcacatacacacatatacacacatgtaaaaatatacatatatatatatgcgtgtgaagtggaaagcttaccttttcctatctagatttaagaacctattttagacatttgttatgttttgtgaaaagaatgttctatttgcaacaaaacatttaattcttactgtatctctggctgtttaatgaggacgtttcacattaaatggtaaaacacatggaagatgttagaatgtagtaattatttaagtaaacgttcacccacatattcctgaagtttgctttgtgcctccgagtattatttaattaaagaagtgttttatgtttgcagaatctttgtcactgtactagggatgtgggtgaatatcatttaaaaaaatttaaaacaacaaaaaaaaagcaaaacagaaacactaaagcaagaggggaacttttataaagcaatgtaaatatttaacctcatggctgtcattatgtaagacatgagattttaataaataactacattctcacgacatctgttgaatttactaggaacactacagtgactgtatagacagttgaaagcattcttgaaaatcctgctctctccttttaaaagttaacaatctcttttatcagatgtcaagggcaagggtaatgcagtttctgtaaatttatgaaatttctttttctatgtacatgaagacatttagtaagtaacacccccccttcccatgcgcacatgtgcgcatacacacacacacacacacacacacacacacaaacacacacactgtcataaagctaatgatttggggactttaaaaaataggatgtcctccaggaacaatcataaatttatgaaagaaagagtagtttacagactcccctgaaagaagcagtgtatatgtgaagacagtgcaaaaatctctttgccatgtatattatagcgtattcattggtgtgaatagtacaaatgtttccttctggtacaaactctgtgtttgcaaatttacaagaagcattgttttcaaaaagctccccttaaaaaatgtaactggtttatatgagtaagcagttaccgtattgcacttaaatgttatgttgaaggaaatgcagttttgttttctgtagatctgttggttgtaaaccatctataaaactaaagctaaaatgctcatattcagagctgggatcaaaactggtatttaacctttgcatcttcttataattatccttctaagaatataacagaatgtggaagtgtctggactttgagtcttttcaactgagccttctctcaaatctgacaccccctcagaatgcacaaacataagcagaaaaggcaaacaagcttaccttcttttgtgaaaacgtattcattctgtatttttttaaatattcaattcccctaaaaatggggagaaaatattttaaaattgtatattacgacttcaaatttagaactaagaaaaaaatgtatttgggattggtctcagcgctacctagaagaatcaaaggtcatggcttccctcaatattgtcccagccatttctcatatgtatatagtataaaccgtgacaaaacactgcctttatattatttagcaatatgttgtaaatagcattattaagctcttttttgtaataaagaccctttgatttgaatatagtacaataactgaactgataaagtcaatttttgatttttgtttgttttttttagctagaggcaatttcaattgtgaatttttgttgttgtctattgttctgaagactttgcataatttattggtttaatttatcctaatttatttgatgaaggtgtacaattttgtattaccaaggatgtactgtaatattaattgatatgataaacacaatgagactccctgtccatattaaaaagaaaataaaaaggtgcagtagacaattgattttaaaggaaaagttaaaaaaattagtttggcagctactaaattttaaaacaggaaaaaaaaaagttgttgtggggagggtgggaaaggggttttactttgtgtgttttaagcttttgtatactctccaaacttttaccttttgctttgtaccacttaaaggatacagtagtccaattgccttgtgtgccttccatctcctcttaaactgaatgtatgtgcagtatatatgcaagcttgtgcaaaataaaatatacattacaagctcagtgccgtttgattttcttaaagaaagagtgacttttaatttttggacctgtatccaattgtaggacagtaggctagttgtgccagtaatgtcaagtatggagattttctttcactacaattcttcattctgttagcctaacgtgcagctcctagaaacaacctcttttactttagatgcttggaataattgcttggatttctctctctgaaacatctttcaggcttaactttatttagccctgaaacttaaaaaaaa

SEQ ID NO: 383455 - DNA, 8085 bp, Homo sapiens
  misc_feature (3135)..(3135): n is a, c, g, or t
gcactgtcttgttcttgaatgagaaaggaagaaaagagcctcccattactcagacccgtgtaaacattattccccccaggagaaaatggtgttattcaaatgaatcataataaaatagcctctaaacagtttctaagcgggagcctccgtggaactcagcgctccgctcctcccagttcctaagaggtcccgggattcttgagctgtgcccagctgacgagcttttgaagatggcacaataaccgtccagtgatgcctgaccatgacagcacagccctcttaagccggcaaaccaagaggagaagagttgacattggagtgaaaaggacggtagggacagcatctgcattttttgctaaggcaagagcaacgttttttagtgccatgaatccccaaggttctgagcaggatgttgagtattcagtggtgcagcatgcagatggggaaaagtcaaatgtactccgcaagctgctgaagagggcgaactcgtatgaagatgccatgatgccttttccaggagcaaccataatttcccagctgttgaaaaataacatgaacaaaaatggtggcacggagcccagtttccaagccagcggtctctctagtacaggctccgaagtacatcaggaggatatatgcagcaactcttcaagagacagccccccagagtgtctttccccttttggcaggcctactatgagccagtttgatatggatcgcttatgtgatgagcacctgagagcaaagcgcgcccgggttgagaatataattcggggtatgagccattcccccagtgtggcattaaggggcaatgaaaatgaaagagagatggccccgcagtctgtgagtccccgagaaagttacagagaaaacaaacgcaagcaaaagcttccccagcagcagcaacagagtttccagcagctggtttcagcccgaaaagaacagaagcgagaggagcgccgacagctgaaacagcagctggaggacatgcagaaacagctgctccacgtgcaggaaaagttctaccaaatctatgacagcactgattcggaaaatgatgaagatggtaacctgtctgaagacagcatgcgctcggagatcctggatgccagggcccaggactctgtcggaaggtcagataatgagatgtgcgagctagacccaggacagtttattgaccgagctcgagccctgatcagagagcaggaaatggctgaaaacaagccgaagcgagaaggcaacaacaaagaaagagaccatgggccaaactccttacaaccggaaggcaaacatttggctgagaccttgaaacaggaactgaacactgccatgtcgcaagttgtggacactgtggtcaaagtcttttcggccaagccctcccgccaggttcctcaggtcttcccacctctccagatcccccaggccagatttgcagtcaatggggtcattccgaaccccctggacacctttggcaatgtgcagatggccagttccactgaccagacagaagcactgcccctggttgtccgcaaaaactcctctgaccagtctgcctccggcctggtgggcggccaccaccagcccctgcaccagtcgcctctctctgccaccacgggcttcaccacgtccaccttccgccaccccttcccccttcccttgatggcctatccatttcagagcccattaggtgctccctccggctccttctctggaaaagacagagcctctcctgaatccttagacttaactagggataccacgagtctgaggaccaagatgtcatctcaccacctgagccaccacccttgttcaccagcacacccgcccagcaccgccgaagggctctccttgtcgctcataaagtccgagtgcggcgatcttcaagatatgtctgaaatatcaccttattcgggaagtgcaatgcaggaaggattgtcacccaatcacttgaaaaaagcaaagctcatgtttttttatacccgttatcccagctccaatatgctgaagacctacttctccgacgtaaagttcaacagatgcattacctctcagctcatcaagtggtttagcaatttccgtgagttttactacattcagatggagaagtacgcacgtcaagccatcaacgatggggtcaccagtactgaagagctgtctataaccagagactgtgagctgtacagggctctgaacatgcactacaataaagcaaatgactttgaggttccagagagattcctggaagtggctcagatcacattacgggagtttttcaatgccattatcgcaggcaaagatgttgatccttcctggaagaaggccatatacaaggtcatctgcaagctggatagtgaagtccctgagtttttcaaatccccgaactgcctacaagagctgcttcatgagtagaaatttcaacaactctttttgaatgtatgaagagtagcagtcccctttggatgtccaagttatatgtgtctagattttgatttcatatatatgtgtatgggaggcatggatatgttatgaaatcagctggtaattcctcctcatcacgtttctctcattttcttttgttttccattgcaaggggatggttgttttctttctgcctttagtttgcttttgcccaaggcccttaacatttggacacttaaaatagggttaattttcagggaaaaagaatgttggcgtgtgtaaagtctctattagcaatgaagggaatttgttaacgatgcatccacttgattgatgacttattgcaaatggcggttggctgaggaaaacccatgacacagcacaactctacagacagtgatgtgtctcttgtttctactgctaagaaggtctgaaaatttaatgaaaccacttcatacatttaagtattttgtttggtttgaactcaatcagtagcttttccttacatgtttaaaaataattccaatgacagatgagcagctcacttttccaaagtaccccaaaaggccaaattaaaaaagaaaaataatcactctcaagccttgtctaagaaaagaggcaaactctgaaagtcgtaccagtttcttctggaggcaaagcaattttgcacaaaaccagctctctcaagatgagactagaaattcatacctggtcttntagccacctctctaaacttgaaaataggttcttcttcataagtgagcttacatcattcttcataaagaaaaatcctataacttgttatcatttttgcttcagatactaaaaggcactaagtttccaatttacgctgctcaactttgtttatatgcttaaaaggattctgtttacttaacaattttttcccctaaaatactattttctgaatacttccttccagtaaggaataaaggaaagcccaacttggccataaaattcttgcctacactagaagtttgttgacagccattagctgacttgatcgtcatctcctaagaggaacacatatattttcacaagcaattccacactatcctgatgggtatgcaaagtggtgacagtctaactcagtgtttcttcattttaggtataacattttaaagcaattgataatgcctcttccaattcagaagctagtattgaccaaaatgtgagaagagtgtatagcataggaaaatttggggttaacccaaaagacacaattccagcacacataagaaagctagctgctattttatgctttcttccatggttctcctcttttttcccttttatttttccctgtttttcaatgatgtacagtgttccctacttgcattgaaaaaactcgtatggcattcacactttttttcttaggtgggtttttgtgtccagatgcagtaagaattcattgttcatcctaaaactgttttccagacccttccttccccttaggtaatttgatatacacctcctaaaatgacacagtaacaaatctggtatttagaacatatagaacataaatgccattttttaattcaactttaataagaattacatttgactttggagaatacaggtcttgacccatgtgactgactagctgacccgatcgctgtaatttaacgtcatttataaattctgctgatggacaggaatgtatgaactcaattattgtcagcacaaagccttaaaacctgctgactttaaattaaatggtgcagtcctatgatgccctgcaccatccaggggactaacagggcctcgcagtgtagacagagggtgcagccacacgggcgggggcaccagccacctcactctgcacccgcggcctcacacatctcccagctcacactctactaatgcacagagtcattagatccaatttgttatttttctcacttgctttaaaaaaaagcagtttggataatcatgacattggaataaagtgggaaggaaaaattccatcagcacaaaatagggaagtaatcccaacttgtagtcacagttttctgactggctttgttttaaaagaggatggcagtccttgttcgtgtcagtgtgccactgggtttttgctgttccgtgtaattcatatcaactttgtgttgccatttgcaaggtaaaaggcaaagctgtagtgtattcacctatgtagacagattgctagatatctttttgatctggggcgagttcaatattgattccagacttatttggatttttttagtattattttcccctccctttctaatttaaatagacaaattaagcaaaagtgtgtgttcacaaccaaatgttgatgcccttatctactgataatatcctctcaatgttcactgaggcatagaaattatttcagagtagaaattgcagcatgaggataaactcacctctttgttctgaaaatagaactttatcactatgctttccggtggttttcccttttacaatcgaaatcttgtgcctcccaagtgcattggaaaatgacaaaagcctgtctctccaaattcctatttaacagtttgattttttttttttaatcaccatctttcaaatcttagctcaactctcaccaagtgaaaattggctacttgggagaaagttaactttctatggtgggatggtgaaggatgagggacagtttacataggaaaagaaaaaaaaaagtctaaagtccatgttgaaaaaccacactaccacttattttctgctaaccctaaattatttttgcgtatacgcttgaggttatagtctgtgcctagacctaaaatgcaccagcgggggggattttaaaaaatccttcaaaataccagttttttcccaacaagtacaattgttcttgtgccttctgtggctttcgatttcatctttttgactttatttccaattactacagctgcaataaacactagattttttttctggctgtttgacataacgttgatagctatgcatattttgtgtctttttaaaacaaagcgggagaatacgtttttgaagaagagaatttttagaacagtttgataccgcaaattattttttcctcaattgtttgagcagcattcgagttttgaaaattcttgtagaagccaattttttgtaactgtggtgcaaatcttgtgttttcttagcctaatgaaaagtagtatagaagcaatatttcataccatgtgctatatatgtgtgcgcagatgtgtgaacataaaatcacatacacacatatacacacatgtaaaaatatacatatatatatatgcgtgtgaagtggaaagcttaccttttcctatctagatttaagaacctattttagacatttgttatgttttgtgaaaagaatgttctatttgcaacaaaacatttaattcttactgtatctctggctgtttaatgaggacgtttcacattaaatggtaaaacacatggaagatgttagaatgtagtaattatttaagtaaacgttcacccacatattcctgaagtttgctttgtgcctccgagtattatttaattaaagaagtgttttatgtttgcagaatctttgtcactgtactagggatgtgggtgaatatcatttaaaaaaatttaaaacaacaaaaaaaaagcaaaacagaaacactaaagcaagaggggaacttttataaagcaatgtaaatatttaacctcatggctgtcattatgtaagacatgagattttaataaataactacattctcacgacatctgttgaatttactaggaacactacagtgactgtatagacagttgaaagcattcttgaaaatcctgctctctccttttaaaagttaacaatctcttttatcagatgtcaagggcaagggtaatgcagtttctgtaaatttatgaaatttctttttctatgtacatgaagacatttagtaagtaacacccccccttcccatgcgcacatgtgcgcatacacacacacacacacacacacacacacacaaacacacacactgtcataaagctaatgatttggggactttaaaaaataggatgtcctccaggaacaatcataaatttatgaaagaaagagtagtttacagactcccctgaaagaagcagtgtatatgtgaagacagtgcaaaaatctctttgccatgtatattatagcgtattcattggtgtgaatagtacaaatgtttccttctggtacaaactctgtgtttgcaaatttacaagaagcattgttttcaaaaagctccccttaaaaaatgtaactggtttatatgagtaagcagttaccgtattgcacttaaatgttatgttgaaggaaatgcagttttgttttctgtagatctgttggttgtaaaccatctataaaactaaagctaaaatgctcatattcagagctgggatcaaaactggtatttaacctttgcatcttcttataattatccttctaagaatataacagaatgtggaagtgtctggactttgagtcttttcaactgagccttctctcaaatctgacaccccctcagaatgcacaaacataagcagaaaaggcaaacaagcttaccttcttttgtgaaaacgtattcattctgtatttttttaaatattcaattcccctaaaaatggggagaaaatattttaaaattgtatattacgacttcaaatttagaactaagaaaaaaatgtatttgggattggtctcagcgctacctagaagaatcaaaggtcatggcttccctcaatattgtcccagccatttctcatatgtatatagtataaaccgtgacaaaacactgcctttatattatttagcaatatgttgtaaatagcattattaagctcttttttgtaataaagaccctttgatttgaatatagtacaataactgaactgataaagtcaatttttgatttttgtttgttttttttagctagaggcaatttcaattgtgaatttttgttgttgtctattgttctgaagactttgcataatttattggtttaatttatcctaatttatttgatgaaggtgtacaattttgtattaccaaggatgtactgtaatattaattgatatgataaacacaatgagactccctgtccatattaaaaagaaaataaaaaggtgcagtagacaattgattttaaaggaaaagttaaaaaaattagtttggcagctactaaattttaaaacaggaaaaaaaaaagttgttgtggggagggtgggaaaggggttttactttgtgtgttttaagcttttgtatactctccaaacttttaccttttgctttgtaccacttaaaggatacagtagtccaattgccttgtgtgccttccatctcctcttaaactgaatgtatgtgcagtatatatgcaagcttgtgcaaaataaaatatacattacaagctcagtgccgtttgattttcttaaagaaagagtgacttttaatttttggacctgtatccaattgtaggacagtaggctagttgtgccagtaatgtcaagtatggagattttctttcactacaattcttcattctgttagcctaacgtgcagctcctagaaacaacctcttttactttagatgcttggaataattgcttggatttctctctctgaaacatctttcaggcttaactttatttagccctgaaacttaaaaaaaa

SEQ ID NO: 383456 - DNA, 2147 bp, Homo sapiens
cctcagcttcccgagtagctgggactgcaggcgccagcaacctcgcccggctaattttttgtatttttggtagagacggggtttcaccgtgttagccaggagggtctcgatctcctgacctcgtgatctgctcgcctcggcctcccaaagtgctgggattacaggcgtgagccaccacgcccggccaggtcccgaaacttaagcttcatttgtttcgcaaatctgcttctgcctacaagcctggtctcattttcctctacctaaggatcttcctccatgcaatttcggcctaggaggcccttcccgccccttttcgcctagctaactctttcggtactcaaccaccaactcctaatcctccctggtcccccaagtgggctaggggcttcttgggagtccctcgcactgctctaagcatccaggcagagtcattattccgggtgccaggttgctctttttccagcagccttcaggggactcctggctgggcggagtctgtagaggcgcgcggagtcctgggagagcgtcagatgtatttcctttcccttttttcgctcgtgtcccgccgggtggcgctcaccacctccccggaacacgcgagtctcctgtcgcggttccggtcggaattaccccgtggagcacgccgatatggctgcgctgacactgaggggtgtccgggagctgctgaagcgtgtggacctcgcgacggtcccgcggagacatcgatataagaagaaatgggctgccacagagcccaaattccctgctgttcgactggctttgcagaattttgacatgacttacagtgtgcagtttggagatctttggccatcaatccgtgtcagtctcctctcagagcagaagtatggtgcactggtcaataactttgctgcctgggatcatgtaagtgctaagctggagcagctgagtgccaaggattttgtgaatgaagccatctcccactgggaactgcagtctgagggtggccaatctgcagccccatcccctgcctcctgggcctgcagtccgaaccttcgatgcttcacttttgacagaggggatatcagtcgcttccctcctgccagacctggcagcctgggtgtcatggagtactacctgatggatgctgcctccttgctgcctgttctggccctcggcctgcagcctggggacatcgtgcttgacctatgtgcagctcctgggggaaagacactagcgttgcttcagactggctgttgccgcaatcttgctgccaatgatctctccccgtcccgaatagccagactacagaagatccttcacagctatgtgcctgaagagatcagggatggaaatcaagttcgagttacctcatgggatggcaggaaatggggagaactggagggggacacctatgaccgggtgctggtggatgtgccctgtaccacagaccgccactcccttcatgaggaggagaacaacatctttaagcggtcaaggaagaaggagcgacagatattgcctgtgctgcaagtgcagcttcttgcggctggactccttgccaccaaaccaggaggccatgttgtctattctacctgctcactctcacacttacagaacgagtatgtggtgcaaggtgccattgagctcctggccaatcaatacagcatccaggtacaggtggaagatctgactcacttccgaagggttttcatggacacattttgtttcttctcatcctgtcaggttggggagctggtaataccaaacctcatggccaattttggccccatgtacttctgcaaaatgcgtaggctgacatagtatcacccaatccctgaagcaagaatacaaagggtatactctgttggatgcaccagaaactggaaactgggaccagtggcagagatgcactctcggtcctgtctccatcctgttcgtgtctttctgcagttttcggcaataagaagtagaagatttgctgtcctgctgtccaattgtggagcatcagcaggtttccaactcactcattaacccctaccccatctccaggcctgtactaaagtttgctgcccgcttaggggcttagaaggagaagccagtgagcaggctcacactaagttgtaaacataggagaagcatttggccaataaagttgttgaaactct

SEQ ID NO: 383457 - DNA, 4114 bp, Homo sapiens
cctcagcttcccgagtagctgggactgcaggcgccagcaacctcgcccggctaattttttgtatttttggtagagacggggtttcaccgtgttagccaggagggtctcgatctcctgacctcgtgatctgctcgcctcggcctcccaaagtgctgggattacaggcgtgagccaccacgcccggccaggtcccgaaacttaagcttcatttgtttcgcaaatctgcttctgcctacaagcctggtctcattttcctctacctaaggatcttcctccatgcaatttcggcctaggaggcccttcccgccccttttcgcctagctaactctttcggtactcaaccaccaactcctaatcctccctggtcccccaagtgggctaggggcttcttgggagtccctcgcactgctctaagcatccaggcagagtcattattccgggtgccaggttgctctttttccagcagccttcaggggactcctggctgggcggagtctgtagaggcgcgcggagtcctgggagagcgtcagatgtatttcctttcccttttttcgctcgtgtcccgccgggtggcgctcaccacctccccggaacacgcgagtctcctgtcgcggttccggtcggaattaccccgtggagcacgccgatatggctgcgctgacactgaggggtgtccgggagctgctgaagcgtgtggacctcgcgacggtcccgcggagacatcgatataagaagaaatgggctgccacagagcccaaattccctgctgttcgactggctttgcagaattttgacatgacttacagtgtgcagtttggagatctttggccatcaatccgtgtcagtctcctctcagagcagaagtatggtgcactggtcaataactttgctgcctgggatcatgtaagtgctaagctggagcagctgagtgccaaggattttgtgaatgaagccatctcccactgggaactgcagtctgagggtggccaatctgcagccccatcccctgcctcctgggcctgcagtccgaaccttcgatgcttcacttttgacagaggggatatcagtcgcttccctcctgccagacctggcagcctgggtgtcatggagtactacctgatggatgctgcctccttgctgcctgttctggccctcggcctgcagcctggggacatcgtgcttgacctatgtgcagctcctgggggaaagacactagcgttgcttcagactggctgttgccgcaatcttgctgccaatgatctctccccgtcccgaatagccagactacagaagatccttcacagctatgtgcctgaagagatcagggatggaaatcaagttcgagttacctcatgggatggcaggaaatggggagaactggagggggacacctatgaccgggtgctggtggatgtgccctgtaccacagaccgccactcccttcatgaggaggagaacaacatctttaagcggtcaaggaagaaggagcgacagatattgcctgtgctgcaagtgcagcttcttgcggctggactccttgccaccaaaccaggaggccatgttgtctattctacctgctcactctcacacttacagaacgagtatgtggtgcaaggtgccattgagctcctggccaatcaatacagcatccaggtacaggtggaagatctgactcacttccgaagggttttcatggacacattttgtttcttctcatcctgtcaggttggggagctggtaataccaaacctcatggccaattttggccccatgtacttctgcaaaatgcgtaggctgacatagtatcacccaatccctgaagcaagaatacaaagggtatactctgttggatgcaccagaaactggaaactgggaccagtggcagagatgcactctcggtcctgtctccatcctgttcgtgtctttctgcagttttcggcaataagaagtagaagatttgctgtcctgctgtccaattgtggagcatcagcaggtttccaactcactcattaacccctaccccatctccaggcctgtactaaagtttgctgcccgcttaggggcttagaaggagaagccagtgagcaggctcacactaagttgtaaacataggagaagcatttggccaataaagttgttgaaactctatagacctggggctgcagttggggacttcatgtcagtgcaaatgccattagttccatttgtaccagccagttactgagcccctgtcacccttgaagtgagttccacctgaccagtcttgagcagccaacaggctcaattaagcccgcctggtttttccatatggctcatgatctaatttaaggaacaagtaactaaaaatgttaagccagtgcaaaataatctgcttacctactcacattggaaaaaccctctgagctgaataattctggccattcctgctgtcaacaatactgctgcccaaatgtggcttaggaggctgcttctgccacaaaaccgtcatactcttgtgcgtgccttgttctttgttcattcatctagcaggtattcccagacctcgtgtatgacaggtagctagggagctcttggagatgtagcagttgggattgtgggagattactgggcttcctcatcctttagaatggtaactctccttttgctttctgaacacctaggaatttcctgatgtttgttttgtggattccagacttttgttgtttctagtctgcagctgagctctggtgcctgttctttggcccaccccctaatccctaactcttccctcagcatcacagggcttcactgcacacactgtgttcagggcaagatttcatcatttactgactgcatactcgatatgttgtttttgtaactttagccaaaagaaagtaacctttagtggcagggatataaaaaattgctcagggtcacttgcagatattttatttttaaactttttttttttttcctggaaaacatcctgtgcagaaaagggtatataattttagaatacctgaaggcttcttggcttttccactttccttattcctcctcttcctgccactctttttgtcccttctgtctttcctgctcatccttatttgggtattagaggtgtcagttgaggagggactttagctgaggttaagccttcttttgggatttgcattgtaattgagggccctggaagatctctgagactcaaaatcaggtgaagctaggaagatggagctttaaggagcatggctagtgctctgagtaggaccgtaaccgcctccgtgcgtggcatatggtccctgcatgctgttcactctgtatagtacttagtattcgctgaggctaagaggcctcaggtgcctgggcttctgcccttggactcctggatatccagcctagtgctaattgaatgctaagcagtggtaattcaaaatgagagggtcccctgcctctagagtcatcatctaattggggacaggcagacctagataagaaaagcagagaactactttggaaaacagtttatctgctgtaattgaacattcagctaccctataacccagttaatccaatactggggataaatcctagagaaactcatacatgtacaccaggagatgtgtacaagaatattcatagcaaccctattcacaaaagcaaaagcctagaaataacccagatgcccatgagcaagagagtggacaagtaaactggaatattcacataatagaacattatacaattgtcaaatgaactataatgatacctaaccatatggatgaatctgagcaataaaataattaagtgaaaaaagtttaatcccagaagagtaaatgtagcatgatgccctttctaaatgaaaggttttttcttttctatggagttattctttacatacaatatagttcataaattttaaatatattgtttaataaattttgataattgtatataatagtatagtcaccatcaagatgtagaaaatagaaaataggctaggcacagtggctcacgcctgtaatctcaacactttgggaggccaaggtgggaagatcacttgatcccaggaattctagatcagcttggacaatgtagtgagacctggtctttaccaaaaaaaaaaaaaaaaaaa

SEQ ID NO: 383458 - DNA, 3994 bp, Homo sapiens
cctcagcttcccgagtagctgggactgcaggcgccagcaacctcgcccggctaattttttgtatttttggtagagacggggtttcaccgtgttagccaggagggtctcgatctcctgacctcgtgatctgctcgcctcggcctcccaaagtgctgggattacaggcgtgagccaccacgcccggccaggtcccgaaacttaagcttcatttgtttcgcaaatctgcttctgcctacaagcctggtctcattttcctctacctaaggatcttcctccatgcaatttcggcctaggaggcccttcccgccccttttcgcctagctaactctttcggtactcaaccaccaactcctaatcctccctggtcccccaagtgggctaggggcttcttgggagtccctcgcactgctctaagcatccaggcagagtcattattccgggtgccaggttgctctttttccagcagccttcaggggactcctggctgggcggagtctgtagaggcgcgcggagtcctgggagagcgtcagatgtatttcctttcccttttttcgctcgtgtcccgccgggtggcgctcaccacctccccggaacacgcgagtctcctgtcgcggttccggtcggaattaccccgtggagcacgccgatatggctgcgctgacactgaggggtgtccgggagctgctgaagcgtgtggacctcgcgacggtcccgcggagacatcgatataagaagaaatgggctgccacagagcccaaattccctgctgttcgactggctttgcagaattttgacatgacttacagtgtgcagtttggagatctttggccatcaatccgtgtcagtctcctctcagagcagaagtatggtgcactggtcaataactttgctgcctgggatcatgtaagtgctaagctggagcagctgagtgccaaggattttgtgaatgaagccatctcccactgggaactgcagtctgagggtggccaatctgcagccccatcccctgcctcctgggcctgcagtccgaaccttcgatgcttcacttttgacagaggggatatcagtcgcttccctcctgccagacctggcagcctgggtgtcatggagtactacctgatggatgctgcctccttgctgcctgttctggccctcggcctgcagcctggggacatcgtgcttgactatgtgcctgaagagatcagggatggaaatcaagttcgagttacctcatgggatggcaggaaatggggagaactggagggggacacctatgaccgggtgctggtggatgtgccctgtaccacagaccgccactcccttcatgaggaggagaacaacatctttaagcggtcaaggaagaaggagcgacagatattgcctgtgctgcaagtgcagcttcttgcggctggactccttgccaccaaaccaggaggccatgttgtctattctacctgctcactctcacacttacagaacgagtatgtggtgcaaggtgccattgagctcctggccaatcaatacagcatccaggtacaggtggaagatctgactcacttccgaagggttttcatggacacattttgtttcttctcatcctgtcaggttggggagctggtaataccaaacctcatggccaattttggccccatgtacttctgcaaaatgcgtaggctgacatagtatcacccaatccctgaagcaagaatacaaagggtatactctgttggatgcaccagaaactggaaactgggaccagtggcagagatgcactctcggtcctgtctccatcctgttcgtgtctttctgcagttttcggcaataagaagtagaagatttgctgtcctgctgtccaattgtggagcatcagcaggtttccaactcactcattaacccctaccccatctccaggcctgtactaaagtttgctgcccgcttaggggcttagaaggagaagccagtgagcaggctcacactaagttgtaaacataggagaagcatttggccaataaagttgttgaaactctatagacctggggctgcagttggggacttcatgtcagtgcaaatgccattagttccatttgtaccagccagttactgagcccctgtcacccttgaagtgagttccacctgaccagtcttgagcagccaacaggctcaattaagcccgcctggtttttccatatggctcatgatctaatttaaggaacaagtaactaaaaatgttaagccagtgcaaaataatctgcttacctactcacattggaaaaaccctctgagctgaataattctggccattcctgctgtcaacaatactgctgcccaaatgtggcttaggaggctgcttctgccacaaaaccgtcatactcttgtgcgtgccttgttctttgttcattcatctagcaggtattcccagacctcgtgtatgacaggtagctagggagctcttggagatgtagcagttgggattgtgggagattactgggcttcctcatcctttagaatggtaactctccttttgctttctgaacacctaggaatttcctgatgtttgttttgtggattccagacttttgttgtttctagtctgcagctgagctctggtgcctgttctttggcccaccccctaatccctaactcttccctcagcatcacagggcttcactgcacacactgtgttcagggcaagatttcatcatttactgactgcatactcgatatgttgtttttgtaactttagccaaaagaaagtaacctttagtggcagggatataaaaaattgctcagggtcacttgcagatattttatttttaaactttttttttttttcctggaaaacatcctgtgcagaaaagggtatataattttagaatacctgaaggcttcttggcttttccactttccttattcctcctcttcctgccactctttttgtcccttctgtctttcctgctcatccttatttgggtattagaggtgtcagttgaggagggactttagctgaggttaagccttcttttgggatttgcattgtaattgagggccctggaagatctctgagactcaaaatcaggtgaagctaggaagatggagctttaaggagcatggctagtgctctgagtaggaccgtaaccgcctccgtgcgtggcatatggtccctgcatgctgttcactctgtatagtacttagtattcgctgaggctaagaggcctcaggtgcctgggcttctgcccttggactcctggatatccagcctagtgctaattgaatgctaagcagtggtaattcaaaatgagagggtcccctgcctctagagtcatcatctaattggggacaggcagacctagataagaaaagcagagaactactttggaaaacagtttatctgctgtaattgaacattcagctaccctataacccagttaatccaatactggggataaatcctagagaaactcatacatgtacaccaggagatgtgtacaagaatattcatagcaaccctattcacaaaagcaaaagcctagaaataacccagatgcccatgagcaagagagtggacaagtaaactggaatattcacataatagaacattatacaattgtcaaatgaactataatgatacctaaccatatggatgaatctgagcaataaaataattaagtgaaaaaagtttaatcccagaagagtaaatgtagcatgatgccctttctaaatgaaaggttttttcttttctatggagttattctttacatacaatatagttcataaattttaaatatattgtttaataaattttgataattgtatataatagtatagtcaccatcaagatgtagaaaatagaaaataggctaggcacagtggctcacgcctgtaatctcaacactttgggaggccaaggtgggaagatcacttgatcccaggaattctagatcagcttggacaatgtagtgagacctggtctttaccaaaaaaaaaaaaaaaaaaa

SEQ ID NO: 383459 - DNA, 2911 bp, Homo sapiens
caaatatactattttccactcattatttcacaattgtctaccaagttaaaatgaagaactttgtcaggtactctgcaaaggagggatgggcagagggaatatttcacaaacttaggccaggggcctaaaacatctctggcctaaggaagagaagcctataaggatctttaatactttaccctttaacactctgggtaggtgctggtggatgtgccctgtaccacagaccgccactcccttcatgaggaggagaacaacatctttaagcggtcaaggaagaaggagcgacagatattgcctgtgctgcaagtgcagcttcttgcggctggactccttgccaccaaaccaggaggccatgttgtctattctacctgctcactctcacacttacagaacgagtatgtggtgcaaggtgccattgagctcctggccaatcaatacagcatccaggtacaggtggaagatctgactcacttccgaagggttttcatggacacattttgtttcttctcatcctgtcaggttggggagctggtaataccaaacctcatggccaattttggccccatgtacttctgcaaaatgcgtaggctgacatagtatcacccaatccctgaagcaagaatacaaagggtatactctgttggatgcaccagaaactggaaactgggaccagtggcagagatgcactctcggtcctgtctccatcctgttcgtgtctttctgcagttttcggcaataagaagtagaagatttgctgtcctgctgtccaattgtggagcatcagcaggtttccaactcactcattaacccctaccccatctccaggcctgtactaaagtttgctgcccgcttaggggcttagaaggagaagccagtgagcaggctcacactaagttgtaaacataggagaagcatttggccaataaagttgttgaaactctatagacctggggctgcagttggggacttcatgtcagtgcaaatgccattagttccatttgtaccagccagttactgagcccctgtcacccttgaagtgagttccacctgaccagtcttgagcagccaacaggctcaattaagcccgcctggtttttccatatggctcatgatctaatttaaggaacaagtaactaaaaatgttaagccagtgcaaaataatctgcttacctactcacattggaaaaaccctctgagctgaataattctggccattcctgctgtcaacaatactgctgcccaaatgtggcttaggaggctgcttctgccacaaaaccgtcatactcttgtgcgtgccttgttctttgttcattcatctagcaggtattcccagacctcgtgtatgacaggtagctagggagctcttggagatgtagcagttgggattgtgggagattactgggcttcctcatcctttagaatggtaactctccttttgctttctgaacacctaggaatttcctgatgtttgttttgtggattccagacttttgttgtttctagtctgcagctgagctctggtgcctgttctttggcccaccccctaatccctaactcttccctcagcatcacagggcttcactgcacacactgtgttcagggcaagatttcatcatttactgactgcatactcgatatgttgtttttgtaactttagccaaaagaaagtaacctttagtggcagggatataaaaaattgctcagggtcacttgcagatattttatttttaaactttttttttttttcctggaaaacatcctgtgcagaaaagggtatataattttagaatacctgaaggcttcttggcttttccactttccttattcctcctcttcctgccactctttttgtcccttctgtctttcctgctcatccttatttgggtattagaggtgtcagttgaggagggactttagctgaggttaagccttcttttgggatttgcattgtaattgagggccctggaagatctctgagactcaaaatcaggtgaagctaggaagatggagctttaaggagcatggctagtgctctgagtaggaccgtaaccgcctccgtgcgtggcatatggtccctgcatgctgttcactctgtatagtacttagtattcgctgaggctaagaggcctcaggtgcctgggcttctgcccttggactcctggatatccagcctagtgctaattgaatgctaagcagtggtaattcaaaatgagagggtcccctgcctctagagtcatcatctaattggggacaggcagacctagataagaaaagcagagaactactttggaaaacagtttatctgctgtaattgaacattcagctaccctataacccagttaatccaatactggggataaatcctagagaaactcatacatgtacaccaggagatgtgtacaagaatattcatagcaaccctattcacaaaagcaaaagcctagaaataacccagatgcccatgagcaagagagtggacaagtaaactggaatattcacataatagaacattatacaattgtcaaatgaactataatgatacctaaccatatggatgaatctgagcaataaaataattaagtgaaaaaagtttaatcccagaagagtaaatgtagcatgatgccctttctaaatgaaaggttttttcttttctatggagttattctttacatacaatatagttcataaattttaaatatattgtttaataaattttgataattgtatataatagtatagtcaccatcaagatgtagaaaatagaaaataggctaggcacagtggctcacgcctgtaatctcaacactttgggaggccaaggtgggaagatcacttgatcccaggaattctagatcagcttggacaatgtagtgagacctggtctttaccaaaaaaaaaaaaaaaaaaa

SEQ ID NO: 383460 - DNA, 1661 bp, Homo sapiens
cctcagcttcccgagtagctgggactgcaggcgccagcaacctcgcccggctaattttttgtatttttggtagagacggggtttcaccgtgttagccaggagggtctcgatctcctgacctcgtgatctgctcgcctcggcctcccaaagtgctgggattacaggcgtgagccaccacgcccggccaggtcccgaaacttaagcttcatttgtttcgcaaatctgcttctgcctacaagcctggtctcattttcctctacctaaggatcttcctccatgcaatttcggcctaggaggcccttcccgccccttttcgcctagctaactctttcggtactcaaccaccaactcctaatcctccctggtcccccaagtgggctaggggcttcttgggagtccctcgcactgctctaagcatccaggcagagtcattattccgggtgccaggttgctctttttccagcagccttcaggggactcctggctgggcggagtctgtagaggcgcgcggagtcctgggagagcgtcagatgtatttcctttcccttttttcgctcgtgtcccgccgggtggcgctcaccacctccccggaacacgcgagtctcctgtcgcggttccggtcggaattaccccgtggagcacgccgatatggctgcgctgacactgaggggtgtccgggagctgctgaagcgtgtggacctcgcgacggtcccgcggagacatcgatataagaagaaatgggctgccacagagcccaaattccctgctgttcgactggctttgcagaattttgacatgacttacagtgtgcagtttggagatctttggccatcaatccgtgtcagtctcctctcagagcagaagtatggtgcactggtcaataactttgctgcctgggatcatgtaagtgctaagctggagcagctgagtgccaaggattttgtgaatgaagccatctcccactgggaactgcagtctgagggtggccaatctgcagccccatcccctgcctcctgggcctgcagtccgaaccttcgatgcttcacttttgacagaggggatatcagtcgcttccctcctgccaggtaggatctggagccatgactggagtggtcctgagtgtctgctggaagtagacatgttgagacccagcttctaccctctgtaataaggaccataatattgctaatatttatggcatgtttatacagactaggcattttttgaggtgctgtacgtatgttatctctttttgttctgtcagcagccttatgaagtaggtaatattattgctcttttacatttggagaaactgaggtacagagaagttaagattcttacttgctttaggtccctcagatggtaagtggtgtgactaatatttagacccagaacctgcactttgaacccactctgctctgtgcctctggtagaaaacagccaccttttacatgagcactcactgggccctctcaagttgaaatgtgtgttattcacagcagtcttctcattttgccctcacagccacccatcaaagtgaataggaaaagtaacttcatggtagcaaagaggtagtgggcctttcctaggaaatagggctggtctaggggcacaaacttggtattagactgggaaaaagaaaggagaagttcagtttcttg

SEQ ID NO: 383461 - DNA, 1014 bp, Homo sapiens
cctcagcttcccgagtagctgggactgcaggcgccagcaacctcgcccggctaattttttgtatttttggtagagacggggtttcaccgtgttagccaggagggtctcgatctcctgacctcgtgatctgctcgcctcggcctcccaaagtgctgggattacaggcgtgagccaccacgcccggccaggtcccgaaacttaagcttcatttgtttcgcaaatctgcttctgcctacaagcctggtctcattttcctctacctaaggatcttcctccatgcaatttcggcctaggaggcccttcccgccccttttcgcctagctaactctttcggtactcaaccaccaactcctaatcctccctggtcccccaagtgggctaggggcttcttgggagtccctcgcactgctctaagcatccaggcagagtcattattccgggtgccaggttgctctttttccagcagccttcaggggactcctggctgggcggagtctgtagaggcgcgcggagtcctgggagagcgtcagatgtatttcctttcccttttttcgctcgtgtcccgccgggtggcgctcaccacctccccggaacacgcgagtctcctgtcgcggttccggtcggaattaccccgtggagcacgccgatatggctgcgctgacactgaggggtgtccgggagctgctgaagcgtgtggacctcgcgacggtcccgcggagacatcgatataagaagaaatggcccggtcgccctcacccctcggaaaataccatagcgaccttgcctgcactcctgggtctccgccgccttgcaggaaaggattcagccccttcctcaacctcgagctgcctctggcgaccgggcaaggttacagcgaccaccctgtccatactgccggcccaaaccctggcaaaaggtgcaacgaatcctctcatcctctggactctccttgcttctccagagaccctttttcttgcctcactggaagccctggaatttcttctatgaccggca

SEQ ID NO: 383462 - DNA, 2027 bp, Homo sapiens
cctcagcttcccgagtagctgggactgcaggcgccagcaacctcgcccggctaattttttgtatttttggtagagacggggtttcaccgtgttagccaggagggtctcgatctcctgacctcgtgatctgctcgcctcggcctcccaaagtgctgggattacaggcgtgagccaccacgcccggccaggtcccgaaacttaagcttcatttgtttcgcaaatctgcttctgcctacaagcctggtctcattttcctctacctaaggatcttcctccatgcaatttcggcctaggaggcccttcccgccccttttcgcctagctaactctttcggtactcaaccaccaactcctaatcctccctggtcccccaagtgggctaggggcttcttgggagtccctcgcactgctctaagcatccaggcagagtcattattccgggtgccaggttgctctttttccagcagccttcaggggactcctggctgggcggagtctgtagaggcgcgcggagtcctgggagagcgtcagatgtatttcctttcccttttttcgctcgtgtcccgccgggtggcgctcaccacctccccggaacacgcgagtctcctgtcgcggttccggtcggaattaccccgtggagcacgccgatatggctgcgctgacactgaggggtgtccgggagctgctgaagcgtgtggacctcgcgacggtcccgcggagacatcgatataagaagaaatgggctgccacagagcccaaattccctgctgttcgactggctttgcagaattttgacatgacttacagtgtgcagtttggagatctttggccatcaatccgtgtcagtctcctctcagagcagaagtatggtgcactggtcaataactttgctgcctgggatcatgtaagtgctaagctggagcagctgagtgccaaggattttgtgaatgaagccatctcccactgggaactgcagtctgagggtggccaatctgcagccccatcccctgcctcctgggcctgcagtccgaaccttcgatgcttcacttttgacagaggggatatcagtcgcttccctcctgccagacctggcagcctgggtgtcatggagtactacctgatggatgctgcctccttgctgcctgttctggccctcggcctgcagcctggggacatcgtgcttgactatgtgcctgaagagatcagggatggaaatcaagttcgagttacctcatgggatggcaggaaatggggagaactggagggggacacctatgaccgggtgctggtggatgtgccctgtaccacagaccgccactcccttcatgaggaggagaacaacatctttaagcggtcaaggaagaaggagcgacagatattgcctgtgctgcaagtgcagcttcttgcggctggactccttgccaccaaaccaggaggccatgttgtctattctacctgctcactctcacacttacagaacgagtatgtggtgcaaggtgccattgagctcctggccaatcaatacagcatccaggtacaggtggaagatctgactcacttccgaagggttttcatggacacattttgtttcttctcatcctgtcaggttggggagctggtaataccaaacctcatggccaattttggccccatgtacttctgcaaaatgcgtaggctgacatagtatcacccaatccctgaagcaagaatacaaagggtatactctgttggatgcaccagaaactggaaactgggaccagtggcagagatgcactctcggtcctgtctccatcctgttcgtgtctttctgcagttttcggcaataagaagtagaagatttgctgtcctgctgtccaattgtggagcatcagcaggtttccaactcactcattaacccctaccccatctccaggcctgtactaaagtttgctgcccgcttaggggcttagaaggagaagccagtgagcaggctcacactaagttgtaaacataggagaagcatttggccaataaagttgttgaaactct

SEQ ID NO: 383463 - DNA, 4179 bp, Homo sapiens
cctcagcttcccgagtagctgggactgcaggcgccagcaacctcgcccggctaattttttgtatttttggtagagacggggtttcaccgtgttagccaggagggtctcgatctcctgacctcgtgatctgctcgcctcggcctcccaaagtgctgggattacaggcgtgagccaccacgcccggccaggtcccgaaacttaagcttcatttgtttcgcaaatctgcttctgcctacaagcctggtctcattttcctctacctaaggatcttcctccatgcaatttcggcctaggaggcccttcccgccccttttcgcctagctaactctttcggtactcaaccaccaactcctaatcctccctggtcccccaagtgggctaggggcttcttgggagtccctcgcactgctctaagcatccaggcagagtcattattccgggtgccaggttgctctttttccagcagccttcaggggactcctggctgggcggagtctgtagaggcgcgcggagtcctgggagagcgtcagatgtatttcctttcccttttttcgctcgtgtcccgccgggtggcgctcaccacctccccggaacacgcgagtctcctgtcgcggttccggtcggaattaccccgtggagcacgccgatatggctgcgctgacactgaggggtgtccgggagctgctgaagcgtgtggacctcgcgacggtcccgcggagacatcgatataagaagaaatgggctgccacagagcccaaattccctgctgttcgactggctttgcagaattttgacatgacttacagtgtgcagtttggagatctttggccatcaatccgtgtcagtctcctctcagagcagaagtatggtgcactggtcaataactttgctgcctgggatcatgtaagtgctaagctggagcagctgagtgccaaggattttgtgaatgaagccatctcccactgggaactgcagtctgagggtggccaatctgcagccccatcccctgcctcctgggcctgcagtccgaaccttcgatgcttcacttttgacagaggggatatcagtcgcttccctcctgccagacctggcagcctgggtgtcatggagtactacctgatggatgctgcctccttgctgcctgttctggccctcggcctgcagcctggggacatcgtgcttgacctatgtgcagctcctgggggaaagacactagcgttgcttcagactggctgttgccgcaatcttgctgccaatgatctctccccgtcccgaatagccagactacagaagatccttcacagctatgtgcctgaagagatcagggatggaaatcaagttcgagttacctcatgggatggcaggaaatggggagaactggagggggacacctatgaccgggtgctggtggatgtgccctgtaccacagaccgccactcccttcatgaggaggagaacaacatctttaagcggtcaaggaagaaggagcgacagatattgcctgtgctgcaagtgcagcttcttgcggctggactccttgccaccaaaccaggaggccatgttgtctattctacctgctcactctcacacttacagaacgagtatgtggtgcaaggtgccattgagctcctggccaatcaatacagcatccaggtacaggtggaagatctgactcacttccgaagggttttcatggacacattttgtttcttctcatcctgtcaggttggggagctggtaataccaaacctcatggccaattttggccccatgtacttctgcaaaatgcgtaggctgacatagtatcacccaatccctgaagcaagaatacaaagggtatactctgttggatgcaccagaaactggaaactgggaccagtggcagagatgcactctcggtcctgtctccatcctgttcgtgtctttctgcagttttcggcaataagaagtagaagatttgctgtcctgctgtccaattgtggagcatcagcaggtttccaactcactcattaacccctaccccatctccaggcctgtactaaagtttgctgcccgcttaggggcttagaaggagaagccagtgagcaggctcacactaagttgtaaacataggagaagcatttggccaataaagttgttgaaactctatagacctggggctgcagttggggacttcatgtcagtgcaaatgccattagttccatttgtaccagccagttactgagcccctgtcacccttgaagtgagttccacctgaccagtcttgagcagccaacaggctcaattaagcccgcctggtttttccatatggctcatgatctaatttaaggaacaagtaactaaaaatgttaagccagtgcaaaataatctgcttacctactcacattggaaaaaccctctgagctgaataattctggccattcctgctgtcaacaatactgctgcccaaatgtggcttaggaggctgcttctgccacaaaaccgtcatactcttgtgcgtgccttgttctttgttcattcatctagcaggtattcccagacctcgtgtatgacaggtagctagggagctcttggagatgtagcagttgggattgtgggagattactgggcttcctcatcctttagaatggtaactctccttttgctttctgaacacctaggaatttcctgatgtttgttttgtggattccagacttttgttgtttctagtctgcagctgagctctggtgcctgttctttggcccaccccctaatccctaactcttccctcagcatcacagggcttcactgcacacactgtgttcagggcaagatttcatcatttactgactgcatactcgatatgttgtttttgtaactttagccaaaagaaagtaacctttagtggcagggatataaaaaattgctcagggtcacttgcagatattttatttttaaactttttttttttttcctggaaaacatcctgtgcagaaaagggtatataattttagaatacctgaaggcttcttggcttttccactttccttattcctcctcttcctgccactctttttgtcccttctgtctttcctgctcatccttatttgggtattagaggtgtcagttgaggagggactttagctgaggttaagccttcttttgggatttgcattgtaattgagggccctggaagatctctgagactcaaaatcaggtgaagctaggaagatggagctttaaggagcatggctagtgctctgagtaggaccgtaaccgcctccgtgcgtggcatatggtccctgcatgctgttcactctgtatagtacttagtattcgctgaggctaagaggcctcaggtgcctgggcttctgcccttggactcctggatatccagcctagtgctaattgaatgctaagcagtggtaattcaaaatgagagggtcccctgcctctagagtcatcatctaattggggacaggcagacctagataagaaaagcagagaactactttggaaaacagtttatctgctgtaattgaacattcagctaccctataacccagttaatccaatactggggataaatcctagagaaactcatacatgtacaccaggagatgtgtacaagaatattcatagcaaccctattcacaaaagcaaaagcctagaaataacccagatgcccatgagcaagagagtggacaagtaaactggaatattcacataatagaacattatacaattgtcaaatgaactataatgatacctaaccatatggatgaatctgagcaataaaataattaagtgaaaaaagtttaatcccagaagagtaaatgtagcatgatgccctttctaaatgaaaggttttttcttttctatggagttattctttacatacaatatagttcataaattttaaatatattgtttaataaattttgataattgtatataatagtatagtcaccatcaagatgtagaaaatagaaaataggcatgagccactgcgcccagccacaatctgaaattcctttcttgaaatgtcgcttatatttctctccttcctagcattcctaccttaggtagggccttatcatttctcactgatcaaaggcagtagcctcaaaactcatttctattactccaatcagccctaaattcttccattctcccccatcctctcatgccaccccttat

SEQ ID NO: 383464 - DNA, 4289 bp, Homo sapiens
cctcagcttcccgagtagctgggactgcaggcgccagcaacctcgcccggctaattttttgtatttttggtagagacggggtttcaccgtgttagccaggagggtctcgatctcctgacctcgtgatctgctcgcctcggcctcccaaagtgctgggattacaggcgtgagccaccacgcccggccaggtcccgaaacttaagcttcatttgtttcgcaaatctgcttctgcctacaagcctggtctcattttcctctacctaaggatcttcctccatgcaatttcggcctaggaggcccttcccgccccttttcgcctagctaactctttcggtactcaaccaccaactcctaatcctccctggtcccccaagtgggctaggggcttcttgggagtccctcgcactgctctaagcatccaggcagagtcattattccgggtgccaggttgctctttttccagcagccttcaggggactcctggctgggcggagtctgtagaggcgcgcggagtcctgggagagcgtcagatgtatttcctttcccttttttcgctcgtgtcccgccgggtggcgctcaccacctccccggaacacgcgagtctcctgtcgcggttccggtcggaattaccccgtggagcacgccgatatggctgcgctgacactgaggggtgtccgggagctgctgaagcgtgtggacctcgcgacggtcccgcggagacatcgatataagaagaaatggcccggtcgccctcacccctcggaaaataccatagcgaccttgcctgcactcctgggtctccgccgccttgcaggaaaggattcagccccttcctcaacctcgagctgcctctggcgaccgggcaaggttacagcgaccaccctgtccatactgccggcccaaaccctggcaaaaggctgccacagagcccaaattccctgctgttcgactggctttgcagaattttgacatgacttacagtgtgcagtttggagatctttggccatcaatccgtgtcagtctcctctcagagcagaagtatggtgcactggtcaataactttgctgcctgggatcatgtaagtgctaagctggagcagctgagtgccaaggattttgtgaatgaagccatctcccactgggaactgcagtctgagggtggccaatctgcagccccatcccctgcctcctgggcctgcagtccgaaccttcgatgcttcacttttgacagaggggatatcagtcgcttccctcctgccagacctggcagcctgggtgtcatggagtactacctgatggatgctgcctccttgctgcctgttctggccctcggcctgcagcctggggacatcgtgcttgacctatgtgcagctcctgggggaaagacactagcgttgcttcagactggctgttgccgcaatcttgctgccaatgatctctccccgtcccgaatagccagactacagaagatccttcacagctatgtgcctgaagagatcagggatggaaatcaagttcgagttacctcatgggatggcaggaaatggggagaactggagggggacacctatgaccgggtgctggtggatgtgccctgtaccacagaccgccactcccttcatgaggaggagaacaacatctttaagcggtcaaggaagaaggagcgacagatattgcctgtgctgcaagtgcagcttcttgcggctggactccttgccaccaaaccaggaggccatgttgtctattctacctgctcactctcacacttacagaacgagtatgtggtgcaaggtgccattgagctcctggccaatcaatacagcatccaggtacaggtggaagatctgactcacttccgaagggttttcatggacacattttgtttcttctcatcctgtcaggttggggagctggtaataccaaacctcatggccaattttggccccatgtacttctgcaaaatgcgtaggctgacatagtatcacccaatccctgaagcaagaatacaaagggtatactctgttggatgcaccagaaactggaaactgggaccagtggcagagatgcactctcggtcctgtctccatcctgttcgtgtctttctgcagttttcggcaataagaagtagaagatttgctgtcctgctgtccaattgtggagcatcagcaggtttccaactcactcattaacccctaccccatctccaggcctgtactaaagtttgctgcccgcttaggggcttagaaggagaagccagtgagcaggctcacactaagttgtaaacataggagaagcatttggccaataaagttgttgaaactctatagacctggggctgcagttggggacttcatgtcagtgcaaatgccattagttccatttgtaccagccagttactgagcccctgtcacccttgaagtgagttccacctgaccagtcttgagcagccaacaggctcaattaagcccgcctggtttttccatatggctcatgatctaatttaaggaacaagtaactaaaaatgttaagccagtgcaaaataatctgcttacctactcacattggaaaaaccctctgagctgaataattctggccattcctgctgtcaacaatactgctgcccaaatgtggcttaggaggctgcttctgccacaaaaccgtcatactcttgtgcgtgccttgttctttgttcattcatctagcaggtattcccagacctcgtgtatgacaggtagctagggagctcttggagatgtagcagttgggattgtgggagattactgggcttcctcatcctttagaatggtaactctccttttgctttctgaacacctaggaatttcctgatgtttgttttgtggattccagacttttgttgtttctagtctgcagctgagctctggtgcctgttctttggcccaccccctaatccctaactcttccctcagcatcacagggcttcactgcacacactgtgttcagggcaagatttcatcatttactgactgcatactcgatatgttgtttttgtaactttagccaaaagaaagtaacctttagtggcagggatataaaaaattgctcagggtcacttgcagatattttatttttaaactttttttttttttcctggaaaacatcctgtgcagaaaagggtatataattttagaatacctgaaggcttcttggcttttccactttccttattcctcctcttcctgccactctttttgtcccttctgtctttcctgctcatccttatttgggtattagaggtgtcagttgaggagggactttagctgaggttaagccttcttttgggatttgcattgtaattgagggccctggaagatctctgagactcaaaatcaggtgaagctaggaagatggagctttaaggagcatggctagtgctctgagtaggaccgtaaccgcctccgtgcgtggcatatggtccctgcatgctgttcactctgtatagtacttagtattcgctgaggctaagaggcctcaggtgcctgggcttctgcccttggactcctggatatccagcctagtgctaattgaatgctaagcagtggtaattcaaaatgagagggtcccctgcctctagagtcatcatctaattggggacaggcagacctagataagaaaagcagagaactactttggaaaacagtttatctgctgtaattgaacattcagctaccctataacccagttaatccaatactggggataaatcctagagaaactcatacatgtacaccaggagatgtgtacaagaatattcatagcaaccctattcacaaaagcaaaagcctagaaataacccagatgcccatgagcaagagagtggacaagtaaactggaatattcacataatagaacattatacaattgtcaaatgaactataatgatacctaaccatatggatgaatctgagcaataaaataattaagtgaaaaaagtttaatcccagaagagtaaatgtagcatgatgccctttctaaatgaaaggttttttcttttctatggagttattctttacatacaatatagttcataaattttaaatatattgtttaataaattttgataattgtatataatagtatagtcaccatcaagatgtagaaaatagaaaataggctaggcacagtggctcacgcctgtaatctcaacactttgggaggccaaggtgggaagatcacttgatcccaggaattctagatcagcttggacaatgtagtgagacctggtctttaccaaaaaaaaaaaaaaaaaaa

SEQ ID NO: 383465 - DNA, 3777 bp, Homo sapiens
cctcagcttcccgagtagctgggactgcaggcgccagcaacctcgcccggctaattttttgtatttttggtagagacggggtttcaccgtgttagccaggagggtctcgatctcctgacctcgtgatctgctcgcctcggcctcccaaagtgctgggattacaggcgtgagccaccacgcccggccaggtcccgaaacttaagcttcatttgtttcgcaaatctgcttctgcctacaagcctggtctcattttcctctacctaaggatcttcctccatgcaatttcggcctaggaggcccttcccgccccttttcgcctagctaactctttcggtactcaaccaccaactcctaatcctccctggtcccccaagtgggctaggggcttcttgggagtccctcgcactgctctaagcatccaggcagagtcattattccgggtgccaggttgctctttttccagcagccttcaggggactcctggctgggcggagtctgtagaggcgcgcggagtcctgggagagcgtcagatgtatttcctttcccttttttcgctcgtgtcccgccgggtggcgctcaccacctccccggaacacgcgagtctcctgtcgcggttccggtcggaattaccccgtggagcacgccgatatggctgcgctgacactgaggggtgtccgggagctgctgaagcgtgtggacctcgcgacggtcccgcggagacatcgatataagaagaaatgggctgccacagagcccaaattccctgctgttcgactggctttgcagaattttgacatgacttacagtgtgcagtttggagatctttggccatcaatccgtgtcagtctcctctcagagcagaagtatggtgcactggtcaataactttgctgcctgggatcatgcaatcttgctgccaatgatctctccccgtcccgaatagccagactacagaagatccttcacagctatgtgcctgaagagatcagggatggaaatcaagttcgagttacctcatgggatggcaggaaatggggagaactggagggggacacctatgaccgggtgctggtggatgtgccctgtaccacagaccgccactcccttcatgaggaggagaacaacatctttaagcggtcaaggaagaaggagcgacagatattgcctgtgctgcaagtgcagcttcttgcggctggactccttgccaccaaaccaggaggccatgttgtctattctacctgctcactctcacacttacagaacgagtatgtggtgcaaggtgccattgagctcctggccaatcaatacagcatccaggtacaggtggaagatctgactcacttccgaagggttttcatggacacattttgtttcttctcatcctgtcaggttggggagctggtaataccaaacctcatggccaattttggccccatgtacttctgcaaaatgcgtaggctgacatagtatcacccaatccctgaagcaagaatacaaagggtatactctgttggatgcaccagaaactggaaactgggaccagtggcagagatgcactctcggtcctgtctccatcctgttcgtgtctttctgcagttttcggcaataagaagtagaagatttgctgtcctgctgtccaattgtggagcatcagcaggtttccaactcactcattaacccctaccccatctccaggcctgtactaaagtttgctgcccgcttaggggcttagaaggagaagccagtgagcaggctcacactaagttgtaaacataggagaagcatttggccaataaagttgttgaaactctatagacctggggctgcagttggggacttcatgtcagtgcaaatgccattagttccatttgtaccagccagttactgagcccctgtcacccttgaagtgagttccacctgaccagtcttgagcagccaacaggctcaattaagcccgcctggtttttccatatggctcatgatctaatttaaggaacaagtaactaaaaatgttaagccagtgcaaaataatctgcttacctactcacattggaaaaaccctctgagctgaataattctggccattcctgctgtcaacaatactgctgcccaaatgtggcttaggaggctgcttctgccacaaaaccgtcatactcttgtgcgtgccttgttctttgttcattcatctagcaggtattcccagacctcgtgtatgacaggtagctagggagctcttggagatgtagcagttgggattgtgggagattactgggcttcctcatcctttagaatggtaactctccttttgctttctgaacacctaggaatttcctgatgtttgttttgtggattccagacttttgttgtttctagtctgcagctgagctctggtgcctgttctttggcccaccccctaatccctaactcttccctcagcatcacagggcttcactgcacacactgtgttcagggcaagatttcatcatttactgactgcatactcgatatgttgtttttgtaactttagccaaaagaaagtaacctttagtggcagggatataaaaaattgctcagggtcacttgcagatattttatttttaaactttttttttttttcctggaaaacatcctgtgcagaaaagggtatataattttagaatacctgaaggcttcttggcttttccactttccttattcctcctcttcctgccactctttttgtcccttctgtctttcctgctcatccttatttgggtattagaggtgtcagttgaggagggactttagctgaggttaagccttcttttgggatttgcattgtaattgagggccctggaagatctctgagactcaaaatcaggtgaagctaggaagatggagctttaaggagcatggctagtgctctgagtaggaccgtaaccgcctccgtgcgtggcatatggtccctgcatgctgttcactctgtatagtacttagtattcgctgaggctaagaggcctcaggtgcctgggcttctgcccttggactcctggatatccagcctagtgctaattgaatgctaagcagtggtaattcaaaatgagagggtcccctgcctctagagtcatcatctaattggggacaggcagacctagataagaaaagcagagaactactttggaaaacagtttatctgctgtaattgaacattcagctaccctataacccagttaatccaatactggggataaatcctagagaaactcatacatgtacaccaggagatgtgtacaagaatattcatagcaaccctattcacaaaagcaaaagcctagaaataacccagatgcccatgagcaagagagtggacaagtaaactggaatattcacataatagaacattatacaattgtcaaatgaactataatgatacctaaccatatggatgaatctgagcaataaaataattaagtgaaaaaagtttaatcccagaagagtaaatgtagcatgatgccctttctaaatgaaaggttttttcttttctatggagttattctttacatacaatatagttcataaattttaaatatattgtttaataaattttgataattgtatataatagtatagtcaccatcaagatgtagaaaatagaaaataggctaggcacagtggctcacgcctgtaatctcaacactttgggaggccaaggtgggaagatcacttgatcccaggaattctagatcagcttggacaatgtagtgagacctggtctttaccaaaaaaaaaaaaaaaaaaa

SEQ ID NO: 383466 - DNA, 1366 bp, Homo sapiens
taattttttgtatttttagtagagactgggtttcaccgtgttagctaggatggtctcgatcttctgtccttaaaatccacctgcctccacctgccaaagtgctgagattacaggcgtgagccaccacacctggcctgttttttgtttctttaacaaaaagttatagaaatttctctgggtattgtgttgaatctacatcacattcagttataatcatttagcaatattattccattcaatatggcttgtatctcttatttgcacatgtttttatcactttgatcaatgtttgtagatttgaaggtagaaacttctcaacttttttcatttattcctaagtatttcttactttaagttctttagcaaatgaaagtgtttttttaattttctttttaaattgtttattgttaatgtatggaaattcaactaatttttggtgctgttattctattcttcaaatccactgcatatgttttttagttccagttgcattttggttgactctttgtgattttctacacagaagatcatgtcatctacaaagaaatagttttacttctttctttctgatttggatgagtttgatttcttttgctatttcattgctctagctaggacagccagtattgattgaatagaaggggtgagagcattcttgcatcatgtgagatcctacaggaaaagcattccattttccctgactggttatttctgctgtggtcatttcatggatggtctttgtattgttgaggtaaatttccttctctttctattttgtttaggatttccatgatgactggatgttgaattttgtgaaatgctttttctccatgtattgagatgatgtggttttcatctttcattatgttcaagtggtatatcacattgatttgcttgactatgttgaaccattttgcatcccagaaataagtggcacttgcatatcaacaatcctttttataacctcttgaatacagttcgctagtacaaggggtcttcaggaagttcatggaaaaatacatattatgagaaaattgtgcatgatatcacattttttgcaccaagataaactggtacaaatccgttataacatgtctgaacagggtttggtttgaggcactcagatgggtaagacatgagtttgaaaagagactcaatcaaggcaatgtaaattctgctaaaactgaaacaagaagaaacatcaaatttgcgatgagaccagatgctgtggctcaggcctgtaatcccataattttcagaggctgagacagttgggtcacgtgggccccggtactcaagaccagcctgggcagaatggtgaaaccaccttctctacaaaaaatacataaattagctgggcattgtg

SEQ ID NO: 383467 - DNA, 154 bp, Homo sapiens
tatctgtgtgtgaaaactggggtagacaaaagctggaccccaaaacaaactgtcaagggaataagttgaactatgtcatttattatacactcaaccaaacccaggtgcctgcaatgtactagataaagttctagtctcagaacatgattctagg

SEQ ID NO: 383468 - DNA, 851 bp, Homo sapiens
tagtttttttaatggtgctaatacccctacctttcagggttgtaaatgaaaagatgttaaaaaaaaaaatacctgacatatagtgggtgttcaataaatgttagttttcccaaagacagtcagatgcatgaatcataataagaggtatttctggtcaacactaagcttaagaatccaagaaaagatatatcaaaatgagacatctttgggtttggatagtgggggaggctgtatatacacaggtatgtatgtaggggcagggagtaaatgggaaatctctggctcttctgcttaactttgccgtgagcttaaaactgctctaaaaaacaaaatctgaccaggcctggtggctcacacttgtaatcctagcactttggggggctgaagcagaaggatccctcgagcccaggagtttgagaccagcccgggcaacatagaaagaccctatctcattttaaaaaactaaaaaataaaaaataaaataaaaaacaaaatccatttttttaaacaaaaagaaaaatgagggaaaatgaggtgttctgcttgttttatttagactctgagcacagagttcccaagatacattctgctgtggtattcacactgatctccaattaaacccttctcagtgtgtcatgagctattcattccctatagtcactctgttagaatcttggtcgtgtcccagaggcctctgttgatgtggcccaactgagctggcaagtgagaaaacatacacataaatacccatgatctcagcgattctctcccctccccaggacattccttagcagaaccaatctctctcactcggctggagcctctctgttcacagataggcctggctgggc

SEQ ID NO: 383469 - DNA, 479 bp, Homo sapiens
gacgaagtaatttatgaacaatagaaatttttcacagttctgaaggctgagaaattcaagatcaaggggcatcggcattcagtgtctagaaagggccttttttctatatcctcacatggcagaagggggaagggcagaaaaggcccaagttctttagctgtagcccttttataaggcactaattcattggtcaattcccaaaaggccctgccatttaacactacctcaaaagggattatgtttcaacacatgaattttggggaacattcagaccatagcatgtggcattaagtatattcacattgagaatatgtttatatttttctgcagccatcacctgtatccacctgcagagttttttcatcttccttaactgaaactctacccattaagcattaactccccattatcccctatccccaggccctggcaattactattctattctgtgtctctgtgaatttcactactctaggaac

SEQ ID NO: 383470 - DNA, 615 bp, Homo sapiens
ttcaggctaaccttgtgttagcattctttaggatcctcattgttcagctgaatgagagcctaaatccatcctattatgagtaattaatgggctatataatagtgagattaacggagtccctccctattcctagacttcacctttggcaagattttcatgtgtacagttttaatcaggcatgacaagaagatacaaaagaaacagaaaatcacagcccataaaaagcaagttacataataatatgaataatacaatcctatttatatctcacatgcatgcattttttaaaacaagaatgagatatatagaaattgcctggaagaaaacacatcagactgggcgcgatggctcacgcctgtaatcccagcactttgagaggccaaggcaggcagatcacctgaggtcaggagttcgagaccagcctggccaacatggcgaaaccctgtctctactaaaaatacaaaaattagccgagtgtggtggtgtatgcctgttatcctagctgcttgggaggctgaggcaggagaatcgcttgaacctgggagatggagattgcagtgagtcaagatcttgccactgcactccagtttgggcaacagagtgagactccatctc

SEQ ID NO: 383471 - DNA, 550 bp, Homo sapiens
gtttgtgattcacaagggacaaaacaatggcacatgctgggtggttgtcagctttccaacagatctgaatcccagagctgtgagttcctgctctgcctacccaaactcataaaaactactgtagagccttctgaaatgtgatatttctccaagccagagaacaagattcatgttggggatttgtccatgattgccatttaacagttttgtgacagctaaagcaactccctcttggttgctaacccaccatgttgacttctgattaactccagttccagaaatgcctctaagatttctattttatctactgttccttgtgtaagagcatgtactaactgtaaatcttgcccataaatcctgcccttaggcagatgcacatagcattcttgccttttcctacgattgtgctatatattccttccctatggtatatgagctctgggttttggagggtgatggcaccaagatccaccatctagactcacagccacccagcactcagacatggcttctgtttgcagcaattaaatgtgtatgttttttaaaaaat

SEQ ID NO: 383472 - DNA, 356 bp, Homo sapiens
cggtaccctctcgttatgcagctccactacccctaacctgccaggatgctcaagtccactgtcacaatccctttcagaaaacattagtggccgctgccccagctacagagacggccgaaatgctttcactccttagctttgccaactccatcctccaaaacttcccagaatacctccctttccagttctaccaaatctgtacttgggagcagcctgctggatccagaacatgacaacagagagctgcgtctgctgaggaggggctcagaggacggagctctgcatccggggaggagccgtcaggcgggataaagggaatggttctcgaatccgggctgggtcctccccgccgagtg

SEQ ID NO: 383473 - DNA, 6305 bp, Homo sapiens
caatggtcgcccggcgtgtttggggcgcctcgcgcgtgcctccggcctccgcccgcccgccgcccgccgcgtgttccggagacgccgcggttcgtgggccaaggtcgcccgggcgctgtttgcgggccgccgcggccgcggatgagccgggacacgcgggctcggccccagcggtggcggaggcggcggcagaggagacgcgcgggggcgacatgccggaggcgcccgggacccccgaggccttgccgccgcgacccccgccgccagcgccggagcccgagggagcgcccgctactcgcgcggtgattcgcgtccccggcgccgcggccccgcgctgcccgccgagcacctcgaggaccggctcttccaccagttcaagcgcttcggcgagatcagcctccgcctgtcgcacacgcctgagctgggccgtgtggcctacgtgaatttccggcacccacaggacgcacgcgaggcccgccagcacgccctggcccggcagctgctgctctacgaccgcccgctcaaggtagagcccgtgtacctgcgtggcggcggcgggagcagtcggcgaagtagcagcagcagcgccgccgcttccacgcctcccccagggccgcccgcgcccgccgacccgctcggctacctcccgctacacggaggctaccagtacaagcagcgctcgctgtcccccgtcgctgccccgcccctgcgggagccccgtgcccgtcacgccgccgcagccttcgccctggatgccgctgctgccgccgccgtgggactgtcccgggagcgggccctggactactacgggctgtacgacgaccgtgggcgcccctatggctacccagctgtgtgtgaggaggacctgatgcccgaggatgaccagcgggccacgcgcaacctcttcattggtaacctggaccacagcgtatctgaggtggagctgcgaagggccttcgagaaatatggcatcatcgaggaggtggtcatcaagaggcctgcccgtggccagggcggtgcctatgccttcctcaagttccagaacctggacatggcccatagggctaaggtggccatgtcgggccgagtgattggtcgcaaccccattaagataggctatggcaaggccaaccccaccactcgtctctgggtgggtggcctgggacctaacacgtcactggcggctctggcccgagagtttgaccgctttgggagcattcggaccattgatcacgtcaaaggagatagctttgcctatattcagtacgagagcttggacgcagcccaggccgcctgtgctaaaatgaggggttttcccttgggtggaccagaccgcaggctccgcgtggattttgccaaagcagaggagactcggtacccccagcagtaccagccctcgccactccctgtgcattatgagctgctcacagatggatacacccggcaccgcaacctggacgccgacctggtgcgggacaggacgcccccacaccttctgtactcagaccgagaccggacttttttggaaggggactggaccagccccagtaaaagctctgaccgccgaaacagccttgagggctacagtcgctcagtgcgcagccggagtggtgagcgttggggggcagatggagaccgtggtttgcccaagccctgggaagagaggcggaaacggagaagcctttccagtgaccgtgggaggacaacccattcaccatatgaggaacggagtaggaccaagggcagtgggcagcagtcagagcggggctccgaccgcacccctgagcgcagccgcaaggagaaccactccagtgaagggaccaaggagtccagcagcaactccctcagcaacagcagacatggggctgaggaacggggccaccaccaccaccaccacgaggctgcagactcttcccacgggaagaaggcaagagacagcgagcgcaatcaccggaccacagaggccgagcccaagcctctggaagagccaaaacacgagaccaaaaagctgaagaatctttcagagtacgctcagacactacagctgggttggaatgggcttctggtgttgaaaaacagctgcttccccacgtctatgcatatcctagagggggaccagggggtgatcagcagtctcctcaaagaccacacttctgggagcaagctgacccagctgaagatcgcccagcgccttcgactggaccagcccaagcttgacgaggtcacacgacgcatcaagcaggggagccccaacggctatgcggtcctcttagccacccaggcaacccccagtgggcttggcactgaggggatgcccacagtagagcccggtctgcagaggcggcttctcaggaacctggtctcctacttgaaacagaagcaggccgcaggggtgatcagcttgccagtgggggggtccaagggcagagacggcacaggcatgctctacgccttcccaccctgcgacttttcccagcagtacctccagtcagcactaaggacattgggcaagctagaagaagaacacatggtgatagtcatcgtcagagacactgcctagcccaagcctgtctttcccagcgtcatgtttgtgtcacaaaagcagttattttaaaatctgatcccctctctaccctaccactttggtttgaattatctcctgggttattttggttcatttgggtggggatcaaagtcctgtccaccaccaaaactaagttcttagattttgggggatttttttttttaaacgatgagaagggaatccggttatgttgatttctagtgtacaagatactgtctgctgtggttctgtatttttttattttttgaccaactgtatggaaagttgtcagtaaaacctttgacagaggatggatttttaaacctgttcagagtcctggtttaatcaatcaagctaaaagaatcgaagacatccctagtgcatgtacacgaatgccctacgtcatccttccagcaccactgctgcatgggtcactctcggcctctcaattcttcaggctcagtctggactctacttacactcatttttatcttggctgacagcaggcaagcttcagtttgggctgtggacgctgccacacaagcctgagtagagcccatgcaaaggaagggatggggtgagcgcaaggcctgtggtcagcagctactgatggttttttctgccttaaaccgtgtgtgtgtccatcatcatcagtttgagctgtggctgtttgtttgggacagagtgcccactcagcatgtttggcagcaggtagccttcagcagctgtgtagtcttgtacaaggagaagctgtgcactgttgatgccagggggtctcggggcccctgatctgtccaggctcctggttcggcctactttctagcctcactcagcccagggatagccagtgttgggagacagagttgcctcaggttcccaggggcccgggagtccaaatactggaatggagggttggaggcagccttccttggatttactcatgaactttgcctagttgtttgtgatttttggctttctctggtcgttcaggggtgatgggtaatagagcaggcccgtgtccagtcatacctagagatttgtggggggatactgaacctctagactgaagtacttaccggggagcacagtggactaggggatgcccttgataatgacggtttcctaggtgcaagatcagagcatgtgcctacaccttgtgccctgatgccgaggtggagaccattgggaaataattaatagatatttttctggggggaaatcacaagtcactgaggtgtttgtttgtttgttaggcagtgctagagcttgaagccactcaagccagttggggaggaaagggatgcggaggtaccctctagctgggaagaagggtgagattccgtcttcttccctgtctcaagtaagtaaggaaggtactgcggacagtgcgggccagggaggaaaaccagagcacacagttttgtcaccatggaacaccccaaatgccattcttcagcgtgtctggtaccttggatgttcaaacagggaacactgtcagggctgaggagaacagaagctctggtaagcgaatgagcccctagatgataaccaggaactccaggttctgctggctgtggagaggtcatgctggtccacaggaacacttggcagtgctctcgtagacccctcggtgatgtggaatggacaggtgcctcgcaagagagcaagcacgttcataacaaaacagcaacacaaagacatgttaagcatgtttatttatttgcctgtttttgtttttttacttgagctgtggtcacagctgccaggtacctaagcaagtcagttgggtacagcaggacacgccaccattccagggtagctggtaccgccagaaacaggagtgggtcttgtcctgttgcaggcacactgcagtggttttcctgcagctctccaacaaacgcctgagtcacaggccagagctgccttggtatgttgttaagtccaaaacttcttctctgggctacctatcttccttcatgaagcaggtgctcaggacccggaagaatcatctacctcccagctttgtgagacagaaccaagtaaaaggaaacatgctagaaaacgtgcctagagaagacacttcaacctttgccttatccaacccctcttcagagaaaggtgtcccatggccccaaaaagaactgccaagttttggtgaggagtaacaccctggcatgacattccttctctttcctggccctcaaccacttccttcctttggctcttaagacctagcaggttctgtgaactctcaggccttggccagcactagttaggggaggtcaggtggtcaatgtcctggtgattttatgagactgccccactgagaaaacttacttacttcaggcatccagtgcccccacccagggttcaggccctgtctaaggtgttgcttaaagacaaaaaggcaacatgtgcctcactggtggtgtgccactgttctcatgctgcctcctaagtgactccgattttcagccctggtagaataaggaagacagctgatgcctccttagccccttagcacatgttcctaaggtgtgttgtcaagccaacctgaattctgcctccctgttatagtccctgtctcccccacagagacctgtgggtgctcccagcagagttgagactggctccgttgagttaatgactagaatatagtgctttcactacttgattgttaacctgttttcttctgatgccatcagtaccagcagtcagactattccactggttaagtgtttactaccattaaagcgaggcatgaagcaaagagctgagtgagtcctctgctctccagaggaccaagaaatacctgtgtgacacagacccacttcagtgtgtacagcaaattctatagtgcttctgagcccagcagggctttacctgcccctggagagttttagccgtcttgtgtttcttgtttacttcacaaccaaatttgtcccctcttctctctgttaagggagagaagtcactttagctggataatacctatgtaacaaactgagcagctgttatttgggcaaaatcaaaggaagaaagagactatggtcttctatttattgtgggaaggaaaacagggtggggcgggtgagtgaaaaggtggaaatccctggtaccttgcctggtggttacacagtttaaccataggccaattttaggggcctctgaagtatctttctacaaacgcagacaagctccactacccctaacctgccaggatgctcaagtccactgtcacaatccctttcagaaaacattagtggccgctgccccagctacagagacggccgaaatgctttcactccttagctttgccaactccatcctccaaaacttcccagaatacctccctttccagttctaccaaatctgtacttgggagcagcctgctggatccagaacatgacaacagagagctgcgtccacagggaacaaagccctgacctctctctccacattacccttacaaaaacaggccctccccatgagagagctacacggcaggggcagacactgtgagtataagctactttcctccctggagtgctctatgtgggcagaacatgctctccttgcctctcctggaaggtgtcttctctatggcctggctagagctgcaaaaaagggacacaccccacttcggtaaaagaaaatagggaaaggccataaacaaagacagacttgtagtttattttgtattttttttaaataaatacactttacattaaaaaaaaggcct

SEQ ID NO: 383474 - DNA, 6109 bp, Homo sapiens
caatggtcgcccggcgtgtttggggcgcctcgcgcgtgcctccggcctccgcccgcccgccgcccgccgcgtgttccggagacgccgcggttcgtgggccaaggtcgcccgggcgctgtttgcgggccgccgcggccgcggatgagccgggacacgcgggctcggccccagcggtggcggaggcggcggcagaggagacgcgcgggggcgacatgccggaggcgcccgggacccccgaggccttgccgccgcgacccccgccgccagcgccggagcccgagggagcgcccgctactcgcgcggtgattcgcgtccccggcgccgcggccccgcgctgcccgccgagcacctcgaggaccggctcttccaccagttcaagcgcttcggcgagatcagcctccgcctgtcgcacacgcctgagctgggccgtgtggcctacgtgaatttccggcacccacaggacgcacgcgaggcccgccagcacgccctggcccggcagctgctgctctacgaccgcccgctcaaggtagagcccgtgtacctgcgtggcggcggcgggagcagtcggcgaagtagcagcagcagcgccgccgcttccacgcctcccccagggccgcccgcgcccgccgacccgctcggctacctcccgctacacggaggctaccagtacaagcagcgctcgctgtcccccgtcgctgccccgcccctgcgggagccccgtgcccgtcacgccgccgcagccttcgccctggatgccgctgctgccgccgccgtgggactgtcccgggagcgggccctggactactacgggctgtacgacgaccgtgggcgcccctatggctacccagctgtgtgtgaggaggacctgatgcccgaggatgaccagcgggccacgcgcaacctcttcattggtaacctggaccacagcgtatctgaggtggagctgcgaagggccttcgagaaatatggcatcatcgaggaggtggtcatcaagaggcctgcccgtggccagggcggtgcctatgccttcctcaagttccagaacctggacatggcccatagggctaaggtggccatgtcgggccgagtgattggtcgcaaccccattaagataggctatggcaaggccaaccccaccactcgtctctgggtgggtggcctgggacctaacacgtcactggcggctctggcccgagagtttgaccgctttgggagcattcggaccattgatcacgtcaaaggagatagctttgcctatattcagtacgagagcttggacgcagcccaggccgcctgtgctaaaatgaggggttttcccttgggtggaccagaccgcaggctccgcgtggattttgccaaagcagaggagactcggtacccccagcagtaccagccctcgccactccctgtgcattatgagctgctcacagatggatacacccggcaccgcaacctggacgccgacctggtgcgggacaggacgcccccacaccttctgtactcagaccgagaccggacttttttggaaggggactggaccagccccagtaaaagctctgaccgccgaaacagccttgagggctacagtcgctcagtgcgcagccggagtggtgagcgttggggggcagatggagaccgtggtttgcccaagccctgggaagagaggcggaaacggagaagcctttccagtgaccgtgggaggacaacccattcaccatatgaggaacggagtaggaccaagggcagtgggcagcagtcagagcggggctccgaccgcacccctgagcgcagccgcaaggagaaccactccagtgaagggaccaaggagtccagcagcaactccctcagcaacagcagacatggggctgaggaacggggccaccaccaccaccaccacgaggctgcagactcttcccacgggaagaaggcaagagacagcgagcgcaatcaccggaccacagaggccgagcccaagcctctggaagagccaaaacacgagaccaaaaagctgaagaatctttcagagtacgctcagacactacagctgggttggaatgggcttctggtgttgaaaaacagctgcttccccacgtctatgcatatcctagagggggaccagggggtgatcagcagtctcctcaaagaccacacttctgggagcaagctgacccagctgaagatcgcccagcgccttcgactggaccagcccaagcttgacgaggtcacacgacgcatcaagcaggggagccccaacggctatgcggtcctcttagccacccaggcaacccccagtgggcttggcactgaggggatgcccacagtagagcccggtctgcagaggcggcttctcaggaacctggtctcctacttgaaacagaagcaggccgcaggggtgatcagcttgccagtgggggggtccaagggcagagacggcacaggcatgctctacgccttcccaccctgcgacttttcccagcagtacctccagtcagcactaaggacattgggcaagctagaagaagaacacatggtgatagtcatcgtcagagacactgcctagcccaagcctgtctttcccagcgtcatgtttgtgtcacaaaagcagttattttaaaatctgatcccctctctaccctaccactttggtttgaattatctcctgggttattttggttcatttgggtggggatcaaagtcctgtccaccaccaaaactaagttcttagattttgggggatttttttttttaaacgatgagaagggaatccggttatgttgatttctagtgtacaagatactgtctgctgtggttctgtatttttttattttttgaccaactgtatggaaagttgtcagtaaaacctttgacagaggatggatttttaaacctgttcagagtcctggtttaatcaatcaagctaaaagaatcgaagacatccctagtgcatgtacacgaatgccctacgtcatccttccagcaccactgctgcatgggtcactctcggcctctcaattcttcaggctcagtctggactctacttacactcatttttatcttggctgacagcaggcaagcttcagtttgggctgtggacgctgccacacaagcctgagtagagcccatgcaaaggaagggatggggtgagcgcaaggcctgtggtcagcagctactgatggttttttctgccttaaaccgtgtgtgtgtccatcatcatcagtttgagctgtggctgtttgtttgggacagagtgcccactcagcatgtttggcagcaggtagccttcagcagctgtgtagtcttgtacaaggagaagctgtgcactgttgatgccagggggtctcggggcccctgatctgtccaggctcctggttcggcctactttctagcctcactcagcccagggatagccagtgttgggagacagagttgcctcaggttcccaggggcccgggagtccaaatactggaatggagggttggaggcagccttccttggatttactcatgaactttgcctagttgtttgtgatttttggctttctctggtcgttcaggggtgatgggtaatagagcaggcccgtgtccagtcatacctagagatttgtggggggatactgaacctctagactgaagtacttaccggggagcacagtggactaggggatgcccttgataatgacggtttcctaggtgcaagatcagagcatgtgcctacaccttgtgccctgatgccgaggtggagaccattgggaaataattaatagatatttttctggggggaaatcacaagtcactgaggtgtttgtttgtttgttaggcagtgctagagcttgaagccactcaagccagttggggaggaaagggatgcggaggtaccctctagctgggaagaagggtgagattccgtcttcttccctgtctcaagtaagtaaggaaggtactgcggacagtgcgggccagggaggaaaaccagagcacacagttttgtcaccatggaacaccccaaatgccattcttcagcgtgtctggtaccttggatgttcaaacagggaacactgtcagggctgaggagaacagaagctctggtaagcgaatgagcccctagatgataaccaggaactccaggttctgctggccgtggcatcctctctccaggtctgctcccttaccggagctaggataaggtagcatgagtgacacctgagattagaggctggggctcactgcaggctgtggagaggtcatgctggtccacaggaacacttggcagtgctctcgtagacccctcggtgatgtggaatggacaggtgcctcgcaagagagcaagcacgttcataacaaaacagcaacacaaagacatgttaagcatgtttatttatttgcctgtttttgtttttttacttgagctgtggtcacagctgccaggtacctaagcaagtcagttgggtacagcaggacacgccaccattccagggtagctggtaccgccagaaacaggagtgggtcttgtcctgttgcaggcacactgcagtggttttcctgcagctctccaacaaacgcctgagtcacaggccagagctgccttggtatgttgttaagtccaaaacttcttctctgggctacctatcttccttcatgaagcaggtgctcaggacccggaagaatcatctacctcccagctttgtgagacagaaccaagtaaaaggaaacatgctagaaaacgtgcctagagaagacacttcaacctttgccttatccaacccctcttcagagaaaggtgtcccatggccccaaaaagaactgccaagttttggtgaggagtaacaccctggcatgacattccttctctttcctggccctcaaccacttccttcctttggctcttaagacctagcaggttctgtgaactctcaggccttggccagcactagttaggggaggtcaggtggtcaatgtcctggtgattttatgagactgccccactgagaaaacttacttacttcaggcatccagtgcccccacccagggttcaggccctgtctaaggtgttgcttaaagacaaaaaggcaacatgtgcctcactggtggtgtgccactgttctcatgctgcctcctaagtgactccgattttcagccctggtagaataaggaagacagctgatgcctccttagccccttagcacatgttcctaaggtgtgttgtcaagccaacctgaattctgcctccctgttatagtccctgtctcccccacagagacctgtgggtgctcccagcagagttgagactggctccgttgagttaatgactagaatatagtgctttcactacttgattgttaacctgttttcttctgatgccatcagtaccagcagtcagactattccactggttaagtgtttactaccattaaagcgaggcatgaagcaaagagctgagtgagtcctctgctctccagaggaccaagaaatacctgtgtgacacagacccacttcagtgtgtacagcaaattctatagtgcttctgagcccagcagggctttacctgcccctggagagttttagccgtcttgtgtttcttgtttacttcacaaccaaatttgtcccctcttctctctgttaagggagagaagtcactttagctggataatacctatgtaacaaactgagcagctgttatttgggcaaaatcaaaggaagaaagagactatggtcttctatttattgtgggaaggaaaacagggtggggcgggtgagtgaaaaggtggaaatccctggtaccttgcctggtggttacacagtttaaccataggccaattttaggggcctctgaagtatctttctacaaacgcagacaagctccactacccctaacctgccaggatgctcaagtccactgtcacaatccctttcagaaaacattagtggccgctgccccagctacagagacggccgaaatgctttcactccttagctttgccaactccatcctccaaaacttcccagaatacctccctttccagttctaccaaatctgtacttgggagcagcctgctggatccagaacatgacaacagagagctgcgtctgctgagagaggggtacgcgagctg

SEQ ID NO: 383475 - DNA, 5703 bp, Homo sapiens
caatggtcgcccggcgtgtttggggcgcctcgcgcgtgcctccggcctccgcccgcccgccgcccgccgcgtgttccggagacgccgcggttcgtgggccaaggtcgcccgggcgctgtttgcgggccgccgcggccgcggatgagccgggacacgcgggctcggccccagcggtggcggaggcggcggcagaggagacgcgcgggggcgacatgccggaggcgcccgggacccccgaggccttgccgccgcgacccccgccgccagcgccggagcccgagggagcgcccgctactcgcgcggtgattcgcgtccccggcgccgcggccccgcgctgcccgccgagcacctcgaggaccggctcttccaccagttcaagcgcttcggcgagatcagcctccgcctgtcgcacacgcctgagctgggccgtgtggcctacgtgaatttccggcacccacaggacgcacgcgaggcccgccagcacgccctggcccggcagctgctgctctacgaccgcccgctcaaggtagagcccgtgtacctgcgtggcggcggcgggagcagtcggcgaagtagcagcagcagcgccgccgcttccacgcctcccccagggccgcccgcgcccgccgacccgctcggctacctcccgctacacggaggctaccagtacaagcagcgctcgctgtcccccgtcgctgccccgcccctgcgggagccccgtgcccgtcacgccgccgcagccttcgccctggatgccgctgctgccgccgccgtgggactgtcccgggagcgggccctggactactacgggctgtacgacgaccgtgggcgcccctatggctacccagctgtgtgtgaggaggacctgatgcccgaggatgaccagcgggccacgcgcaacctcttcattggtaacctggaccacagcgtatctgaggtggagctgcgaagggccttcgagaaatatggcatcatcgaggaggtggtcatcaagaggcctgcccgtggccagggcggtgcctatgccttcctcaagttccagaacctggacatggcccatagggctaaggtggccatgtcgggccgagtgattggtcgcaaccccattaagataggctatggcaaggccaaccccaccactcgtctctgggtgggtggcctgggacctaacacgtcactggcggctctggcccgagagtttgaccgctttgggagcattcggaccattgatcacgtcaaaggagatagctttgcctatattcagtacgagagcttggacgcagcccaggccgcctgtgctaaaatgaggggttttcccttgggtggaccagaccgcaggctccgcgtggattttgccaaagcagaggagactcggtacccccagcagtaccagccctcgccactccctgtgcattatgagctgctcacagatggatacacccggcaccgcaacctggacgccgacctggtgcgggacaggacgcccccacaccttctgtactcagaccgagaccggacttttttggaaggggactggaccagccccagtaaaagctctgaccgccgaaacagccttgagggctacagtcgctcagtgcgcagccggagtggtgagcgttggggggcagatggagaccgtggtttgcccaagccctgggaagagaggcggaaacggagaagcctttccagtgaccgtgggaggacaacccattcaccatatgaggaacggagtaggaccaagggcagtgggcagcagtcagagcggggctccgaccgcacccctgagcgcagccgcaaggagaaccactccagtgaagggaccaaggagtccagcagcaactccctcagcaacagcagacatggggctgaggaacggggccaccaccaccaccaccacgaggctgcagactcttcccacgggaagaaggcaagagacagcgagcgcaatcaccggaccacagaggccgagcccaagcctctggaagagccaaaacacgagaccaaaaagctgaagaatctttcagagtacgctcagacactacagctgggttggaatgggcttctggtgttgaaaaacagctgcttccccacgtctatgcatatcctagagggggaccagggggtgatcagcagtctcctcaaagaccacacttctgggagcaagctgacccagctgaagatcgcccagcgccttcgactggaccagcccaagcttgacgaggtcacacgacgcatcaagcaggggagccccaacggctatgcggtcctcttagccacccaggcaacccccagtgggcttggcactgaggggatgcccacagtagagcccggtctgcagaggcggcttctcaggaacctggtctcctacttgaaacagaagcaggccgcaggggtgatcagcttgccagtgggggggtccaagggcagagacggcacaggcatgctctacgccttcccaccctgcgacttttcccagcagtacctccagtcagcactaaggacattgggcaagctagaagaagaacacatggtgatagtcatcgtcagagacactgcctagcccaagcctgtctttcccagcgtcatgtttgtgtcacaaaagcagttattttaaaatctgatcccctctctaccctaccactttggtttgaattatctcctgggttattttggttcatttgggtggggatcaaagtcctgtccaccaccaaaactaagttcttagattttgggggatttttttttttaaacgatgagaagggaatccggttatgttgatttctagtgtacaagatactgtctgctgtggttctgtatttttttattttttgaccaactgtatggaaagttgtcagtaaaacctttgacagaggatggatttttaaacctgttcagagtcctggtttaatcaatcaagctaaaagaatcgaagacatccctagtgcatgtacacgaatgccctacgtcatccttccagcaccactgctgcatgggtcactctcggcctctcaattcttcaggctcagtctggactctacttacactcatttttatcttggctgacagcaggcaagcttcagtttgggctgtggacgctgccacacaagcctgagtagagcccatgcaaaggaagggatggggtgagcgcaaggcctgtggtcagcagctactgatggttttttctgccttaaaccgtgtgtgtgtccatcatcatcagtttgagctgtggctgtttgtttgggacagagtgcccactcagcatgtttggcagcaggtagccttcagcagctgtgtagtcttgtacaaggagaagctgtgcactgttgatgccagggggtctcggggcccctgatctgtccaggctcctggttcggcctactttctagcctcactcagcccagggatagccagtgttgggagacagagttgcctcaggttcccaggggcccgggagtccaaatactggaatggagggttggaggcagccttccttggatttactcatgaactttgcctagttgtttgtgatttttggctttctctggtcgttcaggggtgatgggtaatagagcaggcccgtgtccagtcatacctagagatttgtggggggatactgaacctctagactgaagtacttaccggggagcacagtggactaggggatgcccttgataatgacggtttcctaggtgcaagatcagagcatgtgcctacaccttgtgccctgatgccgaggtggagaccattgggaaataattaatagatatttttctggggggaaatcacaagtcactgaggtgtttgtttgtttgttaggcagtgctagagcttgaagccactcaagccagttggggaggaaagggatgcggaggtaccctctagctgggaagaagggtgagattccgtcttcttccctgtctcaagtaagtaaggaaggtactgcggacagtgcgggccagggaggaaaaccagagcacacagttttgtcaccatggaacaccccaaatgccattcttcagcgtgtctggtaccttggatgttcaaacagggaacactgtcagggctgaggagaacagaagctctggtaagcgaatgagcccctagatgataaccaggaactccaggttctgctggccgtggcatcctctctccaggtctgctcccttaccggagctaggataaggtagcatgagtgacacctgagattagaggctggggctcactgcaggctgtggagaggtcatgctggtccacaggaacacttggcagtgctctcgtagacccctcggtgatgtggaatggacaggtgcctcgcaagagagcaagcacgttcataacaaaacagcaacacaaagacatgttaagcatgtttatttatttgcctgtttttgtttttttacttgagctgtggtcacagctgccaggtacctaagcaagtcagttgggtacagcaggacacgccaccattccagggtagctggtaccgccagaaacaggagtgggtcttgtcctgttgcaggcacactgcagtggttttcctgcagctctccaacaaacgcctgagtcacaggccagagctgccttggtatgttgttaagtccaaaacttcttctctgggctacctatcttccttcatgaagcaggtgctcaggacccggaagaatcatctacctcccagctttgtgagacagaaccaagtaaaaggaaacatgctagaaaacgtgcctagagaagacacttcaacctttgccttatccaacccctcttcagagaaaggtgtcccatggccccaaaaagaactgccaagttttggtgaggagtaacaccctggcatgacattccttctctttcctggccctcaaccacttccttcctttggctcttaagacctagcaggttctgtgaactctcaggccttggccagcactagttaggggaggtcaggtggtcaatgtcctggtgattttatgagactgccccactgagaaaacttacttacttcaggcatccagtgcccccacccagggttcaggccctgtctaaggtgttgcttaaagacaaaaaggcaacatgtgcctcactggtggtgtgccactgttctcatgctgcctcctaagtgactccgattttcagccctggtagaataaggaagacagctgatgcctccttagccccttagcacatgttcctaaggtgtgttgtcaagccaacctgaattctgcctccctgttatagtccctgtctcccccacagagacctgtgggtgctcccagcagagttgagactggctccgttgagttaatgactagaatatagtgctttcactacttgattgttaacctgttttcttctgatgccatcagtaccagcagtcagactattccactggttaagtgtttactaccattaaagcgaggcatgaagcaaagagctgagtgagtcctctgctctccagaggaccaagaaatacctgtgtgacacagacccacttcagtgtgtacagcaaattctatagtgcttctgagcccagcagggctttacctgcccctggagagttttagccgtcttgtgtttcttgtttacttcacaaccaaatttgtcccctcttctctctgttaagggagagaagtcactttagctggataatacctatgtaacaaactgagcagctgttatttgggcaaaatcaaaggaagaaagaga

SEQ ID NO: 383476 - DNA, 6188 bp, Homo sapiens
ggttaggctaggtagaggccgggtgtgaatcggccgaggctggggccgagcccgcgtgtcccggctcatccgcggccgcgcctgagtacaagacgttgctcatcagcagcttgagccccgcgctgcccgccgagcacctcgaggaccggctcttccaccagttcaagcgcttcggcgagatcagcctccgcctgtcgcacacgcctgagctgggccgtgtggcctacgtgaatttccggcacccacaggacgcacgcgaggcccgccagcacgccctggcccggcagctgctgctctacgaccgcccgctcaaggtagagcccgtgtacctgcgtggcggcggcgggagcagtcggcgaagtagcagcagcagcgccgccgcttccacgcctcccccagggccgcccgcgcccgccgacccgctcggctacctcccgctacacggaggctaccagtacaagcagcgctcgctgtcccccgtcgctgccccgcccctgcgggagccccgtgcccgtcacgccgccgcagccttcgccctggatgccgctgctgccgccgccgtgggactgtcccgggagcgggccctggactactacgggctgtacgacgaccgtgggcgcccctatggctacccagctgtgtgtgaggaggacctgatgcccgaggatgaccagcgggccacgcgcaacctcttcattggtaacctggaccacagcgtatctgaggtggagctgcgaagggccttcgagaaatatggcatcatcgaggaggtggtcatcaagaggcctgcccgtggccagggcggtgcctatgccttcctcaagttccagaacctggacatggcccatagggctaaggtggccatgtcgggccgagtgattggtcgcaaccccattaagataggctatggcaaggccaaccccaccactcgtctctgggtgggtggcctgggacctaacacgtcactggcggctctggcccgagagtttgaccgctttgggagcattcggaccattgatcacgtcaaaggagatagctttgcctatattcagtacgagagcttggacgcagcccaggccgcctgtgctaaaatgaggggttttcccttgggtggaccagaccgcaggctccgcgtggattttgccaaagcagaggagactcggtacccccagcagtaccagccctcgccactccctgtgcattatgagctgctcacagatggatacacccggcaccgcaacctggacgccgacctggtgcgggacaggacgcccccacaccttctgtactcagaccgagaccggacttttttggaaggggactggaccagccccagtaaaagctctgaccgccgaaacagccttgagggctacagtcgctcagtgcgcagccggagtggtgagcgttggggggcagatggagaccgtggtttgcccaagccctgggaagagaggcggaaacggagaagcctttccagtgaccgtgggaggacaacccattcaccatatgaggaacggagtaggaccaagggcagtgggcagcagtcagagcggggctccgaccgcacccctgagcgcagccgcaaggagaaccactccagtgaagggaccaaggagtccagcagcaactccctcagcaacagcagacatggggctgaggaacggggccaccaccaccaccaccacgaggctgcagactcttcccacgggaagaaggcaagagacagcgagcgcaatcaccggaccacagaggccgagcccaagcctctggaagagccaaaacacgagaccaaaaagctgaagaatctttcagagtacgctcagacactacagctgggttggaatgggcttctggtgttgaaaaacagctgcttccccacgtctatgcatatcctagagggggaccagggggtgatcagcagtctcctcaaagaccacacttctgggagcaagctgacccagctgaagatcgcccagcgccttcgactggaccagcccaagcttgacgaggtcacacgacgcatcaagcaggggagccccaacggctatgcggtcctcttagccacccaggcaacccccagtgggcttggcactgaggggatgcccacagtagagcccggtctgcagaggcggcttctcaggaacctggtctcctacttgaaacagaagcaggccgcaggggtgatcagcttgccagtgggggggtccaagggcagagacggcacaggcatgctctacgccttcccaccctgcgacttttcccagcagtacctccagtcagcactaaggacattgggcaagctagaagaagaacacatggtgatagtcatcgtcagagacactgcctagcccaagcctgtctttcccagcgtcatgtttgtgtcacaaaagcagttattttaaaatctgatcccctctctaccctaccactttggtttgaattatctcctgggttattttggttcatttgggtggggatcaaagtcctgtccaccaccaaaactaagttcttagattttgggggatttttttttttaaacgatgagaagggaatccggttatgttgatttctagtgtacaagatactgtctgctgtggttctgtatttttttattttttgaccaactgtatggaaagttgtcagtaaaacctttgacagaggatggatttttaaacctgttcagagtcctggtttaatcaatcaagctaaaagaatcgaagacatccctagtgcatgtacacgaatgccctacgtcatccttccagcaccactgctgcatgggtcactctcggcctctcaattcttcaggctcagtctggactctacttacactcatttttatcttggctgacagcaggcaagcttcagtttgggctgtggacgctgccacacaagcctgagtagagcccatgcaaaggaagggatggggtgagcgcaaggcctgtggtcagcagctactgatggttttttctgccttaaaccgtgtgtgtgtccatcatcatcagtttgagctgtggctgtttgtttgggacagagtgcccactcagcatgtttggcagcaggtagccttcagcagctgtgtagtcttgtacaaggagaagctgtgcactgttgatgccagggggtctcggggcccctgatctgtccaggctcctggttcggcctactttctagcctcactcagcccagggatagccagtgttgggagacagagttgcctcaggttcccaggggcccgggagtccaaatactggaatggagggttggaggcagccttccttggatttactcatgaactttgcctagttgtttgtgatttttggctttctctggtcgttcaggggtgatgggtaatagagcaggcccgtgtccagtcatacctagagatttgtggggggatactgaacctctagactgaagtacttaccggggagcacagtggactaggggatgcccttgataatgacggtttcctaggtgcaagatcagagcatgtgcctacaccttgtgccctgatgccgaggtggagaccattgggaaataattaatagatatttttctggggggaaatcacaagtcactgaggtgtttgtttgtttgttaggcagtgctagagcttgaagccactcaagccagttggggaggaaagggatgcggaggtaccctctagctgggaagaagggtgagattccgtcttcttccctgtctcaagtaagtaaggaaggtactgcggacagtgcgggccagggaggaaaaccagagcacacagttttgtcaccatggaacaccccaaatgccattcttcagcgtgtctggtaccttggatgttcaaacagggaacactgtcagggctgaggagaacagaagctctggtaagcgaatgagcccctagatgataaccaggaactccaggttctgctggccgtggcatcctctctccaggtctgctcccttaccggagctaggataaggtagcatgagtgacacctgagattagaggctggggctcactgcaggctgtggagaggtcatgctggtccacaggaacacttggcagtgctctcgtagacccctcggtgatgtggaatggacaggtgcctcgcaagagagcaagcacgttcataacaaaacagcaacacaaagacatgttaagcatgtttatttatttgcctgtttttgtttttttacttgagctgtggtcacagctgccaggtacctaagcaagtcagttgggtacagcaggacacgccaccattccagggtagctggtaccgccagaaacaggagtgggtcttgtcctgttgcaggcacactgcagtggttttcctgcagctctccaacaaacgcctgagtcacaggccagagctgccttggtatgttgttaagtccaaaacttcttctctgggctacctatcttccttcatgaagcaggtgctcaggacccggaagaatcatctacctcccagctttgtgagacagaaccaagtaaaaggaaacatgctagaaaacgtgcctagagaagacacttcaacctttgccttatccaacccctcttcagagaaaggtgtcccatggccccaaaaagaactgccaagttttggtgaggagtaacaccctggcatgacattccttctctttcctggccctcaaccacttccttcctttggctcttaagacctagcaggttctgtgaactctcaggccttggccagcactagttaggggaggtcaggtggtcaatgtcctggtgattttatgagactgccccactgagaaaacttacttacttcaggcatccagtgcccccacccagggttcaggccctgtctaaggtgttgcttaaagacaaaaaggcaacatgtgcctcactggtggtgtgccactgttctcatgctgcctcctaagtgactccgattttcagccctggtagaataaggaagacagctgatgcctccttagccccttagcacatgttcctaaggtgtgttgtcaagccaacctgaattctgcctccctgttatagtccctgtctcccccacagagacctgtgggtgctcccagcagagttgagactggctccgttgagttaatgactagaatatagtgctttcactacttgattgttaacctgttttcttctgatgccatcagtaccagcagtcagactattccactggttaagtgtttactaccattaaagcgaggcatgaagcaaagagctgagtgagtcctctgctctccagaggaccaagaaatacctgtgtgacacagacccacttcagtgtgtacagcaaattctatagtgcttctgagcccagcagggctttacctgcccctggagagttttagccgtcttgtgtttcttgtttacttcacaaccaaatttgtcccctcttctctctgttaagggagagaagtcactttagctggataatacctatgtaacaaactgagcagctgttatttgggcaaaatcaaaggaagaaagagactatggtcttctatttattgtgggaaggaaaacagggtggggcgggtgagtgaaaaggtggaaatccctggtaccttgcctggtggttacacagtttaaccataggccaattttaggggcctctgaagtatctttctacaaacgcagacaagctccactacccctaacctgccaggatgctcaagtccactgtcacaatccctttcagaaaacattagtggccgctgccccagctacagagacggccgaaatgctttcactccttagctttgccaactccatcctccaaaacttcccagaatacctccctttccagttctaccaaatctgtacttgggagcagcctgctggatccagaacatgacaacagagagctgcgtccacagggaacaaagccctgacctctctctccacattacccttacaaaaacaggccctccccatgagagagctacacggcaggggcagacactgtgagtataagctactttcctccctggagtgctctatgtgggcagaacatgctctccttgcctctcctggaaggtgtcttctctatggcctggctagagctgcaaaaaagggacacaccccacttcggtaaaagaaaatagggaaaggccataaacaaagacagacttgtagtttattttgtattttttttaaataaatacactttacattaaaaaaaaggcct

SEQ ID NO: 383477 - DNA, 5863 bp, Homo sapiens
  misc_feature (14)..(15): n is a, c, g, or t
tgggcggtcaactnnggctaggtacgaggcctgggtgttaagcagcagcgccgccgcttccacgcctcccccagggccgcccgcgcccgccgacccgctcggctacctcccgctacacggaggctaccagtacaagcagcgctcgctgtcccccgtcgctgccccgcccctgcgggagccccgtgcccgtcacgccgccgcagccttcgccctggatgccgctgctgccgccgccgtgggactgtcccgggagcgggccctggactactacgggctgtacgacgaccgtgggcgcccctatggctacccagctgtgtgtgaggaggacctgatgcccgaggatgaccagcgggccacgcgcaacctcttcattggtaacctggaccacagcgtatctgaggtggagctgcgaagggccttcgagaaatatggcatcatcgaggaggtggtcatcaagaggcctgcccgtggccagggcggtgcctatgccttcctcaagttccagaacctggacatggcccatagggctaaggtggccatgtcgggccgagtgattggtcgcaaccccattaagataggctatggcaaggccaaccccaccactcgtctctgggtgggtggcctgggacctaacacgtcactggcggctctggcccgagagtttgaccgctttgggagcattcggaccattgatcacgtcaaaggagatagctttgcctatattcagtacgagagcttggacgcagcccaggccgcctgtgctaaaatgaggggttttcccttgggtggaccagaccgcaggctccgcgtggattttgccaaagcagaggagactcggtacccccagcagtaccagccctcgccactccctgtgcattatgagctgctcacagatggatacacccggcaccgcaacctggacgccgacctggtgcgggacaggacgcccccacaccttctgtactcagaccgagaccggacttttttggaaggggactggaccagccccagtaaaagctctgaccgccgaaacagccttgagggctacagtcgctcagtgcgcagccggagtggtgagcgttggggggcagatggagaccgtggtttgcccaagccctgggaagagaggcggaaacggagaagcctttccagtgaccgtgggaggacaacccattcaccatatgaggaacggagtaggaccaagggcagtgggcagcagtcagagcggggctccgaccgcacccctgagcgcagccgcaaggagaaccactccagtgaagggaccaaggagtccagcagcaactccctcagcaacagcagacatggggctgaggaacggggccaccaccaccaccaccacgaggctgcagactcttcccacgggaagaaggcaagagacagcgagcgcaatcaccggaccacagaggccgagcccaagcctctggaagagccaaaacacgagaccaaaaagctgaagaatctttcagagtacgctcagacactacagctgggttggaatgggcttctggtgttgaaaaacagctgcttccccacgtctatgcatatcctagagggggaccagggggtgatcagcagtctcctcaaagaccacacttctgggagcaagctgacccagctgaagatcgcccagcgccttcgactggaccagcccaagcttgacgaggtcacacgacgcatcaagcaggggagccccaacggctatgcggtcctcttagccacccaggcaacccccagtgggcttggcactgaggggatgcccacagtagagcccggtctgcagaggcggcttctcaggaacctggtctcctacttgaaacagaagcaggccgcaggggtgatcagcttgccagtgggggggtccaagggcagagacggcacaggcatgctctacgccttcccaccctgcgacttttcccagcagtacctccagtcagcactaaggacattgggcaagctagaagaagaacacatggtgatagtcatcgtcagagacactgcctagcccaagcctgtctttcccagcgtcatgtttgtgtcacaaaagcagttattttaaaatctgatcccctctctaccctaccactttggtttgaattatctcctgggttattttggttcatttgggtggggatcaaagtcctgtccaccaccaaaactaagttcttagattttgggggatttttttttttaaacgatgagaagggaatccggttatgttgatttctagtgtacaagatactgtctgctgtggttctgtatttttttattttttgaccaactgtatggaaagttgtcagtaaaacctttgacagaggatggatttttaaacctgttcagagtcctggtttaatcaatcaagctaaaagaatcgaagacatccctagtgcatgtacacgaatgccctacgtcatccttccagcaccactgctgcatgggtcactctcggcctctcaattcttcaggctcagtctggactctacttacactcatttttatcttggctgacagcaggcaagcttcagtttgggctgtggacgctgccacacaagcctgagtagagcccatgcaaaggaagggatggggtgagcgcaaggcctgtggtcagcagctactgatggttttttctgccttaaaccgtgtgtgtgtccatcatcatcagtttgagctgtggctgtttgtttgggacagagtgcccactcagcatgtttggcagcaggtagccttcagcagctgtgtagtcttgtacaaggagaagctgtgcactgttgatgccagggggtctcggggcccctgatctgtccaggctcctggttcggcctactttctagcctcactcagcccagggatagccagtgttgggagacagagttgcctcaggttcccaggggcccgggagtccaaatactggaatggagggttggaggcagccttccttggatttactcatgaactttgcctagttgtttgtgatttttggctttctctggtcgttcaggggtgatgggtaatagagcaggcccgtgtccagtcatacctagagatttgtggggggatactgaacctctagactgaagtacttaccggggagcacagtggactaggggatgcccttgataatgacggtttcctaggtgcaagatcagagcatgtgcctacaccttgtgccctgatgccgaggtggagaccattgggaaataattaatagatatttttctggggggaaatcacaagtcactgaggtgtttgtttgtttgttaggcagtgctagagcttgaagccactcaagccagttggggaggaaagggatgcggaggtaccctctagctgggaagaagggtgagattccgtcttcttccctgtctcaagtaagtaaggaaggtactgcggacagtgcgggccagggaggaaaaccagagcacacagttttgtcaccatggaacaccccaaatgccattcttcagcgtgtctggtaccttggatgttcaaacagggaacactgtcagggctgaggagaacagaagctctggtaagcgaatgagcccctagatgataaccaggaactccaggttctgctggccgtggcatcctctctccaggtctgctcccttaccggagctaggataaggtagcatgagtgacacctgagattagaggctggggctcactgcaggctgtggagaggtcatgctggtccacaggaacacttggcagtgctctcgtagacccctcggtgatgtggaatggacaggtgcctcgcaagagagcaagcacgttcataacaaaacagcaacacaaagacatgttaagcatgtttatttatttgcctgtttttgtttttttacttgagctgtggtcacagctgccaggtacctaagcaagtcagttgggtacagcaggacacgccaccattccagggtagctggtaccgccagaaacaggagtgggtcttgtcctgttgcaggcacactgcagtggttttcctgcagctctccaacaaacgcctgagtcacaggccagagctgccttggtatgttgttaagtccaaaacttcttctctgggctacctatcttccttcatgaagcaggtgctcaggacccggaagaatcatctacctcccagctttgtgagacagaaccaagtaaaaggaaacatgctagaaaacgtgcctagagaagacacttcaacctttgccttatccaacccctcttcagagaaaggtgtcccatggccccaaaaagaactgccaagttttggtgaggagtaacaccctggcatgacattccttctctttcctggccctcaaccacttccttcctttggctcttaagacctagcaggttctgtgaactctcaggccttggccagcactagttaggggaggtcaggtggtcaatgtcctggtgattttatgagactgccccactgagaaaacttacttacttcaggcatccagtgcccccacccagggttcaggccctgtctaaggtgttgcttaaagacaaaaaggcaacatgtgcctcactggtggtgtgccactgttctcatgctgcctcctaagtgactccgattttcagccctggtagaataaggaagacagctgatgcctccttagccccttagcacatgttcctaaggtgtgttgtcaagccaacctgaattctgcctccctgttatagtccctgtctcccccacagagacctgtgggtgctcccagcagagttgagactggctccgttgagttaatgactagaatatagtgctttcactacttgattgttaacctgttttcttctgatgccatcagtaccagcagtcagactattccactggttaagtgtttactaccattaaagcgaggcatgaagcaaagagctgagtgagtcctctgctctccagaggaccaagaaatacctgtgtgacacagacccacttcagtgtgtacagcaaattctatagtgcttctgagcccagcagggctttacctgcccctggagagttttagccgtcttgtgtttcttgtttacttcacaaccaaatttgtcccctcttctctctgttaagggagagaagtcactttagctggataatacctatgtaacaaactgagcagctgttatttgggcaaaatcaaaggaagaaagagactatggtcttctatttattgtgggaaggaaaacagggtggggcgggtgagtgaaaaggtggaaatccctggtaccttgcctggtggttacacagtttaaccataggccaattttaggggcctctgaagtatctttctacaaacgcagacaagctccactacccctaacctgccaggatgctcaagtccactgtcacaatccctttcagaaaacattagtggccgctgccccagctacagagacggccgaaatgctttcactccttagctttgccaactccatcctccaaaacttcccagaatacctccctttccagttctaccaaatctgtacttgggagcagcctgctggatccagaacatgacaacagagagctgcgtccacagggaacaaagccctgacctctctctccacattacccttacaaaaacaggccctccccatgagagagctacacggcaggggcagacactgtgagtataagctactttcctccctggagtgctctatgtgggcagaacatgctctccttgcctctcctggaaggtgtcttctctatggcctggctagagctgcaaaaaagggacacaccccacttcggtaaaagaaaatagggaaaggccataaacaaagacagacttgtagtttattttgtattttttttaaataaatacactttacattaaaaaaaaggcct

SEQ ID NO: 383478 - DNA, 5255 bp, Homo sapiens
ggggagcattcgggccagagcggtcaaactctcgggccagagccgccagtgagtttgaccgctttgggagcattcggaccattgatcacgtcaaaggagatagctttgcctatattcagtacgagagcttggacgcagcccaggccgcctgtgctaaaatgaggggttttcccttgggtggaccagaccgcaggctccgcgtggattttgccaaagcagaggagactcggtacccccagcagtaccagccctcgccactccctgtgcattatgagctgctcacagatggatacacccggcaccgcaacctggacgccgacctggtgcgggacaggacgcccccacaccttctgtactcagaccgagaccggacttttttggaaggggactggaccagccccagtaaaagctctgaccgccgaaacagccttgagggctacagtcgctcagtgcgcagccggagtggtgagcgttggggggcagatggagaccgtggtttgcccaagccctgggaagagaggcggaaacggagaagcctttccagtgaccgtgggaggacaacccattcaccatatgaggaacggagtaggaccaagggcagtgggcagcagtcagagcggggctccgaccgcacccctgagcgcagccgcaaggagaaccactccagtgaagggaccaaggagtccagcagcaactccctcagcaacagcagacatggggctgaggaacggggccaccaccaccaccaccacgaggctgcagactcttcccacgggaagaaggcaagagacagcgagcgcaatcaccggaccacagaggccgagcccaagcctctggaagagccaaaacacgagaccaaaaagctgaagaatctttcagagtacgctcagacactacagctgggttggaatgggcttctggtgttgaaaaacagctgcttccccacgtctatgcatatcctagagggggaccagggggtgatcagcagtctcctcaaagaccacacttctgggagcaagctgacccagctgaagatcgcccagcgccttcgactggaccagcccaagcttgacgaggtcacacgacgcatcaagcaggggagccccaacggctatgcggtcctcttagccacccaggcaacccccagtgggcttggcactgaggggatgcccacagtagagcccggtctgcagaggcggcttctcaggaacctggtctcctacttgaaacagaagcaggccgcaggggtgatcagcttgccagtgggggggtccaagggcagagacggcacaggcatgctctacgccttcccaccctgcgacttttcccagcagtacctccagtcagcactaaggacattgggcaagctagaagaagaacacatggtgatagtcatcgtcagagacactgcctagcccaagcctgtctttcccagcgtcatgtttgtgtcacaaaagcagttattttaaaatctgatcccctctctaccctaccactttggtttgaattatctcctgggttattttggttcatttgggtggggatcaaagtcctgtccaccaccaaaactaagttcttagattttgggggatttttttttttaaacgatgagaagggaatccggttatgttgatttctagtgtacaagatactgtctgctgtggttctgtatttttttattttttgaccaactgtatggaaagttgtcagtaaaacctttgacagaggatggatttttaaacctgttcagagtcctggtttaatcaatcaagctaaaagaatcgaagacatccctagtgcatgtacacgaatgccctacgtcatccttccagcaccactgctgcatgggtcactctcggcctctcaattcttcaggctcagtctggactctacttacactcatttttatcttggctgacagcaggcaagcttcagtttgggctgtggacgctgccacacaagcctgagtagagcccatgcaaaggaagggatggggtgagcgcaaggcctgtggtcagcagctactgatggttttttctgccttaaaccgtgtgtgtgtccatcatcatcagtttgagctgtggctgtttgtttgggacagagtgcccactcagcatgtttggcagcaggtagccttcagcagctgtgtagtcttgtacaaggagaagctgtgcactgttgatgccagggggtctcggggcccctgatctgtccaggctcctggttcggcctactttctagcctcactcagcccagggatagccagtgttgggagacagagttgcctcaggttcccaggggcccgggagtccaaatactggaatggagggttggaggcagccttccttggatttactcatgaactttgcctagttgtttgtgatttttggctttctctggtcgttcaggggtgatgggtaatagagcaggcccgtgtccagtcatacctagagatttgtggggggatactgaacctctagactgaagtacttaccggggagcacagtggactaggggatgcccttgataatgacggtttcctaggtgcaagatcagagcatgtgcctacaccttgtgccctgatgccgaggtggagaccattgggaaataattaatagatatttttctggggggaaatcacaagtcactgaggtgtttgtttgtttgttaggcagtgctagagcttgaagccactcaagccagttggggaggaaagggatgcggaggtaccctctagctgggaagaagggtgagattccgtcttcttccctgtctcaagtaagtaaggaaggtactgcggacagtgcgggccagggaggaaaaccagagcacacagttttgtcaccatggaacaccccaaatgccattcttcagcgtgtctggtaccttggatgttcaaacagggaacactgtcagggctgaggagaacagaagctctggtaagcgaatgagcccctagatgataaccaggaactccaggttctgctggccgtggcatcctctctccaggtctgctcccttaccggagctaggataaggtagcatgagtgacacctgagattagaggctggggctcactgcaggctgtggagaggtcatgctggtccacaggaacacttggcagtgctctcgtagacccctcggtgatgtggaatggacaggtgcctcgcaagagagcaagcacgttcataacaaaacagcaacacaaagacatgttaagcatgtttatttatttgcctgtttttgtttttttacttgagctgtggtcacagctgccaggtacctaagcaagtcagttgggtacagcaggacacgccaccattccagggtagctggtaccgccagaaacaggagtgggtcttgtcctgttgcaggcacactgcagtggttttcctgcagctctccaacaaacgcctgagtcacaggccagagctgccttggtatgttgttaagtccaaaacttcttctctgggctacctatcttccttcatgaagcaggtgctcaggacccggaagaatcatctacctcccagctttgtgagacagaaccaagtaaaaggaaacatgctagaaaacgtgcctagagaagacacttcaacctttgccttatccaacccctcttcagagaaaggtgtcccatggccccaaaaagaactgccaagttttggtgaggagtaacaccctggcatgacattccttctctttcctggccctcaaccacttccttcctttggctcttaagacctagcaggttctgtgaactctcaggccttggccagcactagttaggggaggtcaggtggtcaatgtcctggtgattttatgagactgccccactgagaaaacttacttacttcaggcatccagtgcccccacccagggttcaggccctgtctaaggtgttgcttaaagacaaaaaggcaacatgtgcctcactggtggtgtgccactgttctcatgctgcctcctaagtgactccgattttcagccctggtagaataaggaagacagctgatgcctccttagccccttagcacatgttcctaaggtgtgttgtcaagccaacctgaattctgcctccctgttatagtccctgtctcccccacagagacctgtgggtgctcccagcagagttgagactggctccgttgagttaatgactagaatatagtgctttcactacttgattgttaacctgttttcttctgatgccatcagtaccagcagtcagactattccactggttaagtgtttactaccattaaagcgaggcatgaagcaaagagctgagtgagtcctctgctctccagaggaccaagaaatacctgtgtgacacagacccacttcagtgtgtacagcaaattctatagtgcttctgagcccagcagggctttacctgcccctggagagttttagccgtcttgtgtttcttgtttacttcacaaccaaatttgtcccctcttctctctgttaagggagagaagtcactttagctggataatacctatgtaacaaactgagcagctgttatttgggcaaaatcaaaggaagaaagagactatggtcttctatttattgtgggaaggaaaacagggtggggcgggtgagtgaaaaggtggaaatccctggtaccttgcctggtggttacacagtttaaccataggccaattttaggggcctctgaagtatctttctacaaacgcagacaagctccactacccctaacctgccaggatgctcaagtccactgtcacaatccctttcagaaaacattagtggccgctgccccagctacagagacggccgaaatgctttcactccttagctttgccaactccatcctccaaaacttcccagaatacctccctttccagttctaccaaatctgtacttgggagcagcctgctggatccagaacatgacaacagagagctgcgtccacagggaacaaagccctgacctctctctccacattacccttacaaaaacaggccctccccatgagagagctacacggcaggggcagacactgtgagtataagctactttcctccctggagtgctctatgtgggcagaacatgctctccttgcctctcctggaaggtgtcttctctatggcctggctagagctgcaaaaaagggacacaccccacttcggtaaaagaaaatagggaaaggccataaacaaagacagacttgtagtttattttgtattttttttaaataaatacactttacattaaaaaaaaggcct

SEQ ID NO: 383479 - DNA, 5228 bp, Homo sapiens
cgccgccaccgccgcgccgagtccttttgtccaagatggcggcgccgggggcgctgcctcctcggccgccgcctccgccgccgccgctgtgagaaacctacgggccgcccgcccgccgcgccagcgccatgaagcggcagagcgagcgagactctagcccgagcgggcgcggctcgtcatcgtccgccaagcgtccgcgggagcgcgaacgggaggcggaggcgggcgggcggcgggcggcgcacaaggcctctggcggcgccaagcacccggttccagcgcgggcccgcgacaaaccccgcggcagcggaagcggcgggggcgggcatcgcgacggccgcggcaccggggacgcgaatcaccgcgcgagtagcgggcgctcctcgggctccggcgctggcggcgggggacgcggcggcaaggcctcgggggacccgggcgcctccggcatgtcgccccgcgcgtctcctctgccgccgcctccgccaccgcctggggccgagcccgcgtgtcccggctcatccgcggccgcgcctgagtacaagacgttgctcatcagcagcttgagccccgcgctgcccgccgagcacctcgaggaccgccttcgccctggatgccgctgctgccgccgccgtgggactgtcccgggagcgggccctggactactacgggctgtacgacgaccgtgggcgcccctatggctacccagctgtgtgtgaggaggacctgatgcccgaggatgaccagcgggccacgcgcaacctcttcattggtaacctggaccacagcaggccgagcccaagcctctggaagagccaaaacacgagaccaaaaagctgaagaatctttcagagtacgctcagacactacagctgggttggaatgggcttctggtgttgaaaaacagctgcttccccacgtctatgcatatcctagagggggaccagggggtgatcagcagtctcctcaaagaccacacttctgggagcaagctgacccagctgaagatcgcccagcgccttcgactggaccagcccaagcttgacgaggtcacacgacgcatcaagcaggggagccccaacggctatgcggtcctcttagccacccaggcaacccccagtgggcttggcactgaggggatgcccacagtagagcccggtctgcagaggcggcttctcaggaacctggtctcctacttgaaacagaagcaggccgcaggggtgatcagcttgccagtgggggggtccaagggcagagacggcacaggcatgctctacgccttcccaccctgcgacttttcccagcagtacctccagtcagcactaaggacattgggcaagctagaagaagaacacatggtgatagtcatcgtcagagacactgcctagcccaagcctgtctttcccagcgtcatgtttgtgtcacaaaagcagttattttaaaatctgatcccctctctaccctaccactttggtttgaattatctcctgggttattttggttcatttgggtggggatcaaagtcctgtccaccaccaaaactaagttcttagattttgggggatttttttttttaaacgatgagaagggaatccggttatgttgatttctagtgtacaagatactgtctgctgtggttctgtatttttttattttttgaccaactgtatggaaagttgtcagtaaaacctttgacagaggatggatttttaaacctgttcagagtcctggtttaatcaatcaagctaaaagaatcgaagacatccctagtgcatgtacacgaatgccctacgtcatccttccagcaccactgctgcatgggtcactctcggcctctcaattcttcaggctcagtctggactctacttacactcatttttatcttggctgacagcaggcaagcttcagtttgggctgtggacgctgccacacaagcctgagtagagcccatgcaaaggaagggatggggtgagcgcaaggcctgtggtcagcagctactgatggttttttctgccttaaaccgtgtgtgtgtccatcatcatcagtttgagctgtggctgtttgtttgggacagagtgcccactcagcatgtttggcagcaggtagccttcagcagctgtgtagtcttgtacaaggagaagctgtgcactgttgatgccagggggtctcggggcccctgatctgtccaggctcctggttcggcctactttctagcctcactcagcccagggatagccagtgttgggagacagagttgcctcaggttcccaggggcccgggagtccaaatactggaatggagggttggaggcagccttccttggatttactcatgaactttgcctagttgtttgtgatttttggctttctctggtcgttcaggggtgatgggtaatagagcaggcccgtgtccagtcatacctagagatttgtggggggatactgaacctctagactgaagtacttaccggggagcacagtggactaggggatgcccttgataatgacggtttcctaggtgcaagatcagagcatgtgcctacaccttgtgccctgatgccgaggtggagaccattgggaaataattaatagatatttttctggggggaaatcacaagtcactgaggtgtttgtttgtttgttaggcagtgctagagcttgaagccactcaagccagttggggaggaaagggatgcggaggtaccctctagctgggaagaagggtgagattccgtcttcttccctgtctcaagtaagtaaggaaggtactgcggacagtgcgggccagggaggaaaaccagagcacacagttttgtcaccatggaacaccccaaatgccattcttcagcgtgtctggtaccttggatgttcaaacagggaacactgtcagggctgaggagaacagaagctctggtaagcgaatgagcccctagatgataaccaggaactccaggttctgctggccgtggcatcctctctccaggtctgctcccttaccggagctaggataaggtagcatgagtgacacctgagattagaggctggggctcactgcaggctgtggagaggtcatgctggtccacaggaacacttggcagtgctctcgtagacccctcggtgatgtggaatggacaggtgcctcgcaagagagcaagcacgttcataacaaaacagcaacacaaagacatgttaagcatgtttatttatttgcctgtttttgtttttttacttgagctgtggtcacagctgccaggtacctaagcaagtcagttgggtacagcaggacacgccaccattccagggtagctggtaccgccagaaacaggagtgggtcttgtcctgttgcaggcacactgcagtggttttcctgcagctctccaacaaacgcctgagtcacaggccagagctgccttggtatgttgttaagtccaaaacttcttctctgggctacctatcttccttcatgaagcaggtgctcaggacccggaagaatcatctacctcccagctttgtgagacagaaccaagtaaaaggaaacatgctagaaaacgtgcctagagaagacacttcaacctttgccttatccaacccctcttcagagaaaggtgtcccatggccccaaaaagaactgccaagttttggtgaggagtaacaccctggcatgacattccttctctttcctggccctcaaccacttccttcctttggctcttaagacctagcaggttctgtgaactctcaggccttggccagcactagttaggggaggtcaggtggtcaatgtcctggtgattttatgagactgccccactgagaaaacttacttacttcaggcatccagtgcccccacccagggttcaggccctgtctaaggtgttgcttaaagacaaaaaggcaacatgtgcctcactggtggtgtgccactgttctcatgctgcctcctaagtgactccgattttcagccctggtagaataaggaagacagctgatgcctccttagccccttagcacatgttcctaaggtgtgttgtcaagccaacctgaattctgcctccctgttatagtccctgtctcccccacagagacctgtgggtgctcccagcagagttgagactggctccgttgagttaatgactagaatatagtgctttcactacttgattgttaacctgttttcttctgatgccatcagtaccagcagtcagactattccactggttaagtgtttactaccattaaagcgaggcatgaagcaaagagctgagtgagtcctctgctctccagaggaccaagaaatacctgtgtgacacagacccacttcagtgtgtacagcaaattctatagtgcttctgagcccagcagggctttacctgcccctggagagttttagccgtcttgtgtttcttgtttacttcacaaccaaatttgtcccctcttctctctgttaagggagagaagtcactttagctggataatacctatgtaacaaactgagcagctgttatttgggcaaaatcaaaggaagaaagagactatggtcttctatttattgtgggaaggaaaacagggtggggcgggtgagtgaaaaggtggaaatccctggtaccttgcctggtggttacacagtttaaccataggccaattttaggggcctctgaagtatctttctacaaacgcagacaagctccactacccctaacctgccaggatgctcaagtccactgtcacaatccctttcagaaaacattagtggccgctgccccagctacagagacggccgaaatgctttcactccttagctttgccaactccatcctccaaaacttcccagaatacctccctttccagttctaccaaatctgtacttgggagcagcctgctggatccagaacatgacaacagagagctgcgtccacagggaacaaagccctgacctctctctccacattacccttacaaaaacaggccctccccatgagagagctacacggcaggggcagacactgtgagtataagctactttcctccctggagtgctctatgtgggcagaacatgctctccttgcctctcctggaaggtgtcttctctatggcctggctagagctgcaaaaaagggacacaccccacttcggtaaaagaaaatagggaaaggccataaacaaagacagacttgtagtttattttgtattttttttaaataaatacactttacattaaaaaaaaggcct

SEQ ID NO: 383480 - DNA, 2016 bp, Homo sapiens
cgccgccaccgccgcgccgagtccttttgtccaagatggcggcgccgggggcgctgcctcctcggccgccgcctccgccgccgccgctgtgagaaacctacgggccgcccgcccgccgcgccagcgccatgaagcggcagagcgagcgagactctagcccgagcgggcgcggctcgtcatcgtccgccaagcgtccgcgggagcgcgaacgggaggcggaggcgggcgggcggcgggcggcgcacaaggcctctggcggcgccaagcacccggttccagcgcgggcccgcgacaaaccccgcggcagcggaagcggcgggggcgggcatcgcgacggccgcggcaccggggacgcgaatcaccgcgcgagtagcgggcgctcctcgggctccggcgctggcggcgggggacgcggcggcaaggcctcgggggacccgggcgcctccggcatgtcgccccgcgcgtctcctctgccgccgcctccgccaccgcctggggccgagcccgcgtgtcccggctcatccgcggccgcgcctgagtacaagacgttgctcatcagcagcttgagccccgcgctgcccgccgagcacctcgaggaccggctcttccaccagttcaagcgcttcggcgagatcagcctccgcctgtcgcacacgcctgagctgggccgtgtggcctacgtgaatttccggcacccacaggacgcacgcgaggcccgccagcacgccctggcccggcagctgctgctctacgaccgcccgctcaaggtagagcccgtgtacctgcgtggcggcggcgggagcagtcggcgaagtagcagcagcagcgccgccgcttccacgcctcccccagggccgcccgcgcccgccgacccgctcggctacctcccgctacacggaggctaccagtacaagcagcgctcgctgtcccccgtcgctgccccgcccctgcgggagccccgtgcccgtcacgccgccgcagccttcgccctggatgccgctgctgccgccgccgtgggactgtcccgggagcgggccctggactactacgggctgtacgacgaccgtgggcgcccctatggctacccagctgtgtgtgaggaggacctgatgcccgaggatgaccagcgggccacgcgcaacctcttcattggtaacctggaccacagcgtatctgaggtggagctgcgaagggccttcgagaaatatggcatcatcgaggaggtggtcatcaagaggcctgcccgtggccagggcggtgcctatgccttcctcaagttccagaacctggacatggcccatagggctaaggtggccatgtcgggccgagtgattggtcgcaaccccattaagataggctatggcaaggccaaccccaccactcgtctctgggtgggtggcctgggacctaacacgtcactggcggctctggcccgagagtttgaccgctttgggagcattcggaccattgatcacgtcaaaggagatagctttgcctatattcagtacgagagcttggacgcagcccaggccgcctgtgctaaaatgaggggttttcccttgggtggaccagaccgcaggctccgcgtggattttgccaaagcagaggagactcggtacccccagcagtaccagccctcgccactccctgtgcattatgagctgctcacagatggatacacccggcaccgcaacctggacgccgacctggtgcgggacaggacgcccccacaccttctgtactcagaccgagaccggacttttttggaaggggactggaccagccccagtaaaagctctgaccgccgaaacagccttgagggctacagtcgctcagtgcgcagccggagtggtgagcgttggggggcagatggagaccgtggtttgcccaagccctgggaagagaggcggaaacggagaagccagcaggagggccacaccgaagcctgcggctcgctcaccagcatgcaccggtgcagcaatgtccaggtgacccagactccgcgcagtctgtgag

SEQ ID NO: 383481 - DNA, 1592 bp, Homo sapiens
gctggtacggccgggattttgggattgacattccttctctttcctggccctcaaccacttccttcctttggctcttaagacctagcaggttctgtgaactctcaggccttggccagcactagttaggggaggtcaggtggtcaatgtcctggtgattttatgagactgccccactgagaaaacttacttacttcaggcatccagtgcccccacccagggttcaggccctgtctaaggtgttgcttaaagacaaaaaggcaacatgtgcctcactggtggtgtgccactgttctcatgctgcctcctaagtgactccgattttcagccctggtagaataaggaagacagctgatgcctccttagccccttagcacatgttcctaaggtgtgttgtcaagccaacctgaattctgcctccctgttatagtccctgtctcccccacagagacctgtgggtgctcccagcagagttgagactggctccgttgagttaatgactagaatatagtgctttcactacttgattgttaacctgttttcttctgatgccatcagtaccagcagtcagactattccactggttaagtgtttactaccattaaagcgaggcatgaagcaaagagctgagtgagtcctctgctctccagaggaccaagaaatacctgtgtgacacagacccacttcagtgtgtacagcaaattctatagtgcttctgagcccagcagggctttacctgcccctggagagttttagccgtcttgtgtttcttgtttacttcacaaccaaatttgtcccctcttctctctgttaagggagagaagtcactttagctggataatacctatgtaacaaactgagcagctgttatttgggcaaaatcaaaggaagaaagagactatggtcttctatttattgtgggaaggaaaacagggtggggcgggtgagtgaaaaggtggaaatccctggtaccttgcctggtggttacacagtttaaccataggccaattttaggggcctctgaagtatctttctacaaacgcagacaagctccactacccctaacctgccaggatgctcaagtccactgtcacaatccctttcagaaaacattagtggccgctgccccagctacagagacggccgaaatgctttcactccttagctttgccaactccatcctccaaaacttcccagaatacctccctttccagttctaccaaatctgtacttgggagcagcctgctggatccagaacatgacaacagagagctgcgtccacagggaacaaagccctgacctctctctccacattacccttacaaaaacaggccctccccatgagagagctacacggcaggggcagacactgtgagtataagctactttcctccctggagtgctctatgtgggcagaacatgctctccttgcctctcctggaaggtgtcttctctatggcctggctagagctgcaaaaaagggacacaccccacttcggtaaaagaaaatagggaaaggccataaacaaagacagacttgtagtttattttgtattttttttaaataaatacactttacattaaaaaaaaggcct

SEQ ID NO: 383482 - DNA, 6400 bp, Homo sapiens
caatggtcgcccggcgtgtttggggcgcctcgcgcgtgcctccggcctccgcccgcccgccgcccgccgcgtgttccggagacgccgcggttcgtgggccaaggtcgcccgggcgctgtttgcgggccgccgcggccgcggatgagccgggacacgcgggctcggccccagcggtggcggaggcggcggcagaggagacgcgcgggggcgacatgccggaggcgcccgggacccccgaggccttgccgccgcgacccccgccgccagcgccggagcccgagggagcgcccgctactcgcgcggtgattcgcgtccccggcgccgcggccccgcgctgcccgccgagcacctcgaggaccggctcttccaccagttcaagcgcttcggcgagatcagcctccgcctgtcgcacacgcctgagctgggccgtgtggcctacgtgaatttccggcacccacaggacgcacgcgaggcccgccagcacgccctggcccggcagctgctgctctacgaccgcccgctcaaggtagagcccgtgtacctgcgtggcggcggcgggagcagtcggcgaagtagcagcagcagcgccgccgcttccacgcctcccccagggccgcccgcgcccgccgacccgctcggctacctcccgctacacggaggctaccagtacaagcagcgctcgctgtcccccgtcgctgccccgcccctgcgggagccccgtgcccgtcacgccgccgcagccttcgccctggatgccgctgctgccgccgccgtgggactgtcccgggagcgggccctggactactacgggctgtacgacgaccgtgggcgcccctatggctacccagctgtgtgtgaggaggacctgatgcccgaggatgaccagcgggccacgcgcaacctcttcattggtaacctggaccacagcgtatctgaggtggagctgcgaagggccttcgagaaatatggcatcatcgaggaggtggtcatcaagaggcctgcccgtggccagggcggtgcctatgccttcctcaagttccagaacctggacatggcccatagggctaaggtggccatgtcgggccgagtgattggtcgcaaccccattaagataggctatggcaaggccaaccccaccactcgtctctgggtgggtggcctgggacctaacacgtcactggcggctctggcccgagagtttgaccgctttgggagcattcggaccattgatcacgtcaaaggagatagctttgcctatattcagtacgagagcttggacgcagcccaggccgcctgtgctaaaatgaggggttttcccttgggtggaccagaccgcaggctccgcgtggattttgccaaagcagaggagactcggtacccccagcagtaccagccctcgccactccctgtgcattatgagctgctcacagatggatacacccggcaccgcaacctggacgccgacctggtgcgggacaggacgcccccacaccttctgtactcagaccgagaccggacttttttggaaggggactggaccagccccagtaaaagctctgaccgccgaaacagccttgagggctacagtcgctcagtgcgcagccggagtggtgagcgttggggggcagatggagaccgtggtttgcccaagccctgggaagagaggcggaaacggagaagcctttccagtgaccgtgggaggacaacccattcaccatatgaggaacggagtaggaccaagggcagtgggcagcagtcagagcggggctccgaccgcacccctgagcgcagccgcaaggagaaccactccagtgaagggaccaaggagtccagcagcaactccctcagcaacagcagacatggggctgaggaacggggccaccaccaccaccaccacgaggctgcagactcttcccacgggaagaaggcaagagacagcgagcgcaatcaccggaccacagaggccgagcccaagcctctggaagagccaaaacacgagaccaaaaagctgaagaatctttcagagtacgctcagacactacagctgggttggaatgggcttctggtgttgaaaaacagctgcttccccacgtctatgcatatcctagagggggaccagggggtgatcagcagtctcctcaaagaccacacttctgggagcaagctgacccagctgaagatcgcccagcgccttcgactggaccagcccaagcttgacgaggtcacacgacgcatcaagcaggggagccccaacggctatgcggtcctcttagccacccaggcaacccccagtgggcttggcactgaggggatgcccacagtagagcccggtctgcagaggcggcttctcaggaacctggtctcctacttgaaacagaagcaggccgcaggggtgatcagcttgccagtgggggggtccaagggcagagacggcacaggcatgctctacgccttcccaccctgcgacttttcccagcagtacctccagtcagcactaaggacattgggcaagctagaagaagaacacatggtgatagtcatcgtcagagacactgcctagcccaagcctgtctttcccagcgtcatgtttgtgtcacaaaagcagttattttaaaatctgatcccctctctaccctaccactttggtttgaattatctcctgggttattttggttcatttgggtggggatcaaagtcctgtccaccaccaaaactaagttcttagattttgggggatttttttttttaaacgatgagaagggaatccggttatgttgatttctagtgtacaagatactgtctgctgtggttctgtatttttttattttttgaccaactgtatggaaagttgtcagtaaaacctttgacagaggatggatttttaaacctgttcagagtcctggtttaatcaatcaagctaaaagaatcgaagacatccctagtgcatgtacacgaatgccctacgtcatccttccagcaccactgctgcatgggtcactctcggcctctcaattcttcaggctcagtctggactctacttacactcatttttatcttggctgacagcaggcaagcttcagtttgggctgtggacgctgccacacaagcctgagtagagcccatgcaaaggaagggatggggtgagcgcaaggcctgtggtcagcagctactgatggttttttctgccttaaaccgtgtgtgtgtccatcatcatcagtttgagctgtggctgtttgtttgggacagagtgcccactcagcatgtttggcagcaggtagccttcagcagctgtgtagtcttgtacaaggagaagctgtgcactgttgatgccagggggtctcggggcccctgatctgtccaggctcctggttcggcctactttctagcctcactcagcccagggatagccagtgttgggagacagagttgcctcaggttcccaggggcccgggagtccaaatactggaatggagggttggaggcagccttccttggatttactcatgaactttgcctagttgtttgtgatttttggctttctctggtcgttcaggggtgatgggtaatagagcaggcccgtgtccagtcatacctagagatttgtggggggatactgaacctctagactgaagtacttaccggggagcacagtggactaggggatgcccttgataatgacggtttcctaggtgcaagatcagagcatgtgcctacaccttgtgccctgatgccgaggtggagaccattgggaaataattaatagatatttttctggggggaaatcacaagtcactgaggtgtttgtttgtttgttaggcagtgctagagcttgaagccactcaagccagttggggaggaaagggatgcggaggtaccctctagctgggaagaagggtgagattccgtcttcttccctgtctcaagtaagtaaggaaggtactgcggacagtgcgggccagggaggaaaaccagagcacacagttttgtcaccatggaacaccccaaatgccattcttcagcgtgtctggtaccttggatgttcaaacagggaacactgtcagggctgaggagaacagaagctctggtaagcgaatgagcccctagatgataaccaggaactccaggttctgctggccgtggcatcctctctccaggtctgctcccttaccggagctaggataaggtagcatgagtgacacctgagattagaggctggggctcactgcaggctgtggagaggtcatgctggtccacaggaacacttggcagtgctctcgtagacccctcggtgatgtggaatggacaggtgcctcgcaagagagcaagcacgttcataacaaaacagcaacacaaagacatgttaagcatgtttatttatttgcctgtttttgtttttttacttgagctgtggtcacagctgccaggtacctaagcaagtcagttgggtacagcaggacacgccaccattccagggtagctggtaccgccagaaacaggagtgggtcttgtcctgttgcaggcacactgcagtggttttcctgcagctctccaacaaacgcctgagtcacaggccagagctgccttggtatgttgttaagtccaaaacttcttctctgggctacctatcttccttcatgaagcaggtgctcaggacccggaagaatcatctacctcccagctttgtgagacagaaccaagtaaaaggaaacatgctagaaaacgtgcctagagaagacacttcaacctttgccttatccaacccctcttcagagaaaggtgtcccatggccccaaaaagaactgccaagttttggtgaggagtaacaccctggcatgacattccttctctttcctggccctcaaccacttccttcctttggctcttaagacctagcaggttctgtgaactctcaggccttggccagcactagttaggggaggtcaggtggtcaatgtcctggtgattttatgagactgccccactgagaaaacttacttacttcaggcatccagtgcccccacccagggttcaggccctgtctaaggtgttgcttaaagacaaaaaggcaacatgtgcctcactggtggtgtgccactgttctcatgctgcctcctaagtgactccgattttcagccctggtagaataaggaagacagctgatgcctccttagccccttagcacatgttcctaaggtgtgttgtcaagccaacctgaattctgcctccctgttatagtccctgtctcccccacagagacctgtgggtgctcccagcagagttgagactggctccgttgagttaatgactagaatatagtgctttcactacttgattgttaacctgttttcttctgatgccatcagtaccagcagtcagactattccactggttaagtgtttactaccattaaagcgaggcatgaagcaaagagctgagtgagtcctctgctctccagaggaccaagaaatacctgtgtgacacagacccacttcagtgtgtacagcaaattctatagtgcttctgagcccagcagggctttacctgcccctggagagttttagccgtcttgtgtttcttgtttacttcacaaccaaatttgtcccctcttctctctgttaagggagagaagtcactttagctggataatacctatgtaacaaactgagcagctgttatttgggcaaaatcaaaggaagaaagagactatggtcttctatttattgtgggaaggaaaacagggtggggcgggtgagtgaaaaggtggaaatccctggtaccttgcctggtggttacacagtttaaccataggccaattttaggggcctctgaagtatctttctacaaacgcagacaagctccactacccctaacctgccaggatgctcaagtccactgtcacaatccctttcagaaaacattagtggccgctgccccagctacagagacggccgaaatgctttcactccttagctttgccaactccatcctccaaaacttcccagaatacctccctttccagttctaccaaatctgtacttgggagcagcctgctggatccagaacatgacaacagagagctgcgtccacagggaacaaagccctgacctctctctccacattacccttacaaaaacaggccctccccatgagagagctacacggcaggggcagacactgtgagtataagctactttcctccctggagtgctctatgtgggcagaacatgctctccttgcctctcctggaaggtgtcttctctatggcctggctagagctgcaaaaaagggacacaccccacttcggtaaaagaaaatagggaaaggccataaacaaagacagacttgtagtttattttgtattttttttaaataaatacactttacattaaaaaaaaggcct

SEQ ID NO: 383483 - DNA, 6641 bp, Homo sapiens
cgccgccaccgccgcgccgagtccttttgtccaagatggcggcgccgggggcgctgcctcctcggccgccgcctccgccgccgccgctgtgagaaacctacgggccgcccgcccgccgcgccagcgccatgaagcggcagagcgagcgagactctagcccgagcgggcgcggctcgtcatcgtccgccaagcgtccgcgggagcgcgaacgggaggcggaggcgggcgggcggcgggcggcgcacaaggcctctggcggcgccaagcacccggttccagcgcgggcccgcgacaaaccccgcggcagcggaagcggcgggggcgggcatcgcgacggccgcggcaccggggacgcgaatcaccgcgcgagtagcgggcgctcctcgggctccggcgctggcggcgggggacgcggcggcaaggcctcgggggacccgggcgcctccggcatgtcgccccgcgcgtctcctctgccgccgcctccgccaccgcctggggccgagcccgcgtgtcccggctcatccgcggccgcgcctgagtacaagacgttgctcatcagcagcttgagccccgcgctgcccgccgagcacctcgaggaccggctcttccaccagttcaagcgcttcggcgagatcagcctccgcctgtcgcacacgcctgagctgggccgtgtggcctacgtgaatttccggcacccacaggacgcacgcgaggcccgccagcacgccctggcccggcagctgctgctctacgaccgcccgctcaaggtagagcccgtgtacctgcgtggcggcggcgggagcagtcggcgaagtagcagcagcagcgccgccgcttccacgcctcccccagggccgcccgcgcccgccgacccgctcggctacctcccgctacacggaggctaccagtacaagcagcgctcgctgtcccccgtcgctgccccgcccctgcgggagccccgtgcccgtcacgccgccgcagccttcgccctggatgccgctgctgccgccgccgtgggactgtcccgggagcgggccctggactactacgggctgtacgacgaccgtgggcgcccctatggctacccagctgtgtgtgaggaggacctgatgcccgaggatgaccagcgggccacgcgcaacctcttcattggtaacctggaccacagcgtatctgaggtggagctgcgaagggccttcgagaaatatggcatcatcgaggaggtggtcatcaagaggcctgcccgtggccagggcggtgcctatgccttcctcaagttccagaacctggacatggcccatagggctaaggtggccatgtcgggccgagtgattggtcgcaaccccattaagataggctatggcaaggccaaccccaccactcgtctctgggtgggtggcctgggacctaacacgtcactggcggctctggcccgagagtttgaccgctttgggagcattcggaccattgatcacgtcaaaggagatagctttgcctatattcagtacgagagcttggacgcagcccaggccgcctgtgctaaaatgaggggttttcccttgggtggaccagaccgcaggctccgcgtggattttgccaaagcagaggagactcggtacccccagcagtaccagccctcgccactccctgtgcattatgagctgctcacagatggatacacccggcaccgcaacctggacgccgacctggtgcgggacaggacgcccccacaccttctgtactcagaccgagaccggacttttttggaaggggactggaccagccccagtaaaagctctgaccgccgaaacagccttgagggctacagtcgctcagtgcgcagccggagtggtgagcgttggggggcagatggagaccgtggtttgcccaagccctgggaagagaggcggaaacggagaagcctttccagtgaccgtgggaggacaacccattcaccatatgaggaacggagtaggaccaagggcagtgggcagcagtcagagcggggctccgaccgcacccctgagcgcagccgcaaggagaaccactccagtgaagggaccaaggagtccagcagcaactccctcagcaacagcagacatggggctgaggaacggggccaccaccaccaccaccacgaggctgcagactcttcccacgggaagaaggcaagagacagcgagcgcaatcaccggaccacagaggccgagcccaagcctctggaagagccaaaacacgagaccaaaaagctgaagaatctttcagagtacgctcagacactacagctgggttggaatgggcttctggtgttgaaaaacagctgcttccccacgtctatgcatatcctagagggggaccagggggtgatcagcagtctcctcaaagaccacacttctgggagcaagctgacccagctgaagatcgcccagcgccttcgactggaccagcccaagcttgacgaggtcacacgacgcatcaagcaggggagccccaacggctatgcggtcctcttagccacccaggcaacccccagtgggcttggcactgaggggatgcccacagtagagcccggtctgcagaggcggcttctcaggaacctggtctcctacttgaaacagaagcaggccgcaggggtgatcagcttgccagtgggggggtccaagggcagagacggcacaggcatgctctacgccttcccaccctgcgacttttcccagcagtacctccagtcagcactaaggacattgggcaagctagaagaagaacacatggtgatagtcatcgtcagagacactgcctagcccaagcctgtctttcccagcgtcatgtttgtgtcacaaaagcagttattttaaaatctgatcccctctctaccctaccactttggtttgaattatctcctgggttattttggttcatttgggtggggatcaaagtcctgtccaccaccaaaactaagttcttagattttgggggatttttttttttaaacgatgagaagggaatccggttatgttgatttctagtgtacaagatactgtctgctgtggttctgtatttttttattttttgaccaactgtatggaaagttgtcagtaaaacctttgacagaggatggatttttaaacctgttcagagtcctggtttaatcaatcaagctaaaagaatcgaagacatccctagtgcatgtacacgaatgccctacgtcatccttccagcaccactgctgcatgggtcactctcggcctctcaattcttcaggctcagtctggactctacttacactcatttttatcttggctgacagcaggcaagcttcagtttgggctgtggacgctgccacacaagcctgagtagagcccatgcaaaggaagggatggggtgagcgcaaggcctgtggtcagcagctactgatggttttttctgccttaaaccgtgtgtgtgtccatcatcatcagtttgagctgtggctgtttgtttgggacagagtgcccactcagcatgtttggcagcaggtagccttcagcagctgtgtagtcttgtacaaggagaagctgtgcactgttgatgccagggggtctcggggcccctgatctgtccaggctcctggttcggcctactttctagcctcactcagcccagggatagccagtgttgggagacagagttgcctcaggttcccaggggcccgggagtccaaatactggaatggagggttggaggcagccttccttggatttactcatgaactttgcctagttgtttgtgatttttggctttctctggtcgttcaggggtgatgggtaatagagcaggcccgtgtccagtcatacctagagatttgtggggggatactgaacctctagactgaagtacttaccggggagcacagtggactaggggatgcccttgataatgacggtttcctaggtgcaagatcagagcatgtgcctacaccttgtgccctgatgccgaggtggagaccattgggaaataattaatagatatttttctggggggaaatcacaagtcactgaggtgtttgtttgtttgttaggcagtgctagagcttgaagccactcaagccagttggggaggaaagggatgcggaggtaccctctagctgggaagaagggtgagattccgtcttcttccctgtctcaagtaagtaaggaaggtactgcggacagtgcgggccagggaggaaaaccagagcacacagttttgtcaccatggaacaccccaaatgccattcttcagcgtgtctggtaccttggatgttcaaacagggaacactgtcagggctgaggagaacagaagctctggtaagcgaatgagcccctagatgataaccaggaactccaggttctgctggccgtggcatcctctctccaggtctgctcccttaccggagctaggataaggtagcatgagtgacacctgagattagaggctggggctcactgcaggctgtggagaggtcatgctggtccacaggaacacttggcagtgctctcgtagacccctcggtgatgtggaatggacaggtgcctcgcaagagagcaagcacgttcataacaaaacagcaacacaaagacatgttaagcatgtttatttatttgcctgtttttgtttttttacttgagctgtggtcacagctgccaggtacctaagcaagtcagttgggtacagcaggacacgccaccattccagggtagctggtaccgccagaaacaggagtgggtcttgtcctgttgcaggcacactgcagtggttttcctgcagctctccaacaaacgcctgagtcacaggccagagctgccttggtatgttgttaagtccaaaacttcttctctgggctacctatcttccttcatgaagcaggtgctcaggacccggaagaatcatctacctcccagctttgtgagacagaaccaagtaaaaggaaacatgctagaaaacgtgcctagagaagacacttcaacctttgccttatccaacccctcttcagagaaaggtgtcccatggccccaaaaagaactgccaagttttggtgaggagtaacaccctggcatgacattccttctctttcctggccctcaaccacttccttcctttggctcttaagacctagcaggttctgtgaactctcaggccttggccagcactagttaggggaggtcaggtggtcaatgtcctggtgattttatgagactgccccactgagaaaacttacttacttcaggcatccagtgcccccacccagggttcaggccctgtctaaggtgttgcttaaagacaaaaaggcaacatgtgcctcactggtggtgtgccactgttctcatgctgcctcctaagtgactccgattttcagccctggtagaataaggaagacagctgatgcctccttagccccttagcacatgttcctaaggtgtgttgtcaagccaacctgaattctgcctccctgttatagtccctgtctcccccacagagacctgtgggtgctcccagcagagttgagactggctccgttgagttaatgactagaatatagtgctttcactacttgattgttaacctgttttcttctgatgccatcagtaccagcagtcagactattccactggttaagtgtttactaccattaaagcgaggcatgaagcaaagagctgagtgagtcctctgctctccagaggaccaagaaatacctgtgtgacacagacccacttcagtgtgtacagcaaattctatagtgcttctgagcccagcagggctttacctgcccctggagagttttagccgtcttgtgtttcttgtttacttcacaaccaaatttgtcccctcttctctctgttaagggagagaagtcactttagctggataatacctatgtaacaaactgagcagctgttatttgggcaaaatcaaaggaagaaagagactatggtcttctatttattgtgggaaggaaaacagggtggggcgggtgagtgaaaaggtggaaatccctggtaccttgcctggtggttacacagtttaaccataggccaattttaggggcctctgaagtatctttctacaaacgcagacaagctccactacccctaacctgccaggatgctcaagtccactgtcacaatccctttcagaaaacattagtggccgctgccccagctacagagacggccgaaatgctttcactccttagctttgccaactccatcctccaaaacttcccagaatacctccctttccagttctaccaaatctgtacttgggagcagcctgctggatccagaacatgacaacagagagctgcgtccacagggaacaaagccctgacctctctctccacattacccttacaaaaacaggccctccccatgagagagctacacggcaggggcagacactgtgagtataagctactttcctccctggagtgctctatgtgggcagaacatgctctccttgcctctcctggaaggtgtcttctctatggcctggctagagctgcaaaaaagggacacaccccacttcggtaaaagaaaatagggaaaggccataaacaaagacagacttgtagtttattttgtattttttttaaataaatacactttacattaaaaaaaaggcct

SEQ ID NO: 383484 - DNA, 3125 bp, Homo sapiens
cgccgccaccgccgcgccgagtccttttgtccaagatggcggcgccgggggcgctgcctcctcggccgccgcctccgccgccgccgctgtgagaaacctacgggccgcccgcccgccgcgccagcgccatgaagcggcagagcgagcgagactctagcccgagcgggcgcggctcgtcatcgtccgccaagcgtccgcgggagcgcgaacgggaggcggaggcgggcgggcggcgggcggcgcacaaggcctctggcggcgccaagcacccggttccagcgcgggcccgcgacaaaccccgcggcagcggaagcggcgggggcgggcatcgcgacggccgcggcaccggggacgcgaatcaccgcgcgagtagcgggcgctcctcgggctccggcgctggcggcgggggacgcggcggcaaggcctcgggggacccgggcgcctccggcatgtcgccccgcgcgtctcctctgccgccgcctccgccaccgcctggggccgagcccgcgtgtcccggctcatccgcggccgcgcctgagtacaagacgttgctcatcagcagcttgagccccgcgctgcccgccgagcacctcgaggaccggctcttccaccagttcaagcgcttcggcgagatcagcctccgcctgtcgcacacgcctgagctgggccgtgtggcctacgtgaatttccggcacccacaggacgcacgcgaggcccgccagcacgccctggcccggcagctgctgctctacgaccgcccgctcaaggtagagcccgtgtacctgcgtggcggcggcgggagcagtcggcgaagtagcagcagcagcgccgccgcttccacgcctcccccagggccgcccgcgcccgccgacccgctcggctacctcccgctacacggaggctaccagtacaagcagcgctcgctgtcccccgtcgctgccccgcccctgcgggagccccgtgcccgtcacgccgccgcagccttcgccctggatgccgctgctgccgccgccgtgggactgtcccgggagcgggccctggactactacgggctgtacgacgaccgtgggcgcccctatggctacccagctgtgtgtgaggaggacctgatgcccgaggatgaccagcgggccacgcgcaacctcttcattggtaacctggaccacagcgtatctgaggtggagctgcgaagggccttcgagaaatatggcatcatcgaggaggtggtcatcaagaggcctgcccgtggccagggcggtgcctatgccttcctcaagttccagaacctggacatggcccatagggctaaggtggccatgtcgggccgagtgattggtcgcaaccccattaagataggctatggcaaggccaaccccaccactcgtctctgggtgggtggcctgggacctaacacgtcactggcggctctggcccgagagtttgaccgctttgggagcattcggaccattgatcacgtcaaaggagatagctttgcctatattcagtacgagagcttggacgcagcccaggccgcctgtgctaaaatgaggggttttcccttgggtggaccagaccgcaggctccgcgtggattttgccaaagcagaggagactcggtacccccagcagtaccagccctcgccactccctgtgcattatgagctgctcacagatggatacacccggcaccgcaacctggacgccgacctggtgcgggacaggacgcccccacaccttctgtactcagaccgagaccggacttttttggaaggggactggaccagccccagtaaaagctctgaccgccgaaacagccttgagggctacagtcgctcagtgcgcagccggagtggtgagcgttggggggcagatggagaccgtggtttgcccaagccctgggaagagaggcggaaacggagaagcctttccagtgaccgtgggaggacaacccattcaccatatgaggaacggagtaggaccaagggcagtgggcagcagtcagagcggggctccgaccgcacccctgagcgcagccgcaaggagaaccactccagtgaagggaccaaggagtccagcagcaactccctcagcaacagcagacatggggctgaggaacggggccaccaccaccaccaccacgaggctgcagactcttcccacgggaagaaggcaagagacagcgagcgcaatcaccggaccacagaggccgagcccaagcctctggaagagccaaaacacgagaccaaaaagctgaagaatctttcagagtacgctcagacactacagctgggttggaatgggcttctggtgttgaaaaacagctgcttccccacgtctatgcatatcctagagggggaccagggggtgatcagcagtctcctcaaagaccacacttctgggagcaagctgacccagctgaagatcgcccagcgccttcgactggaccagcccaagcttgacgaggtcacacgacgcatcaagcaggggagccccaacggctatgcggtcctcttagccacccaggcaacccccagtgggcttggcactgaggggatgcccacagtagagcccggtctgcagaggcggcttctcaggaacctggtctcctacttgaaacagaagcaggccgcaggggtgatcagcttgccagtgggggggtccaagggcagagacggcacaggcatgctctacgccttcccaccctgcgacttttcccagcagtacctccagtcagcactaaggacattgggcaagctagaagaagaacacatggtgatagtcatcgtcagagacactgcctagcccaagcctgtctttcccagcgtcatgtttgtgtcacaaaagcagttattttaaaatctgatcccctctctaccctaccactttggtttgaattatctcctgggttattttggttcatttgggtggggatcaaagtcctgtccaccaccaaaactaagttcttagattttgggggatttttttttttaaacgatgagaagggaatccggttatgttgatttctagtgtacaagatactgtctgctgtggttctgtatttttttattttttgaccaactgtatggaaagttgtcagtaaaacctttgacagaggatggattttta

SEQ ID NO: 383485 - DNA, 5864 bp, Homo sapiens
aggggagaaaaaaaatcggcaggacaggggctgggtgttatagcagcagcgccgccgcttccacgcctcccccagggccgcccgcgcccgccgacccgctcggctacctcccgctacacggaggctaccagtacaagcagcgctcgctgtcccccgtcgctgccccgcccctgcgggagccccgtgcccgtcacgccgccgcagccttcgccctggatgccgctgctgccgccgccgtgggactgtcccgggagcgggccctggactactacgggctgtacgacgaccgtgggcgcccctatggctacccagctgtgtgtgaggaggacctgatgcccgaggatgaccagcgggccacgcgcaacctcttcattggtaacctggaccacagcgtatctgaggtggagctgcgaagggccttcgagaaatatggcatcatcgaggaggtggtcatcaagaggcctgcccgtggccagggcggtgcctatgccttcctcaagttccagaacctggacatggcccatagggctaaggtggccatgtcgggccgagtgattggtcgcaaccccattaagataggctatggcaaggccaaccccaccactcgtctctgggtgggtggcctgggacctaacacgtcactggcggctctggcccgagagtttgaccgctttgggagcattcggaccattgatcacgtcaaaggagatagctttgcctatattcagtacgagagcttggacgcagcccaggccgcctgtgctaaaatgaggggttttcccttgggtggaccagaccgcaggctccgcgtggattttgccaaagcagaggagactcggtacccccagcagtaccagccctcgccactccctgtgcattatgagctgctcacagatggatacacccggcaccgcaacctggacgccgacctggtgcgggacaggacgcccccacaccttctgtactcagaccgagaccggacttttttggaaggggactggaccagccccagtaaaagctctgaccgccgaaacagccttgagggctacagtcgctcagtgcgcagccggagtggtgagcgttggggggcagatggagaccgtggtttgcccaagccctgggaagagaggcggaaacggagaagcctttccagtgaccgtgggaggacaacccattcaccatatgaggaacggagtaggaccaagggcagtgggcagcagtcagagcggggctccgaccgcacccctgagcgcagccgcaaggagaaccactccagtgaagggaccaaggagtccagcagcaactccctcagcaacagcagacatggggctgaggaacggggccaccaccaccaccaccacgaggctgcagactcttcccacgggaagaaggcaagagacagcgagcgcaatcaccggaccacagaggccgagcccaagcctctggaagagccaaaacacgagaccaaaaagctgaagaatctttcagagtacgctcagacactacagctgggttggaatgggcttctggtgttgaaaaacagctgcttccccacgtctatgcatatcctagagggggaccagggggtgatcagcagtctcctcaaagaccacacttctgggagcaagctgacccagctgaagatcgcccagcgccttcgactggaccagcccaagcttgacgaggtcacacgacgcatcaagcaggggagccccaacggctatgcggtcctcttagccacccaggcaacccccagtgggcttggcactgaggggatgcccacagtagagcccggtctgcagaggcggcttctcaggaacctggtctcctacttgaaacagaagcaggccgcaggggtgatcagcttgccagtgggggggtccaagggcagagacggcacaggcatgctctacgccttcccaccctgcgacttttcccagcagtacctccagtcagcactaaggacattgggcaagctagaagaagaacacatggtgatagtcatcgtcagagacactgcctagcccaagcctgtctttcccagcgtcatgtttgtgtcacaaaagcagttattttaaaatctgatcccctctctaccctaccactttggtttgaattatctcctgggttattttggttcatttgggtggggatcaaagtcctgtccaccaccaaaactaagttcttagattttgggggatttttttttttaaacgatgagaagggaatccggttatgttgatttctagtgtacaagatactgtctgctgtggttctgtatttttttattttttgaccaactgtatggaaagttgtcagtaaaacctttgacagaggatggatttttaaacctgttcagagtcctggtttaatcaatcaagctaaaagaatcgaagacatccctagtgcatgtacacgaatgccctacgtcatccttccagcaccactgctgcatgggtcactctcggcctctcaattcttcaggctcagtctggactctacttacactcatttttatcttggctgacagcaggcaagcttcagtttgggctgtggacgctgccacacaagcctgagtagagcccatgcaaaggaagggatggggtgagcgcaaggcctgtggtcagcagctactgatggttttttctgccttaaaccgtgtgtgtgtccatcatcatcagtttgagctgtggctgtttgtttgggacagagtgcccactcagcatgtttggcagcaggtagccttcagcagctgtgtagtcttgtacaaggagaagctgtgcactgttgatgccagggggtctcggggcccctgatctgtccaggctcctggttcggcctactttctagcctcactcagcccagggatagccagtgttgggagacagagttgcctcaggttcccaggggcccgggagtccaaatactggaatggagggttggaggcagccttccttggatttactcatgaactttgcctagttgtttgtgatttttggctttctctggtcgttcaggggtgatgggtaatagagcaggcccgtgtccagtcatacctagagatttgtggggggatactgaacctctagactgaagtacttaccggggagcacagtggactaggggatgcccttgataatgacggtttcctaggtgcaagatcagagcatgtgcctacaccttgtgccctgatgccgaggtggagaccattgggaaataattaatagatatttttctggggggaaatcacaagtcactgaggtgtttgtttgtttgttaggcagtgctagagcttgaagccactcaagccagttggggaggaaagggatgcggaggtaccctctagctgggaagaagggtgagattccgtcttcttccctgtctcaagtaagtaaggaaggtactgcggacagtgcgggccagggaggaaaaccagagcacacagttttgtcaccatggaacaccccaaatgccattcttcagcgtgtctggtaccttggatgttcaaacagggaacactgtcagggctgaggagaacagaagctctggtaagcgaatgagcccctagatgataaccaggaactccaggttctgctggccgtggcatcctctctccaggtctgctcccttaccggagctaggataaggtagcatgagtgacacctgagattagaggctggggctcactgcaggctgtggagaggtcatgctggtccacaggaacacttggcagtgctctcgtagacccctcggtgatgtggaatggacaggtgcctcgcaagagagcaagcacgttcataacaaaacagcaacacaaagacatgttaagcatgtttatttatttgcctgtttttgtttttttacttgagctgtggtcacagctgccaggtacctaagcaagtcagttgggtacagcaggacacgccaccattccagggtagctggtaccgccagaaacaggagtgggtcttgtcctgttgcaggcacactgcagtggttttcctgcagctctccaacaaacgcctgagtcacaggccagagctgccttggtatgttgttaagtccaaaacttcttctctgggctacctatcttccttcatgaagcaggtgctcaggacccggaagaatcatctacctcccagctttgtgagacagaaccaagtaaaaggaaacatgctagaaaacgtgcctagagaagacacttcaacctttgccttatccaacccctcttcagagaaaggtgtcccatggccccaaaaagaactgccaagttttggtgaggagtaacaccctggcatgacattccttctctttcctggccctcaaccacttccttcctttggctcttaagacctagcaggttctgtgaactctcaggccttggccagcactagttaggggaggtcaggtggtcaatgtcctggtgattttatgagactgccccactgagaaaacttacttacttcaggcatccagtgcccccacccagggttcaggccctgtctaaggtgttgcttaaagacaaaaaggcaacatgtgcctcactggtggtgtgccactgttctcatgctgcctcctaagtgactccgattttcagccctggtagaataaggaagacagctgatgcctccttagccccttagcacatgttcctaaggtgtgttgtcaagccaacctgaattctgcctccctgttatagtccctgtctcccccacagagacctgtgggtgctcccagcagagttgagactggctccgttgagttaatgactagaatatagtgctttcactacttgattgttaacctgttttcttctgatgccatcagtaccagcagtcagactattccactggttaagtgtttactaccattaaagcgaggcatgaagcaaagagctgagtgagtcctctgctctccagaggaccaagaaatacctgtgtgacacagacccacttcagtgtgtacagcaaattctatagtgcttctgagcccagcagggctttacctgcccctggagagttttagccgtcttgtgtttcttgtttacttcacaaccaaatttgtcccctcttctctctgttaagggagagaagtcactttagctggataatacctatgtaacaaactgagcagctgttatttgggcaaaatcaaaggaagaaagagactatggtcttctatttattgtgggaaggaaaacagggtggggcgggtgagtgaaaaggtggaaatccctggtaccttgcctggtggttacacagtttaaccataggccaattttaggggcctctgaagtatctttctacaaacgcagacaagctccactacccctaacctgccaggatgctcaagtccactgtcacaatccctttcagaaaacattagtggccgctgccccagctacagagacggccgaaatgctttcactccttagctttgccaactccatcctccaaaacttcccagaatacctccctttccagttctaccaaatctgtacttgggagcagcctgctggatccagaacatgacaacagagagctgcgtccacagggaacaaagccctgacctctctctccacattacccttacaaaaacaggccctccccatgagagagctacacggcaggggcagacactgtgagtataagctactttcctccctggagtgctctatgtgggcagaacatgctctccttgcctctcctggaaggtgtcttctctatggcctggctagagctgcaaaaaagggacacaccccacttcggtaaaagaaaatagggaaaggccataaacaaagacagacttgtagtttattttgtattttttttaaataaatacactttacattaaaaaaaaggcct

SEQ ID NO: 383486 - DNA, 5430 bp, Homo sapiens
ctgaggtgactctacaggatcttaaaggctggtctgggtcagggcggtgcctatgccttcctcaagttccagaacctggacatggcccatagggctaaggtggccatgtcgggccgagtgattggtcgcaaccccattaagataggctatggcaaggccaaccccaccactcgtctctgggtgggtggcctgggacctaacacgtcactggcggctctggcccgagagtttgaccgctttgggagcattcggaccattgatcacgtcaaaggagatagctttgcctatattcagtacgagagcttggacgcagcccaggccgcctgtgctaaaatgaggggttttcccttgggtggaccagaccgcaggctccgcgtggattttgccaaagcagaggagactcggtacccccagcagtaccagccctcgccactccctgtgcattatgagctgctcacagatggatacacccggcaccgcaacctggacgccgacctggtgcgggacaggacgcccccacaccttctgtactcagaccgagaccggacttttttggaaggggactggaccagccccagtaaaagctctgaccgccgaaacagccttgagggctacagtcgctcagtgcgcagccggagtggtgagcgttggggggcagatggagaccgtggtttgcccaagccctgggaagagaggcggaaacggagaagcctttccagtgaccgtgggaggacaacccattcaccatatgaggaacggagtaggaccaagggcagtgggcagcagtcagagcggggctccgaccgcacccctgagcgcagccgcaaggagaaccactccagtgaagggaccaaggagtccagcagcaactccctcagcaacagcagacatggggctgaggaacggggccaccaccaccaccaccacgaggctgcagactcttcccacgggaagaaggcaagagacagcgagcgcaatcaccggaccacagaggccgagcccaagcctctggaagagccaaaacacgagaccaaaaagctgaagaatctttcagagtacgctcagacactacagctgggttggaatgggcttctggtgttgaaaaacagctgcttccccacgtctatgcatatcctagagggggaccagggggtgatcagcagtctcctcaaagaccacacttctgggagcaagctgacccagctgaagatcgcccagcgccttcgactggaccagcccaagcttgacgaggtcacacgacgcatcaagcaggggagccccaacggctatgcggtcctcttagccacccaggcaacccccagtgggcttggcactgaggggatgcccacagtagagcccggtctgcagaggcggcttctcaggaacctggtctcctacttgaaacagaagcaggccgcaggggtgatcagcttgccagtgggggggtccaagggcagagacggcacaggcatgctctacgccttcccaccctgcgacttttcccagcagtacctccagtcagcactaaggacattgggcaagctagaagaagaacacatggtgatagtcatcgtcagagacactgcctagcccaagcctgtctttcccagcgtcatgtttgtgtcacaaaagcagttattttaaaatctgatcccctctctaccctaccactttggtttgaattatctcctgggttattttggttcatttgggtggggatcaaagtcctgtccaccaccaaaactaagttcttagattttgggggatttttttttttaaacgatgagaagggaatccggttatgttgatttctagtgtacaagatactgtctgctgtggttctgtatttttttattttttgaccaactgtatggaaagttgtcagtaaaacctttgacagaggatggatttttaaacctgttcagagtcctggtttaatcaatcaagctaaaagaatcgaagacatccctagtgcatgtacacgaatgccctacgtcatccttccagcaccactgctgcatgggtcactctcggcctctcaattcttcaggctcagtctggactctacttacactcatttttatcttggctgacagcaggcaagcttcagtttgggctgtggacgctgccacacaagcctgagtagagcccatgcaaaggaagggatggggtgagcgcaaggcctgtggtcagcagctactgatggttttttctgccttaaaccgtgtgtgtgtccatcatcatcagtttgagctgtggctgtttgtttgggacagagtgcccactcagcatgtttggcagcaggtagccttcagcagctgtgtagtcttgtacaaggagaagctgtgcactgttgatgccagggggtctcggggcccctgatctgtccaggctcctggttcggcctactttctagcctcactcagcccagggatagccagtgttgggagacagagttgcctcaggttcccaggggcccgggagtccaaatactggaatggagggttggaggcagccttccttggatttactcatgaactttgcctagttgtttgtgatttttggctttctctggtcgttcaggggtgatgggtaatagagcaggcccgtgtccagtcatacctagagatttgtggggggatactgaacctctagactgaagtacttaccggggagcacagtggactaggggatgcccttgataatgacggtttcctaggtgcaagatcagagcatgtgcctacaccttgtgccctgatgccgaggtggagaccattgggaaataattaatagatatttttctggggggaaatcacaagtcactgaggtgtttgtttgtttgttaggcagtgctagagcttgaagccactcaagccagttggggaggaaagggatgcggaggtaccctctagctgggaagaagggtgagattccgtcttcttccctgtctcaagtaagtaaggaaggtactgcggacagtgcgggccagggaggaaaaccagagcacacagttttgtcaccatggaacaccccaaatgccattcttcagcgtgtctggtaccttggatgttcaaacagggaacactgtcagggctgaggagaacagaagctctggtaagcgaatgagcccctagatgataaccaggaactccaggttctgctggccgtggcatcctctctccaggtctgctcccttaccggagctaggataaggtagcatgagtgacacctgagattagaggctggggctcactgcaggctgtggagaggtcatgctggtccacaggaacacttggcagtgctctcgtagacccctcggtgatgtggaatggacaggtgcctcgcaagagagcaagcacgttcataacaaaacagcaacacaaagacatgttaagcatgtttatttatttgcctgtttttgtttttttacttgagctgtggtcacagctgccaggtacctaagcaagtcagttgggtacagcaggacacgccaccattccagggtagctggtaccgccagaaacaggagtgggtcttgtcctgttgcaggcacactgcagtggttttcctgcagctctccaacaaacgcctgagtcacaggccagagctgccttggtatgttgttaagtccaaaacttcttctctgggctacctatcttccttcatgaagcaggtgctcaggacccggaagaatcatctacctcccagctttgtgagacagaaccaagtaaaaggaaacatgctagaaaacgtgcctagagaagacacttcaacctttgccttatccaacccctcttcagagaaaggtgtcccatggccccaaaaagaactgccaagttttggtgaggagtaacaccctggcatgacattccttctctttcctggccctcaaccacttccttcctttggctcttaagacctagcaggttctgtgaactctcaggccttggccagcactagttaggggaggtcaggtggtcaatgtcctggtgattttatgagactgccccactgagaaaacttacttacttcaggcatccagtgcccccacccagggttcaggccctgtctaaggtgttgcttaaagacaaaaaggcaacatgtgcctcactggtggtgtgccactgttctcatgctgcctcctaagtgactccgattttcagccctggtagaataaggaagacagctgatgcctccttagccccttagcacatgttcctaaggtgtgttgtcaagccaacctgaattctgcctccctgttatagtccctgtctcccccacagagacctgtgggtgctcccagcagagttgagactggctccgttgagttaatgactagaatatagtgctttcactacttgattgttaacctgttttcttctgatgccatcagtaccagcagtcagactattccactggttaagtgtttactaccattaaagcgaggcatgaagcaaagagctgagtgagtcctctgctctccagaggaccaagaaatacctgtgtgacacagacccacttcagtgtgtacagcaaattctatagtgcttctgagcccagcagggctttacctgcccctggagagttttagccgtcttgtgtttcttgtttacttcacaaccaaatttgtcccctcttctctctgttaagggagagaagtcactttagctggataatacctatgtaacaaactgagcagctgttatttgggcaaaatcaaaggaagaaagagactatggtcttctatttattgtgggaaggaaaacagggtggggcgggtgagtgaaaaggtggaaatccctggtaccttgcctggtggttacacagtttaaccataggccaattttaggggcctctgaagtatctttctacaaacgcagacaagctccactacccctaacctgccaggatgctcaagtccactgtcacaatccctttcagaaaacattagtggccgctgccccagctacagagacggccgaaatgctttcactccttagctttgccaactccatcctccaaaacttcccagaatacctccctttccagttctaccaaatctgtacttgggagcagcctgctggatccagaacatgacaacagagagctgcgtccacagggaacaaagccctgacctctctctccacattacccttacaaaaacaggccctccccatgagagagctacacggcaggggcagacactgtgagtataagctactttcctccctggagtgctctatgtgggcagaacatgctctccttgcctctcctggaaggtgtcttctctatggcctggctagagctgcaaaaaagggacacaccccacttcggtaaaagaaaatagggaaaggccataaacaaagacagacttgtagtttattttgtattttttttaaataaatacactttacattaaaaaaaaggcct

SEQ ID NO: 383487 - DNA, 439 bp, Homo sapiens
aattagggagtcctgttgtggctgcagctctaagctatgcccttctatgaacttcatcagtgtttaggctaatcttcatctctttctatctggcttcttctttctcaattctcagagtgtggaggggaggatgattaattatcacctgtaacctcttgtatcagtccgggttctccggagaaacagaaccctacctatatctgtgtatctctatctatctatatatctatacagatatactgtatagatggatggtatgtctgcagggacctgtgttttatggaattggctcacatgattgtggggactggaaaatatgaaatttgtggggcaggcacagcctggaagttcaggtaagaattgatgttgtagtttggaatctcaaattcacagggcaggccagaaggctggaaactcaggtgggtttctatgtcacagt

SEQ ID NO: 383488 - DNA, 328 bp, Homo sapiens
tggaagccgtttgagaattcagaagtcgcttgggatcctgcaatatctcatccgtgtaagtctcagctgcagtttatccattgcttaaagtcatatgcgtggctaataatcaggaactagttactttcctattatattagctcaaggtattattccttaggtaaaaatagattgtgtctcaccacagcaccacgggagtttattccagaacttactttccctcatatctcataatgaactgactgtatcatcacccagaacaagccagcgaatgaccatggcaaccttattttatggtctcccactatctcacaactaactatacagt

SEQ ID NO: 383489 - DNA, 5456 bp, Homo sapiens
ttatatccgtggtttcctgctacctccaaccatgggccttttgggaatactttgttttttaatcttcctggggaaaacctggggacaggagcaaacatatgtcatttcagcaccaaaaatattccgtgttggagcatctgaaaatattgtgattcaagtttatggatacactgaagcatttgatgcaacaatctctattaaaagttatcctgataaaaaatttagttactcctcaggccatgttcatttatcctcagagaataaattccaaaactctgcaatcttaacaatacaaccaaaacaattgcctggaggacaaaacccagtttcttatgtgtatttggaagttgtatcaaagcatttttcaaaatcaaaaagaatgccaataacctatgacaatggatttctcttcattcatacagacaaacctgtttatactccagaccagtcagtaaaagttagagtttattcgttgaatgacgacttgaagccagccaaaagagaaactgtcttaaccttcatagatcctgaaggatcagaagttgacatggtagaagaaattgatcatattggaattatctcttttcctgacttcaagattccgtctaatcctagatatggtatgtggacgatcaaggctaaatataaagaggacttttcaacaactggaaccgcatattttgaagttaaagaatatgtcttgccacatttttctgtctcaatcgagccagaatataatttcattggttacaagaactttaagaattttgaaattactataaaagcaagatatttttataataaagtagtcactgaggctgacgtttatatcacatttggaataagagaagacttaaaagatgatcaaaaagaaatgatgcaaacagcaatgcaaaacacaatgttgataaatggaattgctcaagtcacatttgattctgaaacagcagtcaaagaactgtcatactacagtttagaagatttaaacaacaagtacctttatattgctgtaacagtcatagagtctacaggtggattttctgaagaggcagaaatacctggcatcaaatatgtcctctctccctacaaactgaatttggttgctactcctcttttcctgaagcctgggattccatatcccatcaaggtgcaggttaaagattcgcttgaccagttggtaggaggagtcccagtaatactgaatgcacaaacaattgatgtaaaccaagagacatctgacttggatccaagcaaaagtgtaacacgtgttgatgatggagtagcttcctttgtgcttaatctcccatctggagtgacggtgctggagtttaatgtcaaaactgatgctccagatcttccagaagaaaatcaggccagggaaggttaccgagcaatagcatactcatctctcagccaaagttacctttatattgattggactgataaccataaggctttgctagtgggagaacatctgaatattattgttacccccaaaagcccatatattgacaaaataactcactataattacttgattttatccaagggcaaaattatccactttggcacgagggagaaattttcagatgcatcttatcaaagtataaacattccagtaacacagaacatggttccttcatcccgacttctggtctattatatcgtcacaggagaacagacagcagaattagtgtctgattcagtctggttaaatattgaagaaaaatgtggcaaccagctccaggttcatctgtctcctgatgcagatgcatattctccaggccaaactgtgtctcttaatatggcaactggaatggattcctgggtggcattagcagcagtggacagtgctgtgtatggagtccaaagaggagccaaaaagcccttggaaagagtatttcaattcttagagaagagtgatctgggctgtggggcaggtggtggcctcaacaatgccaatgtgttccacctagctggacttaccttcctcactaatgcaaatgcagatgactcccaagaaaatgatgaaccttgtaaagaaattctcaggccaagaagaacgctgcaaaagaagatagaagaaatagctgctaaatataaacattcagtagtgaagaaatgttgttacgatggagcctgcgttaataatgatgaaacctgtgagcagcgagctgcacggattagtttagggccaagatgcatcaaagctttcactgaatgttgtgtcgtcgcaagccagctccgtgctaatatctctcataaagacatgcaattgggaaggctacacatgaagaccctgttaccagtaagcaagccagaaattcggagttattttccagaaagctggttgtgggaagttcatcttgttcccagaagaaaacagttgcagtttgccctacctgattctctaaccacctgggaaattcaaggcgttggcatttcaaacactggtatatgtgttgctgatactgtcaaggcaaaggtgttcaaagatgtcttcctggaaatgaatataccatattctgttgtacgaggagaacagatccaattgaaaggaactgtttacaactataggacttctgggatgcagttctgtgttaaaatgtctgctgtggagggaatctgcacttcggaaagcccagtcattgatcatcagggcacaaagtcctccaaatgtgtgcgccagaaagtagagggctcctccagtcacttggtgacattcactgtgcttcctctggaaattggccttcacaacatcaatttttcactggagacttggtttggaaaagaaatcttagtaaaaacattacgagtggtgccagaaggtgtcaaaagggaaagctattctggtgttactttggatcctaggggtatttatggtaccattagcagacgaaaggagttcccatacaggatacccttagatttggtccccaaaacagaaatcaaaaggattttgagtgtaaaaggactgcttgtaggtgagatcttgtctgcagttctaagtcaggaaggcatcaatatcctaacccacctccccaaagggagtgcagaggcggagctgatgagcgttgtcccagtattctatgtttttcactacctggaaacaggaaatcattggaacatttttcattctgacccattaattgaaaagcagaaactgaagaaaaaattaaaagaagggatgttgagcattatgtcctacagaaatgctgactactcttacagtgtgtggaagggtggaagtgctagcacttggttaacagcttttgctttaagagtacttggacaagtaaataaatacgtagagcagaaccaaaattcaatttgtaattctttattgtggctagttgagaattatcaattagataatggatctttcaaggaaaattcacagtatcaaccaataaaattacagggtaccttgcctgttgaagcccgagagaacagcttatatcttacagcctttactgtgattggaattagaaaggctttcgatatatgccccctggtgaaaatcgacacagctctaattaaagctgacaactttctgcttgaaaatacactgccagcccagagcacctttacattggccatttctgcgtatgctctttccctgggagataaaactcacccacagtttcgttcaattgtttcagctttgaagagagaagctttggttaaaggtaatccacccatttatcgtttttggaaagacaatcttcagcataaagacagctctgtacctaacactggtacggcacgtatggtagaaacaactgcctatgctttactcaccagtctgaacttgaaagatataaattatgttaacccagtcatcaaatggctatcagaagagcagaggtatggaggtggcttttattcaacccaggacacaatcaatgccattgagggcctgacggaatattcactcctggttaaacaactccgcttgagtatggacatcgatgtttcttacaagcataaaggtgccttacataattataaaatgacagacaagaatttccttgggaggccagtagaggtgcttctcaatgatgacctcattgtcagtacaggatttggcagtggcttggctacagtacatgtaacaactgtagttcacaaaaccagtacctctgaggaagtttgcagcttttatttgaaaatcgatactcaggatattgaagcatcccactacagaggctacggaaactctgattacaaacgcatagtagcatgtgccagctacaagcccagcagggaagaatcatcatctggatcctctcatgcggtgatggacatctccttgcctactggaatcagtgcaaatgaagaagacttaaaagcccttgtggaaggggtggatcaactattcactgattaccaaatcaaagatggacatgttattctgcaactgaattcgattccctccagtgatttcctttgtgtacgattccggatatttgaactctttgaagttgggtttctcagtcctgccactttcacagtgtacgaataccacagaccagataaacagtgtaccatgttttatagcacttccaatatcaaaattcagaaagtctgtgaaggagccgcgtgcaagtgtgtagaagctgattgtgggcaaatgcaggaagaattggatctgacaatctctgcagagacaagaaaacaaacagcatgtaaaccagagattgcatatgcttataaagttagcatcacatccatcactgtagaaaatgtttttgtcaagtacaaggcaacccttctggatatctacaaaactggggaagctgttgctgagaaagactctgagattaccttcattaaaaaggtaacctgtactaacgctgagctggtaaaaggaagacagtacttaattatgggtaaagaagccctccagataaaatacaatttcagtttcaggtacatctaccctttagattccttgacctggattgaatactggcctagagacacaacatgttcatcgtgtcaagcatttttagctaatttagatgaatttgccgaagatatctttttaaatggatgctaaaattcctgaagttcagctgcatacagtttgcacttatggactcctgttgttgaagttcgtttttttgttttcttctttttttaaacattcatagctggtcttatttgtaaagctcactttacttagaattagtggcacttgcttttattagagaatgatttcaaatgctgtaactttctgaaataacatggccttggagggcatgaagacagatactcctccaaggttattggacaccggaaacaataaattggaacacctcctcaaacctaccactcaggaatgtttgctggggccgaaagaacagtccattgaaagggagtattacaaaaacatggcctttgcttgaaagaaaataccaaggaacaggaaactgatcattaaagcctgagtt

SEQ ID NO: 383490 - DNA, 5309 bp, Homo sapiens
ttatatccgtggtttcctgctacctccaaccatgggccttttgggaatactttgttttttaatcttcctggggaaaacctggggacaggagcaaacatatgtcatttcagcaccaaaaatattccgtgttggagcatctgaaaatattgtgattcaagtttatggatacactgaagcatttgatgcaacaatctctattaaaagttatcctgataaaaaatttagttactcctcaggccatgttcatttatcctcagagaataaattccaaaactctgcaatcttaacaatacaaccaaaacaattgcctggaggacaaaacccagtttcttatgtgtatttggaagttgtatcaaagcatttttcaaaatcaaaaagaatgccaataacctatgacaatggatttctcttcattcatacagacaaacctgtttatactccagaccagtcagtaaaagttagagtttattcgttgaatgacgacttgaagccagccaaaagagaaactgtcttaaccttcatagatcctgaaggatcagaagttgacatggtagaagaaattgatcatattggaattatctcttttcctgacttcaagattccgtctaatcctagatatggtatgtggacgatcaaggctaaatataaagaggacttttcaacaactggaaccgcatattttgaagttaaagaatatgtcttgccacatttttctgtctcaatcgagccagaatataatttcattggttacaagaactttaagaattttgaaattactataaaagcaagatatttttataataaagtagtcactgaggctgacgtttatatcacatttggaataagagaagacttaaaagatgatcaaaaagaaatgatgcaaacagcaatgcaaaacacaatgttgataaatggaattgctcaagtcacatttgattctgaaacagcagtcaaagaactgtcatactacagtttagaagatttaaacaacaagtacctttatattgctgtaacagtcatagagtctacaggtggattttctgaagaggcagaaatacctggcatcaaatatgtcctctctccctacaaactgaatttggttgctactcctcttttcctgaagcctgggattccatatcccatcaaggtgcaggttaaagattcgcttgaccagttggtaggaggagtcccagtaatactgaatgcacaaacaattgatgtaaaccaagagacatctgacttggatccaagcaaaagtgtaacacgtgttgatgatggagtagcttcctttgtgcttaatctcccatctggagtgacggtgctggagtttaatgtcaaaactgatgctccagatcttccagaagaaaatcaggccagggaaggttaccgagcaatagcatactcatctctcagccaaagttacctttatattgattggactgataaccataaggctttgctagtgggagaacatctgaatattattgttacccccaaaagcccatatattgacaaaataactcactataattacttgattttatccaagggcaaaattatccactttggcacgagggagaaattttcagatgcatcttatcaaagtataaacattccagtaacacagaacatggttccttcatcccgacttctggtctattatatcgtcacaggagaacagacagcagaattagtgtctgattcagtctggttaaatattgaagaaaaatgtggcaaccagctccaggttcatctgtctcctgatgcagatgcatattctccaggccaaactgtgtctcttaatatggcaactggaatggattcctgggtggcattagcagcagtggacagtgctgtgtatggagtccaaagaggagccaaaaagcccttggaaagagggcaggtggtggcctcaacaatgccaatgtgttccacctagctggacttaccttcctcactaatgcaaatgcagatgactcccaagaaaatgatgaaccttgtaaagaaattctcaggccaagaagaacgctgcaaaagaagatagaagaaatagctgctaaatataaacattcagtagtgaagaaatgttgttacgatggagcctgcgttaataatgatgaaacctgtgagcagcgagctgcacggattagtttagggccaagatgcatcaaagctttcactgaatgttgtgtcgtcgcaagccagctccgtgctaatatctctcataaagacatgcaattgggaaggctacacatgaagaccctgttaccagtaagcaagccagaaattcggagttattttccagaaagctggttgtgggaagttcatcttgttcccagaaggtattatacttctttcatgtatatgtgttgctgatactgtcaaggcaaaggtgttcaaagatgtcttcctggaaatgaatataccatattctgttgtacgaggagaacagatccaattgaaaggaactgtttacaactataggacttctgggatgcagttctgtgttaaaatgtctgctgtggagggaatctgcacttcggaaagcccagtcattgatcatcagggcacaaagtcctccaaatgtgtgcgccagaaagtagagggctcctccagtcacttggtgacattcactgtgcttcctctggaaattggccttcacaacatcaatttttcactggagacttggtttggaaaagaaatcttagtaaaaacattacgagtggtgccagaaggtgtcaaaagggaaagctattctggtgttactttggatcctaggggtatttatggtaccattagcagacgaaaggagttcccatacaggatacccttagatttggtccccaaaacagaaatcaaaaggattttgagtgtaaaaggactgcttgtaggtgagatcttgtctgcagttctaagtcaggaaggcatcaatatcctaacccacctccccaaagggagtgcagaggcggagctgatgagcgttgtcccagtattctatgtttttcactacctggaaacaggaaatcattggaacatttttcattctgacccattaattgaaaagcagaaactgaagaaaaaattaaaagaagggatgttgagcattatgtcctacagaaatgctgactactcttacagtgtgtggaagggtggaagtgctagcacttggttaacagcttttgctttaagagtacttggacaagtaaataaatacgtagagcagaacctggatcttctaaggaagattcacagtttcaaccaataatattacaggggtaccttgcctgttgaagcccgagagaacagcttatatcttacagcctttactgtgattggaattagaaaggctttcgatatatgccccctggtgaaaatcgacacagctctaattaaagctgacaactttctgcttgaaaatacactgccagcccagagcacctttacattggccatttctgcgtatgctctttccctgggagataaaactcacccacagtttcgttcaattgtttcagctttgaagagagaagctttggttaaaggtaatccacccatttatcgtttttggaaagacaatcttcagcataaagacagctctgtacctaacactggtacggcacgtatggtagaaacaactgcctatgctttactcaccagtctgaacttgaaagatataaattatgttaacccagtcatcaaatggctatcagaagagcagaggtatggaggtggcttttattcaacccaggacacaatcaatgccattgagggcctgacggaatattcactcctggttaaacaactccgcttgagtatggacatcgatgtttcttacaagcataaaggtgccttacataattataaaatgacagacaagaatttccttgggaggccagtagaggtgcttctcaatgatgacctcattgtcagtacaggatttggcagtggcttggctacagtacatgtaacaactgtagttcacaaaaccagtacctctgaggaagtttgcagcttttatttgaaaatcgatactcaggatattgaagcatcccactacagaggctacggaaactctgattacaaacgcatagtagcatgtgccagctacaagcccagcagggaagaatcatcatctggatcctctcatgcggtgatggacatctccttgcctactggaatcagtgcaaatgaagaagacttaaaagcccttgtggaaggggtggatcaactattcactgattaccaaatcaaagatggacatgttattctgcaactgaattcgattccctccagtgatttcctttgtgtacgattccggatatttgaactctttgaagttgggtttctcagtcctgccactttcacagtgtacgaataccacagaccagataaacagtgtaccatgttttatagcacttccaatatcaaaattcagaaagtctgtgaaggagccgcgtgcaagtgtgtagaagctgattgtgggcaaatgcaggaagaattggatctgacaatctctgcagagacaagaaaacaaacagcatgtaaaccagagattgcatatgcttataaagttagcatcacatccatcactgtagaaaatgtttttgtcaagtacaaggcaacccttctggatatctacaaaactggggaagctgttgctgagaaagactctgagattaccttcattaaaaaggtaacctgtactaacgctgagctggtaaaaggaagacagtacttaattatgggtaaagaagccctccagataaaatacaatttcagtttcaggtacatctaccctttagattccttgacctggattgaatactggcctagagacacaacatgttcatcgtgtcaagcatttttagctaatttagatgaatttgccgaagatatctttttaaatggatgctaaaattcctgaagttcagctgcatacagtttgcacttatggactcctgttgttgaagttcgtttttttgttttcttctttttttaaacattcatagctggtcttatttgtaaagctcactttacttagaattagtggcacttgcttttattagagaatgatttcaaatgctgtaactttctgaaataacatggccttggagggcatgaagacagatactcctccaaggttattggacaccggaaacaataaattggaacacctcctcaaacctaccactcaggaatgtttgctggggccgaaagaacagtccattgaaagggagtattacaaaaacatggcctttgcttgaaagaaaataccaaggaacaggaaactgatcattaaagcctgagtt

SEQ ID NO: 383491 - DNA, 5254 bp, Homo sapiens
ttatatccgtggtttcctgctacctccaaccatgggccttttgggaatactttgttttttaatcttcctggggaaaacctggggacaggagcaaacatatgtcatttcagcaccaaaaatattccgtgttggagcatctgaaaatattgtgattcaagtttatggatacactgaagcatttgatgcaacaatctctattaaaagttatcctgataaaaaatttagttactcctcaggccatgttcatttatcctcagagaataaattccaaaactctgcaatcttaacaatacaaccaaaacaattgcctggaggacaaaacccagtttcttatgtgtatttggaagttgtatcaaagcatttttcaaaatcaaaaagaatgccaataacctatgacaatggatttctcttcattcatacagacaaacctgtttatactccagaccagtcagtaaaagttagagtttattcgttgaatgacgacttgaagccagccaaaagagaaactgtcttaaccttcatagatcctgaaggatcagaagttgacatggtagaagaaattgatcatattggaattatctcttttcctgacttcaagattccgtctaatcctagatatggtatgtggacgatcaaggctaaatataaagaggacttttcaacaactggaaccgcatattttgaagttaaagaatatgtcttgccacatttttctgtctcaatcgagccagaatataatttcattggttacaagaactttaagaattttgaaattactataaaagcaagatatttttataataaagtagtcactgaggctgacgtttatatcacatttggaataagagaagacttaaaagatgatcaaaaagaaatgatgcaaacagcaatgcaaaacacaatgttgataaatggaattgctcaagtcacatttgattctgaaacagcagtcaaagaactgtcatactacagtttagaagatttaaacaacaagtacctttatattgctgtaacagtcatagagtctacaggtggattttctgaagaggcagaaatacctggcatcaaatatgtcctctctccctacaaactgaatttggttgctactcctcttttcctgaagcctgggattccatatcccatcaaggtgcaggttaaagattcgcttgaccagttggtaggaggagtcccagtaatactgaatgcacaaacaattgatgtaaaccaagagacatctgacttggatccaagcaaaagtgtaacacgtgttgatgatggagtagcttcctttgtgcttaatctcccatctggagtgacggtgctggagtttaatgtcaaaactgatgctccagatcttccagaagaaaatcaggccagggaaggttaccgagcaatagcatactcatctctcagccaaagttacctttatattgattggactgataaccataaggctttgctagtgggagaacatctgaatattattgttacccccaaaagcccatatattgacaaaataactcactataattacttgattttatccaagggcaaaattatccactttggcacgagggagaaattttcagatgcatcttatcaaagtataaacattccagtaacacagaacatggttccttcatcccgacttctggtctattatatcgtcacaggagaacagacagcagaattagtgtctgattcagtctggttaaatattgaagaaaaatgtggcaaccagctccaggttcatctgtctcctgatgcagatgcatattctccaggccaaactgtgtctcttaatatggcaactggaatggattcctgggtggcattagcagcagtggacagtgctgtgtatggagtccaaagaggagccaaaaagcccttggaaagagggcaggtggtggcctcaacaatgccaatgtgttccacctagctggacttaccttcctcactaatgcaaatgcagatgactcccaagaaaatgatgaaccttgtaaagaaattctcaggccaagaagaacgctgcaaaagaagatagaagaaatagctgctaaatataaacattcagtagtgaagaaatgttgttacgatggagcctgcgttaataatgatgaaacctgtgagcagcgagctgcacggattagtttagggccaagatgcatcaaagctttcactgaatgttgtgtcgtcgcaagccagctccgtgctaatatctctcataaagacatgcaattgggaaggctacacatgaagaccctgttaccagtaagcaagccagaaattcggagttattttccagaaagctggttgtgggaagttcatcttgttcccagaaggtattatacttctttcatgtatatgtgttgctgatactgtcaaggcaaaggtgttcaaagatgtcttcctggaaatgaatataccatattctgttgtacgaggagaacagatccaattgaaaggaactgtttacaactataggacttctgggatgcagttctgtgttaaaatgtctgctgtggagggaatctgcacttcggaaagcccagtcattgatcatcagggcacaaagtcctccaaatgtgtgcgccagaaagtagagggctcctccagtcacttggtgacattcactgtgcttcctctggaaattggccttcacaacatcaatttttcactggagacttggtttggaaaagaaatcttagtaaaaacattacgagtggtgccagaaggtgtcaaaagggaaagctattctggtgttactttggatcctaggggtatttatggtaccattagcagacgaaaggagttcccatacaggatacccttagatttggtccccaaaacagaaatcaaaaggattttgagtgtaaaaggactgcttgtaggtgagatcttgtctgcagttctaagtcaggaaggcatcaatatcctaacccacctccccaaagggagtgcagaggcggagctgatgagcgttgtcccagtattctatgtttttcactacctggaaacaggaaatcattggaacatttttcattctgacccattaattgaaaagcagaaactgaagaaaaaattaaaagaagggatgttgagcattatgtcctacagaaatgctgactactcttacagtgtgtggaagggtggaagtgctagcacttggttaacagcttttgctttaagagtacttggacaagtaaataaatacgtagagcagaacctggatcttctaaggaagattcacagtttcaaccaataatattacaggggtaccttgcctgttgaagcccgagagaacagcttatatcttacagcctttactgtgattggaattagaaaggctttcgatatatgccccctggtgaaaatcgacacagctctaattaaagctgacaactttctgcttgaaaatacactgccagcccagagcacctttacattggccatttctgcgtatgctctttccctgggagataaaactcacccacagtttcgttcaattgtttcagctttgaagagagaagctttggttaaaggtaatccacccatttatcgtttttggaaagacaatcttcagcataaagacagctctgtacctaacactggtacggcacgtatggtagaaacaactgcctatgctttactcaccagtctgaacttgaaagatataaattatgttaacccagtcatcaaatggctatcagaagagcagaggtatggaggtggcttttattcaacccaggacacaatcaatgccattgagggcctgacggaatattcactcctggttaaacaactccgcttgagtatggacatcgatgtttcttacaagcataaaggtgccttacataattataactcattgtcagtacaggatttggcagtggcttggctacagtacatgtaacaactgtagttcacaaaaccagtacctctgaggaagtttgcagcttttatttgaaaatcgatactcaggatattgaagcatcccactacagaggctacggaaactctgattacaaacgcatagtagcatgtgccagctacaagcccagcagggaagaatcatcatctggatcctctcatgcggtgatggacatctccttgcctactggaatcagtgcaaatgaagaagacttaaaagcccttgtggaaggggtggatcaactattcactgattaccaaatcaaagatggacatgttattctgcaactgaattcgattccctccagtgatttcctttgtgtacgattccggatatttgaactctttgaagttgggtttctcagtcctgccactttcacagtgtacgaataccacagaccagataaacagtgtaccatgttttatagcacttccaatatcaaaattcagaaagtctgtgaaggagccgcgtgcaagtgtgtagaagctgattgtgggcaaatgcaggaagaattggatctgacaatctctgcagagacaagaaaacaaacagcatgtaaaccagagattgcatatgcttataaagttagcatcacatccatcactgtagaaaatgtttttgtcaagtacaaggcaacccttctggatatctacaaaactggggaagctgttgctgagaaagactctgagattaccttcattaaaaaggtaacctgtactaacgctgagctggtaaaaggaagacagtacttaattatgggtaaagaagccctccagataaaatacaatttcagtttcaggtacatctaccctttagattccttgacctggattgaatactggcctagagacacaacatgttcatcgtgtcaagcatttttagctaatttagatgaatttgccgaagatatctttttaaatggatgctaaaattcctgaagttcagctgcatacagtttgcacttatggactcctgttgttgaagttcgtttttttgttttcttctttttttaaacattcatagctggtcttatttgtaaagctcactttacttagaattagtggcacttgcttttattagagaatgatttcaaatgctgtaactttctgaaataacatggccttggagggcatgaagacagatactcctccaaggttattggacaccggaaacaataaattggaacacctcctcaaacctaccactcaggaatgtttgctggggccgaaagaacagtccattgaaagggagtattacaaaaacatggcctttgcttgaaagaaaataccaaggaacaggaaactgatcattaaagcctgagtt

SEQ ID NO: 383492 - DNA, 5306 bp, Homo sapiens
ttatatccgtggtttcctgctacctccaaccatgggccttttgggaatactttgttttttaatcttcctggggaaaacctggggacaggagcaaacatatgtcatttcagcaccaaaaatattccgtgttggagcatctgaaaatattgtgattcaagtttatggatacactgaagcatttgatgcaacaatctctattaaaagttatcctgataaaaaatttagttactcctcaggccatgttcatttatcctcagagaataaattccaaaactctgcaatcttaacaatacaaccaaaacaattgcctggaggacaaaacccagtttcttatgtgtatttggaagttgtatcaaagcatttttcaaaatcaaaaagaatgccaataacctatgacaatggatttctcttcattcatacagacaaacctgtttatactccagaccagtcagtaaaagttagagtttattcgttgaatgacgacttgaagccagccaaaagagaaactgtcttaaccttcatagatcctgaaggatcagaagttgacatggtagaagaaattgatcatattggaattatctcttttcctgacttcaagattccgtctaatcctagatatggtatgtggacgatcaaggctaaatataaagaggacttttcaacaactggaaccgcatattttgaagttaaagaatatgtcttgccacatttttctgtctcaatcgagccagaatataatttcattggttacaagaactttaagaattttgaaattactataaaagcaagatatttttataataaagtagtcactgaggctgacgtttatatcacatttggaataagagaagacttaaaagatgatcaaaaagaaatgatgcaaacagcaatgcaaaacacaatgttgataaatggaattgctcaagtcacatttgattctgaaacagcagtcaaagaactgtcatactacagtttagaagatttaaacaacaagtacctttatattgctgtaacagtcatagagtctacaggtggattttctgaagaggcagaaatacctggcatcaaatatgtcctctctccctacaaactgaatttggttgctactcctcttttcctgaagcctgggattccatatcccatcaaggtgcaggttaaagattcgcttgaccagttggtaggaggagtcccagtaatactgaatgcacaaacaattgatgtaaaccaagagacatctgacttggatccaagcaaaagtgtaacacgtgttgatgatggagtagcttcctttgtgcttaatctcccatctggagtgacggtgctggagtttaatgtcaaaactgatgctccagatcttccagaagaaaatcaggccagggaaggttaccgagcaatagcatactcatctctcagccaaagttacctttatattgattggactgataaccataaggctttgctagtgggagaacatctgaatattattgttacccccaaaagcccatatattgacaaaataactcactataattacttgattttatccaagggcaaaattatccactttggcacgagggagaaattttcagatgcatcttatcaaagtataaacattccagtaacacagaacatggttccttcatcccgacttctggtctattatatcgtcacaggagaacagacagcagaattagtgtctgattcagtctggttaaatattgaagaaaaatgtggcaaccagctccaggttcatctgtctcctgatgcagatgcatattctccaggccaaactgtgtctcttaatatggcaactggaatggattcctgggtggcattagcagcagtggacagtgctgtgtatggagtccaaagaggagccaaaaagcccttggaaagagggcaggtggtggcctcaacaatgccaatgtgttccacctagctggacttaccttcctcactaatgcaaatgcagatgactcccaagaaaatgatgaaccttgtaaagaaattctcaggccaagaagaacgctgcaaaagaagatagaagaaatagctgctaaatataaacattcagtagtgaagaaatgttgttacgatggagcctgcgttaataatgatgaaacctgtgagcagcgagctgcacggattagtttagggccaagatgcatcaaagctttcactgaatgttgtgtcgtcgcaagccagctccgtgctaatatctctcataaagacatgcaattgggaaggctacacatgaagaccctgttaccagtaagcaagccagaaattcggagttattttccagaaagctggttgtgggaagttcatcttgttcccagaaggtattatacttctttcatgtatatgtgttgctgatactgtcaaggcaaaggtgttcaaagatgtcttcctggaaatgaatataccatattctgttgtacgaggagaacagatccaattgaaaggaactgtttacaactataggacttctgggatgcagttctgtgttaaaatgtctgctgtggagggaatctgcacttcggaaagcccagtcattgatcatcagggcacaaagtcctccaaatgtgtgcgccagaaagtagagggctcctccagtcacttggtgacattcactgtgcttcctctggaaattggccttcacaacatcaatttttcactggagacttggtttggaaaagaaatcttagtaaaaacattacgagtggtgccagaaggtgtcaaaagggaaagctattctggtgttactttggatcctaggggtatttatggtaccattagcagacgaaaggagttcccatacaggatacccttagatttggtccccaaaacagaaatcaaaaggattttgagtgtaaaaggactgcttgtaggtgagatcttgtctgcagttctaagtcaggaaggcatcaatatcctaacccacctccccaaagggagtgcagaggcggagctgatgagcgttgtcccagtattctatgtttttcactacctggaaacaggaaatcattggaacatttttcattctgacccattaattgaaaagcagaaactgaagaaaaaattaaaagaagggatgttgagcattatgtcctacagaaatgctgactactcttacagtgtgtggaagggtggaagtgctagcacttggttaacagcttttgctttaagagtacttggacaagtaaataaatacgtagagcagaaccaaaattcaatttgtaattctttattgtggctagttgagaattatcaattagataatggatctttcaaggaaaattcacagtatcaaccaataaaattacagggtaccttgcctgttgaagcccgagagaacagcttatatcttacagcctttactgtgattggaattagaaaggctttcgatatatgccccctggtgaaaatcgacacagctctaattaaagctgacaactttctgcttgaaaatacactgccagcccagagcacctttacattggccatttctgcgtatgctctttccctgggagataaaagtaatccacccatttatcgtttttggaaagacaatcttcagcataaagacagctctgtacctaacactggtacggcacgtatggtagaaacaactgcctatgctttactcaccagtctgaacttgaaagatataaattatgttaacccagtcatcaaatggctatcagaagagcagaggtatggaggtggcttttattcaacccaggacacaatcaatgccattgagggcctgacggaatattcactcctggttaaacaactccgcttgagtatggacatcgatgtttcttacaagcataaaggtgccttacataattataaaatgacagacaagaatttccttgggaggccagtagaggtgcttctcaatgatgacctcattgtcagtacaggatttggcagtggcttggctacagtacatgtaacaactgtagttcacaaaaccagtacctctgaggaagtttgcagcttttatttgaaaatcgatactcaggatattgaagcatcccactacagaggctacggaaactctgattacaaacgcatagtagcatgtgccagctacaagcccagcagggaagaatcatcatctggatcctctcatgcggtgatggacatctccttgcctactggaatcagtgcaaatgaagaagacttaaaagcccttgtggaaggggtggatcaactattcactgattaccaaatcaaagatggacatgttattctgcaactgaattcgattccctccagtgatttcctttgtgtacgattccggatatttgaactctttgaagttgggtttctcagtcctgccactttcacagtgtacgaataccacagaccagataaacagtgtaccatgttttatagcacttccaatatcaaaattcagaaagtctgtgaaggagccgcgtgcaagtgtgtagaagctgattgtgggcaaatgcaggaagaattggatctgacaatctctgcagagacaagaaaacaaacagcatgtaaaccagagattgcatatgcttataaagttagcatcacatccatcactgtagaaaatgtttttgtcaagtacaaggcaacccttctggatatctacaaaactggggaagctgttgctgagaaagactctgagattaccttcattaaaaaggtaacctgtactaacgctgagctggtaaaaggaagacagtacttaattatgggtaaagaagccctccagataaaatacaatttcagtttcaggtacatctaccctttagattccttgacctggattgaatactggcctagagacacaacatgttcatcgtgtcaagcatttttagctaatttagatgaatttgccgaagatatctttttaaatggatgctaaaattcctgaagttcagctgcatacagtttgcacttatggactcctgttgttgaagttcgtttttttgttttcttctttttttaaacattcatagctggtcttatttgtaaagctcactttacttagaattagtggcacttgcttttattagagaatgatttcaaatgctgtaactttctgaaataacatggccttggagggcatgaagacagatactcctccaaggttattggacaccggaaacaataaattggaacacctcctcaaacctaccactcaggaatgtttgctggggccgaaagaacagtccattgaaagggagtattacaaaaacatggcctttgcttgaaagaaaataccaaggaacaggaaactgatcattaaagcctgagtt

SEQ ID NO: 383493 - DNA, 5263 bp, Homo sapiens
ttatatccgtggtttcctgctacctccaaccatgggccttttgggaatactttgttttttaatcttcctggggaaaacctggggacaggagcaaacatatgtcatttcagcaccaaaaatattccgtgttggagcatctgaaaatattgtgattcaagtttatggatacactgaagcatttgatgcaacaatctctattaaaagttatcctgataaaaaatttagttactcctcaggccatgttcatttatcctcagagaataaattccaaaactctgcaatcttaacaatacaaccaaaacaattgcctggaggacaaaacccagtttcttatgtgtatttggaagttgtatcaaagcatttttcaaaatcaaaaagaatgccaataacctatgacaatggatttctcttcattcatacagacaaacctgtttatactccagaccagtcagtaaaagttagagtttattcgttgaatgacgacttgaagccagccaaaagagaaactgtcttaaccttcatagatcctgaaggatcagaagttgacatggtagaagaaattgatcatattggaattatctcttttcctgacttcaagattccgtctaatcctagatatggtatgtggacgatcaaggctaaatataaagaggacttttcaacaactggaaccgcatattttgaagttaaagaatatgtcttgccacatttttctgtctcaatcgagccagaatataatttcattggttacaagaactttaagaattttgaaattactataaaagcaagatatttttataataaagtagtcactgaggctgacgtttatatcacatttggaataagagaagacttaaaagatgatcaaaaagaaatgatgcaaacagcaatgcaaaacacaatgttgataaatggaattgctcaagtcacatttgattctgaaacagcagtcaaagaactgtcatactacagtttagaagatttaaacaacaagtacctttatattgctgtaacagtcatagagtctacaggtggattttctgaagaggcagaaatacctggcatcaaatatgtcctctctccctacaaactgaatttggttgctactcctcttttcctgaagcctgggattccatatcccatcaaggtgcaggttaaagattcgcttgaccagttggtaggaggagtcccagtaatactgaatgcacaaacaattgatgtaaaccaagagacatctgacttggatccaagcaaaagtgtaacacgtgttgatgatggagtagcttcctttgtgcttaatctcccatctggagtgacggtgctggagtttaatgtcaaaactgatgctccagatcttccagaagaaaatcaggccagggaaggttaccgagcaatagcatactcatctctcagccaaagttacctttatattgattggactgataaccataaggctttgctagtgggagaacatctgaatattattgttacccccaaaagcccatatattgacaaaataactcactataattacttgattttatccaagggcaaaattatccactttggcacgagggagaaattttcagatgcatcttatcaaagtataaacattccagtaacacagaacatggttccttcatcccgacttctggtctattatatcgtcacaggagaacagacagcagaattagtgtctgattcagtctggttaaatattgaagaaaaatgtggcaaccagctccaggttcatctgtctcctgatgcagatgcatattctccaggccaaactgtgtctcttaatatggcaactggaatggattcctgggtggcattagcagcagtggacagtgctgtgtatggagtccaaagaggagccaaaaagcccttggaaagagggcaggtggtggcctcaacaatgccaatgtgttccacctagctggacttaccttcctcactaatgcaaatgcagatgactcccaagaaaatgatgaaccttgtaaagaaattctcaggccaagaagaacgctgcaaaagaagatagaagaaatagctgctaaatataaacattcagtagtgaagaaatgttgttacgatggagcctgcgttaataatgatgaaacctgtgagcagcgagctgcacggattagtttagggccaagatgcatcaaagctttcactgaatgttgtgtcgtcgcaagccagctccgtgctaatatctctcataaagacatgcaattgggaaggctacacatgaagaccctgttaccagtaagcaagccagaaattcggagttattttccagaaagctggttgtgggaagttcatcttgttcccagaaggtattatacttctttcatgtatatgtgttgctgatactgtcaaggcaaaggtgttcaaagatgtcttcctggaaatgaatataccatattctgttgtacgaggagaacagatccaattgaaaggaactgtttacaactataggacttctgggatgcagttctgtgttaaaatgtctgctgtggagggaatctgcacttcggaaagcccagtcattgatcatcagggcacaaagtcctccaaatgtgtgcgccagaaagtagagggctcctccagtcacttggtgacattcactgtgcttcctctggaaattggccttcacaacatcaatttttcactggagacttggtttggaaaagaaatcttagtaaaaacattacgagtggtgccagaaggtgtcaaaagggaaagctattctggtgttactttggatcctaggggtatttatggtaccattagcagacgaaaggagttcccatacaggatacccttagatttggtccccaaaacagaaatcaaaaggattttgagtgtaaaaggactgcttgtaggtgagatcttgtctgcagttctaagtcaggaaggcatcaatatcctaacccacctccccaaagggagtgcagaggcggagctgatgagcgttgtcccagtattctatgtttttcactacctggaaacaggaaatcattggaacatttttcattctgacccattaattgaaaagcagaaactgaagaaaaaattaaaagaagggatgttgagcattatgtcctacagaaatgctgactactcttacagtgtgtggaagggtggaagtgctagcacttggttaacagcttttgctttaagagtacttggacaagtaaataaatacgtagagcagaacctggatcttctaaggaagattcacagtttcaaccaataatattacaggggtaccttgcctgttgaagcccgagagaacagcttatatcttacagcctttactgtgattggaattagaaaggctttcgatatatgccccctggtgaaaatcgacacagctctaattaaagctgacaactttctgcttgaaaatacactgccagcccagagcacctttacattggccatttctgcgtatgctctttccctgggagataaaactcacccacagtttcgttcaattgtttcagctttgaagagagaagctttggttaaaggtaatccacccatttatcgtttttggaaagacaatcttcagcataaagacagctctgtacctaacactggtacggcacgtatggtagaaacaactgcctatgctttactcaccagtctgaacttgaaagatataaattatgttaacccagtcatcaaatggctatcagaagagcagaggtatggaggtggcttttattcaacccaggacacaatcaatgccattgagggcctgacggaatattcactcctggttaaacaactccgcttgagtatggacatcgatgtttcttacaagcataaaggtgccttacataattataaaatgacagacaagaatttccttgggaggccagtagaggtgcttctcaatgatgacctcattgtcagtacaggatttggcagtggcttggctacagtacatgtaacaactgtagttcacaaaaccagtacctctgaggaagtttgcagcttttatttgaaaatcgatactcaggatattgaagcatcccactacagaggctacggaaactctgattacaaacgcatagtagcatgtgccagctacaagcccagcagggaagaatcatcatctggatcctctcatgcggtgatggacatctccttgcctactggaatcagtgcaaatgaagaagacttaaaagccatggacatgttattctgcaactgaattcgattccctccagtgatttcctttgtgtacgattccggatatttgaactctttgaagttgggtttctcagtcctgccactttcacagtgtacgaataccacagaccagataaacagtgtaccatgttttatagcacttccaatatcaaaattcagaaagtctgtgaaggagccgcgtgcaagtgtgtagaagctgattgtgggcaaatgcaggaagaattggatctgacaatctctgcagagacaagaaaacaaacagcatgtaaaccagagattgcatatgcttataaagttagcatcacatccatcactgtagaaaatgtttttgtcaagtacaaggcaacccttctggatatctacaaaactggggaagctgttgctgagaaagactctgagattaccttcattaaaaaggtaacctgtactaacgctgagctggtaaaaggaagacagtacttaattatgggtaaagaagccctccagataaaatacaatttcagtttcaggtacatctaccctttagattccttgacctggattgaatactggcctagagacacaacatgttcatcgtgtcaagcatttttagctaatttagatgaatttgccgaagatatctttttaaatggatgctaaaattcctgaagttcagctgcatacagtttgcacttatggactcctgttgttgaagttcgtttttttgttttcttctttttttaaacattcatagctggtcttatttgtaaagctcactttacttagaattagtggcacttgcttttattagagaatgatttcaaatgctgtaactttctgaaataacatggccttggagggcatgaagacagatactcctccaaggttattggacaccggaaacaataaattggaacacctcctcaaacctaccactcaggaatgtttgctggggccgaaagaacagtccattgaaagggagtattacaaaaacatggcctttgcttgaaagaaaataccaaggaacaggaaactgatcattaaagcctgagtt

SEQ ID NO: 383494 - DNA, 2348 bp, Homo sapiens
gatcctgtctcaaaacacacaaacaaaaaaaacaaaaaataggttgagtgttcctgatctgaactgcttgggaccagaagtatttcagatttcagatttttttcagattttggaatatttacatatacataatgatatatcttggggatgggactcaagtctaaacatgaaattcatttatgtttcatatatactttacacacagcttgaaagtaattttacacactattttcaataattttgtgcatgaaacaaagttttgactgcattttgattgtgacccatcacatgaggtcaggggtgaaattacccacctgtggcatcatgtcagagctcaaaaactttcagattttgggggcatttcatatttcagattttcagattagggatgctcaatgtgtaaagacaagtaataccatattaagggatctcgttttgcattggtcatcttcaggaagttcctctaacaagaaaaagtaagtagcttctagaaactggaaggccataatacacctggtagaattattatgtcaaattcacatttttaatcatattaatgaatggaatttgttgatgttcaggtaatccacccatttatcgtttttggaaagacaatcttcagcataaagacagctctgtacctaacactggtacggcacgtatggtagaaacaactgcctatgctttactcaccagtctgaacttgaaagatataaattatgttaacccagtcatcaaatggctatcagaagagcagaggtatggaggtggcttttattcaacccaggacacaatcaatgccattgagggcctgacggaatattcactcctggttaaacaactccgcttgagtatggacatcgatgtttcttacaagcataaaggtgccttacataattataaaatgacagacaagaatttccttgggaggccagtagaggtgcttctcaatgatgacctcattgtcagtacaggatttggcagtggcttggctacagtacatgtaacaactgtagttcacaaaaccagtacctctgaggaagtttgcagcttttatttgaaaatcgatactcaggatattgaagcatcccactacagaggctacggaaactctgattacaaacgcatagtagcatgtgccagctacaagcccagcagggaagaatcatcatctggatcctctcatgcggtgatggacatctccttgcctactggaatcagtgcaaatgaagaagacttaaaagcccttgtggaaggggtggatcaactattcactgattaccaaatcaaagatggacatgttattctgcaactgaattcgattccctccagtgatttcctttgtgtacgattccggatatttgaactctttgaagttgggtttctcagtcctgccactttcacagtgtacgaataccacagaccagataaacagtgtaccatgttttatagcacttccaatatcaaaattcagaaagtctgtgaaggagccgcgtgcaagtgtgtagaagctgattgtgggcaaatgcaggaagaattggatctgacaatctctgcagagacaagaaaacaaacagcatgtaaaccagagattgcatatgcttataaagttagcatcacatccatcactgtagaaaatgtttttgtcaagtacaaggcaacccttctggatatctacaaaactggggaagctgttgctgagaaagactctgagattaccttcattaaaaaggtaacctgtactaacgctgagctggtaaaaggaagacagtacttaattatgggtaaagaagccctccagataaaatacaatttcagtttcaggtacatctaccctttagattccttgacctggattgaatactggcctagagacacaacatgttcatcgtgtcaagcatttttagctaatttagatgaatttgccgaagatatctttttaaatggatgctaaaattcctgaagttcagctgcatacagtttgcacttatggactcctgttgttgaagttcgtttttttgttttcttctttttttaaacattcatagctggtcttatttgtaaagctcactttacttagaattagtggcacttgcttttattagagaatgatttcaaatgctgtaactttctgaaataacatggccttggagggcatgaagacagatactcctccaaggttattggacaccggaaacaataaattggaacacctcctcaaacctaccactcaggaatgtttgctggggccgaaagaacagtccattgaaagggagtattacaaaaacatggcctttgcttgaaagaaaataccaaggaacaggaaactgatcattaaagcctgagtt

SEQ ID NO: 383495 - DNA, 4743 bp, Homo sapiens
ttatatccgtggtttcctgctacctccaaccatgggccttttgggaatactttgttttttaatcttcctggggaaaacctggggacaggagcaaacatatgtcatttcagcaccaaaaatattccgtgttggagcatctgaaaatattgtgattcaagtttatggatacactgaagcatttgatgcaacaatctctattaaaagttatcctgataaaaaatttagttactcctcaggccatgttcatttatcctcagagaataaattccaaaactctgcaatcttaacaatacaaccaaaacaattgcctggaggacaaaacccagtttcttatgtgtatttggaagttgtatcaaagcatttttcaaaatcaaaaagaatgccaataacctatgacaatggatttctcttcattcatacagacaaacctgtttatactccagaccagtcagtaaaagttagagtttattcgttgaatgacgacttgaagccagccaaaagagaaactgtcttaaccttcatagatcctgaaggatcagaagttgacatggtagaagaaattgatcatattggaattatctcttttcctgacttcaagattccgtctaatcctagatatggtatgtggacgatcaaggctaaatataaagaggacttttcaacaactggaaccgcatattttgaagttaaagaatatgtcttgccacatttttctgtctcaatcgagccagaatataatttcattggttacaagaactttaagaattttgaaattactataaaagcaagatatttttataataaagtagtcactgaggctgacgtttatatcacatttggaataagagaagacttaaaagatgatcaaaaagaaatgatgcaaacagcaatgcaaaacacaatgttgataaatggaattgctcaagtcacatttgattctgaaacagcagtcaaagaactgtcatactacagtttagaagatttaaacaacaagtacctttatattgctgtaacagtcatagagtctacaggtggattttctgaagaggcagaaatacctggcatcaaatatgtcctctctccctacaaactgaatttggttgctactcctcttttcctgaagcctgggattccatatcccatcaaggtgcaggttaaagattcgcttgaccagttggtaggaggagtcccagtaatactgaatgcacaaacaattgatgtaaaccaagagacatctgacttggatccaagcaaaagtgtaacacgtgttgatgatggagtagcttcctttgtgcttaatctcccatctggagtgacggtgctggagtttaatgtcaaaactgatgctccagatcttccagaagaaaatcaggccagggaaggttaccgagcaatagcatactcatctctcagccaaagttacctttatattgattggactgataaccataaggctttgctagtgggagaacatctgaatattattgttacccccaaaagcccatatattgacaaaataactcactataattacttgattttatccaagggcaaaattatccactttggcacgagggagaaattttcagatgcatcttatcaaagtataaacattccagtaacacagaacatggttccttcatcccgacttctggtctattatatcgtcacaggagaacagacagcagaattagtgtctgattcagtctggttaaatattgaagaaaaatgtggcaaccagctccaggttcatctgtctcctgatgcagatgcatattctccaggccaaactgtgtctcttaatatggcaactggaatggattcctgggtggcattagcagcagtggacagtgctgtgtatggagtccaaagaggagccaaaaagcccttggaaagagggcaggtggtggcctcaacaatgccaatgtgttccacctagctggacttaccttcctcactaatgcaaatgcagatgactcccaagaaaatgatgaaccttgtaaagaaattctcaggccaagaagaacgctgcaaaagaagatagaagaaatagctgctaaatataaacattcagtagtgaagaaatgttgttacgatggagcctgcgttaataatgatgaaacctgtgagcagcgagctgcacggattagtttagggccaagatgcatcaaagctttcactgaatgttgtgtcgtcgcaagccagctccgtgctaatatctctcataaagacatgcaattgggaaggctacacatgaagaccctgttaccagtaagcaagccagaaattcggagttattttccagaaagctggttgtgggaagttcatcttgttcccagaaggtattatacttctttcatgtatatgtgttgctgatactgtcaaggcaaaggtgttcaaagatgtcttcctggaaatgaatataccatattctgttgtacgaggagaacagatccaattgaaaggaactgtttacaactataggacttctgggatgcagttctgtgttaaaatgtctgctgtggagggaatctgcacttcggaaagcccagtcattgatcatcagggcacaaagtcctccaaatgtgtgcgccagaaagtagagggctcctccagtcacttggtgacattcactgtgcttcctctggaaattggccttcacaacatcaatttttcactggagacttggtttggaaaagaaatcttagtaaaaacattacgagtggtgccagaaggtgtcaaaagggaaagctattctggtgttactttggatcctaggggtatttatggtaccattagcagacgaaaggagttcccatacaggatacccttagatttggtccccaaaacagaaatcaaaaggattttgagtgtaaaaggactgcttgtaggtgagatcttgtctgcagttctaagtcaggaaggcatcaatatcctaacccacctccccaaagggagtgcagaggcggagctgatgagcgttgtcccagtattctatgtttttcactacctggaaacaggaaatcattggaacatttttcattctgacccattaattgaaaagcagaaactgaagaaaaaattaaaagaagggatgttgagcattatgtcctacagaaatgctgactactcttacagtgtgtggaagggtggaagtgctagcacttggttaacagcttttgctttaagagtacttggacaagtaaataaatacgtagagcagaacctggatcttctaaggaagattcacagtttcaaccaataatattacaggggtaccttgcctgttgaagcccgagagaacagcttatatcttacagcctttactgtgattggaattagaaaggctttcgatatatgccccctggtgaaaatcgacacagctctaattaaagctgacaactttctgcttgaaaatacactgccagcccagagcacctttacattggccatttctgcgtatgctctttccctgggagataaaactcacccacagtttcgttcaattgtttcagctttgaagagagaagctttggttaaaggtaatccacccatttatcgtttttggaaagacaatcttcagcataaagacagctctgtacctaacactggtacggcacgtatggtagaaacaactgcctatgctttactcaccagtctgaacttgaaagatataaattatgttaacccagtcatcaaatggctatcagaagagcagaggtatggaggtggcttttattcaacccaggacacaatcaatgccattgagggcctgacggaatattcactcctggttaaacaactccgcttgagtatggacatcgatgtttcttacaagcataaaggtgccttacataattataaaatgacagacaagaatttccttgggaggccagtagaggtgcttctcaatgatgacctcattgtcagtacaggatttggcagtggcttggctacagtacatgtaacaactgtagttcacaaaaccagtacctctgaggaagtttgcagcttttatttgaaaatcgatactcaggatattgaagcatcccactacagaggctacggaaactctgattacaaacgcatagtagcatgtgccagctacaagcccagcagggaagaatcatcatctggatcctctcatgcggtgatggacatctccttgcctactggaatcagtgcaaatgaagaagacttaaaagcccttgtggaaggggtggatcaactattcactgattaccaaatcaaagatggacatgttattctgcaactgaattcgattccctccagtgatttcctttgtgtacgattccggatatttgaactctttgaagttgggtttctcagtcctgccactttcacagtgtacgaataccacagaccagataaacagtgtaccatgttttatagcacttccaatatcaaaattcagaaagtctgtgaaggagccgcgtgcaagtgtgtagaagctgattgtgggcaaatgcaggaagaattggatctgacaatctctgcagagacaagaaaacaaacagcatgtaaaccagagattgcatatgcttataaagttagcatcacatccatcactgtagaaaatgtttttgtcaagtacaaggcaacccttctggatatctacaaaactggtgagaattcattcgttcattcgttccttcattcagcaactatttagtactgactatgtgccaggcattatattaaacacagaagatacaactcaaa

SEQ ID NO: 383496 - DNA, 3705 bp, Homo sapiens
ttatatccgtggtttcctgctacctccaaccatgggccttttgggaatactttgttttttaatcttcctggggaaaacctggggacaggagcaaacatatgtcatttcagcaccaaaaatattccgtgttggagcatctgaaaatattgtgattcaagtttatggatacactgaagcatttgatgcaacaatctctattaaaagttatcctgataaaaaatttagttactcctcaggccatgttcatttatcctcagagaataaattccaaaactctgcaatcttaacaatacaaccaaaacaattgcctggaggacaaaacccagtttcttatgtgtatttggaagttgtatcaaagcatttttcaaaatcaaaaagaatgccaataacctatgacaatggatttctcttcattcatacagacaaacctgtttatactccagaccagtcagtaaaagttagagtttattcgttgaatgacgacttgaagccagccaaaagagaaactgtcttaaccttcatagatcctgaaggatcagaagttgacatggtagaagaaattgatcatattggaattatctcttttcctgacttcaagattccgtctaatcctagatatggtatgtggacgatcaaggctaaatataaagaggacttttcaacaactggaaccgcatattttgaagttaaagaatatgtcttgccacatttttctgtctcaatcgagccagaatataatttcattggttacaagaactttaagaattttgaaattactataaaagcaagatatttttataataaagtagtcactgaggctgacgtttatatcacatttggaataagagaagacttaaaagatgatcaaaaagaaatgatgcaaacagcaatgcaaaacacaatgttgataaatggaattgctcaagtcacatttgattctgaaacagcagtcaaagaactgtcatactacagtttagaagatttaaacaacaagtacctttatattgctgtaacagtcatagagtctacaggtggattttctgaagaggcagaaatacctggcatcaaatatgtcctctctccctacaaactgaatttggttgctactcctcttttcctgaagcctgggattccatatcccatcaaggtgcaggttaaagattcgcttgaccagttggtaggaggagtcccagtaatactgaatgcacaaacaattgatgtaaaccaagagacatctgacttggatccaagcaaaagtgtaacacgtgttgatgatggagtagcttcctttgtgcttaatctcccatctggagtgacggtgctggagtttaatgtcaaaactgatgctccagatcttccagaagaaaatcaggccagggaaggttaccgagcaatagcatactcatctctcagccaaagttacctttatattgattggactgataaccataaggctttgctagtgggagaacatctgaatattattgttacccccaaaagcccatatattgacaaaataactcactataattacttgattttatccaagggcaaaattatccactttggcacgagggagaaattttcagatgcatcttatcaaagtataaacattccagtaacacagaacatggttccttcatcccgacttctggtctattatatcgtcacaggagaacagacagcagaattagtgtctgattcagtctggttaaatattgaagaaaaatgtggcaaccagctccaggttcatctgtctcctgatgcagatgcatattctccaggccaaactgtgtctcttaatatggcaactggaatggattcctgggtggcattagcagcagtggacagtgctgtgtatggagtccaaagaggagccaaaaagcccttggaaagagggcaggtggtggcctcaacaatgccaatgtgttccacctagctggacttaccttcctcactaatgcaaatgcagatgactcccaagaaaatgatgaaccttgtaaagaaattctcaggccaagaagaacgctgcaaaagaagatagaagaaatagctgctaaatataaacattcagtagtgaagaaatgttgttacgatggagcctgcgttaataatgatgaaacctgtgagcagcgagctgcacggattagtttagggccaagatgcatcaaagctttcactgaatgttgtgtcgtcgcaagccagctccgtgctaatatctctcataaagacatgcaattgggaaggctacacatgaagaccctgttaccagtaagcaagccagaaattcggagttattttccagaaagctggttgtgggaagttcatcttgttcccagaaggtattatacttctttcatgtatatgtgttgctgatactgtcaaggcaaaggtgttcaaagatgtcttcctggaaatgaatataccatattctgttgtacgaggagaacagatccaattgaaaggaactgtttacaactataggacttctgggatgcagttctgtgttaaaatgtctgctgtggagggaatctgcacttcggaaagcccagtcattgatcatcagggcacaaagtcctccaaatgtgtgcgccagaaagtagagggctcctccagtcacttggtgacattcactgtgcttcctctggaaattggccttcacaacatcaatttttcactggagacttggtttggaaaagaaatcttagtaaaaacattacgagtggtgccagaaggtgtcaaaagggaaagctattctggtgttactttggatcctaggggtatttatggtaccattagcagacgaaaggagttcccatacaggatacccttagatttggtccccaaaacagaaatcaaaaggattttgagtgtaaaaggactgcttgtaggtgagatcttgtctgcagttctaagtcaggaaggcatcaatatcctaacccacctccccaaagggagtgcagaggcggagctgatgagcgttgtcccagtattctatgtttttcactacctggaaacaggaaatcattggaacatttttcattctgacccattaattgaaaagcagaaactgaagaaaaaattaaaagaagggatgttgagcattatgtcctacagaaatgctgactactcttacagtgtgtggaagggtggaagtgctagcacttggttaacagcttttgctttaagagtacttggacaagtaaataaatacgtagagcagaacctggatcttctaaggaagattcacagtttcaaccaataatattacaggggtaccttgcctgttgaagcccgagagaacagcttatatcttacagcctttactgtgattggaattagaaaggctttcgatatatgccccctggtgaaaatcgacacagctctaattaaagctgacaactttctgcttgaaaatacactgccagcccagagcacctttacattggccatttctgcgtatgctctttccctgggagataaaactcacccacagtttcgttcaattgtttcagctttgaagagagaagctttggttaaagatacgagtctcactgtgtttccccggatgatctcaaatgcctgggctcaagcactcctactgcctcagccttccaaagtgctaggatcacaggcatgagccaccacacctgtcctctatttattcctttattcaataaatatgcattgagtatcctatgtaca

SEQ ID NO: 383497 - DNA, 147 bp, Homo sapiens
cttttattttgaaatattctttggaagtagatacattataaataatctgcaaacagtcttcccctggaaactctgtataaatccaaattttctaaattacaggtaccattagcagacgaaaggagttcccatacaggatacccttag

SEQ ID NO: 383498 - DNA, 335 bp, Homo sapiens
tcaaattcatgttcctaaccggatctttttttctcaccccgtttctgagaagcaagtcaactgcctagataaaaagggaagaaccatctctagatggttgttcttctctcttgagaacatactgttagaagttaataaaaagcaatgtgtctactttgatcttttttgtttcaggactgcttgtaggtgagatcttgtctgcagttctaagtcaggaaggcatcaatatcctaacccacctccccaaagggagtgcagaggcggagctgatgagcgttgtcccagtattctatgtttttcactacctggaaacaggaaatcattggaacattttt

SEQ ID NO: 383499 - DNA, 371 bp, Homo sapiens
taagtgaggaaatatatgtattttaaatggaatctctcaagtgagagaaaaaaatcaaaagtaaaagaaaatatgtcatataaagacattgagccttatcttttcctttttcaacagatatgtcatttcagcaccaaaaatattccgtgttggagcatctgaaaatattgtgattcaagtttatggatacactgaagcatttgatgcaacaatctctattaaaagttatcctgataaaaaatttagttactcctcaggccatgttcatttatcctcagagaataaattccaaaactctgcaatcttaacagtatgtatttatcctttattttctttatatatatatacagaatattctcaataaaaatgtg

SEQ ID NO: 383500 - DNA, 936 bp, Homo sapiens
cttagtctctcctgtacccctttcttttttagtctctcctgtaccatcctttctttaaatgtacccctgacccttttatttaacccaaggccctcacatccctctgctggttggttctcccttcctggtccaaaagcaagtccacttgcacactccagtcctcctggtctccccattgcctccagggtcagaatgaatgttgctgcctctgccctgatattttccatctattgctcagaagcctgttcctacaggaaacttcccaactaccagcaaattaaggcatctgttcttcctccctccaacatcccccaaacatattaccaatacatatttatctttaataatttcttcattaaattataagttatttgagagcaatgaactgttaattatttaaagacttcctggtattgtcaatagccatgaatttccattagaaccactgaaagtatctaaacttccaaatcacaaatcatttttaagtgtgttcaaagatttgctcattaatgattctgttctgacaggttccaaagcagctgaaaacagtttactcttatatttgtctgtttgttttcttgtcttatgtgccagcatcccactacagaggctacggaaactctgattacaaacgcatagtagcatgtgccaggtgagcctatttccacaaaggggagcatagactccaagttctcatttttgttaacgtattgtttctttacatattttcaaattttggtatgtccagaagatacaaaattgttcaattgtttaaaaatgcagaacatatatattcttaaattgctacttaccataaaaaacagccttggttttgctcataatagttttctctgtctgttttgtcttctgattcaaacagtgtaatattaattttttctctttcagagggatagaaatgtgatttaaaaaattagg

SEQ ID NO: 383501 - DNA, 5208 bp, Homo sapiens
ttatatccgtggtttcctgctacctccaaccatgggccttttgggaatactttgttttttaatcttcctggggaaaacctggggacaggagcaaacatatgtcatttcagcaccaaaaatattccgtgttggagcatctgaaaatattgtgattcaagtttatggatacactgaagcatttgatgcaacaatctctattaaaagttatcctgataaaaaatttagttactcctcaggccatgttcatttatcctcagagaataaattccaaaactctgcaatcttaacaatacaaccaaaacaattgcctggaggacaaaacccagtttcttatgtgtatttggaagttgtatcaaagcatttttcaaaatcaaaaagaatgccaataacctatgacaatggatttctcttcattcatacagacaaacctgtttatactccagaccagtcagtaaaagttagagtttattcgttgaatgacgacttgaagccagccaaaagagaaactgtcttaaccttcatagatcctgaaggatcagaagttgacatggtagaagaaattgatcatattggaattatctcttttcctgacttcaagattccgtctaatcctagatatggtatgtggacgatcaaggctaaatataaagaggacttttcaacaactggaaccgcatattttgaagttaaagaatatgtcttgccacatttttctgtctcaatcgagccagaatataatttcattggttacaagaactttaagaattttgaaattactataaaagcaagatatttttataataaagtagtcactgaggctgacgtttatatcacatttggaataagagaagacttaaaagatgatcaaaaagaaatgatgcaaacagcaatgcaaaacacaatgttgataaatggaattgctcaagtcacatttgattctgaaacagcagtcaaagaactgtcatactacagtttagaagatttaaacaacaagtacctttatattgctgtaacagtcatagagtctacaggtggattttctgaagaggcagaaatacctggcatcaaatatgtcctctctccctacaaactgaatttggttgctactcctcttttcctgaagcctgggattccatatcccatcaaggtgcaggttaaagattcgcttgaccagttggtaggaggagtcccagtaatactgaatgcacaaacaattgatgtaaaccaagagacatctgacttggatccaagcaaaagtgtaacacgtgttgatgatggagtagcttcctttgtgcttaatctcccatctggagtgacggtgctggagtttaatgtcaaaactgatgctccagatcttccagaagaaaatcaggccagggaaggttaccgagcaatagcatactcatctctcagccaaagttacctttatattgattggactgataaccataaggctttgctagtgggagaacatctgaatattattgttacccccaaaagcccatatattgacaaaataactcactataattacttgattttatccaagggcaaaattatccactttggcacgagggagaaattttcagatgcatcttatcaaagtataaacattccagtaacacagaacatggttccttcatcccgacttctggtctattatatcgtcacaggagaacagacagcagaattagtgtctgattcagtctggttaaatattgaagaaaaatgtggcaaccagctccaggttcatctgtctcctgatgcagatgcatattctccaggccaaactgtgtctcttaatatggcaactggaatggattcctgggtggcattagcagcagtggacagtgctgtgtatggagtccaaagaggagccaaaaagcccttggaaagagggcaggtggtggcctcaacaatgccaatgtgttccacctagctggacttaccttcctcactaatgcaaatgcagatgactcccaagaaaatgatgaaccttgtaaagaaattctcaggccaagaagaacgctgcaaaagaagatagaagaaatagctgctaaatataaacattcagtagtgaagaaatgttgttacgatggagcctgcgttaataatgatgaaacctgtgagcagcgagctgcacggattagtttagggccaagatgcatcaaagctttcactgaatgttgtgtcgtcgcaagccagctccgtgctaatatctctcataaagacatgcaattgggaaggctacacatgaagaccctgttaccagtaagcaagccagaaattcggagttattttccagaaagctggttgtgggaagttcatcttgttcccagaaggtattatacttctttcatgtatatgtgttgctgatactgtcaaggcaaaggtgttcaaagatgtcttcctggaaatgaatataccatattctgttgtacgaggagaacagatccaattgaaaggaactgtttacaactataggacttctgggatgcagttctgtgttaaaatgtctgctgtggagggaatctgcacttcggaaagcccagtcattgatcatcagggcacaaagtcctccaaatgtgtgcgccagaaagtagagggctcctccagtcacttggtgacattcactgtgcttcctctggaaattggccttcacaacatcaatttttcactggagacttggtttggaaaagaaatcttagtaaaaacattacgagtggtgccagaaggtgtcaaaagggaaagctattctggtgttactttggatcctaggggtatttatggtaccattagcagacgaaaggagttcccatacaggatacccttagatttggtccccaaaacagaaatcaaaaggattttgagtgtaaaaggactgcttgtaggtgagatcttgtctgcagttctaagtcaggaaggcatcaatatcctaacccacctccccaaagggagtgcagaggcggagctgatgagcgttgtcccagtattctatgtttttcactacctggaaacaggaaatcattggaacatttttcattctgacccattaattgaaaagcagaaactgaagaaaaaattaaaagaagggatgttgagcattatgtcctacagaaatgctgactactcttacagtgtgtggaagggtggaagtgctagcacttggttaacagcttttgctttaagagtacttggacaagtaaataaatacgtagagcagaacctggatcttctaaggaagattcacagtttcaaccaataatattacaggggtaccttgcctgttgaagcccgagagaacagcttatatcttacagcctttactgtgattggaattagaaaggctttcgatatatgccccctggtgaaaatcgacacagctctaattaaagctgacaactttctgcttgaaaatacactgccagcccagagcacctttacattggccatttctgcgtatgctctttccctgggagataaaactcacccacagtttcgttcaattgtttcagctttgaagagagaagctttggttaaaggtaatccacccatttatcgtttttggaaagacaatcttcagcataaagacagctctgtacctaacactggtacggcacgtatggtagaaacaactgcctatgctttactcaccagtctgaacttgaaagatataaattatgttaacccagtcatcaaatggctatcagaagagcagaggtatggaggtggcttttattcaacccaggacacaatcaatgccattgagggcctgacggaatattcactcctggttaaacaactccgcttgagtatggacatcgatgtttcttacaagcataaaggtgccttacataattataactcattgtcagtacaggatttggcagtggcttggctacagtacatgtaacaactgtagttcacaaaaccagtacctctgaggaagtttgcagcttttatttgaaaatcgatactcaggatattgaagcatcccactacagaggctacggaaactctgattacaaacgcatagtagcatgtgccagctacaagcccagcagggaagaatcatcatctggatcctctcatgcggtgatggacatctccttgcctactggaatcagtgcaaatgaagaagacttaaaagccatggacatgttattctgcaactgaattcgattccctccagtgatttcctttgtgtacgattccggatatttgaactctttgaagttgggtttctcagtcctgccactttcacagtgtacgaataccacagaccagataaacagtgtaccatgttttatagcacttccaatatcaaaattcagaaagtctgtgaaggagccgcgtgcaagtgtgtagaagctgattgtgggcaaatgcaggaagaattggatctgacaatctctgcagagacaagaaaacaaacagcatgtaaaccagagattgcatatgcttataaagttagcatcacatccatcactgtagaaaatgtttttgtcaagtacaaggcaacccttctggatatctacaaaactggggaagctgttgctgagaaagactctgagattaccttcattaaaaaggtaacctgtactaacgctgagctggtaaaaggaagacagtacttaattatgggtaaagaagccctccagataaaatacaatttcagtttcaggtacatctaccctttagattccttgacctggattgaatactggcctagagacacaacatgttcatcgtgtcaagcatttttagctaatttagatgaatttgccgaagatatctttttaaatggatgctaaaattcctgaagttcagctgcatacagtttgcacttatggactcctgttgttgaagttcgtttttttgttttcttctttttttaaacattcatagctggtcttatttgtaaagctcactttacttagaattagtggcacttgcttttattagagaatgatttcaaatgctgtaactttctgaaataacatggccttggagggcatgaagacagatactcctccaaggttattggacaccggaaacaataaattggaacacctcctcaaacctaccactcaggaatgtttgctggggccgaaagaacagtccattgaaagggagtattacaaaaacatggcctttgcttgaaagaaaataccaaggaacaggaaactgatcattaaagcctgagtt

SEQ ID NO: 383502 - DNA, 5259 bp, Homo sapiens
ttatatccgtggtttcctgctacctccaaccatgggccttttgggaatactttgttttttaatcttcctggggaaaacctggggacaggagcaaacatatgtcatttcagcaccaaaaatattccgtgttggagcatctgaaaatattgtgattcaagtttatggatacactgaagcatttgatgcaacaatctctattaaaagttatcctgataaaaaatttagttactcctcaggccatgttcatttatcctcagagaataaattccaaaactctgcaatcttaacaatacaaccaaaacaattgcctggaggacaaaacccagtttcttatgtgtatttggaagttgtatcaaagcatttttcaaaatcaaaaagaatgccaataacctatgacaatggatttctcttcattcatacagacaaacctgtttatactccagaccagtcagtaaaagttagagtttattcgttgaatgacgacttgaagccagccaaaagagaaactgtcttaaccttcatagatcctgaaggatcagaagttgacatggtagaagaaattgatcatattggaattatctcttttcctgacttcaagattccgtctaatcctagatatggtatgtggacgatcaaggctaaatataaagaggacttttcaacaactggaaccgcatattttgaagttaaagaatatgtcttgccacatttttctgtctcaatcgagccagaatataatttcattggttacaagaactttaagaattttgaaattactataaaagcaagatatttttataataaagtagtcactgaggctgacgtttatatcacatttggaataagagaagacttaaaagatgatcaaaaagaaatgatgcaaacagcaatgcaaaacacaatgttgataaatggaattgctcaagtcacatttgattctgaaacagcagtcaaagaactgtcatactacagtttagaagatttaaacaacaagtacctttatattgctgtaacagtcatagagtctacaggtggattttctgaagaggcagaaatacctggcatcaaatatgtcctctctccctacaaactgaatttggttgctactcctcttttcctgaagcctgggattccatatcccatcaaggtgcaggttaaagattcgcttgaccagttggtaggaggagtcccagtaatactgaatgcacaaacaattgatgtaaaccaagagacatctgacttggatccaagcaaaagtgtaacacgtgttgatgatggagtagcttcctttgtgcttaatctcccatctggagtgacggtgctggagtttaatgtcaaaactgatgctccagatcttccagaagaaaatcaggccagggaaggttaccgagcaatagcatactcatctctcagccaaagttacctttatattgattggactgataaccataaggctttgctagtgggagaacatctgaatattattgttacccccaaaagcccatatattgacaaaataactcactataattacttgattttatccaagggcaaaattatccactttggcacgagggagaaattttcagatgcatcttatcaaagtataaacattccagtaacacagaacatggttccttcatcccgacttctggtctattatatcgtcacaggagaacagacagcagaattagtgtctgattcagtctggttaaatattgaagaaaaatgtggcaaccagctccaggttcatctgtctcctgatgcagatgcatattctccaggccaaactgtgtctcttaatatggcaactggaatggattcctgggtggcattagcagcagtggacagtgctgtgtatggagtccaaagaggagccaaaaagcccttggaaagagggcaggtggtggcctcaacaatgccaatgtgttccacctagctggacttaccttcctcactaatgcaaatgcagatgactcccaagaaaatgatgaaccttgtaaagaaattctcaggccaagaagaacgctgcaaaagaagatagaagaaatagctgctaaatataaacattcagtagtgaagaaatgttgttacgatggagcctgcgttaataatgatgaaacctgtgagcagcgagctgcacggattagtttagggccaagatgcatcaaagctttcactgaatgttgtgtcgtcgcaagccagctccgtgctaatatctctcataaagacatgcaattgggaaggctacacatgaagaccctgttaccagtaagcaagccagaaattcggagttattttccagaaagctggttgtgggaagttcatcttgttcccagaaggtattatacttctttcatgtatatgtgttgctgatactgtcaaggcaaaggtgttcaaagatgtcttcctggaaatgaatataccatattctgttgtacgaggagaacagatccaattgaaaggaactgtttacaactataggacttctgggatgcagttctgtgttaaaatgtctgctgtggagggaatctgcacttcggaaagcccagtcattgatcatcagggcacaaagtcctccaaatgtgtgcgccagaaagtagagggctcctccagtcacttggtgacattcactgtgcttcctctggaaattggccttcacaacatcaatttttcactggagacttggtttggaaaagaaatcttagtaaaaacattacgagtggtgccagaaggtgtcaaaagggaaagctattctggtgttactttggatcctaggggtatttatggtaccattagcagacgaaaggagttcccatacaggatacccttagatttggtccccaaaacagaaatcaaaaggattttgagtgtaaaagatcaatatcctaacccacctccccaaagggagtgcagaggcggagctgatgagcgttgtcccagtattctatgtttttcactacctggaaacaggaaatcattggaacatttttcattctgacccattaattgaaaagcagaaactgaagaaaaaattaaaagaagggatgttgagcattatgtcctacagaaatgctgactactcttacagtgtgtggaagggtggaagtgctagcacttggttaacagcttttgctttaagagtacttggacaagtaaataaatacgtagagcagaaccaaaattcaatttgtaattctttattgtggctagttgagaattatcaattagataatggatctttcaaggaaaattcacagtatcaaccaataaaattacagggtaccttgcctgttgaagcccgagagaacagcttatatcttacagcctttactgtgattggaattagaaaggctttcgatatatgccccctggtgaaaatcgacacagctctaattaaagctgacaactttctgcttgaaaatacactgccagcccagagcacctttacattggccatttctgcgtatgctctttccctgggagataaaagtaatccacccatttatcgtttttggaaagacaatcttcagcataaagacagctctgtacctaacactggtacggcacgtatggtagaaacaactgcctatgctttactcaccagtctgaacttgaaagatataaattatgttaacccagtcatcaaatggctatcagaagagcagaggtatggaggtggcttttattcaacccaggacacaatcaatgccattgagggcctgacggaatattcactcctggttaaacaactccgcttgagtatggacatcgatgtttcttacaagcataaaggtgccttacataattataaaatgacagacaagaatttccttgggaggccagtagaggtgcttctcaatgatgacctcattgtcagtacaggatttggcagtggcttggctacagtacatgtaacaactgtagttcacaaaaccagtacctctgaggaagtttgcagcttttatttgaaaatcgatactcaggatattgaagcatcccactacagaggctacggaaactctgattacaaacgcatagtagcatgtgccagctacaagcccagcagggaagaatcatcatctggatcctctcatgcggtgatggacatctccttgcctactggaatcagtgcaaatgaagaagacttaaaagcccttgtggaaggggtggatcaactattcactgattaccaaatcaaagatggacatgttattctgcaactgaattcgattccctccagtgatttcctttgtgtacgattccggatatttgaactctttgaagttgggtttctcagtcctgccactttcacagtgtacgaataccacagaccagataaacagtgtaccatgttttatagcacttccaatatcaaaattcagaaagtctgtgaaggagccgcgtgcaagtgtgtagaagctgattgtgggcaaatgcaggaagaattggatctgacaatctctgcagagacaagaaaacaaacagcatgtaaaccagagattgcatatgcttataaagttagcatcacatccatcactgtagaaaatgtttttgtcaagtacaaggcaacccttctggatatctacaaaactggggaagctgttgctgagaaagactctgagattaccttcattaaaaaggtaacctgtactaacgctgagctggtaaaaggaagacagtacttaattatgggtaaagaagccctccagataaaatacaatttcagtttcaggtacatctaccctttagattccttgacctggattgaatactggcctagagacacaacatgttcatcgtgtcaagcatttttagctaatttagatgaatttgccgaagatatctttttaaatggatgctaaaattcctgaagttcagctgcatacagtttgcacttatggactcctgttgttgaagttcgtttttttgttttcttctttttttaaacattcatagctggtcttatttgtaaagctcactttacttagaattagtggcacttgcttttattagagaatgatttcaaatgctgtaactttctgaaataacatggccttggagggcatgaagacagatactcctccaaggttattggacaccggaaacaataaattggaacacctcctcaaacctaccactcaggaatgtttgctggggccgaaagaacagtccattgaaagggagtattacaaaaacatggcctttgcttgaaagaaaataccaaggaacaggaaactgatcattaaagcctgagtt

SEQ ID NO: 383503 - DNA, 1857 bp, Homo sapiens
cttagtctctcctgtacccctttcttttttagtctctcctgtaccatcctttctttaaatgtacccctgacccttttatttaacccaaggccctcacatccctctgctggttggttctcccttcctggtccaaaagcaagtccacttgcacactccagtcctcctggtctccccattgcctccagggtcagaatgaatgttgctgcctctgccctgatattttccatctattgctcagaagcctgttcctacaggaaacttcccaactaccagcaaattaaggcatctgttcttcctccctccaacatcccccaaacatattaccaatacatatttatctttaataatttcttcattaaattataagttatttgagagcaatgaactgttaattatttaaagacttcctggtattgtcaatagccatgaatttccattagaaccactgaaagtatctaaacttccaaatcacaaatcatttttaagtgtgttcaaagatttgctcattaatgattctgttctgacaggttccaaagcagctgaaaacagtttactcttatatttgtctgtttgttttcttgtcttatgtgccagcatcccactacagaggctacggaaactctgattacaaacgcatagtagcatgtgccagctacaagcccagcagggaagaatcatcatctggatcctctcatgcggtgatggacatctccttgcctactggaatcagtgcaaatgaagaagacttaaaagcccttgtggaaggggtggatcaactattcactgattaccaaatcaaagatggacatgttattctgcaactgaattcgattccctccagtgatttcctttgtgtacgattccggatatttgaactctttgaagttgggtttctcagtcctgccactttcacagtgtacgaataccacagaccagataaacagtgtaccatgttttatagcacttccaatatcaaaattcagaaagtctgtgaaggagccgcgtgcaagtgtgtagaagctgattgtgggcaaatgcaggaagaattggatctgacaatctctgcagagacaagaaaacaaacagcatgtaaaccagagattgcatatgcttataaagttagcatcacatccatcactgtagaaaatgtttttgtcaagtacaaggcaacccttctggatatctacaaaactggggaagctgttgctgagaaagactctgagattaccttcattaaaaaggtaacctgtactaacgctgagctggtaaaaggaagacagtacttaattatgggtaaagaagccctccagataaaatacaatttcagtttcaggtacatctaccctttagattccttgacctggattgaatactggcctagagacacaacatgttcatcgtgtcaagcatttttagctaatttagatgaatttgccgaagatatctttttaaatggatgctaaaattcctgaagttcagctgcatacagtttgcacttatggactcctgttgttgaagttcgtttttttgttttcttctttttttaaacattcatagctggtcttatttgtaaagctcactttacttagaattagtggcacttgcttttattagagaatgatttcaaatgctgtaactttctgaaataacatggccttggagggcatgaagacagatactcctccaaggttattggacaccggaaacaataaattggaacacctcctcaaacctaccactcaggaatgtttgctggggccgaaagaacagtccattgaaagggagtattacaaaaacatggcctttgcttgaaagaaaataccaaggaacaggaaactgatcattaaagcctgagtt

SEQ ID NO: 383504 - DNA, 2953 bp, Homo sapiens
ttatatccgtggtttcctgctacctccaaccatgggccttttgggaatactttgttttttaatcttcctggggaaaacctggggacaggagcaaacatatgtcatttcagcaccaaaaatattccgtgttggagcatctgaaaatattgtgattcaagtttatggatacactgaagcatttgatgcaacaatctctattaaaagttatcctgataaaaaatttagttactcctcaggccatgttcatttatcctcagagaataaattccaaaactctgcaatcttaacaatacaaccaaaacaattgcctggaggacaaaacccagtttcttatgtgtatttggaagttgtatcaaagcatttttcaaaatcaaaaagaatgccaataacctatgacaatggatttctcttcattcatacagacaaacctgtttatactccagaccagtcagtaaaagttagagtttattcgttgaatgacgacttgaagccagccaaaagagaaactgtcttaaccttcatagatcctgaaggatcagaagttgacatggtagaagaaattgatcatattggaattatctcttttcctgacttcaagattccgtctaatcctagatatggtatgtggacgatcaaggctaaatataaagaggacttttcaacaactggaaccgcatattttgaagttaaagaatatgtcttgccacatttttctgtctcaatcgagccagaatataatttcattggttacaagaactttaagaattttgaaattactataaaagcaagatatttttataataaagtagtcactgaggctgacgtttatatcacatttggaataagagaagacttaaaagatgatcaaaaagaaatgatgcaaacagcaatgcaaaacacaatgttgataaatggaattgctcaagtcacatttgattctgaaacagcagtcaaagaactgtcatactacagtttagaagatttaaacaacaagtacctttatattgctgtaacagtcatagagtctacaggtggattttctgaagaggcagaaatacctggcatcaaatatgtcctctctccctacaaactgaatttggttgctactcctcttttcctgaagcctgggattccatatcccatcaaggtgcaggttaaagattcgcttgaccagttggtaggaggagtcccagtaatactgaatgcacaaacaattgatgtaaaccaagagacatctgacttggatccaagcaaaagtgtaacacgtgttgatgatggagtagcttcctttgtgcttaatctcccatctggagtgacggtgctggagtttaatgtcaaaactgatgctccagatcttccagaagaaaatcaggccagggaaggttaccgagcaatagcatactcatctctcagccaaagttacctttatattgattggactgataaccataaggctttgctagtgggagaacatctgaatattattgttacccccaaaagcccatatattgacaaaataactcactataattacttgattttatccaagggcaaaattatccactttggcacgagggagaaattttcagatgcatcttatcaaagtataaacattccagtaacacagaacatggttccttcatcccgacttctggtctattatatcgtcacaggagaacagacagcagaattagtgtctgattcagtctggttaaatattgaagaaaaatgtggcaaccagctccaggttcatctgtctcctgatgcagatgcatattctccaggccaaactgtgtctcttaatatggcaactggaatggattcctgggtggcattagcagcagtggacagtgctgtgtatggagtccaaagaggagccaaaaagcccttggaaagagggcaggtggtggcctcaacaatgccaatgtgttccacctagctggacttaccttcctcactaatgcaaatgcagatgactcccaagaaaatgatgaaccttgtaaagaaattctcaggccaagaagaacgctgcaaaagaagatagaagaaatagctgctaaatataaacattcagtagtgaagaaatgttgttacgatggagcctgcgttaataatgatgaaacctgtgagcagcgagctgcacggattagtttagggccaagatgcatcaaagctttcactgaatgttgtgtcgtcgcaagccagctccgtgctaatatctctcataaagacatgcaattgggaaggctacacatgaagaccctgttaccagtaagcaagccagaaattcggagttattttccagaaagctggttgtgggaagttcatcttgttcccagaagaaaacagttgcagtttgccctacctgattctctaaccacctgggaaattcaaggcgttggcatttcaaacactggtatatgtgttgctgatactgtcaaggcaaaggtgttcaaagatgtcttcctggaaatgaatataccatattctgttgtacgaggagaacagatccaattgaaaggaactgtttacaactataggacttctgggatgcagagtctcgccctgtcgcccaggctggagtgcaatgggaagatctcgggtcaactgcaagtccgcctgccaggttcaagcgattctcctgcctcagcctcccaagtagctgggattacaggcacacaccaccatgcccagccaacttgacagcattttaaagtgtcatgcatatcactatactgccatattttatttaatctttaaattttcagtgcatttccatcatatcaaaataagaaacaagtacatctgtgatattttgggcttagttcctgttaattacctttcctcctgagtgtgggttacactttcctatttctttttatctagtaattttggattgaatcttctactttattaataaaaatattataaagactctggattctattacatt

SEQ ID NO: 383505 - DNA, 361 bp, Homo sapiens
gtagcattttggctcaacttaccaaaatgcctgaatgagaggcaaggcacctgcattccaaactacagaacacttccttccttttcgaatgagatcagaatgttctacttgataattcccaattcgagcaattcatatacttcctttgagaagttcaatgctggccacagagcatatgcttgctgcccaacaccaaaggaagcttaccattctcagggcctgataaagtgttctttgagtagaaacggaggtctgttaagcaccgtgttctttttcttgtgcttcttagggatgttgagcattatgtcctacagaaatgctgactactcttacagtgtgtggaagggtggaagtgctagca

SEQ ID NO: 383506 - DNA, 710 bp, Homo sapiens
ttcatattttcagtacagacagggttttttcgtgttggccaggctggtctcaaacttctgacctcaagtgatccgcctgccttggcatcccaaagtgctgggattacaggcatgtgccatcatgcccagctgggattaaactttttaaagttaaaacaaatataaatatgttacagaactgagtacaatgaccacatgaatttttaggatgaaataacaaacttcaaagaagtttgtgttttcaatgtgcctctcccgtctctgtccatcaggaataagtcacccttcctttgctattaggaatattttgtagaaaagttttaaaagcatcggtatactataaatatttggtatggctggccctagctgtaggagatgggtttggattactggtgaggtggttaggtcatgaggagccctttatactatgcttaaagttataagcagtcaggagccattaaagggttttaagctgcagtatgaccaaatcagattctcattttagacagatcattgaaaggctacctaggggctggaggaaggaagtaaaaggccaaggaaagagaaaagtttgatttctgttgccctagtccactgagaaaggatttttttaaaaactagtgctataggatgatatgaaacaatacactatagatataataagtaaatttatatagtatacatacatgctagaaggtgataactgctat

SEQ ID NO: 383507 - DNA, 533 bp, Homo sapiens
gaggaactttctttatcttcaggcattacttctcttgaaaatgaaatatcttctaagcttgaaagcacggtctgagtggaactaattgtaaagtgggggtggtagtggggagagagaggcagcgtgagtagaaagaccatgttcaggtagagggaaaaaattcaatttcaacgtattgtccctttttatatctttgacattaaatgaatgcctttaaacacactgacattttgtaatattacaaaatgaacgtgcagaattgagcaatcaatacaaacagatcatctataaaaaaggcaaggaagcatatcaccaaacctacaagaaggactcacagtttgggggactagaaaatgctagaccattgcaataacttccctcctggtctccccattttcaggtcttttagctctatcttcttaaagcagggttcagcccacataaatcgctttcttacaaaccttccagcactttctgttaactgcctactgaaatgaaaacctctcaggctgggactcagtgaagttcctctg

SEQ ID NO: 383508 - DNA, 448 bp, Homo sapiens
gacctggccctgccctcaagctcccaagctaaagagagcctggccctccctcccactaggtttctccagagcctgctgcctcctggtttgggcttctactctattcttcccccacagactccctgcaatttactgcatcacctctagactagcaattacagatggagctcagaacctacttcctgagccttcctaatctcagcagccctgacagccacttccctcttaacactaatgcagctgcttattctgctgacattaaggtcagggcctggtccaaggaagaggacaggtacagcccaagctttgcacttgaacatccatgcttctgaccacctgccctgtgacgctggctctgtgccccagtccagaaaagacttctgcctactcctcctctgccctacccagttaactccctttccttccctcccttctgcttctcactcct

SEQ ID NO: 383509 - DNA, 515 bp, Homo sapiens
aaacaaccagatctcctgagaactcactcactatcatgagaacagccagaggggaagtccacccccatgattcagtcacctcccaccaggctccctcccccgacactccctgattaaaagttatgtatgggcttatacaatttcaaatgtaaaaacagcctatttacatatgttgaaacaataagattttgtggtatcactgtcccttaataattacaattcaaggtaagatttggatggggacacagagccaaaccatattatatacttttgtgatagcatagaagcatgcctttttaaatacacaaaagtctaaatttctgaaacatcaagttatccttggctgagtaaaataatttttcacttataagaggattcaccatagccttctctaaatagttatttcttcatttaaatattgttcaatttaccaaaaaagttaccaaaaccttcccaaaatagttattacaggaagtgaggtacatatatatcttttgcaccttgtatagaaatag

SEQ ID NO: 383510 - DNA, 414 bp, Homo sapiens
tcttaattctctggcaaaggaaatgcaggtaatagcacccctgttttactggccaaaagatgaagcaacaaaattgaactttctcaaaattgtaccatttgaaatgccatattactcattcctcatctgctgctattttactttttaaaatttgtaacggcgttgttgaaatataattcacataccatacaacttacctgtttaaagtgttcatccagtgctatttttgttacagttattattattctccactccccttttatcttccctttattcaagaacttttattatttctacagtaagaagaaagggcatgttagttgaaatttaattatatttaccattcaaaataccactagaaaaaccccaacagaaaagagatgcagatgcagaatgagttcaggggcctgttgt

SEQ ID NO: 383511 - DNA, 1180 bp, Homo sapiens
gcgagcggccgccaccacacccagctactcagcctcccgaatggctgggattacaggcatgtgccaccacgcctggcaaattttgtatatttggagagacggggtttctccatgttggtcaggctggtcttgaactcctgacctagtgatccgcccgcctccacctcccaaagtgctgggattacagtcgtgaaccaccacaccccgccagaggtgggacctttaagaggtgattaggtcttgagggcttcaccctcatgaagggattaatgccattatttcgggaattgattccttataaaaggatgagtttggcccctttccgtccagccacataatgcctgctggcatgttatgtggcagcaggaaggtcctcatgagatgtggcccctccctcttggacctccaaatctccagaaccaataaatcccagtttattatcaattacccagtctgtggcattatagcagcacaaaacgaactaagacactgtagggtccagccctatggggctaagcgggtgttgtccccatgtgcagagacgagagattgtagtaaataaagacacaagacaaagagataaagagaaaacagctgggccccgggggaccactaccatcaagacgcagagactggtagtggccccgaatggctgggcgcgctgatatttattgcatacaagacaagggggggcagggtaaggagggtgaatcttctaagtgattgacaaggtgaagcaagtcacatgatcataggacagggggcccttccctcttaggtagccgaagcagagagagaaggcagcaaacgtcagcgttttcttgtatgcacttacaagaaagatcaaagactttaagactttcactatttcttctactgctatctactacaaacttcaaagaggaactaggagtacaggaggagcatgaaagtggacaaggagcgtgaacattgaagcaccacagggaggggtttaggcctccggatgattgcggccaggcctggataatatccagccttccacaagaagctggtggagcagagtgttccctgactcctccaaggaaaggagactccctttcgcagtctattaagcaacgggtgacttcccagacactggcgttagggcttgaccaaggagccctcaagcagcccttatgcgggcgtgacagagggctca

SEQ ID NO: 383512 - DNA, 800 bp, Homo sapiens
  misc_feature (575)..(575): n is a, c, g, or t
atcaccttcctggtcacctgcaaggcctggggtctgcaccctcaggaggatttgcaggcactccttcataacagcaacccaaggtccgcagcagcggctggtcatccccagtgaaagagcagaactctccatatgacaacctggacaaggccttggtgacctaaccaattcatccaattgtcttctgtaaaaggagaagagtctcttaactgaatctatgtgctgtggtttgaaagtgtcccccagagttcatggattgcaaacctgatccccagtgtggcagtattggaggtgggacctttttatttttttctgagatggaatctcgctctgtcatcccaggctggagtgcaatggtgcgatcttggcttgtcgcaacctctgcctcccaggttcaaacaattctcccgcctcagcctcccgaatggctgggattacaggcatgtgccaccacgcctgtagtcccggctactcgggaggctgaggcaggagaattgcttgagctcaggaggtggaggttgcagtgagccgaggttgagccattgcactccagcctgggcaaaaaagtgagaccnttgtctcaaaataaaataaaattaaattaaataaaaaataaatcacactgggccataaaaatgaagctggtgtcagcaagtgtggtccaattatttacataggtgcagaaaacagtgcaatatccatataggcacttacgttgctttgtggaagttttcataagaatatcagatggggtggtggcggggtcaacgcctgtaatccagactttgggaggtgaaggg

SEQ ID NO: 383513 - DNA, 300 bp, Homo sapiens
attttatggcccatcatatggtctatcttggagcaagttccatgcactgttaaatagaatgtatattctgcggttgttggatgaaatgttctcatctgttaagggcatttgttccaaggtgtagtttaaatccattgtttctttgttgacttcctgtcgtgatgacctgtctggtgctgtcagtggagtattgaagttccccactatttttgtattactgtctatctcatttcttaggtctattagtaattgttttataaatctgggagctccagtgttaggtgcatatatgtgtagggt

SEQ ID NO: 383514 - DNA, 2746 bp, Homo sapiens
gggagcttccggattgagccggaagtccccccagagcggatgccgcggcgggcctgtgggagcggggtcatcttctctctgctgctgtagctgccatgggcaaaagagaccgagcggaccgcgacaagaagaaatccaggaagcggcactatgaggatgaagaggatgatgaagaggacgccccggggaacgaccctcaggaagcggttccctcggcggcggggaagcaggtggatgagtcaggcaccaaagtggatgaatatggagccaaggactacaggctgcaaatgccgctgaaggacgaccacacctccaggcccctctgggtggctcccgatggccatatcttcttggaagccttctctccagtttacaaatatgcccaagacttcttggtggctattgcagagccagtgtgccgaccaacccatgtgcatgagtacaaactaactgcctactccttgtatgcagctgtcagcgttgggctgcaaaccagtgacatcaccgagtacctcaggaagctcagcaagactggagtccctgatggaattatgcagtttattaagttgtgtactgtcagctatggaaaagtcaagctggtcttgaagcacaacagatacttcgttgaaagttgccaccctgatgtaatccagcatcttctccaggaccccgtgatccgagaatgccgcttaagaaactctgaaggggaggccactgagctcatcacagagactttcacaagcaaatctgccatttctaagactgctgaaagcagtggtgggccctccacttcccgagtgacagatccacagggtaaatctgacatccccatggacctgtttgacttctatgagcaaatggacaaggatgaagaagaagaagaagagacacagacagtgtcttttgaagtcaagcaggaaatgattgaggaactccagaaacgttgcatccacctggagtaccctctgttggcagaatatgacttccggaatgattctgtcaaccctgatatcaacattgacctaaagcccacagctgtcctcagaccctatcaggagaagagcttgcgaaagatgtttggaaacgggcgtgcacgttcgggggtcattgttcttccctgcggtgctggaaagtccctggttggtgtgactgctgcatgcactgtcagaaaacgctgtctggtgctgggcaactcagctgtttctgtggagcagtggaaagcccagttcaagatgtggtccaccattgacgacagccagatctgccggttcacctccgatgccaaggacaagcccatcggctgctccgttgccattagcacctactccatgctgggccacaccaccaaaaggtcctgggaggccgagcgagtcatggagtggctcaagacccaggagtggggcctcatgatcctggatgaagtgcacaccataccagccaagatgttccgaagggtgctcaccatcgtgcaggcccactgtaagctgggtttgactgcgaccctcgtccgcgaagatgacaaaattgtggatttaaattttctgattgggcctaagctctacgaagccaactggatggagctgcagaataatggctacatcgccaaagtccagtgtgctgaggtctggtgccctatgtctcctgaattttaccgggaatatgtggcaatcaaaaccaagaaacgaatcttgctgtacaccatgaaccccaacaaatttagagcttgccagtttctgatcaagtttcatgaaaggaggaatgacaagattattgtctttgctgacaatgtgtttgccctaaaggaatatgccattcgactgaacaaaccctatatctacggacctacgtctcagggggaaaggatgcaaattctccagaatttcaagcacaaccccaaaattaacaccatcttcatatccaaggtaggtgacacttcgtttgatctgccggaagcaaatgtcctcattcagatctcatcccatggtggctccaggcgtcaggaagcccaaaggctagggcgggtgcttcgagctaaaaaagggatggttgcagaagagtacaatgcctttttctactcactggtatcccaggacacacaggaaatggcttactcaaccaagcggcagagattcttggtagatcaaggttatagcttcaaggtgatcacgaaactcgctggcatggaggaggaagacttggcgttttcgacaaaagaagagcaacagcagctcttacagaaagtcctggcagccactgacctggatgccgaggaggaggtggtggctggggaatttggctccagatccagccaggcatctcggcgctttggcaccatgagttctatgtctggggccgacgacactgtgtacatggagtaccactcatcgcggagcaaggcgcccagcaaacatgtacacccgctcttcaagcgctttaggaaatgatgcttaggcagggtacttcgttcaagaccggcgcttggcacccttgttggaaagggattttcagcataacattttccttccacctctttgaccttccctccagcgttggccaaattgtgctgaggaagatgcatcaagggcttggctgtgccttcataggtcatctagggttttataaaggaggaggagacaatattttttcaaactttttggggagtggggtcatttctgtatataaaaaatgttaatatttaaggtgtatttatgttaccgttctgaataaacagaatggaccattgaac

SEQ ID NO: 383515 - DNA, 3150 bp, Homo sapiens
gggagcttccggattgagccggaagtccccccagagcggatgccgcggcgggcctgtgggagcggggtcatcttctctctgctgctgtagctgccatgggcaaaagagaccgagcggaccgcgacaagaagaaatccaggaagcggcactatgaggatgaagaggatgatgaagaggacgccccggggaacgaccctcaggaagcggttccctcggcggcggggaagcaggtggatgagtcaggcaccaaagtggatgaatatggagccaaggactacaggctgcaaatgccgctgaaggacgaccacacctccaggcccctctgggtggctcccgatggccatatcttcttggaagccttctctccagtttacaaatatgcccaagacttcttggtggctattgcagagccagtgtgccgaccaacccatgtgcatgagtacaaactaactgcctactccttgtatgcagctgtcagcgttgggctgcaaaccagtgacatcaccgagtacctcaggaagctcagcaagactggagtccctgatggaattatgcagtttattaagttgtgtactgtcagctatggaaaagtcaagctggtcttgaagcacaacaggtaagagattccatgacaggcctgtcccaagggcactgtcactttctgcgcaccagcaggaataaagggatatgggaaggacctgatgtttatgctgtcttttctgtgaagcacagataagagaagagaaaccaagagatgtggcccagactggaaactcatccactggccactgtatttcctctagcaggtggagctgggctcaggccccctgcctaccttgacctcaaagtcacaaccctcatatgttaaatcatggccggcagctcatggtacagatttggcgaagggttgtggggagagtcatgaggcttgtatttccagaccatctaattgaatgagcagtggaatctccaggaggtacctgctggtcagtagaccccttcttcctcccctgcttgcagatacttcgttgaaagttgccaccctgatgtaatccagcatcttctccaggaccccgtgatccgagaatgccgcttaagaaactctgaaggggaggccactgagctcatcacagagactttcacaagcaaatctgccatttctaagactgctgaaagcagtggtgggccctccacttcccgagtgacagatccacagggtaaatctgacatccccatggacctgtttgacttctatgagcaaatggacaaggatgaagaagaagaagaagagacacagacagtgtcttttgaagtcaagcaggaaatgattgaggaactccagaaacgttgcatccacctggagtaccctctgttggcagaatatgacttccggaatgattctgtcaaccctgatatcaacattgacctaaagcccacagctgtcctcagaccctatcaggagaagagcttgcgaaagatgtttggaaacgggcgtgcacgttcgggggtcattgttcttccctgcggtgctggaaagtccctggttggtgtgactgctgcatgcactgtcagaaaacgctgtctggtgctgggcaactcagctgtttctgtggagcagtggaaagcccagttcaagatgtggtccaccattgacgacagccagatctgccggttcacctccgatgccaaggacaagcccatcggctgctccgttgccattagcacctactccatgctgggccacaccaccaaaaggtcctgggaggccgagcgagtcatggagtggctcaagacccaggagtggggcctcatgatcctggatgaagtgcacaccataccagccaagatgttccgaagggtgctcaccatcgtgcaggcccactgtaagctgggtttgactgcgaccctcgtccgcgaagatgacaaaattgtggatttaaattttctgattgggcctaagctctacgaagccaactggatggagctgcagaataatggctacatcgccaaagtccagtgtgctgaggtctggtgccctatgtctcctgaattttaccgggaatatgtggcaatcaaaaccaagaaacgaatcttgctgtacaccatgaaccccaacaaatttagagcttgccagtttctgatcaagtttcatgaaaggaggaatgacaagattattgtctttgctgacaatgtgtttgccctaaaggaatatgccattcgactgaacaaaccctatatctacggacctacgtctcagggggaaaggatgcaaattctccagaatttcaagcacaaccccaaaattaacaccatcttcatatccaaggtaggtgacacttcgtttgatctgccggaagcaaatgtcctcattcagatctcatcccatggtggctccaggcgtcaggaagcccaaaggctagggcgggtgcttcgagctaaaaaagggatggttgcagaagagtacaatgcctttttctactcactggtatcccaggacacacaggaaatggcttactcaaccaagcggcagagattcttggtagatcaaggttatagcttcaaggtgatcacgaaactcgctggcatggaggaggaagacttggcgttttcgacaaaagaagagcaacagcagctcttacagaaagtcctggcagccactgacctggatgccgaggaggaggtggtggctggggaatttggctccagatccagccaggcatctcggcgctttggcaccatgagttctatgtctggggccgacgacactgtgtacatggagtaccactcatcgcggagcaaggcgcccagcaaacatgtacacccgctcttcaagcgctttaggaaatgatgcttaggcagggtacttcgttcaagaccggcgcttggcacccttgttggaaagggattttcagcataacattttccttccacctctttgaccttccctccagcgttggccaaattgtgctgaggaagatgcatcaagggcttggctgtgccttcataggtcatctagggttttataaaggaggaggagacaatattttttcaaactttttggggagtggggtcatttctgtatataaaaaatgttaatatttaaggtgtatttatgttaccgttctgaataaacagaatggaccattgaac

SEQ ID NO: 383516 - DNA, 3039 bp, Homo sapiens
ggccctgccccccgctctgcctcggagctgctccgggcctctgcgccggccgaccctgctggccctcccgcgcgcaccccgttgggacaggcctttgggcgggagagatgctggacctgggcgcagcccagcgaactcggcctaggggagacggacaagaagaaatccaggaagcggcactatgaggatgaagaggatgatgaagaggacgccccggggaacgaccctcaggaagcggttccctcggcggcggggaagcaggtggatgagtcaggcaccaaagtggatgaatatggagccaaggactacaggctgcaaatgccgctgaaggacgaccacacctccaggcccctctgggtgctgtcagcgttgggctgcaaaccagtgacatcaccgagtacctcaggaagctcagcaagactggagtccctgatggaattatgcagtttattaagttgtgtactgtcagctatggaaaagtcaagctggtcttgaagcacaacaggtaagagattccatgacaggcctgtcccaagggcactgtcactttctgcgcaccagcaggaataaagggatatgggaaggacctgatgtttatgctgtcttttctgtgaagcacagataagagaagagaaaccaagagatgtggcccagactggaaactcatccactggccactgtatttcctctagcaggtggagctgggctcaggccccctgcctaccttgacctcaaagtcacaaccctcatatgttaaatcatggccggcagctcatggtacagatttggcgaagggttgtggggagagtcatgaggcttgtatttccagaccatctaattgaatgagcagtggaatctccaggaggtacctgctggtcagtagaccccttcttcctcccctgcttgcagatacttcgttgaaagttgccaccctgatgtaatccagcatcttctccaggaccccgtgatccgagaatgccgcttaagaaactctgaaggggaggccactgagctcatcacagagactttcacaagcaaatctgccatttctaagactgctgaaagcagtggtgggccctccacttcccgagtgacagatccacagggtaaatctgacatccccatggacctgtttgacttctatgagcaaatggacaaggatgaagaagaagaagaagagacacagacagtgtcttttgaagtcaagcaggaaatgattgaggaactccagaaacgttgcatccacctggagtaccctctgttggcagaatatgacttccggaatgattctgtcaaccctgatatcaacattgacctaaagcccacagctgtcctcagaccctatcaggagaagagcttgcgaaagatgtttggaaacgggcgtgcacgttcgggggtcattgttcttccctgcggtgctggaaagtccctggttggtgtgactgctgcatgcactgtcagaaaacgctgtctggtgctgggcaactcagctgtttctgtggagcagtggaaagcccagttcaagatgtggtccaccattgacgacagccagatctgccggttcacctccgatgccaaggacaagcccatcggctgctccgttgccattagcacctactccatgctgggccacaccaccaaaaggtcctgggaggccgagcgagtcatggagtggctcaagacccaggagtggggcctcatgatcctggatgaagtgcacaccataccagccaagatgttccgaagggtgctcaccatcgtgcaggcccactgtaagctgggtttgactgcgaccctcgtccgcgaagatgacaaaattgtggatttaaattttctgattgggcctaagctctacgaagccaactggatggagctgcagaataatggctacatcgccaaagtccagtgtgctgaggtctggtgccctatgtctcctgaattttaccgggaatatgtggcaatcaaaaccaagaaacgaatcttgctgtacaccatgaaccccaacaaatttagagcttgccagtttctgatcaagtttcatgaaaggaggaatgacaagattattgtctttgctgacaatgtgtttgccctaaaggaatatgccattcgactgaacaaaccctatatctacggacctacgtctcagggggaaaggatgcaaattctccagaatttcaagcacaaccccaaaattaacaccatcttcatatccaaggtaggtgacacttcgtttgatctgccggaagcaaatgtcctcattcagatctcatcccatggtggctccaggcgtcaggaagcccaaaggctagggcgggtgcttcgagctaaaaaagggatggttgcagaagagtacaatgcctttttctactcactggtatcccaggacacacaggaaatggcttactcaaccaagcggcagagattcttggtagatcaaggttatagcttcaaggtgatcacgaaactcgctggcatggaggaggaagacttggcgttttcgacaaaagaagagcaacagcagctcttacagaaagtcctggcagccactgacctggatgccgaggaggaggtggtggctggggaatttggctccagatccagccaggcatctcggcgctttggcaccatgagttctatgtctggggccgacgacactgtgtacatggagtaccactcatcgcggagcaaggcgcccagcaaacatgtacacccgctcttcaagcgctttaggaaatgatgcttaggcagggtacttcgttcaagaccggcgcttggcacccttgttggaaagggattttcagcataacattttccttccacctctttgaccttccctccagcgttggccaaattgtgctgaggaagatgcatcaagggcttggctgtgccttcataggtcatctagggttttataaaggaggaggagacaatattttttcaaactttttggggagtggggtcatttctgtatataaaaaatgttaatatttaaggtgtatttatgttaccgttctgaataaacagaatggaccattgaac

SEQ ID NO: 383517 - DNA, 2434 bp, Homo sapiens
acggggccgtcgttacacacgcgggaagcatgctctgaccatctaattgaatgagcagtggaatctccaggaggtacctgctggtcagtagaccccttcttcctcccctgcttgcagatacttcgttgaaagttgccaccctgatgtaatccagcatcttctccaggaccccgtgatccgagaatgccgcttaagaaactctgaaggggaggccactgagctcatcacagagactttcacaagcaaatctgccgtatgtggactcctgggccacccttgggtgggggcaggcatttaggatttcagttctctcaggtgtctttaacccagcacttacaacctagcagccctgctggttctaccctttacaacttcacccattgcttgataacagcagaattaaatgttgtgtgcacgttcagcacctacctctctcacagatttctaagactgctgaaagcagtggtgggccctccacttcccgagtgacagatccacagggtaaatctgacatccccatggacctgtttgacttctatgagcaaatggacaaggatgaagaagaagaagaagagacacagacagtgtcttttgaagtcaagcaggaaatgattgaggaactccagaaacgttgcatccacctggagtaccctctgttggcagaatatgacttccggaatgattctgtcaaccctgatatcaacattgacctaaagcccacagctgtcctcagaccctatcaggagaagagcttgcgaaagatgtttggaaacgggcgtgcacgttcgggggtcattgttcttccctgcggtgctggaaagtccctggttggtgtgactgctgcatgcactgtcagaaaacgctgtctggtgctgggcaactcagctgtttctgtggagcagtggaaagcccagttcaagatgtggtccaccattgacgacagccagatctgccggttcacctccgatgccaaggacaagcccatcggctgctccgttgccattagcacctactccatgctgggccacaccaccaaaaggtcctgggaggccgagcgagtcatggagtggctcaagacccaggagtggggcctcatgatcctggatgaagtgcacaccataccagccaagatgttccgaagggtgctcaccatcgtgcaggcccactgtaagctgggtttgactgcgaccctcgtccgcgaagatgacaaaattgtggatttaaattttctgattgggcctaagctctacgaagccaactggatggagctgcagaataatggctacatcgccaaagtccagtgtgctgaggtctggtgccctatgtctcctgaattttaccgggaatatgtggcaatcaaaaccaagaaacgaatcttgctgtacaccatgaaccccaacaaatttagagcttgccagtttctgatcaagtttcatgaaaggaggaatgacaagattattgtctttgctgacaatgtgtttgccctaaaggaatatgccattcgactgaacaaaccctatatctacggacctacgtctcagggggaaaggatgcaaattctccagaatttcaagcacaaccccaaaattaacaccatcttcatatccaaggtaggtgacacttcgtttgatctgccggaagcaaatgtcctcattcagatctcatcccatggtggctccaggcgtcaggaagcccaaaggctagggcgggtgcttcgagctaaaaaagggatggttgcagaagagtacaatgcctttttctactcactggtatcccaggacacacaggaaatggcttactcaaccaagcggcagagattcttggtagatcaaggttatagcttcaaggtgatcacgaaactcgctggcatggaggaggaagacttggcgttttcgacaaaagaagagcaacagcagctcttacagaaagtcctggcagccactgacctggatgccgaggaggaggtggtggctggggaatttggctccagatccagccaggcatctcggcgctttggcaccatgagttctatgtctggggccgacgacactgtgtacatggagtaccactcatcgcggagcaaggcgcccagcaaacatgtacacccgctcttcaagcgctttaggaaatgatgcttaggcagggtacttcgttcaagaccggcgcttggcacccttgttggaaagggattttcagcataacattttccttccacctctttgaccttccctccagcgttggccaaattgtgctgaggaagatgcatcaagggcttggctgtgccttcataggtcatctagggttttataaaggaggaggagacaatattttttcaaactttttggggagtggggtcatttctgtatataaaaaatgttaatatttaaggtgtatttatgttaccgttctgaataaacagaatggaccattgaac

SEQ ID NO: 383518 - DNA, 3309 bp, Homo sapiens
gggagcttccggattgagccggaagtccccccagagcggatgccgcggcgggcctgtgggagcggggtcatcttctctctgctgctgtagctgccatgggcaaaagagaccgagcggaccgcgacaagaagaaatccaggaagcggcactatgaggatgaagaggatgatgaagaggacgccccggggaacgaccctcaggaagcggttccctcggcggcggggaagcaggtggatgagtcaggcaccaaagtggatgaatatggagccaaggactacaggctgcaaatgccgctgaaggacgaccacacctccaggcccctctgggtggctcccgatggccatatcttcttggaagccttctctccagtttacaaatatgcccaagacttcttggtggctattgcagagccagtgtgccgaccaacccatgtgcatgagtacaaactaactgcctactccttgtatgcagctgtcagcgttgggctgcaaaccagtgacatcaccgagtacctcaggaagctcagcaagactggagtccctgatggaattatgcagtttattaagttgtgtactgtcagctatggaaaagtcaagctggtcttgaagcacaacagatacttcgttgaaagttgccaccctgatgtaatccagcatcttctccaggaccccgtgatccgagaatgccgcttaagaaactctgaaggggaggccactgagctcatcacagagactttcacaagcaaatctgccatttctaagactgctgaaagcagtggtgggccctccacttcccgagtgacagatccacagggtaaatctgacatccccatggacctgtttgacttctatgagcaaatggacaaggatgaagaagaagaagaagagacacagacagtgtcttttgaagtcaagcaggaaatgattgaggaactccagaaacgttgcatccacctggagtaccctctgttggcagaatatgacttccggaatgattctgtcaaccctgatatcaacattgacctaaagcccacagctgtcctcagaccctatcaggagaagagcttgcgaaagatgtttggaaacgggcgtgcacgttcgggggtcattgttcttccctgcggtgctggaaagtccctggttggtgtgactgctgcatgcactgtcagaaaacgctgtctggtgctgggcaactcagctgtttctgtggagcagtggaaagcccagttcaagatgtggtccaccattgacgacagccagatctgccggttcacctccgatgccaaggacaagcccatcggctgctccgttgccattagcacctactccatgctgggccacaccaccaaaaggtcctgggaggccgagcgagtcatggagtggctcaagacccaggagtggggcctcatgatcctggatgaagtgcacaccataccagccaagatgttccgaagggtgctcaccatcgtgcaggcccactgtaagctgggtttgactgcgaccctcgtccgcgaagatgacaaaattgtggatttaaattttctgattgggcctaagctctacgaagccaactggatggagctgcagaataatggctacatcgccaaagtccagtgtgctgaggtctggtgccctatgtctcctgaattttaccgggaatatgtggcaatcaaaaccaagaaacgaatcttgctgtacaccatgaaccccaacaaatttagagcttgccagtttctgatcaagtttcatgaaaggaggaatgacaagattattgtctttgctgacaatgtgtttgccctaaaggaatatgccattcgactgaacaaaccctatatctacggacctacgtctcagggggaaaggatgcaaattctccagaatttcaagcacaaccccaaaattaacaccatcttcatatccaaggtaggtgacacttcgtttgatctgccggaagcaaatgtcctcattcagatctcatcccatggtggctccaggcgtcaggaagcccaaaggctagggcgggtgcttcgagctaaaaaagggatggttgcagaagagtacaatgcctttttctactcactggtatcccaggacacacaggaaatggcttactcaaccaagcggcagagattcttggtagatcaaggttatagcttcaaggtgatcacgaaactcgctggcatggaggaggaagacttggcgttttcgacaaaagaagagcaacagcagctcttacagaaagtcctggcagccactgacctggatgccgaggaggaggtggtggctggggaatttggctccagatccagccaggcatctcggcgctttggcaccatgagttctatgtctggggccgacgacactgtgtacatggagtaccactcatcgcggagcaaggcgcccagcaaacatgtacacccgctcttcaagcgctttaggaaatgatgcttaggcagggtacttcgttcaagaccggcgcttggcacccttgttggaaagggattttcagcataacattttccttccacctctttgaccttccctccagcgttggccaaattgtgctgaggaagatgcatcaagggcttggctgtgccttcataggtcatctagggttttataaaggaggaggagacaatattttttcaaactttttggggagtggggtcatttctgtatataaaaaatgttaatatttaaggtgtatttatgttaccgttctgaataaacagaatggaccattgaacaaaaaaaaaaaaaaaaaaaaaaaaaaaaaaaaaaaaaaaaaaaaaaaaaaaaaaaacaagagaaaaaaaaaaaaaaaaagaagaacaaaaaaaagaagaacaaagaaagaggggggcggccccgggacgccgcgacccgcgaggagatgcagccgacagcggacgcccgcgacagagggggaggtagacgacggacggggcacaaaacaaaagagagaccgaaaaacaacgtcacgaagcgagaagaggaggagagcagagaaagagaacaagaagcaggggaagagagaaacgaagagaacaaaaagaggagatgaagggaggaggaagaaaaggacaagacaagaggagagcgcggaaggaaaggagagagggaaggaagaaaaagaagagggagaaacagtggtaggagagaaggagaaaggcgaggagaagaggagaaagagcgaaaaggcagaggagaggggagaaagaagaaacgaaacgggaaggcgagggcgagagacaaaggagaaggaggacggcgagagagaagaaagagggggagcgggcacgcaaggaga

SEQ ID NO: 383519 - DNA, 2283 bp, Homo sapiens
gggagcttccggattgagccggaagtccccccagagcggatgccgcggcgggcctgtgggagcggggtcatcttctctctgctgctgtagctgccatgggcaaaagagaccgagcggaccgcgacaagaagaaatccaggaagcggcactatgaggatgaagaggatgatgaagaggacgccccggggaacgaccctcaggaagcggttccctcggcggcggggaagcaggtggatgagtcaggcaccaaagtggatgaatatggagccaaggactacaggctgcaaatgccgctgaaggacgaccacacctccaggcccctctgggtggctcccgatggccatatcttcttggaagccttctctccagtttacaaatatgcccaagacttcttggtggctattgcagagccagtgtgccgaccaacccatgtgcatgagtacaaactaactgcctactccttgtatgcagctgtcagcgttgggctgcaaaccagtgacatcaccgagtacctcaggaagctcagcaagactggagtccctgatggaattatgcagtttattaagttgtgtactgtcagctatggaaaagtcaagctggtcttgaagcacaacagatacttcgttgaaagttgccaccctgatgtaatccagcatcttctccaggaccccgtgatccgagaatgccgcttaagaaactctgaaggggaggccactgagctcatcacagagactttcacaagcaaatctgccatttctaagactgctgaaagcagtggtgggccctccacttcccgagtgacagatccacagggtaaatctgacatccccatggacctgtttgacttctatgagcaaatggacaaggatgaagaagaagaagaagagacacagacagtgtcttttgaagtcaagcaggaaatgattgaggaactccagaaacgttgcatccacctggagtaccctctgttggcagaatatgacttccggaatgattctgtcaaccctgatatcaacattgacctaaagcccacagctgtcctcagaccctatcaggagaagagcttgcgaaagatgtttggaaacgggcgtgcacgttcgggggtcattgttcttccctgcggtgctggaaagtccctggttggtgtgactgctgcatgcactgtcagaaaacgctgtctggtgctgggcaactcagctgtttctgtggagcagtggaaagcccagttcaagatgtggtccaccattgacgacagccagatctgccggttcacctccgatgccaaggacaagcccatcggctgctccgttgccattagcacctactccatgctgggccacaccaccaaaaggtcctgggaggccgagcgagtcatggagtggctcaagacccaggagtggggcctcatgatcctggatgaagtgcacaccataccagccaagatgttccgaagggtgctcaccatcgtgcaggcccactgtaagctgggtttgactgcgaccctcgtccgcgaagatgacaaaattgtggatttaaattttctgattgggcctaagctctacgaagccaactggatggagctgcagaataatggctacatcgccaaagtccagtgtgctgaggtctggtgccctatgtctcctgaattttaccgggaatatgtggcaatcaaaaccaagaaacgaatcttgctgtacaccatgaaccccaacaaatttagagcttgccagtttctgatcaagtttcatgaaaggaggaatgacaagattattgtctttgctgacaatgtgtttgccctaaaggaatatgccattcgactgaacaaaccctatatctacggacctacgtctcagggggaaaggatgcaaattctccagaatttcaagcacaaccccaaaattaacaccatcttcatatccaaggtaggtgacacttcgtttgatctgccggaagcaaatgtcctcattcagatctcatcccatggtggctccaggcgtcaggaagcccaaaggctagggcgggtgcttcgagctaaaaaaggacacacaggaaatggcttactcaaccaagcggcagagattcttggtagatcaaggttatagcttcaaggtgatcacgaaactcgctggcatggaggaggaagacttggcgttttcgacaaaagaagagcaacagcagctcttacagaaagtcctggcagccactgacctggatgccgaggaggaggtggtggctggggaatttggctccagatccagccagcatcttcgggcctttggaccc

SEQ ID NO: 383520 - DNA, 1839 bp, Homo sapiens
gggagcttccggattgagccggaagtccccccagagcggatgccgcggcgggcctgtgggagcggggtcatcttctctctgctgctgtagctgccatgggcaaaagagaccgagcggaccgcgacaagaagaaatccaggaagcggcactatgaggatgaagaggatgatgaagaggacgccccggggaacgaccctcaggaagcggttccctcggcggcggggaagcaggtggatgagtcaggcaccaaagtggatgaatatggagccaaggactacaggctgcaaatgccgctgaaggacgaccacacctccaggcccctctgggtggctcccgatggccatatcttcttggaagccttctctccagtttacaaatatgcccaagacttcttggtggctattgcagagccagtgtgccgaccaacccatgtgcatgagtacaaactaactgcctactccttgtatgcagctgtcagcgttgggctgcaaaccagtgacatcaccgagtacctcaggaagctcagcaagactggagtccctgatggaattatgcagtttattaagttgtgtactgtcagctatggaaaagtcaagctggtcttgaagcacaacagatacttcgttgaaagttgccaccctgatgtaatccagcatcttctccaggaccccgtgatccgagaatgccgcttaagaaactctgaaggggaggccactgagctcatcacagagactttcacaagcaaatctgccatttctaagactgctgaaagcagtggtgggccctccacttcccgagtgacagatccacagggtaaatctgacatccccatggacctgtttgacttctatgagcaaatggacaaggatgaagaagaagaagaagagacacagacagtgtcttttgaagtcaagcaggaaatgattgaggaactccagaaacgttgcatccacctggagtaccctctgttggcagaatatgacttccggaatgattctgtcaaccctgatatcaacattgacctaaagcccacagctgtcctcagaccctatcaggagaagagcttgcgaaagatgtttggaaacgggcgtgcacgttcgggggtcattgttcttccctgcggtgctggaaagtccctggttggtgtgactgctgcatgcactgtcagaaaacgctgtctggtgctgggcaactcagctgtttctgtggagcagtggaaagcccagttcaagatgtggtccaccattgacgacagccagatctgccggttcacctccgatgccaaggacaagcccatcggctgctccgttgccattagcacctactccatgctgggccacaccaccaaaaggtcctgggaggccgagcgagtcatggagtggctcaagacccaggagtggggcctcatgatcctggatgaagtgcacaccataccagccaagatgttccgaagggtgctcaccatcgtgcaggcccactgtaagctgggtttgactgcgaccctcgtccgcgaagatgacaaaattgtggatttaaattttctgattgggcctaagctctacgaagccaactggatggagctgcagaataatggctacatcgccaaagtccagtgtgctgaggtctggtgccctatgtctcctgaattttaccgggaatatgtggcaatcaaaaccaagaaacgaatcttgctgtacaccatgaaccccaacaaatttagagcttgccagtttctgatcaagtttcatgaaaggaggaatgacaagattattgtctttgctgacaatgtgtttgccttgtgatatgccttcgactgacccctatattaccggctcgttg

SEQ ID NO: 383521 - DNA, 1226 bp, Homo sapiens
gggagcttccggattgagccggaagtccccccagagcggatgccgcggcgggcctgtgggagcggggtcatcttctctctgctgctgtagctgccatgggcaaaagagaccgagcggaccgcgacaagaagaaatccaggaagcggcactatgaggatgaagaggatgatgaagaggacgccccggggaacgaccctcaggaagcggttccctcggcggcggggaagcaggtggatgagtcaggcaccaaagtggatgaatatggagccaaggactacaggctgcaaatgccgctgaaggacgaccacacctccaggcccctctgggtggctcccgatggccatatcttcttggaagccttctctccagtttacaaatatgcccaagacttcttggtggctattgcagagccagtgtgccgaccaacccatgtgcatgagtacaaactaactgcctactccttgtatgcagctgtcagcgttgggctgcaaaccagtgacatcaccgagtacctcaggaagctcagcaagactggagtccctgatggaattatgcagtttattaagttgtgtactgtcagctatggaaaagtcaagctggtcttgaagcacaacagatacttcgttgaaagttgccaccctgatgtaatccagcatcttctccaggaccccgtgatccgagaatgccgcttaagaaactctgaaggggaggccactgagctcatcacagagactttcacaagcaaatctgccatttctaagactgctgaaagcagtggtgggccctccacttcccgagtgacagatccacagggtaaatctgacatccccatggacctgtttgacttctatgagcaaatggacaaggatgaagaagaagaagaagagacacagacagtgtcttttgaagtcaagcaggaaatgatgcttaggcagggtacttcgttcaagaccggcgcttggcacccttgttggaaagggattttcagcataacattttccttccacctctttgaccttccctccagcgttggccaaattgtgctgaggaagatgcatcaagggcttggctgtgccttcataggtcatctagggttttataaaggaggaggagacaatattttttcaaactttttggggagtggggtcatttctgtatataaaaaatgttaatatttaaggtgtatttatgttaccgttctgaataaacagaatggaccattgaac

SEQ ID NO: 383522 - DNA, 1268 bp, Homo sapiens
gggagcttccggattgagccggaagtccccccagagcggatgccgcggcgggcctgtgggagcggggtcatcttctctctgctgctgtagctgccatgggcaaaagagaccgagcggaccgcgacaagaagaaatccaggaagcggcactatgaggatgaagaggatgatgaagaggacgccccggggaacgaccctcaggaagcggttccctcggcggcggggaagcaggtggatgagtcaggcaccaaagtggatgaatatggagccaaggactacaggctgcaaatgccgctgaaggacgaccacacctccaggcccctctgggtggctcccgatggccatatcttcttggaagccttctctccagtttacaaatatgcccaagacttcttggtggctattgcagagccagtgtgccgaccaacccatgtgcatgagtacaaactaactgcctactccttgtatgcagctgtcagcgttgggctgcaaaccagtgacatcaccgagtacctcaggaagctcagcaagactggagtccctgatggaattatgcagtttattaagttgtgtactgtcagctatggaaaagtcaagctggtcttgaagcacaacaggtaagagattccatgacaggcctgtcccaagggcactgtcactttctgcgcaccagcaggaataaagggatatgggaaggacctgatgtttatgctgtcttttctgtgaagcacagataagagaagagaaaccaagagatgtggcccagactggaaactcatccactggccactgtatttcctctagcaggtggagctgggctcaggccccctgcctaccttgacctcaaagtcacaaccctcatatgttaaatcatggccggcagctcatggtacagatttggcgaagggttgtggggagagtcatgaggcttgtatttccagaccatctaattgaatgagcagtggaatctccaggaggtacctgctggtcagtagaccccttcttcctcccctgcttgcagatacttcgttgaaagttgccaccctgatgtaatccagcatcttctccagcgttggccaaattgtgctgaggaagatgcatcaagggcttggctgtgccttcataggtcatctagggttttataaaggaggaggagacaatattttttcaaactttttggggagtggggtcatttctgtatataaaaaatgttaatatttaaggtgtatttatgttaccgttctgaataaacagaatggaccattgaac

SEQ ID NO: 383523 - DNA, 337 bp, Homo sapiens
agtagtgtcgggcgatcttcagtccggagaaatgatgcttaggcagggtacttcgttcaagaccggcgcttggcacccttgttggaaagggattttcagcataacattttccttccacctctttgaccttccctccagcgttggccaaattgtgctgaggaagatgcatcaagggcttggctgtgccttcataggtcatctagggttttataaaggaggaggagacaatattttttcaaactttttggggagtggggtcatttctgtatataaaaaatgttaatatttaaggtgtatttatgttaccgttctgaataaacagaatggaccattgaac

SEQ ID NO: 383524 - DNA, 466 bp, Homo sapiens
ggagccttttaaaatcactaagattcttcctgttgatcttccatacatgatcatttagatgctgtgtgctgggggcagatttctctgaaattcctgcatccctctggtcttgagatcattagtcaagctccctgttaaaggcggctcctgatgctggtctctggaatgctagggaggagctctccattgttggccaccagggtggctgggcctggggagggaagtgaccaaagcaggtggacccaggagaaggcagaggagggctggggagagagagcagaaaggggcatgtctgctggcttgggctttgcaggtgatcacgaaactcgctggcatggaggaggaagacttggcgttttcgacaaaagaagagcaacagcagctcttacagaaagtcctggcagccactgacctggatgccgaggaggaggtggtggctggggaatttggctccagatccagccag

SEQ ID NO: 383525 - DNA, 583 bp, Homo sapiens
tgttcaaatcccatctccttaagagctatgtgatcttggataggttagttaatctctctgtgtctcagtttcctcttctttcaggtgtggattatagtagttttgaggattagaggagataatgcatgtaaaatgcttagaacaatgcctgagacagtaagcgatctgtaaacattattaaaaatgatgtattaaatttatgtaagtcttataaaatttgctgtgattataagtattataaaaggagtatcttttcttctggagactaacatgggctggttcccccttcccggcaggcatctcggcgctttggcaccatgagttctatgtctggggccgacgacactgtgtacatggagtaccactcatcgcggagcaaggcgcccagcaaacatgtacacccgctcttcaagcgctttaggaaatgatgcttaggcagggtacttcgttcaagaccggcgcttggcacccttgttggaaagggattttcagcataacattttccttccacctctttgaccttccctccagcgttggccaaattgtgctgaggaagatgcatcaagggcttggctgtgccttc

SEQ ID NO: 383526 - DNA, 2933 bp, Homo sapiens
gggagcttccggattgagccggaagtccccccagagcggatgccgcggcgggcctgtgggagcggggtcatcttctctctgctgctgtagctgccatgggcaaaagagaccgagcggaccgcgacaagaagaaatccaggaagcggcactatgaggatgaagaggatgatgaagaggacgccccggggaacgaccctcaggaagcggttccctcggcggcggggaagcaggtggatgagtcaggcaccaaagtggatgaatatggagccaaggactacaggctgcaaatgccgctgaaggacgaccacacctccaggcccctctgggtggctcccgatggccatatcttcttggaagccttctctccagtttacaaatatgcccaagacttcttggtggctattgcagagccagtgtgccgaccaacccatgtgcatgagtacaaactaactgcctactccttgtatgcagctgtcagcgttgggctgcaaaccagtgacatcaccgagtacctcaggaagctcagcaagactggagtccctgatggaattatgcagtttattaagttgtgtactgtcagctatggaaaagtcaagctggtcttgaagcacaacagatacttcgttgaaagttgccaccctgatgtaatccagcatcttctccaggaccccgtgatccgagaatgccgcttaagaaactctgaaggggaggccactgagctcatcacagagactttcacaagcaaatctgccgtatgtggactcctgggccacccttgggtgggggcaggcatttaggatttcagttctctcaggtgtctttaacccagcacttacaacctagcagccctgctggttctaccctttacaacttcacccattgcttgataacagcagaattaaatgttgtgtgcacgttcagcacctacctctctcacagatttctaagactgctgaaagcagtggtgggccctccacttcccgagtgacagatccacagggtaaatctgacatccccatggacctgtttgacttctatgagcaaatggacaaggatgaagaagaagaagaagagacacagacagtgtcttttgaagtcaagcaggaaatgattgaggaactccagaaacgttgcatccacctggagtaccctctgttggcagaatatgacttccggaatgattctgtcaaccctgatatcaacattgacctaaagcccacagctgtcctcagaccctatcaggagaagagcttgcgaaagatgtttggaaacgggcgtgcacgttcgggggtcattgttcttccctgcggtgctggaaagtccctggttggtgtgactgctgcatgcactgtcagaaaacgctgtctggtgctgggcaactcagctgtttctgtggagcagtggaaagcccagttcaagatgtggtccaccattgacgacagccagatctgccggttcacctccgatgccaaggacaagcccatcggctgctccgttgccattagcacctactccatgctgggccacaccaccaaaaggtcctgggaggccgagcgagtcatggagtggctcaagacccaggagtggggcctcatgatcctggatgaagtgcacaccataccagccaagatgttccgaagggtgctcaccatcgtgcaggcccactgtaagctgggtttgactgcgaccctcgtccgcgaagatgacaaaattgtggatttaaattttctgattgggcctaagctctacgaagccaactggatggagctgcagaataatggctacatcgccaaagtccagtgtgctgaggtctggtgccctatgtctcctgaattttaccgggaatatgtggcaatcaaaaccaagaaacgaatcttgctgtacaccatgaaccccaacaaatttagagcttgccagtttctgatcaagtttcatgaaaggaggaatgacaagattattgtctttgctgacaatgtgtttgccctaaaggaatatgccattcgactgaacaaaccctatatctacggacctacgtctcagggggaaaggatgcaaattctccagaatttcaagcacaaccccaaaattaacaccatcttcatatccaaggtaggtgacacttcgtttgatctgccggaagcaaatgtcctcattcagatctcatcccatggtggctccaggcgtcaggaagcccaaaggctagggcgggtgcttcgagctaaaaaagggatggttgcagaagagtacaatgcctttttctactcactggtatcccaggacacacaggaaatggcttactcaaccaagcggcagagattcttggtagatcaaggttatagcttcaaggtgatcacgaaactcgctggcatggaggaggaagacttggcgttttcgacaaaagaagagcaacagcagctcttacagaaagtcctggcagccactgacctggatgccgaggaggaggtggtggctggggaatttggctccagatccagccaggcatctcggcgctttggcaccatgagttctatgtctggggccgacgacactgtgtacatggagtaccactcatcgcggagcaaggcgcccagcaaacatgtacacccgctcttcaagcgctttaggaaatgatgcttaggcagggtacttcgttcaagaccggcgcttggcacccttgttggaaagggattttcagcataacattttccttccacctctttgaccttccctccagcgttggccaaattgtgctgaggaagatgcatcaagggcttggctgtgccttcataggtcatctagggttttataaaggaggaggagacaatattttttcaaactttttggggagtggggtcatttctgtatataaaaaatgttaatatttaaggtgtatttatgttaccgttctgaataaacagaatggaccattgaac

SEQ ID NO: 383527 - DNA, 2604 bp, Homo sapiens
gggagcttccggattgagccggaagtccccccagagcggatgccgcggcgggcctgtgggagcggggtcatcttctctctgctgctgtagctgccatgggcaaaagagaccgagcggaccgcgacaagaagaaatccaggaagcggcactatgaggatgaagaggatgatgaagaggacgccccggggaacgaccctcaggaagcggttccctcggcggcggggaagcaggtggatgagtcaggcaccaaagtggatgaatatggagccaaggactacaggctgcaaatgccgctgaaggacgaccacacctccaggcccctctgggtgctgtcagcgttgggctgcaaaccagtgacatcaccgagtacctcaggaagctcagcaagactggagtccctgatggaattatgcagtttattaagttgtgtactgtcagctatggaaaagtcaagctggtcttgaagcacaacagatacttcgttgaaagttgccaccctgatgtaatccagcatcttctccaggaccccgtgatccgagaatgccgcttaagaaactctgaaggggaggccactgagctcatcacagagactttcacaagcaaatctgccatttctaagactgctgaaagcagtggtgggccctccacttcccgagtgacagatccacagggtaaatctgacatccccatggacctgtttgacttctatgagcaaatggacaaggatgaagaagaagaagaagagacacagacagtgtcttttgaagtcaagcaggaaatgattgaggaactccagaaacgttgcatccacctggagtaccctctgttggcagaatatgacttccggaatgattctgtcaaccctgatatcaacattgacctaaagcccacagctgtcctcagaccctatcaggagaagagcttgcgaaagatgtttggaaacgggcgtgcacgttcgggggtcattgttcttccctgcggtgctggaaagtccctggttggtgtgactgctgcatgcactgtcagaaaacgctgtctggtgctgggcaactcagctgtttctgtggagcagtggaaagcccagttcaagatgtggtccaccattgacgacagccagatctgccggttcacctccgatgccaaggacaagcccatcggctgctccgttgccattagcacctactccatgctgggccacaccaccaaaaggtcctgggaggccgagcgagtcatggagtggctcaagacccaggagtggggcctcatgatcctggatgaagtgcacaccataccagccaagatgttccgaagggtgctcaccatcgtgcaggcccactgtaagctgggtttgactgcgaccctcgtccgcgaagatgacaaaattgtggatttaaattttctgattgggcctaagctctacgaagccaactggatggagctgcagaataatggctacatcgccaaagtccagtgtgctgaggtctggtgccctatgtctcctgaattttaccgggaatatgtggcaatcaaaaccaagaaacgaatcttgctgtacaccatgaaccccaacaaatttagagcttgccagtttctgatcaagtttcatgaaaggaggaatgacaagattattgtctttgctgacaatgtgtttgccctaaaggaatatgccattcgactgaacaaaccctatatctacggacctacgtctcagggggaaaggatgcaaattctccagaatttcaagcacaaccccaaaattaacaccatcttcatatccaaggtaggtgacacttcgtttgatctgccggaagcaaatgtcctcattcagatctcatcccatggtggctccaggcgtcaggaagcccaaaggctagggcgggtgcttcgagctaaaaaagggatggttgcagaagagtacaatgcctttttctactcactggtatcccaggacacacaggaaatggcttactcaaccaagcggcagagattcttggtagatcaaggttatagcttcaaggtgatcacgaaactcgctggcatggaggaggaagacttggcgttttcgacaaaagaagagcaacagcagctcttacagaaagtcctggcagccactgacctggatgccgaggaggaggtggtggctggggaatttggctccagatccagccaggcatctcggcgctttggcaccatgagttctatgtctggggccgacgacactgtgtacatggagtaccactcatcgcggagcaaggcgcccagcaaacatgtacacccgctcttcaagcgctttaggaaatgatgcttaggcagggtacttcgttcaagaccggcgcttggcacccttgttggaaagggattttcagcataacattttccttccacctctttgaccttccctccagcgttggccaaattgtgctgaggaagatgcatcaagggcttggctgtgccttcataggtcatctagggttttataaaggaggaggagacaatattttttcaaactttttggggagtggggtcatttctgtatataaaaaatgttaatatttaaggtgtatttatgttaccgttctgaataaacagaatggaccattgaac

SEQ ID NO: 383528 - DNA, 2776 bp, Homo sapiens
  misc_feature (2749)..(2749): n is a, c, g, or t
  misc_feature (2754)..(2754): n is a, c, g, or t
  misc_feature (2757)..(2758): n is a, c, g, or t
  misc_feature (2763)..(2764): n is a, c, g, or t
gggagcttccggattgagccggaagtccccccagagcggatgccgcggcgggcctgtgggagcggggtcatcttctctctgctgctgtagctgccatgggcaaaagagaccgagcggaccgcgacaagaagaaatccaggaagcggcactatgaggatgaagaggatgatgaagaggacgccccggggaacgaccctcaggaagcggttccctcggcggcggggaagcaggtggatgagtcaggcaccaaagtggatgaatatggagccaaggactacaggctgcaaatgccgctgaaggacgaccacacctccaggcccctctgggtggctcccgatggccatatcttcttggaagccttctctccagtttacaaatatgcccaagacttcttggtggctattgcagagccagtgtgccgaccaacccatgtgcatgagtacaaactaactgcctactccttgtatgcagctgtcagcgttgggctgcaaaccagtgacatcaccgagtacctcaggaagctcagcaagactggagtccctgatggaattatgcagtttattaagttgtgtactgtcagctatggaaaagtcaagctggtcttgaagcacaacagatacttcgttgaaagttgccaccctgatgtaatccagcatcttctccaggaccccgtgatccgagaatgccgcttaagaaactctgaaggggaggccactgagctcatcacagagactttcacaagcaaatctgccatttctaagactgctgaaagcagtggtgggccctccacttcccgagtgacagatccacagggtaaatctgacatccccatggacctgtttgacttctatgagcaaatggacaaggatgaagaagaagaagaagagacacagacagtgtcttttgaagtcaagcaggaaatgattgaggaactccagaaacgttgcatccacctggagtaccctctgttggcagaatatgacttccggaatgattctgtcaaccctgatatcaacattgacctaaagcccacagctgtcctcagaccctatcaggagaagagcttgcgaaagatgtttggaaacgggcgtgcacgttcgggggtcattgttcttccctgcggtgctggaaagtccctggttggtgtgactgctgcatgcactgtcagaaaacgctgtctggtgctgggcaactcagctgtttctgtggagcagtggaaagcccagttcaagatgtggtccaccattgacgacagccagatctgccggttcacctccgatgccaaggacaagcccatcggctgctccgttgccattagcacctactccatgctgggccacaccaccaaaaggtcctgggaggccgagcgagtcatggagtggctcaagacccaggagtggggcctcatgatcctggatgaagtgcacaccataccagccaagatgttccgaagggtgctcaccatcgtgcaggcccactgtaagctgggtttgactgcgaccctcgtccgcgaagatgacaaaattgtggatttaaattttctgattgggcctaagctctacgaagccaactggatggagctgcagaataatggctacatcgccaaagtccagtgtgctgaggtctggtgccctatgtctcctgaattttaccgggaatatgtggcaatcaaaaccaagaaacgaatcttgctgtacaccatgaaccccaacaaatttagagcttgccagtttctgatcaagtttcatgaaaggaggaatgacaagattattgtctttgctgacaatgtgtttgccctaaaggaatatgccattcgactgaacaaaccctatatctacggacctacgtctcagggggaaaggatgcaaattctccagaatttcaagcacaaccccaaaattaacaccatcttcatatccaaggtaggtgacacttcgtttgatctgccggaagcaaatgtcctcattcagatctcatcccatggtggctccaggcgtcaggaagcccaaaggctagggcgggtgcttcgagctaaaaaagggatggttgcagaagagtacaatgcctttttctactcactggtatcccaggacacacaggaaatggcttactcaaccaagcggcagagattcttggtagatcaaggttatagcttcaaggtgatcacgaaactcgctggcatggaggaggaagacttggcgttttcgacaaaagaagagcaacagcagctcttacagaaagtcctggcagccactgacctggatgccgaggaggaggtggtggctggggaatttggctccagatccagccaggcatctcggcgctttggcaccatgagttctatgtctggggccgacgacactgtgtacatggagtaccactcatcgcggagcaaggcgcccagcaaacatgtacacccgctcttcaagcgctttaggaaatgatgcttaggcagggtacttcgttcaagaccggcgcttggcacccttgttggaaagggattttcagcataacattttccttccacctctttgaccttccctccagcgttggccaaattgtgctgaggaagatgcatcaagggcttggctgtgccttcataggtcatctagggttttataaaggaggaggagacaatattttttcaaactttttggggagtggggtcatttctgtatataaaaaatgttaatatttaaggtgtatttatgttaccgttctgaataaacagaatggaccattgaaccancacancanncaaannacaaaacacaag

SEQ ID NO: 383529 - DNA, 2424 bp, Homo sapiens
gggagcttccggattgagccggaagtccccccagagcggatgccgcggcgggcctgtgggagcggggtcatcttctctctgctgctgtagctgccatgggcaaaagagaccgagcggaccgcgacaagaagaaatccaggaagcggcactatgaggatgaagaggatgatgaagaggacgccccggggaacgaccctcaggaagcggttccctcggcggcggggaagcaggtggatgagtcaggcaccaaagtggatgaatatggagccaaggactacaggctgcaaatgccgctgaaggacgaccacacctccaggcccctctgggtggctcccgatggccatatcttcttggaagccttctctccagtttacaaatatgcccaagacttcttggtggctattgcagagccagtgtgccgaccaacccatgtgcatgagtacaaactaactgcctactccttgtatgcagctgtcagcgttgggctgcaaaccagtgacatcaccgagtacctcaggaagctcagcaagactggagtccctgatggaattatgcagtttattaagttgtgtactgtcagctatggaaaagtcaagctggtcttgaagcacaacagatacttcgttgaaagttgccaccctgatgtaatccagcatcttctccaggaccccgtgatccgagaatgccgcttaagaaactctgaaggggaggccactgagctcatcacagagactttcacaagcaaatctgccatttctaagactgctgaaagcagtggtgggccctccacttcccgagtgacagatccacagggtaaatctgacatccccatggacctgtttgacttctatgagcaaatggacaaggatgaagaagaagaagaagagacacagacagtgtcttttgaagtcaagcaggaaatgattgaggaactccagaaacgttgcatccacctggagtaccctctgttggcagaatatgacttccggaatgattctgtcaaccctgatatcaacattgacctaaagcccacagctgtcctcagaccctatcaggagaagagcttgcgaaagatgtttggaaacgggcgtgcacgttcgggggtcattgttcttccctgcggtgctggaaagtccctggttggtgtgactgctgcatgcactgtcagaaaacgctgtctggtgctgggcaactcagctgtttctgtggagcagtggaaagcccagttcaagatgtggtccaccattgacgacagccagatctgccggttcacctccgatgccaaggacaagcccatcggctgctccgttgccattagcacctactccatgctgggccacaccaccaaaaggtcctgggaggccgagcgagtcatggagtggctcaagacccaggagtggggcctcatgatcctggatgaagtgcacaccataccagccaagatgttccgaagggtgctcaccatcgtgcaggcccactgtaagctgggtttgactgcgaccctcgtccgcgaagatgacaaaattgtggatttaaattttctgattgggcctaagctctacgaagccaactggatggagctgcagaataatggctacatcgccaaagtccagtgtgctgaggtctggtgccctatgtctcctgaattttaccgggaatatgtggcaatcaaaaccaagaaacgaatcttgctgtacaccatgaaccccaacaaatttagagcttgccagtttctgatcaagtttcatgaaaggaggaatgacaagattattgtctttgctgacaatgtgtttgccctaaaggaatatgccattcgactgaacaaaccctatatctacggacctacgtctcagggggaaaggatgcaaattctccagaatttcaagcacaaccccaaaattaacaccatcttcatatccaaggtaggtgacacttcgtttgatctgccggaagcaaatgtcctcattcagatctcatcccatggtggctccaggcgtcaggaagcccaaaggctagggcgggtgcttcgagctaaaaaagggatggttgcagaagagtacaatgcctttttctactcactggtatcccaggacacacaggaaatggcttactcaaccaagcggcagagattcttggtagatcaaggttatagcttcaaggtgatcacgaaactcgctggcatggaggaggaagacttggcgttttcgacaaaagaagagcaacagcagctcttacagaaagtcctggcagccactgacctggatgccgaggaggaggtggtggctggggaatttggctccagatccagccaggcctctcggcgcctttggcacccatgaatttcttatgttttggggccccgaccgaacactggggttccattggaggttaccacctcatatcgcgggagccaagggcgcctcc

SEQ ID NO: 383530 - DNA, 2437 bp, Homo sapiens
  misc_feature (2264)..(2264): n is a, c, g, or t
gggagcttccggattgagccggaagtccccccagagcggatgccgcggcgggcctgtgggagcggggtcatcttctctctgctgctgtagctgccatgggcaaaagagaccgagcggaccgcgacaagaagaaatccaggaagcggcactatgaggatgaagaggatgatgaagaggacgccccggggaacgaccctcaggaagcggttccctcggcggcggggaagcaggtggatgagtcaggcaccaaagtggatgaatatggagccaaggactacaggctgcaaatgccgctgaaggacgaccacacctccaggcccctctgggtggctcccgatggccatatcttcttggaagccttctctccagtttacaaatatgcccaagacttcttggtggctattgcagagccagtgtgccgaccaacccatgtgcatgagtacaaactaactgcctactccttgtatgcagctgtcagcgttgggctgcaaaccagtgacatcaccgagtacctcaggaagctcagcaagactggagtccctgatggaattatgcagtttattaagttgtgtactgtcagctatggaaaagtcaagctggtcttgaagcacaacagatacttcgttgaaagttgccaccctgatgtaatccagcatcttctccaggaccccgtgatccgagaatgccgcttaagaaactctgaaggggaggccactgagctcatcacagagactttcacaagcaaatctgccatttctaagactgctgaaagcagtggtgggccctccacttcccgagtgacagatccacagggtaaatctgacatccccatggacctgtttgacttctatgagcaaatggacaaggatgaagaagaagaagaagagacacagacagtgtcttttgaagtcaagcaggaaatgattgaggaactccagaaacgttgcatccacctggagtaccctctgttggcagaatatgacttccggaatgattctgtcaaccctgatatcaacattgacctaaagcccacagctgtcctcagaccctatcaggagaagagcttgcgaaagatgtttggaaacgggcgtgcacgttcgggggtcattgttcttccctgcggtgctggaaagtccctggttggtgtgactgctgcatgcactgtcagaaaacgctgtctggtgctgggcaactcagctgtttctgtggagcagtggaaagcccagttcaagatgtggtccaccattgacgacagccagatctgccggttcacctccgatgccaaggacaagcccatcggctgctccgttgccattagcacctactccatgctgggccacaccaccaaaaggtcctgggaggccgagcgagtcatggagtggctcaagacccaggagtggggcctcatgatcctggatgaagtgcacaccataccagccaagatgttccgaagggtgctcaccatcgtgcaggcccactgtaagctgggtttgactgcgaccctcgtccgcgaagatgacaaaattgtggatttaaattttctgattgggcctaagctctacgaagccaactggatggagctgcagaataatggctacatcgccaaagtccagtgtgctgaggtctggtgccctatgtctcctgaattttaccgggaatatgtggcaatcaaaaccaagaaacgaatcttgctgtacaccatgaaccccaacaaatttagagcttgccagtttctgatcaagtttcatgaaaggaggaatgacaagattattgtctttgctgacaatgtgtttgccctaaaggaatatgccattcgactgaacaaaggtgacacttcgtttgatctgccggaagcaaatgtcctcattcagatctcatcccatggtggctccaggcgtcaggaagcccaaaggctagggcgggtgcttcgagctaaaaaagggatggttgcagaagagtacaatgcctttttctactcactggtatcccaggacacacaggaaatggcttactcaaccaagcggcagagattcttggtagatcaaggttatagcttcaagccgttctagttcacgtgatccgaactcgtggctggagaggaaatggcgtttcgacaagaggaccggcgtcttctcggcgcatgactgtcccagagaggggcgggactggccaacacgactggctgccaaatatgagcgcagttgatcactggggcacaaccgattaggaacgatccggtattcctcgtaggataatgtacactntgggaacgacatcagacaggagccgctctacactagaccacaacggtacacatacgcacggagtcacaaagcgaacgcattcacacaaccagccgatcacaccagcgcgcatgacgccgacgcaggagctaccgccgcagaggaccacccttacgacgaccacaggcacagac

SEQ ID NO: 383531 - DNA, 889 bp, Homo sapiens
ccccacttacggctagtagaggcccgtgttaatcggcacagggcccaagcagttcttggtggctattgcagagccagtgtgccgaccaacccatgtgcatgagtacaaactaactgcctactccttgtatgcagctgtcagcgttgggctgcaaaccagtgacatcaccgagtacctcaggaagctcagcaagactggagtccctgatggaattatgcagtttattaagttgtgtactgtcagctatggaaaagtcaagctggtcttgaagcacaacagatacttcgttgaaagttgccaccctgatgtaatccagcatcttctccaggaccccgtgatccgagaatgccgcttaagaaactctgaaggggaggccactgagctcatcacagagactttcacaagcaaatctgccatttctaagactgctgaaagcagtggtgggccctccacttcccgagtgacagatccacagggtaaatctgacatccccatggacctgtttgacttctatgagcaaatggacaaggatgaagaagaagaagaagagacacagacagtgtcttttgaagtcaagcaggaaatgatgcttaggcagggtacttcgttcaagaccggcgcttggcacccttgttggaaagggattttcagcataacattttccttccacctctttgaccttccctccagcgttggccaaattgtgctgaggaagatgcatcaagggcttggctgtgccttcataggtcatctagggttttataaaggaggaggagacaatattttttcaaactttttggggagtggggtcatttctgtatataaaaaatgttaatatttaaggtgtatttatgttaccgttctgaataaacagaatggaccattgaac

SEQ ID NO: 383532 - DNA, 577 bp, Homo sapiens
gggagcttccggattgagccggaagtccccccagagcggatgccgcggcgggcctgtgggagcggggtcatcttctctctgctgctgtagctgccatgggcaaaagagaccgagcggaccgcgacaagaagaaatccaggaagcggcactatgaggatgaagaggatgatgaagaggacgccccggggaacgaccctcaggaagcggttccctcggcggcggggaaccaaggactacaggctgcaaatgccgctgaaggacgaccacacctccaggcccctctgggtgctgtcagcgttgggctgcaaaccagtgacatcaccgagtacctcaggaagctcagcaagactggagtccctgatggaattatgcagtttattaagttagaaaaaacatgctgttgtctgcccctcagtcccttcatgaccttgggcaagtcacgtaatgtttttgtgcctcaacaattcactttttaaaaacatgatcgtatgatgaatgatattattttgttatttatatttactgtgattgataactgttgaaccaaaataataaaataattaatttaaacaatgtc

SEQ ID NO: 383533 - DNA, 479 bp, Homo sapiens
ctatgaggatgaagaggatgatgaagaggacgccccggggaacgaccctcaggaagcggttccctcggcggcggggaagcaggtggatgagtcaggcaccaaagtggatgaatatggagccaaggactacaggctgcaaatgccgctgaaggacgaccacacctccaggcccctctgggtggtaagcatgcccttagcttgggcagggcccaggagtgtgcggagcggcagctaaatcttgggcatcctcagagtcaaaactgacattcaggatactgcccctagaactggccgggagagaattttcatccacacacgttggaacagcccaaggcaacagcgagcagttgcgcacacgtgtggcggccggacctgggcttccaacagctctaacccctcggtttactctcactccttccccagccctaccccatgtagtgaatccttttatctgccgaataaatagcatttatcatgta

SEQ ID NO: 383534 - DNA, 342 bp, Homo sapiens
gacaaagggagggagaaagaaggaatgggggagggaaggcacaagatatttaaggaaagaaggacaaaacaccactgttttattgtgaaagtcacagacttcacctaaagttgggggcggggtggggaggggggcggtgactgaaagtaaaagcaaagcaaaccgaaaagtcaaatcacttgaggaaaggggcagtgggcagactataaagccagtgattgcacttattatataactatttctttcatttgccctaaaaataagaaaagaaggcaaaaaagcaagcccttattagactgtacgttgcaaatactttaagccaaagacttaggattgtcattt

SEQ ID NO: 383535 - DNA, 492 bp, Homo sapiens
  misc_feature (6)..(6): n is a, c, g, or t
cgtgcngccgacctactactactaaattcgcggccgcgtcgacgcctgaatactaaaattggctacttgtactaagcagtttcccgtgtttgttaagtagctaacatctgtgtggggttttatggttaaaggaattttagatgttttccacttaatcaagtcagttatgtgtttttttaaattctaatttttttgggcacagggtcttgctctgttgcataggctggagggcagtggcatgatcatagctcactgccgcctcgaaatcctgggctcaagtgttcctcccacctcagcctcccgagtatctgggactacaggtgcatgccaccatgcctagctaatttttttttttttgtagagatagtcttgctgtgttgcccaggttattctagaactcctgggctcaggtgatcctccagcctggcgacagagcgagactccttctcaaaaaaaaaaaagtcgacgcggccgcgaatttagtagtagaag

SEQ ID NO: 383536 - DNA, 405 bp, Homo sapiens
aaatatattggctcagtaacagaaaaaaaaaatagcccttgattaaaggtttgatctatcccacgtaagaaagattaaaagcaaagctagaaaagatcagatttgtttctaaataacttatctgcgtcctaaaacaaaactaaaaaatttttttaaatacagtaatgtattaaaacatactgaaactcaatacatacagagaaacgaagataagaataagaagtccaagtgcagcggctcatacctgtaatccaagcacttggggaggccaaggcaggggatcacttgaggccacgaatttggggaccagcgtggggcaacacagcagaaccctgtcttttacaaaaaaaaaaataattatttttttcctttttggtagagacagggttttactgtgttttttcg

SEQ ID NO: 383537 - DNA, 1266 bp, Homo sapiens
  misc_feature (1012)..(1012): n is a, c, g, or t
gaattcaggcaggccctgggacagtttgtctctgctccccccagtgttggggcctcagctaggaagactttaaggctgggagagatttgatgcctgggagagactcaatcactgtgtaaccgaacacttgcttcttacagagtccaattgacaagggtgaggtataatagaaagacagaatttattagccaaaaatagtaaagggaaagcaatcggattcctatccaaattaacggcttctatttttaggaagaaggcaggggtttaaaaagggaaaacttgataaggaaggcagacaagaactgggctgagtacagtgtctgtgtgtcttattctggtggctatcttgggtcctggtccacctggaccctgggctgatggcatttcaacaacagccaggttgttaactagctgtcttgaagtaatctctggaactttgcagctgggtctccagacttggtctgtgtgtctcaggattgacccctggaacttctaagaagacacataattagatactagtagacagttggataaatgtgaagggagtatatacaatgagaaagggagggatgtggactctagaaaaggtttctgcagtttgcttcaaggttatatctttaaacccaaggaaaaggggaaaaaatttttaatgcagtttgaagctaagctgcctggttacaactgggtactaggatcatctggaggaatcttcactcagctgtctggcaggtgacactgggacttcatctaggctgttggccaaacacctctccatgtggcctttgcttcctcacagcacagtgcctgggtcccaagaacgaccatcccaagaggacaagacagaaccatatcaccatttgtgatttgctcttggaagtcacatgatatcacttccattgtagtcacaggctcacccagattcagaataaggggacacagaacctctcagtgggaaccatctgtggcacattgtaagaggaacatgtgggatgagagatgttgagggttcatnatcctaaaacatcactttaatcctgtcttcccattactgaccaaaacaaattctggcattaaaggcactctacacttaggcctcaaatgcctttccttacttcctgtattatctcctccattcagatcagaccgaactactcagtcacccacacttgtcagactcattcttctcttgccctttttctcaaggaatccctctcttgacctgagaaattctacctctcacttaaaagtgactgttcactgaattcc

SEQ ID NO: 383538 - DNA, 670 bp, Homo sapiens
ttttttggtcatatccatttcagtctttcctatgctctttctctactgctcatttaagttactgttacaaaaaggtgctgctaaatgtaggatgtcttagtcatgttgtactttgggacaatgccacatttttaacatggtctgctatgcattcctgttaaacattcactgtcagctacactgaactgtctaacaaacctggtttaaagtaattcatataaaacaaataaagagctggcttctgcactgtttattagtagtagtattaattgccatgttagaaatgattcatgtagttgagactatattaaatattcaacacttcccagctgcagggcatctttcttggggcaatgctaaatactttatgttcctttagtaatcttcctattatgtctgattaaaaaaaaagatacctccacgtagataaaatattttattcaacgtgagctctagcagaataatctgggtcagttatgagttctggatcaagagtttaatttctgctgcgctgtacttttaactatttgtactttgcttcattatttaaaacatgacacagggttttaaagtaaatgtactcactgttgaacttaagtacttcttctgtttcatagaaatgttaatattaaatgttaaaatatatattaattttccctcacatttccct

SEQ ID NO: 383539 - DNA, 142 bp, Homo sapiens
caagtcaatacccataattaagtcaagttgccagccttaattatatttctctctcgctcgttcactctctctctccttccctccttccctctctgccccacccccgtgtacattatataccaattcattggagatatatata

SEQ ID NO: 383540 - DNA, 277 bp, Homo sapiens
ttactctgcccctctgaggctattgtggtcaccctgtcccactgccctggactggcttgggggccaggctggcatgatcatgctgctctaggctggcaggtggagcattcccagccccggttccaaggtcccccgaggcgctgacaacacttggagggagaccatgcaggctgggcttcctgaccacccagacccttcaggaccaccccccatcccaccccaccatggatgtggcaaaggccctgccttggcaagccttccccagaccctctgctct

SEQ ID NO: 383541 - DNA, 456 bp, Homo sapiens
taaggtctacacagctggaaacatccatttctgatgccagctacatcattccctgatgagaacagtgccagcagtgaacccctcaccactccccacacccaacccccacctcagtgtccccagggtattatcagttgtgtcagcctagagtctctgagtttggtctggctctgcccctcccccatccgtttagaaagaatctatttctgtttctctctctctctctctctcatgcctcaatctcatgtcctcctgctgactctaaagagacagctgattgtgggaaagatttaaattgggttattctctcttaatataatttttgtaaaatactataaatgaatttcttcatggccgccaaagagaagtgctgctatttctagcaccagactgacaggaatggtgcctgttaggattaagttaagctgcaatgggaacattaaatatggcttaaac

SEQ ID NO: 383542 - DNA, 541 bp, Homo sapiens
caatgtttattttcagtgcttttcagtttgtcaaagagtggatctcaaaatcttgcttaaagggtaattgagatgtagcagatttatttacttagtcatggaaagaaaaaaattcagtcaaaagctaaagatttccttttgattgaagacagattggttctgtggccttggaactttcccagacttaatggggaaacatcatttctagattagcatactctttggtttaaatttaatatatacatttaatgttacttagggatacttttatattttgcatatataaagcctcatatataaagccttatttctgatgctcttagatttctgaggagtgagatgattaagttgtattcattagtgtattggtatttcttcacatccagtgaaattggagatatgttgtatgttagaagagcattctttaaattgtgttgctttgaacatgtgtaccttttctagattcagtaatcccttccccccgtcctctggagtatgaaacctttagagtcacaataaaatgtaactaaagaaaatttct

SEQ ID NO: 383543 - DNA, 312 bp, Homo sapiens
ggggtgactaaaccttcagcttggttttactaaaaaagaaattcttgaaagaaatgccaccggtcacaaaattctatacacctatacctcttaagagtcaaaacactacatcatagagcaaatctgggaaaaccgtaacaagctatttcctgctgcctatcctaaacaggaggttaaatcctaaggctctagatgcaattctccgtaccgctgagcacctggaaccttcattttggaaactcatgaacttcagcgacactgccacgagggtttaataatgtcacccaactcctggactcacaaaagctacag

SEQ ID NO: 383544 - DNA, 115 bp, Homo sapiens
tccttgttaaacgtggccccttaactgatggctttcacagggaaaaagaaaccctacaaattactgttcttattttttaagttaaaaaaattaatcaaaataaaataatgccaaa

SEQ ID NO: 383545 - DNA, 885 bp, Homo sapiens
taacaataaagttttcttaataaataaaagtttataagcatagtaacaagtaacaaaatagagacaatctgaaaagctgtcataatagcaaatttgtatattttcctatttcattctgttttttagttttttttgtgcaagtaacactaggcatgtgaaggtaatgatgagtggaaaccatgtggggaggaggcacgagccatgcctcctccttccagtcaggatagtatcagtggaagcctaatgggaacctagcactcccacctgctacccagcagtaatgagtagcctctcccatttttgagtgtcaacagaggccgagttgggaacctgaacttctatccccatatggcagtaatgaggtagtatctccctttcttctgatggagcagtattaggaaaagccatataaaacaaaaaatttaaacaagatccagtctcttaattctcaaaatatccagatttcaattgaaaataacttataaagacaatctcaactaggttgaaaaaggtaatcaatagacaccaacaccaagataacagagatgttctaattatctgacaaagattttaaagcagccctcgtaaaaatgcttcaacaagcaattaggaaaatacaacaagtgctgtaaggaaagtacaatttgaatgacagcgcatttctcactagaaaccatggagaccagaaggaagtagcacatttctcaagtgctgaaagaaaataactgtcaagcaagaattctgtttctagtgaaaatatccttcaggaatatgggagaaaatcaagacattgttaggtaatggaaaacaaagagaaattgtcatcagcagagctgtcctagaagaatagttaaaggaagttctttaaacagaaaggaaatgata

SEQ ID NO: 383546 - DNA, 745 bp, Homo sapiens
aggggtttcactatgttggccatgctggtcttgaattcctgaactcaggtgatccgcccaccttgacctcccaaaatgctgggattacaggcatgagccaccgcacctggtttcttaacattctttgccacctcctctgctatatctatttactttgtatccaccagatcgaaagctcaggtctaattccctgtacctagaatattgcctgtagtgtagtaggcacttaaggttttgttgagtgagagaatgaataaacaaacagaaggatttgcttttcaaaccagagcctccctgcctcctgctctgcctgctaaggatcaggaggagacagcagctaaggaaggcagtcctgaattttccctagggatagggagtaagtggggggatccctgagaaacgctggaagcacccactctgctgccaaggctgcgaggaaaacaggccagagtatcctaacagcctccactcagaaggggcctggaaacttttaaccagacaaaataacaaatgcagtggtttagggcttggtggggcttcccacccgtcccacccctgtcccacacacctaggcccacattgaatgccctcagcacctccggctgcacaggggcctgttttccctgactctgctgctgttcacagaaccaacttcctcccaccccacacagacgctcccttcccagagctcattgggaaccttctgatttgcatctccaaagaaataaaataaattccactaaat

SEQ ID NO: 383547 - DNA, 229 bp, Homo sapiens
tcatccttctccttctagaaagccatgtctctgtcagtatcccgccctcctcactaaagctgtcaagaactataaaaggtctgagattttgtcctactcaacaagctaacaagtcagcccactacagtttcatggaatctggtagaaaacatgacactcagagatggacagtgttttactgtagaaaggtcagtcaccagatatcaacattttggcaccagtttcttga

SEQ ID NO: 383548 - DNA, 430 bp, Homo sapiens
  misc_feature (26)..(26): n is a, c, g, or t
ttcggcacagcatggcagaaggcaanggaagagcaaagggatgtcttacatggtggcaggcaaaagaacatgtgcagaggaactgccctttatagaactatcagatctcgtaggacttattcactatcttgagaacagcatgggaaatactcgcctctatgattcaattaccttgcattcctgacccatgtaaatccctactctacattgccctgcataatggtcttgtagcattttctagttattactgctatttgtgaacacatctattctccttaactattaatagtataaacaatttgagggtagggcatactatattttattttttaacccttaggaccacaatgctatagtttgaatgtttgtgtcccccccagattcatgcattgaaatgctaatctccaaggtattgggagatgaggccttt

SEQ ID NO: 383549 - DNA, 168 bp, Homo sapiens
atatgtatacactgagttaagtagtataaatattttagagaaaattgatgtaaaatcctcaactcatttgatgctccctatcccaggacagtaaaaattgcccaatatttccttggacctccataaagaagcagtttttcaaaaaataaagtgtttggaagtttaaga

SEQ ID NO: 383550 - DNA, 426 bp, Homo sapiens
tagaaaaatgcatggaattcattatgagccattaaagaagcagtcagtaattactagcagtgagaacaatttataatataaacttagacttcttttctgttttgtagtgatgaagcttacctagatttagagaatccaatggctgtttgttgtattttcttgaaagaatcatttcaaattttctgcgcttatagaaaaaatactactactaaatcttcgagaaatagagcttagaatagaaaactttcgacatgaatatcattaaggctagagctccttcataatctcagtcttttgttagttaaataattagctctctttcatgctcttgcctaacattgcattttgctccatagagaatattgtgtgaatgagtttaaacattaattcacttgcctccatcataatgatagctgcatgtaatgt

SEQ ID NO: 383551 - DNA, 4161 bp, Homo sapiens
gaattccggttatcactgacactatataactctgccacttagggccatgtgaccttaaggaaggcacttcacctgtttgtgtctcatctgtaaaatgggaattatgatgatacctaccttaaaaagggttgtatcaagggagttaatgcatgtaaaacaatgagaagaatctttagccaattgtaagcataagtgtcaatcattattattagtagtagtagtacatttatttgtttggggtttattatctgtctcctacacaagaagataaccttcttaacgacaaagactttgttttgttgactactatattctcattgcaagaagagtgcctagcacatagtaagggcttaataattatttattcaatgaatgaatgaatgcataaatgacttcaagtcttcatcatcctttttccgtgacttatgggatttggctgctaaagttcatgagtgggtgaacatagtgtttgatgtcacagctgcacacacttggtccagcacccccatatgcctagatacaaagtgggcatcacttgtgttctttgttgtgcctcattctgatgaccttttcgcctgacattttcttcccacaggcctcatgaatggccaggctatgctccacttccttcaagttgttcatttctcttaatctcatgaacgtgaacctgtcctcaatttcattgccataagatctcctcttagtaggtgatgcctaattactctttccaattaacatgctattcaaatttgtctaatgtttcttccagttctaaaatttgatgaccactgatctgatgtgaccgtgtgattgtttcacaatttgatgtgtgtgatgatattagtatgtacaatacatgctgtttacctctatctagtaacaaatgtttacatttgttactagagtaagctttaggggtagaacttgagtctcaaagctcacgtcttgggaaaaaaaaaagatctggtattgatagaaccttgataaatcccttgttatagcacatgtttttgtttcccagaagtagggcaagagctctctggcttatccaatcagcttcttctcctgactttagtagagacacgggcttcattactgagctgggaatttaacttccctctgtcctatgaaaagtagaagattttcctaagagaaaccttcagtgagagcagaacagaaaaaagagcaaagaactaactgaaggagagggcaagaaatcagtgtagtgtggggcagcagaagggaagtgacaggtcaaagaaaataggagagaaaaggagagagagctacccaagtaaacaggaaaaggggaggaaatacagggcaaaagcagagagcaggggaattggcatgacaagaaagtggtgaaacacagaggattccaccagacaacagagagcccggtagagaagagtgggctaggataaagagacaggaaacaaatggattaagacatagagtagccattgtcagttacctgggtaagaaaagattggtggtctaaataaaatgcagattgttcatttacaattctgactgtttaaattatttatggtacaccttggtgcttcacttaatcatgttaagttacagttgtaatcttattaattacttgcaaccagctttctcaatgtaccatgtatagaggacagcttgtcaaggggtagaagtactatagcttcacttttaatccagtatcatccagtacacaaattagccttacactgttagaatcttcctgatgatgactggctgaactaagcattagtcttgacaatacaagtactgctgtgcccatttacagaaagggaagcaattctttcccagaaagtaagatatgatttaaatgctttggcctaattagctgtgaaaaaggacatggcccaggtaaggcttcaggaaaagccaattaacacatgtgcatatgtctctctccattcacatcacccagcctagtccaagtcaccaccatctcttcacttgcattgttacagtagtctcttagccgcttttcccacctccacctttgatatctctagttattcatgaggtccaaaatgacttttaaaaataacaccacactatctctatttagacttttcaacagtttcccactgcacaagggatacattaccacaagggaattacaccaacttgcccttgcaaatctcatctttatgttcaactgtgctgatcttcattttcctcctcagatgcgcaaatgctttcccatcccagggacttcatgtttgttctgccccaaaactaaaacactcttccctgttcttcatctggctaaccaatatttgtgctttctgtgtcagcataaacactgttttcctcagacaagatttcctgactcccagcctagccaggccacttcaaggtgtgtgctctccataaagtttacttcttctatatacatcaattcacataattatactttaatacttacttgtataattgttcgtgtgctatgccccccagttggctgtaagtcctataaagacagaggccacatccatcttgcacatccctctgttcctagcacctgccatgggtcctatcagctgacaagcactcaatatattgtatggataagtaaatatgattctaatttccaacatcctaaacttgtttacagtcccacggagcctgctcaggtagagcacatgcaatgcttcctatgcatgtgtttgcagagagaagagagagaagcccttctgcttctcccacgtgttaccattttgaccagactcagtgctgaaagcactgatgaaagggatggagacagtgagcctgtgaatgccgtgtgcagaacagcacttgcctttgtcccccatgaaagtaatgtgatgctcggtatccacaatcttttaatctggctgctgtagggtgagaatttgtggtccttttctgttaagatggaatcttgctgaaggtcagaatgtggttagagtcaaagagtggcatcactagcactgtgtataaaagaaagaatacaactcggatctttggttctctaccaacttgactcactttctccacagcaaggctcatattatcctttcctaatggagtttaggatgcaattgcagtcctcttcagacaagtctcctgtcccttttgctttattctgaaacaatggagtccaaaatctgtacttcttacatagtacagtgactagcttctaacattccagcatggctatctcaaggacttttgactaaatgctgccagttcatttggagtgatctctggcagggccaaattcagcataatgtagcttcctgttgtcttcctatattcctgtatgttattgtaaatatattgacgtaagctgacctattatacatgcttgttcccttctatggtgatagggactaggaaagacaatgcactgttcactctaatgtaagggatcacatataattcttatgatttgatgattctcttctggcactcaaacctgcttgtagcttttaggattcatggccactggtggcattaaacacttagggcctgtcatcacaaaaggacactttgtacacaattatctttccaaaggctagatcagcccatgtcaatgtcatgtttaatatttaaacaaaacacactttactgtcatttgtatctatttactcagtcaccatctgcaaaaccactgtgaataaaaatggaacttgtggtgcaagaaaaatatattgagaatcattgagttggacagacctagtgagaaggttgtgtctattcaaacacctgtcttccaccctcccaccatctgtgcaatcacttcacccttcagcctcactagtccccctaacaattaccctgtcaagaggagagtgcagctcaggtggatttaatgtgggtttaatatggcctgttgagtttaatgtttaatgttgattttctttaagtaaccatttctgttcttgctataaatctatgtctatatgtctatgcttaatttggatgatgaaggcaacttggatttaaggaaagagccagtttatatgttttatgaagagattatagatcaaataagcagacgatagaccttccaaagctataagtgaaaacagaaaaatgacgcgtaattcacaggttacagtgaagttaaaagagagggttaatattttaatgtgttgttaagaattc

SEQ ID NO: 383552 - DNA, 570 bp, Homo sapiens
aatcatgtgaagacggcatctaccacctcaaatcgcccagctcattgaacctgcgtgaggatccagcactgtccctggtgtgtacagctcagtgcaccgagatgaccaaccgcctgggtttgctttactgtcactgctaaaggcaggaaggcagctgccaaaccaggacaaggtggtcaccccacggtgaacatcagtcaccctccctagcccacacaggcaaacaaccgggggagactatggctcagggcttagaacccaaaggcctgaacaaatgaggaagtttctacaacaaagactttctttgacagagtaaccagtcataatttctgagcattccaggagcgctgtgcagaatcacaggtatttggcaactagtgggataaaacaaaggtgccattgaggatgtttacaaccaacccctctccggagataacctcaaggtctttcccttgcacatggcctttccatgactcatccacagcagctgcctccctccaccacacaaaggaccctgcaagttctgtttggtattcttgagaataaaaactccgtgggtcgttccctgga

SEQ ID NO: 383553 - DNA, 1480 bp, Homo sapiens
aatcatgtgaagacggcatctaccacctcaaatcgcccagctcattgaacctgcgtgaggatccagcactgtccctggtgtgtacagctcagtgcaccgagatgaccaaccgcctgggtttgctttactgtcactgctaaaggcaggaaggcagctgccaaaccaggacaaggtggtcaccccacggtgaacatcagtcaccctccctagcccacacaggcaaacaaccgggggagactatggctcagggcttagaacccaaaggcctgaacaaatgaggaagtttctacaacaaagactttctttgacagagtaaccagtcataatttctgagcattccaggagcgctgtgcagaatcacaggtatttggcaactagtgggataaaacaaaggtgccattgaggatgtttacaaccaacccctctccggagataacctcaaggtctttcccttgcacatggcctttccatgactcatccacagcagctgcctccctccaccacacaaaggaccctgcaagttctgtttggtattcttgagaataaaaactccgtgggtcgttccctggaattggttctcacccattttctttcctctgaccgtagccaggataggcatctaattctatagcttgtccgtggaatggaaaaacaatttggattttcacaacctgaaacctaatttctggtaggaaggtaccatctggtggatatttgtgaaactgctcacgtcctgtgtttgaaaatgagcatctgggggcagcgtgcctctccgaatgtcaataggaacgttgctccgagaggaggagagatccacactcaatgtggctgatccccttaactatgtgacactgtgtatgtgactatgtcataagcagcgtcatccctgtttacagttttctcagtttacaatgaatttaaatagctacccattgcctcttcctctccaagcgtactccttgctcctccgtgacaggcacattgatctatgagagttgtctcttgggaaatctagtcatatctcatgcgaacattttctaattggtgcacccacccctctgtgggcatgttcgcacagtgtcatgggccctttgtggagggttgtcccctttgttcaccacagcccctctctctgagactctgcaccccctataggaggtcgggggtgtctgccatgtttgtgggactagcccccaaacagcagggtgagcagggttgaccacttgctcaagctgggcagtcagattctcactctcttgagatctggaaccagtattcagaaaccacgaacaagtgcagctggatctgcggtggggtggaccccagcgcttaggggcatgctgctgctgccatgtgcacaaagcagcagccctgcctggcctgcagagtgagtaccagcccagagcagagacagctggagaggcccttctgcctatgccctgaggcagtccacatccctgggctgcattctggcccttga

SEQ ID NO: 383554 - DNA, 472 bp, Homo sapiens
  misc_feature (260)..(260): n is a, c, g, or t
catctgtagccccttgctgtacagtgtcatcatatccaataaggcttgcttttctctgattttaggggtgtatataataggcctggtttgtgcatcagttcatacaggctgtatgtttagggttcaattctgcaaatttgatttgattaaccattatttctgtgatcttcttcccctcctaaagctctcttgctctagtatctatgtcaacaaactacttattctatgtgttggtgcatttaacatccttgtccccagcntgaccatcctttgctcttacatctttattattgccagcatcctccacattcgctccactgagggcaggtccaaagccttcagcacttgtagctcccacatgttggcggttgtaatcttttttggatctgcagcattcatgtacttgcagccatcttcaatcagctccatggaccaggggaaagtatcctctgtgttttatactattattgtg

SEQ ID NO: 383555 - DNA, 903 bp, Homo sapiens
aatgctttatgatcaacttgccataggactgatggattaaccagtgttcggctttatttgaagtctatgccctgcacagctcttgtatgtattttagatgctagaagtttttttagcatgtgatgtgtgattcttgtttgaattctaggtaccttgtgaattccagaaaaagagactgtgcttcacgattgttagtcccatgaacttgcactatctatctttcatggtgatgttttgaaaatacaatcaggaaaaaacccaacacctttggaatttaaaatagaatcatatcatgaaatttaaaaagaatctcttctgttgcatttcctcacccctaagtaacagctacatttaagtaaaatgcaggtggtaggggaaaaaaaaccatggcgagatggtggtttagtggaataaactgattactggtttttttgtttttttttttttttttaaagaaagaagcttcatcacagatactttccagtttctcttttatacttttttgaaagattactttttaggaacatttggtatgatatgcataaaattatttatccatttatgggcaaaatgatacaagtagcatcttgattgaacatcatttacctcagatattcaaccagcagtacgttttttatgcagtctcaacccatatcccatttgttacctctcagaatattggtaagcagttattttcgctttactctgtatttcttgtgttttgggcacaggttattgtactactgtcaaatcgtacttgctattttttctgcaagtatttaacagaaagcttaaaatccccataaaaccccaccttggataagtgattgttaaatattgtacaaataaaatgtatgctatccccattccatccccaagttaaataaaaaaatgaatacggta

SEQ ID NO: 383556 - DNA, 1317 bp, Homo sapiens
aatgctttatgatcaacttgccataggactgatggattaaccagtgttcggctttatttgaagtctatgccctgcacagctcttgtatgtattttagatgctagaagtttttttagcatgtgatgtgtgattcttgtttgaattctaggtaccttgtgaattccagaaaaagagactgtgcttcacgattgttagtcccatgaacttgcactatctatctttcatggtgatgttttgaaaatacaatcaggaaaaaacccaacacctttggaatttaaaatagaatcatatcatgaaatttaaaaagaatctcttctgttgcatttcctcacccctaagtaacagctacatttaagtaaaatgcaggtggtaggggaaaaaaaaccatggcgagatggtggtttagtggaataaactgattactggtttttttgtttttttttttttttttaaagaaagaagcttcatcacagatactttccagtttctcttttatacttttttgaaagattactttttaggaacatttggtatgatatgcataaaattatttatccatttatgggcaaaatgatacaagtagcatcttgattgaacatcatttacctcagatattcaaccagcagtacgttttttatgcagtctcaacccatatcccatttgttacctctcagaatattggtaagcagttattttcgctttactctgtatttcttgtgttttgggcacaggttattgtactactgtcaaatcgtacttgctattttttctgcaagtatttaacagaaagcttaaaatccccataaaaccccaccttggataagtgattgttaaatattgtacaaataaaatgtatgctatccccattccatccccaagttaaataaaaaaatgaatacggtatgatttgcatatgcagtttttctttagctatgtttttttttttttttatactttaagttttagggtacatgtgcacattgtgcaggttagttacataggtatacatgtgccatgctggtgcgctgcacccactaactcgtcatctagcattaggtatatctcctaatgctatccctcccccatccccccaccccacaacagtccccagagtgtgatattccccttcctgtgtccatgtgatctcattgttcaattcccacctatgagtgagaatatgcggtgtttggttttttgttcttgtgatagtttactgagaatgatgatttccaatttcatccatgtccctacaaaggacatgaactcatcattttttatggctgcatagtattccatggtgtatatgtgccacgtttt

SEQ ID NO: 383557 - DNA, 2189 bp, Homo sapiens
  misc_feature (1906)..(1906): n is a, c, g, or t
tccagatgttgtactgcttctcaaaggatgcttttctatttatttatttatttattcattcattcattcattcattcattcattcattcatttgacgaagtcttgctctgccccccaggctggagtgcaatggtgcgatttcagctcactgcagcctgtctcccaggttcaagcgattctcctgcctcagcctcctgagtagtggggattacaggcgcctgccagcacgcccagctaatttctgtatttttagtagagacgggttttcaccatgttggtcaggctggtcttgaactcctgacctcaggtgatccacttgcctcggtctcccaaagtgctgggattacaggtgtgagccaccatgcctggtcaggatgcttttatttctaatacctatccgaataaattaaaaggaccatgtttcctatgtttcacatctttgtaaactttttataaaattgtagtaaaatataatttaacctattgtgactttgtggaaaaagtgagtttgaatgtcagtgttattggcttttttgggtttttcacttgctaacaattgatctttaatccaaattaaatgctatttactttaagggtcttttaaatatttcattactaattttaagttaaaactgatcatgtacagtggctcatgcttgtaatcccagcattttgggaggctgaggcgggagtattgcttgagctcaggagttcgagaccagcctgggcaatgtggcgaaaccccgtctctattaaaaatacaaaaattagccgggtgcggtgacatgtgcctgtagtcccagccacttgagaagctgaagtgggagaatcgcttgaacccaggagacggaggttgcagtaagccgacgttatgccactgcattccagcctgggcatgacagatcgagaccctgtctcagaaaaacagaaaagaatcttgtttgtaatactttaaaatactgtaaatagtatataaatagcaagttttgtttttatttctaattactgaaagtaattgctattttatcttttctatagttttattagactcctttttagaattatgtgattaaaattgttacttattcaatattgaatatctgtgttcaatacaatattgaagccagcctctgcttgactaggagaaaaaaacatccttattcactgtcatcgagtttgtagctttgtggtaaatacagataaaaacagcagttacaatataatgattgtaatgttcttgtcttatttcactttatttcataatcttattctgtagaaacatagtgatttcattggaattattttcctttatgggttttttgaaccaaaattagcacacattggattataatggaattgtttctaggtttattttctccactagattagaaacaagaaagcccaggcctttttctacaactaaaaatactcagatttcattgaatgtttgggtaattgaatttgagtggttttgtttctttgttttattgatgaatttattattgagtaaggacacttcctttttaaaaattacttggtatcctacatagattactatattaaagcattatttggctgttctcaatcagtgttttctttgttcagtgtgccaagatcatactctttagaacattgcattatgaaaatgaagttttgacagtcagttgtggagtttttgttttgtgtgtgtgtgtgtttatttgttttttaccttcccagttcttcagccctcttcccaccaccacaatgaccccatcaagagagacaataaatgtacccataatgtttgtgtaggatcagaatttattccagtattcacagcttttgaagcaagctttaagattgcataaatccttagtaatcatggtttaagagaaacaatcccagctcctataatttttcttcnctccaatcagaaaggcaactggccatgaaatctcagctggaatatttaaaaggaaattcagatatggcttgctcgtttgttaacttattaccaaatgtattaaccaaaggaaagaatttaggccaaatctgacagggtcatatgacatatgcagggaaaagccaacaggttcctattaggctactcgaactcatcctactactactactcttttgcggggttaggggtaggttttttaaaatgttcttgtgtccatcagtcacaagaggaggtagttttcact

SEQ ID NO: 383558 - DNA, 414 bp, Homo sapiens
ccaatgttgtctacaactgataatagaatataaaaatagaataagaacttaaaggaaaaatagacaagtctacaataatagttgaagatttcaacactcatctttcagtaattaatggaagaaatagacagaaatcaataaggatatagaagactgtcagctaccttgacttcattgacatttacagaatgttccattcaacatcacagtatatgttcttttcaagtgcacatgaaacattcaccaagatagactgtgtttaggtttataaaacaggtctgaataaatttttaaaaatcaaaattatgcaaagtaatctagttatgacagaattaaactagaaatcagtaacaaatatatatctgtaatatcccctgaataattggaaattcaacaatatttatccaaataact

SEQ ID NO: 383559 - DNA, 489 bp, Homo sapiens
cactattagctgatatcacagtgtgtatcaccttaaaatgcttagggagggcagatagctgtgctctctacctttatctggagttattgagtctgatcccttcgggcgaggcctcattcccacttccatggctggtttgggtgcagacatcatccaactttggacagaggatacaggctggcttgagctggcagcttgtaaagattttcctttcttcatgggtattattgcttgtcttataatgttggtgatagatttttcaccttccaagctgcccaaacccagtcaatttccacgtgactatactggttttagtgatgataaagtcattgtttaagctacatttactcattgcagttttattctctgtgtgctgtgggttgagagcaaaattggagtctgccaaaatgaaaaagtgagtggttttgtgaggttttcaattttatgtacttccaaggaaatagcaaaaacaaaaaaaccaaaaaaaaa

SEQ ID NO: 383560 - DNA, 425 bp, Homo sapiens
gcatttcatggctcttcatcatcttaatatgaacttcatttccttagcctggaagagaaggcttcacgctccaagtctggctctttgtagacttgactcagctgtcaccttccctgggaagcacattcagtacactgcccctatcttgaagaggcgggaagcacccgctctggcttcccaaagctccctgtgcattcatctataatagtacttctgatattataattagttttttgtctccttgaacaaatgatgactttcagaacaggcatgaactatcttttttacctctgtattccaaagcctaatagtaatgcaaagcatatagtaagtaattgtaaaatatattaaataaatgcatactatttttaaaatatctgatgaactctgaggttcccatacacacaaataaacagaagtaaaat

SEQ ID NO: 383561 - DNA, 561 bp, Homo sapiens
tacgtgaggtgttttaacatggagaaagtaatttggagccacacaaacctgaggtagagtccaaattattggtctgtggaatgacgtaagctctctgggtcttagttttcttagctgtaaactggggataatagcatcctcttcatcagattgttttgagaattaaatggtgcaagcttaatgcctattatacagtgtctagcacatcagagctcagaagatgatgacaaagataacagtgacactattatcgatgaaaatttccacgccaagcacagtggctcacgcctgtaatcccagcactttaggaggctgaggtgggcgtgttgcttgagctcaagagttcgagaccagcctgggcaacatggcgaaaccttgtcttttagtagactaaaaatacaaaaattagctgggcatggtggcatgcacctgtagtcccaggtactggggaggctgaagtgggaggattgcttgaccctgggaggttgaggctcgcataatcagtgagccgtgattgcaccactgcaatccagcctgggtgacagagtgggattccatgtc

SEQ ID NO: 383562 - DNA, 307 bp, Homo sapiens
agattgtctgtactctttaatagttaaataccaactgtttggtattaactatttaatagttaaacgctaagccgaactaaaaacctttagtgtatgagtcatacttgtcatcttgaagctcttaccctaagtcgaggacacgttttcttgggggtgtctctcaagtaggtcgttagtcttgagttggctgcgttgctggaaagggattatccagtctcttcttggaggatatcagcttgatttcttgcatcctgggagctggttatttcactgtttagcataaagacttacacctcagctccctgtt

SEQ ID NO: 383563 - DNA, 453 bp, Homo sapiens
tgaggcaggagatcatttgaatcccgggaggaggaggttgcagtgagctgagatggcacccactgcattccagcctgggcgacagagcacgacaccgtctcaaaaaaaaaaaagaaaaaggcctctttatatatcagtgtcccttcatttttagtaaaattggatgccataatagaaagtgccttcatgttggcatagcttaaaagtatttttcatgttgctttcagagtaatatgtctctattctccttcccccattaaaacatttcaaaagcttcaagcagcacaaatgtgacaaagtagaacttcaaagccttcccaccagatacaatcactgtaaatagtggctttttataatacagctcatatgggcacagttgtacatctctccctgtcaaaacatacagccctttttattgattaattgcattttgttttgtggattccattatgt

SEQ ID NO: 383564 - DNA, 764 bp, Homo sapiens
  misc_feature (284)..(284): n is a, c, g, or t
gctcaaagtatcatttcctcttgggtatccgaagaggcttattatggaagatttgtgcagcagcgatatctcagttacaggcgggtgcctcacaccaatccaccagaatatgaattctcttggggtccccgaagcaactggaaatcagcaagatggaagtcctggggttcgtggccaaactgcataagaaggaaccgcagcactggccagtgcagtaccgtgagccctagcagacgaggccgacaggcagagcaaggcagactgaagccagtatgagggcaggncagtgctagggccggcatccacctctggtgagggttggtgaaaagttggccagtgggtccccgtgaggacgaactactgtcctgagtcataagtaatatgggtggggcgagggtcttatttctgtagaaatcgtgtgactttaaggatttagattttgtatcttatgttttgtaacatttaataattactgttaaaatgctgtttgtaaatgagattggtctactttttcctgtaggattttattgtagagttttgctggttttgtaaaatggatggaagaactttgtatttatactgtgattttgaacagattatgcaacattggaaggaaggctgtactttgatggtttgaaggaactcagcagtatgatgatctggttccaggggaaaaaaatagctggttggtgtctagccccccaacacttttgtctgttgtgtataaaagaagaaagactggcatgtaccttcatttgcttagc

SEQ ID NO: 383565 - DNA, 480 bp, Homo sapiens
ggcaagaggtcaaggatgctccctgcaggggatgacggccaagctgaaactttggttgcaggggaggcaacccgaggaggggcctgaggctgggcacgggcagggggcatccaagccatcctgcgtggatgaaaactgggtgtgtttctgcagtacgcagtgctctggggggagacctgaccaccggctgcatgcctgcagttgggtgtgatgtgcttacgtgccatgcaaacgtgggcacacagtcgtggcctcttgacaattgcacagacaaatccccagcaaggcagcgtggcacaggagccaacaggaaggaataaagaaggcatggatttcatggcacgcttgatccaacggggaaaggtgggattctgctaattttgcttgagtagaaatctaaggctgataattacctatccaggcttcagtccagaataagtgattaataaaagaattctgcagaaccaggccaggaatcct

SEQ ID NO: 383566 - DNA, 778 bp, Homo sapiens
  misc_feature (1)..(1): n is a, c, g, or t
ngggagagctggctgcgccgagccccctgcgcgctgcacatggggcgcctgacggaagcggcggcagcgggcagcggctctcgggctgcaggctgggcagggtcccctcccacgctcctgccgctgtctcccacgtcccccaggtgcgcggccaccatggcgtccagcgacgaggacggcaccaacggcggcgcctcggaggccggcgaggaccgggaggctcccggcaagcggaggcgcctggggttcttggccaccgcctggctcaccttctacgacatcgccatgaccgcgggacggagactcattctgtcgcccaggctggagtgcattggcgcgatctccgctcactgccaacctcagcctccggagttcaagcgattctcctgcctcggcctccggagtagctgggactacaagcgtgggccaccacgccccattaattttgtattttggtagagacagggtatcaccatgttggccagggtggtctcgaactcctgacctcaaatgattcccccacttcggcctcccaatgtgctgggattacaggtgtgagccatcgcaccgggcctaatattttattttaattttttaaaaatagagatggcctctcactgtgttggtaggctggtctcaaactcccggcctcaagcaatcctcccaccttaacctccaaaagtggggattaccacttccggcttaatattttaaactttctccagggtttatagaaaaatgtgattgacaaaaatttaataaatctttacctatggtg

SEQ ID NO: 383567 - DNA, 244 bp, Homo sapiens
ctcgtgcctttcaagtataaataattttaaagcaatagcttgtttttctttgttttctttttcaatgaagtgtttccacaactctattttcatatgttacgtcaaagaagaaaggtgcttcatggagaggtgattgtagaaaaggatgattaaatgatctctgcaaacaaggtgctttttccagaataaccaagattacctgagtccaagttttaataacaagaataaacaactttgtgaaata

SEQ ID NO: 383568 - DNA, 1322 bp, Homo sapiens
  misc_feature (1)..(1): n is a, c, g, or t
ngggagagctggctgcgccgagccccctgcgcgctgcacatggggcgcctgacggaagcggcggcagcgggcagcggctctcgggctgcaggctgggcagggtcccctcccacgctcctgccgctgtctcccacgtcccccaggtgcgcggccaccatggcgtccagcgacgaggacggcaccaacggcggcgcctcggaggccggcgaggaccgggaggctcccggcaagcggaggcgcctggggttcttggccaccgcctggctcaccttctacgacatcgccatgaccgcggggtggttggttctagctattgccatggtacgtttttatatggaaaaaggaacacacagaggtttatataaaagtattcagaagacacttaaatttttccagacatttgccttgcttgagatagttcactgtttaattggaattgtacctacttctgtgattgtgactggggtccaagtgagttcaagaatctttatggtgtggctcattactcacagtataaaaccaatccagaatgaagagagtgtggtgctttttctggtcgcgtggactgtgacagagatcactcgctattccttctacacattcagccttcttgaccacttgccatacttcattaaatgggccagatataatttttttatcatcttatatcctgttggagttgctggtgaacttcttacaatatacgctgccttgccgcatgtgaagaaaacaggaatgttttcaataagacttcctaacaaatacaatgtctcttttgactactattattttcttcttataaccatggcatcatatatacctttgtttccacaactctattttcatatgttacgtcaaagaagaaaggtgcttcatggagaggtgattgtagaaaaggatgattaaatgatctctgcaaacaaggtgctttttccagaataaccaagattacctgagtccaagttttaataacaagaataaacaactttgtgaaatatcatggattgtatggtttcttaaaatataacttgagacacgtggtatttgccagtatttgtgttcctcttgtgccagatctattttttacaagaactgtgcaaatatcagtaacttttgggtaggtattgattattaggaaaataattaggtgtattatctgggggaaaaaaaaacttttgctaagttttttttgaaacatgctcaaagctttttaaatcaatatttagaaattagtttaacgatttactattatacctgctagtgatatttatgtgatatttataaatgaaaataaatgcaaaattataacaacttgttaataa

SEQ ID NO: 383569 - DNA, 1072 bp, Homo sapiens
ggatttgctgaatgccaatgttgacagtggtttatttaatgttttctattattgacgtaatgatttttttctatttgcttacagatagttcactgtttaattggtgagtttttgcttcaattttatacttttattataaattgcctttagggcaatagttcactatagttcactgtttaattggaattgtacctacttctgtgattgtgactggggtccaagtgagttcaagaatctttatggtgtggctcattactcacagtataaaaccaatccagaatgaagagagtgtggtgctttttctggtcgcgtggactgtgacagagatcactcgctattccttctacacattcagccttcttgaccacttgccatacttcattaaatgggccagatataatttttttatcatcttatatcctgttggagttgctggtgaacttcttacaatatacgctgccttgccgcatgtgaagaaaacaggaatgttttcaataagacttcctaacaaatacaatgtctcttttgactactattattttcttcttataaccatggcatcatatatacctttgtttccacaactctattttcatatgttacgtcaaagaagaaaggtgcttcatggagaggtgattgtagaaaaggatgattaaatgatctctgcaaacaaggtgctttttccagaataaccaagattacctgagtccaagttttaataacaagaataaacaactttgtgaaatatcatggattgtatggtttcttaaaatataacttgagacacgtggtatttgccagtatttgtgttcctcttgtgccagatctattttttacaagaactgtgcaaatatcagtaacttttgggtaggtattgattattaggaaaataattaggtgtattatctgggggaaaaaaaaacttttgctaagttttttttgaaacatgctcaaagctttttaaatcaatatttagaaattagtttaacgatttactattatacctgctagtgatatttatgtgatatttataaatgaaaataaatgcaaaattataacaacttgttaataa

SEQ ID NO: 383570 - DNA, 884 bp, Homo sapiens
tatacacagcccagccagcacccaggtccttccatccttctgctgcacatggggcgcctgacggaagcggcggcagcgggcagcggctctcgggctgcaggctgggcagggtcccctcccacgctcctgccgctgtctcccacgtcccccaggtgcgcggccaccatggcgtccagcgacgaggacggcaccaacggcggcgcctcggaggccggcgaggaccgggaggctcccggcaagcggaggcgcctggggttcttggccaccgcctggctcaccttctacgacatcgccatgaccgcggggtggttggttctagctattgccatggtacgtttttatatggaaaaaggaacacacagaggtttatataaaagtattcagaagacacttaaatttttccagacatttgccttgcttgagatagttcactgtttaattggaattgtacctacttctgtgattgtgactggggtccaagtgagttcaagaatctttatggtgtggctcattactcacagtataaaaccaatataatttttttatcatcttatatcctgttggagttgctggtgaacttcttacaatatacgctgccttgccgcatgtgaagaaaacaggaatgttttcaataagacttcctaacaaatacaatgtctcttttgactactattattttcttcttataaccatggcatcatatatacctttgtttccacaactctattttcatatgttacgtcaaagaagaaaggtgcttcatggagaggtgattgtagaaaaggatgattaaatgatctctgcaaacaaggtgctttttccagaataaccaagattacctgagtccaagttttaataacaagaataaacaactttgtgaaata

SEQ ID NO: 383571 - DNA, 596 bp, Homo sapiens
acagatagttcactgtttaattggtgagtttttgcttcaattttatacttttattataaattgcctttagggcaatagttcactatagttcactgtttaattggaattgtacctacttctgtgattgtgactggggtccaagtgagttcaagaatctttatggtgtggctcattactcacagtataaaaccagtaagtgacacaaacatgttgtctacttgagcctgcaggaaagctttccattcataggaatctaaaatattaacatttgtatatttcaggaggtggaagtgttggacaaaaaggagttgggtttgagttttagatgttgtgcattgacttagtgccttagcagaatgactttgatacacaaacaaacccaaatattggcatcttagatccgtaatatattctcctttgatattttccagtttttgaaatcagtattcaggttctgtcaaataacctgcagaaaatgttcttttctatagaagtttcttttcaatccaagttgtcctctttgattatgtaatcgaagttgtcagtatacaatttattatttctggccagccgcagtggcccacacctgtaatccc

SEQ ID NO: 383572 - DNA, 1006 bp, Homo sapiens
tatacacagcccagccagcacccaggtccttccatccttctgctgcacatggggcgcctgacggaagcggcggcagcgggcagcggctctcgggctgcaggctgggcagggtcccctcccacgctcctgccgctgtctcccacgtcccccaggtgcgcggccaccatggcgtccagcgacgaggacggcaccaacggcggcgcctcggaggccggcgaggaccgggaggctcccggcaagcggaggcgcctggggttcttggccaccgcctggctcaccttctacgacatcgccatgaccgcggggtggttggttctagctattgccatggtacgtttttatatggaaaaaggaacacacagaggtttatataaaagtattcagaagacacttaaatttttccagacatttgccttgcttgagatagttcactgtttaattggaattgtacctacttctgtgattgtgactggggtccaagtgagttcaagaatctttatggtgtggctcattactcacagtataaaaccaatccagaatgaagagagtgtggtgctttttctggtcgcgtggactgtgacagagatcactcgctattccttctacacattcagccttcttgaccacttgccatacttcattaaatgggccagatataatttttttatcatcttatatcctgttggagttgctggtgaacttcttacaatatacgctgccttgccgcatgtgaagaaaacaggaatgttttcaataagacttcctaacaaatacaatgtctcttttgactactattattttcttcttataaccatggcatcatatatacctttgtttccacaactctattttcatatgttacgtcaaagaagaaaggtgcttcatggagaggtgattgtagaaaaggatgattaaatgatctctgcaaacaaggtgctttttccagaataaccaagattacctgagtccaagttttaataacaagaataaacaactttgtgaaata

SEQ ID NO: 383573 - DNA, 997 bp, Homo sapiens
  misc_feature (1)..(1): n is a, c, g, or t
ngggagagctggctgcgccgagccccctgcgcgctgcacatggggcgcctgacggaagcggcggcagcgggcagcggctctcgggctgcaggctgggcagggtcccctcccacgctcctgccgctgtctcccacgtcccccaggtgcgcggccaccatggcgtccagcgacgaggacggcaccaacggcggcgcctcggaggccggcgaggaccgggaggctcccggcaagcggaggcgcctggggttcttggccaccgcctggctcaccttctacgacatcgccatgaccgcggggtggttggttctagctattgccatggtacgtttttatatggaaaaaggaacacacagaggtttatataaaagtattcagaagacacttaaatttttccagacatttgccttgcttgagatagttcactgtttaattggaattgtacctacttctgtgattgtgactggggtccaagtgagttcaagaatctttatggtgtggctcattactcacagtataaaaccaatccagaatgaagagagtgtggtgctttttctggtcgcgtggactgtgacagagatcactcgctattccttctacacattcagccttcttgaccacttgccatacttcattaaatgggccagatataatttttttatcatcttatatcctgttggagttgctggtgaacttcttacaatatacgctgccttgccgcatgtgaagaaaacaggaatgttttcaataagacttcctaacaaatacaatgtctcttttgactactattattttcttcttataaccatggcatcatatatacctttgtttccacaactctattttcatatgttacgtcaaagaagaaaggtgcttcatggagaggtgattgtagaaaaggatgattaaatgatctctgcaaacaaggtgctttttccagaataaccaagattacctgagtccaagttttaataacaagaataaacaactttgtgaaata

SEQ ID NO: 383574 - DNA, 1346 bp, Homo sapiens
  misc_feature (1)..(1): n is a, c, g, or t
ngggagagctggctgcgccgagccccctgcgcgctgcacatggggcgcctgacggaagcggcggcagcgggcagcggctctcgggctgcaggctgggcagggtcccctcccacgctcctgccgctgtctcccacgtcccccaggtgcgcggccaccatggcgtccagcgacgaggacggcaccaacggcggcgcctcggaggccggcgaggaccgggaggctcccggcaagcggaggcgcctggggttcttggccaccgcctggctcaccttctacgacatcgccatgaccgcggggtggttggttctagctattgccatggtacgtttttatatggaaaaaggaacacacagaggtttatataaaagtattcagaagacacttaaatttttccagacatttgccttgcttgagatagttcactgtttaattggaattgtacctacttctgtgattgtgactggggtccaagtgagttcaagaatctttatggtgtggctcattactcacagtataaaaccaatccagaatgaagagagtgtggtgctttttctggtcgcgtggactgtgacagagatcactcgctattccttctacacattcagccttcttgaccacttgccatacttcattaaatgggccagatataatttttttatcatcttatatcctgttggagttgctggtgaacttcttacaatatacgctgccttgccgcatgtgaagaaaacaggaatgttttcaataagacttcctaacaaatacaatgtctcttttgactactattattttcttcttataaccatggcatcatatatacctttgtttccacaactctattttcatatgttacgtcaaagaagaaaggtgcttcatggagaggtgattgtagaaaaggatgattaaatgatctctgcaaacaaggtgctttttccagaataaccaagattacctgagtccaagttttaataacaagaataaacaactttgtgaaatatcatggattgtatggtttcttaaaatataacttgagacacgtggtatttgccagtatttgtgttcctcttgtgccagatctattttttacaagaactgtgcaaatatcagtaacttttgggtaggtattgattattaggaaaataattaggtgtattatctgggggaaaaaaaaacttttgctaagttttttttgaaacatgctcaaagctttttaaatcaatatttagaaattagtttaacgatttactattatacctgctagtgatatttatgtgatatttataaatgaaaataaagcagagcggccgttcattctatctaatagtactatcatccacctccgttga

SEQ ID NO: 383575 - DNA, 871 bp, Homo sapiens
tatacacagcccagccagcacccaggtccttccatccttctgctgcacatggggcgcctgacggaagcggcggcagcgggcagcggctctcgggctgcaggctgggcagggtcccctcccacgctcctgccgctgtctcccacgtcccccaggtgcgcggccaccatggcgtccagcgacgaggacggcaccaacggcggcgcctcggaggccggcgaggaccgggaggctcccggcaagcggaggcgcctggggttcttggccaccgcctggctcaccttctacgacatcgccatgaccgcggggtggttggttctagctattgccatggtacgtttttatatggaaaaaggaacacacagaggtttatataaaagtattcagaagacacttaaatttttccagacatttgccttgcttgagatagttcactgtttaattggaattgtacctacttctgtgattgtgactggggtccaagtgagttcaagaatctttatggtgtggctcattactcacagtataaaaccaatccagaatgaagagagtgtggtgctttttctggtcgcgtggactgtgacagagatcactcgctattccttctacacattcagccttcttgaccacttgccatacttcattaaatgggccaggtggcgatatcttgcagtttagtttctccttgtcctgtgcatgcttattttgtgtgctaacgccagagaattaaaattcgtgtttcagccccacgatgccagaatgctgttataggaggtataactggtataactaataattatacaagttatgatttgtattctaaaagcttaatgatgagagaggaatcgtattaataaatattttgagtgaaatc

SEQ ID NO: 383576 - DNA, 1112 bp, Homo sapiens
gggaaccccttagtcggccgggcattttacggagcctgcactttcaaggacagccacagcgtgtacgaagtgaggaattcctttccaccaagagcgctcattttagcgacaatacagaattccccttcctttgcctaagggagaaaggaaaggaaacattaccaggttcattcccagtgtttccctggagtaatgctagaatttacttttgtcataatgcaaaattaaaaaaaaaaaaaatacaacgaagcgatacgttgggcggatgctacgtgacagatttttccaaattttgttgcggggagagggagggaggagaattgaaaacggctcacaacaggaatgaaatgtacatttctgcagtggatttaaaaagtactgcttggttagttggaagaaaaataatttcattggaaaacagtaacagtgcattgacgtttttcttctacaactttaggtaaagaactataggtggtctcagaagataactaaatcttttacctttttgctctttcaaaagcctccccaaaatatgcataaagatgggattagaatctcaacaattctcttaaaattaccctttgcgagcaatatatttccaaaatcacatttgtaaaaatgcagtacgtctaaaagaattatttctattttaaatgaccatttacattttaaaaaatagaatgtatcttgctatggtttggaaccaaatagctgcagtttgtattgatgtcacagggatggaaaacaattttgatgaagagtaacatgtatgtacaaatcacctgccatacacactatccagttttgaacattggaatttaattaaacatttttttcttctgaagtggctttgagattacttcacttttcaaatctaattactatgagaggggggaggagagcccttagttcttccattacatccttcctccatctgaatgtttctgtgggatgctatggttaatgtgtgatgatttcactttcacttcataaacccattgtgtacctcacaagtagcaagctgaggacattttaaaattaatctttttaaaatttaggaatgcttagtaaacattttactctcataaaaatcttgcattaccactgctata

SEQ ID NO: 383577 - DNA, 900 bp, Homo sapiens
aaaactttggctaggtacgaggctggtgggatgactctgacccagggtctcatctcttttgtcaggatccatgaaactgtgactggcagcatgcaaacaggataaaatctcagcacagttcctgacggtgtccttactaccttctcagactcatcaccattacctaatattttaaggtccagttgcagagaacagagttaattctaattagtttaagcaagagaagactttccaaatgacatactaatctgaacttagaattgttgagaactgagctttgaggaagcactcccaatgccacattacagaactgggtcaaccaggagagctgcttcctcttctaagttcaggaaaccactcactcccaagtataccaatattgagagggtccagatagtgccataatcaggaatccacactaccactgctggttctctgcaacacttgtcaggcttgctacaatctacctccagttagatgttttgtaccattcctcttgccacttaagaacctcatgtctgcacactgcctcagaaaaggcacttccatgaccctgcttgctggcatttagcacagcctgcatctcacgtctgccttctctaggtgcatctacgtggccaaaattaaatcacatccagacccctagctgcaagaaagtctgagaaatatagcctctagctttctctctaatttgttacaggaggacacactaggagtgtggaatgaaggttcagcattgagttagcccatgcacccacacctgtaagcttctctgagatcaggaactccagctttgggcaacaaagaaaacatagccactgtcattattcacaggttcactcatgacctgtcatttggggtttcagcttaaattaacccgttcacccttcatttaaagta

SEQ ID NO: 383578 - DNA, 920 bp, Homo sapiens
gatggaacatgaaacttatgctgcttttgctgtgctgtgaatgaagtcatctgactctgacccagggtctcatctcttttgtcaggatccatgaaactgtgactggcagcatgcaaacaggataaaatctcagcacagttcctgacggtgtccttactaccttctcagactcatcaccattacctaatattttaaggtccagttgcagagaacagagttaattctaattagtttaagcaagagaagactttccaaatgacatactaatctgaacttagaattgttgagaactgagctttgaggaagcactcccaatgccacattacagaactgggtcaaccaggagagctgcttcctcttctaagttcaggaaaccactcactcccaagtataccaatattgagagggtccagatagtgccataatcaggaatccacactaccactgctggttctctgcaacacttgtcaggcttgctacaatctacctccagttagatgttttgtaccattcctcttgccacttaagaacctcatgtctgcacactgcctcagaaaaggcacttccatgaccctgcttgctggcatttagcacagcctgcatctcacgtctgccttctctaggtgcatctacgtggccaaaattaaatcacatccagacccctagctgcaagaaagtctgagaaatatagcctctagctttctctctaatttgttacaggaggacacactaggagtgtggaatgaaggttcagcattgagttagcccatgcacccacacctgtaagcttctctgagatcaggaactccagctttgggcaacaaagaaaacatagccactgtcattattcacaggttcactcatgacctgtcatttggggtttcagcttaaattaacccgttcacccttcatttaaagta

SEQ ID NO: 383579 - DNA, 352 bp, Homo sapiens
aaactagaaactactgaaagcctctaggtagctgggtcaggagtaagcctactgagctactgctacccagaaaaacccctcacaccaccccatgtgtcctacaataaatgtttgctaaaaaagtgtgtttgttagtgcagatgggacccccgtatgcatggattcactatctctgtgcttcaaaaagctcttgttagtcctttccagtggccaacactcagtgcagcatgtggagcataatagatatgtaataaatatctgttgaatgaatagtgaatctacagatggtctgttgggaaaactgagccatactgttcttatagtacctaccattcttcacctgtattggcaa

SEQ ID NO: 383580 - DNA, 275 bp, Homo sapiens
  misc_feature (240)..(240): n is a, c, g, or t
tgtcagacctccacgaagtggtctccctgaaggagcggatggcgaggtaccaggcagctgtttccaggggtgactgccgcagcttctctgctaatatgatggaagaatcagaaatgtgcgcagtgcctggtggtttggccaaggtgaagaaacaatttgaggacgaaattacttcttcccgtaatacctttgctcaataccaatatcaacatcagaacagatctgagcaggaggcaattntatagcagcccagggtttgcacttcaaagaaggca

SEQ ID NO: 383581 - DNA, 322 bp, Homo sapiens
agaggcttggagttcaaagtgtgtgtatacatatttttttctattccttaataaattcaaaccctaaatgctaaccatattggaacagtggactggccttcactcttcagtcttctcatgacaatgtggtgctctataaatcttgttttgcataaggacagggaaaagaagaaatcatcaactcagcagagatgtgaacttgagggccaataattgcttttacattattttccttaatgtcttgttccctactctgtcctcagatcatagcagagaacaaacaaggaggaggaagaacaggaggaggagggggaaaagagga

SEQ ID NO: 383582 - DNA, 389 bp, Homo sapiens
gaccacaggcatgcagcactatgcctggccaatttttgtattttgggtagagacagggtttcgccatgttgcccaggctggtctcgaacgcctgcctaagcctcccaaagtgctgggattacaggcgtgaaccaccccgcccagccccatgttgaactcttaactgccaagcagagaaaaaaaaatccttaccatactaagacaactttaatgatactttcacctttgggcaaagggaaagcattcttgaatatatcttaagaaccaagtcctcaaatactgatgaagattttcgacctcattcctaccaacggctgtgggttatgtgacgcatgcaaaaccaaagcataagaaaaactcaggcccaaggtagaacacatcagctacag

SEQ ID NO: 383583 - DNA, 429 bp, Homo sapiens
tattctcctgcctcagcctcctgagtagctaggattacaggggcctgccactgcgcctggctaagttttgtagttttagtagagacgggattttatcatgttggccaggctggtcttgaactcctgacctcatgatccgcctgcctaggcctgccaaagtgctgggcgtacaggcgtgagccacggcacctggcctttgtatgtttttgtaatacatgttataaaacgtatgactcaagtccttgacactttgaagagtaactggttgggtgttttgaagaatgtcccttaatttaggtttgtctaagggtttctcatgattagaatgagattatgaatttggattatgagattagaatgggaatatgcattttagtaagaatactgcagtaaatacagtaatgctggttacttaattagtaaaggttt

SEQ ID NO: 383584 - DNA, 513 bp, Homo sapiens
tcattggcaggaaacatgtcagttgcttgtttttacaaactgaaggaaatgaatgggatttgttggtttctagaatctaccttcattctctattgtcttgcaaatagttggctcagaacacttcgtttcgaaaggggctttggagtggtacaattcattctctgcaaacctgtggcatttaggtttatttctttctgattttggaattaggaaaattgatcgtggtacaaccatgtgcaacttattttcctaatacaaatgaacaagatgttcaatacaattccaaatcattttaagttgtcagctagttactcacacactcactgaagctgctgtttttggatggctatgccaaatttctaataattattccagaataccaaccaaatgccagtgtcgattttggattagtgtagagaggtaaagagaaagaggcagcttcattcttctcattgcttataacaaaaggtccataaagaatacacgttaggtatataccaaccttgctgatag

SEQ ID NO: 383585 - DNA, 461 bp, Homo sapiens
ggtgcccacctggaggagggcaggtagggaggcagctactctgcttcccagatagtggctcctgagcctgtggacctccctctggcctccagaggctagggttgcctggaaacacagctggacacaggcctcccttggcggtggccacacccaaggcaggaagacaaaggccacccatcaacagagaaatccaggttagcaaggagcccagcggttccctggcaagtggggctgaagtagggcagcgaccacgctgagtggctttccctcttccacactcacagggaaaggaatggaccccagccctgtgcaggccgggccctcatcctgggttgctgcctttccttgcaggagaagtgagcattcctgtttcacagctgggcaaactgaggtcaggggaggtcactggcgggggtcacacagccagtaagagatgaagcaggaatggagcccaggactgt

SEQ ID NO: 383586 - DNA, 469 bp, Homo sapiens
gatccctcatatgtgcagttcacaataggattcacgcttctatgagaatctaatgctgctgctgatctcacaggaggtagagctcaggtagtagtgcccgcttgtctcccgctcacctcctgctgtgtggctcagttcctaacaggccactggtaccggtctgcggcccagaggttggggacccctgccttagaagcctttgtagggacaaatatgatatggacaaatagcctatatgatagggtgattatgtcctccactctaatttcaccactattttaatttgcttgacatgtaggagttctgtctaatatttcctttgcgaaaggtttatagtgccaaaagaaaaagaaattggaaaccactgaaatgggaaaggggaaaggaaacacacccatgtggaatgctgacgctgtggtcagttctcaggtggaagttcttagaaggaagtcgggatactcatgaaaac

SEQ ID NO: 383587 - DNA, 458 bp, Homo sapiens
atactaaagcaaatgtggtaaaatattaacactggggaatcttgtaaagaatacaaagtaattatttgtaccattctctcgtctcttttatcggtctgaaattatgtttttcaaaagaatccaagtctaattatagaatcatacctgttttactgaattacattttttctcatgctaaagaatattcccaacaactgacaattttgatatacccctaacatggaatacaaatgacgcactaaataaatgaagttcaaataatcaattaaaggctatgtggactacaggatcattccaccctgtttcatatgagccaaaacagatttattagctgcaagctcaaataaagtgatctcaaatgagagttatgtcagtaaaaacactgcctcttaacaggtcagcaatgactttactcacttatattttacaaaatattttgaggatttaaaagattaaat

SEQ ID NO: 383588 - DNA, 563 bp, Homo sapiens
caagcaggtaattgccaagtacttttaccgtggttgctagtctctcgtgttttggggtatgggtgtgatagtgggaagcacaactatttgaatctcacatttagtagggttaatcagttactgattctggcagttataatagttcattatgcttgggtagaagacatgctactaagacactgagttcacctaatatacaacttcatttattatttaaaagtaactggtgcttcaaatattttaagttttttattttttacaacttattcagaaacatagtacatgacagtagacttttaaaaattgcttcttccttttggggacatgatagtactgatcccctgataggttgtctaatctgagtggtttttagtaagaatgattccatctgcacaccacccgaatcctatctgtaactaaaaggggacaattgtcaggttctctctctcctgtcagttcccaccttgtgtaccattatattactgaagggttgatactacagtttatctgttcatacatctgtctctcctactggattaggtgaccatcagttattcatcaat

SEQ ID NO: 383589 - DNA, 4452 bp, Homo sapiens
cccggaacccgcggtcgccaccgcggcggcggccccaggctggaggcgtccgggcgcctctttcctccagcctctgggactgcgctgctcgcagtctcctcgccctgcctgggcttgagaaacctagtgcataccccaaagagggtttttgtgtatgtgtgtgtttttaaagggtggctatgatgactgggccttggagatgtgagactgggaggtaaaatgcacacttgctgccccccagtaactttggaacaggaccttcacagaaaaatgcatagctggatgctgcagactctagcgtttgctgtaacatctctcgtcctttcgtgtgcagaaaccatcgattattatggggaaatctgtgacaatgcatgtccttgtgaggaaaaggacggcattttaactgtgagctgtgaaaaccgggggatcatcagtctctctgaaattagccctccccgtttcccaatctaccacctcttgttgtccggaaaccttttgaaccgtctctatcccaatgagtttgtcaattacactggggcttcaattttgcatctaggtagcaatgttatccaggacattgagaccggggctttccatgggctacggggtttgaggagattgcatctaaacaataataaactggaacttctgcgagatgataccttccttggcttggagaacctggagtacctacaggtcgattacaactacatcagcgtcattgaacccaatgcttttgggaaactgcatttgttgcaggtgcttatcctcaatgacaatcttttgtccagtttacccaacaatcttttccgttttgtgcccttaacgcacttggacctccgggggaaccggctgaaacttctgccctacgtggggctcttgcagcacatggataaagttgtggagctacagctggaggaaaacccttggaattgttcttgtgagctgatctctctaaaggattggttggacagcatctcctattcagccctggtgggggatgtagtttgtgagacccccttccgcttacacggaagggacttggacgaggtatccaagcaggaactttgcccaaggagacttatttctgactacgagatgaggccgcagacgcctttgagcaccacggggtatttacacaccaccccggcgtcagtgaattctgtggccacttcttcctctgctgtttacaaaccccctttgaagccccctaaggggactcgccaacccaacaagcccagggtgcgccccacctctcggcagccctctaaggacttgggctacagcaactatggccccagcatcgcctatcagaccaaatccccggtgcctttggagtgtcccaccgcgtgctcttgcaacctgcagatctctgatctgggcctcaacgtaaactgccaggagcgaaagatcgagagcatcgctgaactgcagcccaagccctacaatcccaagaaaatgtatctgacagagaactacatcgctgtcgtgcgcaggacagacttcctggaggccacggggctggacctcctgcacctggggaataaccgcatctcgatgatccaggaccgcgctttcggggatctcaccaacctgaggcgcctctacctgaatggcaacaggatcgagaggctgagcccggagttattctatggcctgcagagcctgcagtatctcttcctccagtacaatctcatccgcgagattcagtctggaacttttgacccggtcccaaacctccagctgctattcttgaataacaacctcctgcaggccatgccctcaggcgtcttctctggcttgaccctcctcaggctaaacctgaggagtaaccacttcacctccttgccagtgagtggagttttggaccagctgaagtcactcatccaaatcgacctgcatgacaatccttgggattgtacctgtgacattgtgggcatgaagctgtgggtggagcagctcaaagtgggcgtcctagtggacgaggtgatctgtaaggcgcccaaaaaattcgctgagaccgacatgcgctccattaagtcggagctgctgtgccctgactattcagatgtagtagtttccacgcccacaccctcctctatccaggtccctgcgaggaccagcgccgtgactcctgcggtccggttgaatagcaccggggcccccgcgagcttgggcgcaggcggaggggcgtcgtcggtgcccttgtctgtgttaattctcagcctcctgctggttttcatcatgtccgtcttcgtggccgccgggctcttcgtgctggtcatgaagcgcaggaagaagaaccagagcgaccacaccagcaccaacaactccgacgtgagctcctttaacatgcagtacagcgtgtacggcggcggcggcggcacgggcggccacccacacgcgcacgtgcatcaccgcgggcccgcgctgcccaaggtgaagacgcccgcgggccacgtgtatgaatacatcccccacccactgggccacatgtgcaaaaaccccatctaccgctcccgagagggcaactccgtagaggattacaaagacctgcacgagctcaaggtcacctacagcagcaaccaccacctgcagcagcagcagcagccgccgccgccaccgcagcagccacagcagcagcccccgccgcagctgcagctgcagcccggggaggaggagaggcgggaaagccaccacttgcggagccccgcctacagcgtcagcaccatcgagccccgggaggacctgctgtcgccggtgcaggacgccgaccgcttttacaggggcattttagaaccagacaaacactgctccaccacccccgccggcaatagcctcccggaatatcccaaattcccgtgcagccccgctgcttacactttctcccccaactatgacctgagacgcccccatcagtatttgcacccgggggcaggggacagcaggctacgggaaccggtgctctacagccccccgagtgctgtctttgtagaacccaaccggaacgaatatctggagttaaaagcaaaactaaacgttgagccggactacctcgaagtgctggaaaaacagaccacgtttagccagttctaaaagcaaagaaactctcttggagcttttgcatttaaaacaaacaagcaagcagacacacacagtgaacacatttgattaattgtgttgtttcaacgtttagggtgaagtgccttggcacgggatttctcagcttcggtggaagatacgaaaagggtgtgcaatttcctttaaaatttacacgtgggaaacatttgtgtaaactgggcacatcactttctcttcttgcgtgtggggcaggtgtggagaagggctttaaggaggccaatttgctgcgcgggtgacctgtgaaaggtcacagtcatttttgtagtggttggaagtgctaagaatggtggatgatggcagagcatagattctactcttcctcttttgcttcctccccctcccccgcccctgccccacctctctttctccccttttaagccatgggtgggtctaactggcttttgtggagaaattagcacaccccaactttaataggaaatttgttctctttttccgcccctctccttctctcctcccctcccctcccttctcattccttttctttgtttttaaaggatgtgtttgtatgcattctggacatttgaattaaaaaaaaagtattgtgatcctgtaaaggatcaccatagatgtggacaaatcattaaaattacagagctatatgatccataattgattagtcaaaataacttattgatgaaatatacaaatattttattgtagcacctatttttatatgcacatttagcattcctctttccttcactatttagcctatgattttgcagaggtgtcacactgtattaggatctgcatttctaaaactgacgtggtatcaggaaggcattttcaatcattcaaaatgtggagaatttaatggctaaatctttaaaagccaatgcaacccacccaattgaatctgcattttcttttaagaaaacagagctgattgtatcccaatgtattttaaaaaatagggcaattgattgggccattccgagagaattgtttgcaagttttgggttttattagaaaatatttgaaagtatttttattaatgaaccaaaatgacatgttcatttgactactattgtagccgattttcgattgtttaaccaaacccagttgcatttgtacagatccacgtgtactggcacctcagaagaccaaatcatggactgtacaagtctctatacaatgtctttatccctgtgggcagcaagcaatgatgataatgacaaacaggatatctgtaagatggggctactgttgttacagtctcatatgtatcccagcacatgtaattttttaaatagtttctgaataaacacttgataactatgtcaaatatga

SEQ ID NO: 383590 - DNA, 3492 bp, Homo sapiens
tgtgccgcaataaaatgtgtgaacacgtgtttctgtcgtgtgtgtcatgcacatctgtgtgttgcatagcataagccaaatgaaaatcatttgttcatgggattcatatgaggaacaaaattaaatttgaatacagtcagataactgccacgcagggcatttggggaaccatccccgaatgccctgatgtgatttccctcagaaaatccttgttattagaggagaaggtctgggcaggggcagcagcatctcagacatcaagtcaactttatcatctactacatcagcactgaagtccaggggcattgaggcactaactaggttccattttctttggtttggttacttattttttctttttgggttctcggtgtgcagaggctgtagagagagcctcagggcggtgaccgctgcaggaattcggccctccagctcccctcccagttacccaggagccgatttggagcccaggccttcccagctgagtgtctgtcagcttcattctctctcagctgtgcagtggaagagcaacaacagacaggtgaccttcttgggttgtgcttcacaatggactgggaaaaacatctttgaaatcaggaaatcaggccgggcgcagtggctcatgcctgtaagcccagcactttgggaggcggaggcgggtggatccattgaggtcaggagctcaagaccagcctggtcaacatggtgaaaccccgtctctactaaaaatacaaaaaaaaaattagctgggcgtgttggcgggagcctgtagtcccagctacacgggaggctaaggtgggagaattgcttgaacccgggaggcggaggttgcagtgagctgagattgcaccattgcactccagcctgggcgacagagcaagactctctcaaaaaaaaaaaaaaaagaaagaaagaaatcagaaaatcgaccacagtggtagccacctggcctaatgctgtgtttttgtacctgacaggggtcactcattttaggcacaactccttcattctttgtgaaattagtgagtttccttctacccgtcaccagattcaatatgttctattaatacaccgataaccacaggggaagggcacttgtcgctctcccacctggttaccacagtctccatgggtcttttgccgtgaccacaaataaaggaaacactcatcactagtatctaagtcgggctttacagtaactatgcaccttctgtgtgcttcacctcactctctacttcaaacagcccatggagggaggtattattatactccttatgttgacagtgaagaatctgaggcccagagaggttggggacttgagtaaagtcacacagccctgagaggcaggaccagggttccattcctgctctatccagttccaagcccttgtgttttccattatgtttagtgcctctttgctaacagcaacatctgcaagatttgtgttggttttgatggagaactctagctcatccacatgctagtgcccaagtggtggaggggccacctcagcaggtgggttctgaatgcagccaaggctgtccccgcaatgggtgagactcgctccaactgcccgccctcagagcaggtgcctaagtcctccctggcactggcaggccttacctcacattgctaaattaaagcaatgcaattcctcttgggtaagaggaattcctccttctttactaactgatccccagcaaggaaataaaatgttaggctttaaaaatccctactttgtcatatcagactatattctaaaactatatttgagcgaaacctgtcattgcgtctaatttcaaatatacagaatctccttaagagctgttgccttatttttttgtaaagcctctctgacatcaaatggggagaaatggtggcacctccagacaccctgaaactacacaccatttcttccctgctcagcttctgctcaggagttctgtgagctatgggaaggccattggttgtatttgctacttttactttcatcttcctctgctgtagagccatttaatgttattgtcatatgctgctggtgaggtaaaggtgggtccgggtgccttcccaggggttagaggatgttcaaagggccgatttcagcaggagttcagagggcttatgatggatggtgagagatttgacaaccaccagagcacatgtgctctgaccctctcctgggcattggttcctgctggtaccgggcggttcagaccttcaaataggttgctttcaaaagagctttcaggcacttattgagaattaatgtttaaacagacataatagcctagatgaactcccaagagatctattaaatcttgtgggctgaataaatatctcgtgcaggactgtgcaacagtagcccagagcatcctgcctgtgggcatccacctcccaggtgagggcagtgggaagctggcccgacggcagccagaacttgtttctcacctcccaccagcaaccccccacccaactctgggccccaggcacacgaagcacaagtctcaggggaccattcccacattgggggatcctgagggagcccatcaccgcctcttgcatacaactgtccactaggaggcacgcccagtgtgggagagatgtatggtcttgccttccacctgtaaaaactgcacatatgcaagccatttgcactctggaactgcatgccgtgaaaactcctaatggtgtggaacttagtttgaatttgaaatcacgccgcatgcacaaagggacaggcccaggcccgacctcaggtcatccgcccgctggctgcagagcatccctgggagccaaggcgaggcccgtggagcctgagctttgtgtagctcgagctttgtgtagctcgtgcacttattatgcaccacctcccttcagtcaccactcctcttcctccgccatcctcatttatactgattgcacaccccccgctcaaacaacaatgtccttattatgatgaccatctcgtagtggtacattccattcctatttaaggtaagcccaaagcccacttttggattttctcgactgtccgagaaaagttgtgtaagcgcctgcgttcttctgggtttggctagatagggttgtgtccctctatggaatggagagtgatgtgggcaagggtgtcattttctcgcacaatacaactcactgaggatgcttctgtagaagtgagaaacacgatgagtacattcagaattacaataactcactctcactgggtaacttctcatgatagatttgtatgatcaatacgggtctatttttatgtcaactgaacactgtagggtaccttccagtctttttcaagattgttaaattgagacaagtaattgaataatttgtcctatttttattttaaaaaaagtgaatggactgaaatgttaaatgtgaatgtacatttcttaattgcaacttttctactgagtgtttgcactatactttctggaatcttatttaacaaaaataaagggaaaaaattgcttgactaaa

SEQ ID NO: 383591 - DNA, 2484 bp, Homo sapiens
agctagactgagcaagggaagtgacaggaaatggagctggggagacaaaaatgtggataacaacaaaagaatttcaacaggtaaaaaaatgagtcaaacatctctcaaacagaaaaagaatgagcctggaatgaggtcctcaaaagagagtctagaagcagaaaaaagaaaggaatctgacaaaacaggagttcgtctgagcaatcagatgaggcgtgcagtcaatccgaatcactcgctgagatgttgccccttccagggtcactcgtcgtgtagacgctgcctttgtgcagctgagggaacagcccttggcccctgccacacaatacgtatttatattcacatgtgcctgttgtgggagcagggccagcagatcaccatgatgaggggatcacaagaatcatcactgcggaagacagactctcgagggtaccttgtgcgcagtcaatggtctagaatatcccggagcccatccaccaaggctccatccatagatgagcctagaagcaggaacaccagtgctaagctccccagcagctccacgagctcccggactccatccacctccccaagcctgcatgactcctcaccgccgccgctgtccgggcagccctcgctccagccacccgcgtcgccccagctgccccggtcgctggactcgcggcctcccacgcccccagagcccgatcctggctcccggcgcagcaccaaaatgcaagagaatccggaggcctgggcccaaggcatcgtgcgggaaatccgccagacccgggactcgcagccgctggaatattcgcgcacgtcccccaccgagtggaagtcctccagccagcgcagggggatctaccccgcctccacccagctggaccgcaactctctgtccgagcagcagcagcagcagcgggaggacgaggacgactacgaggctgcctactgggcatccatgaggtcgttctacgagaagaacccgagctgctcgcgcccctggccgcccaaacccaagaacgccatcaccattgctctctcatcctgcgcgctcttcaacatggtggacggcaggaaaatctacgagcaagagggtctggaaaagtacatggagtatcagctcaccaatgagaacgtcatcctgaccccgggcccggcgttccgcttcgtcaaggcactacagtatgtcaatgctagactccgtgatctatatcctgatgaacaggacttatttgatattgtactgatgactaataaccatgcccaagtgggagtgcggcttataaacagcgtcaatcactacggcttactgattgaccgcttctgtctgaccgggggaaaagaccccattggctatttgaaggcatatcttaccaacttgtatattgctgcagattctgaaaaagtgcaagaggcaatacaagaaggtattgcctctgcgacaatgtttgatggagccaaagacatggcttactgtgacactcagctccgtgtagcctttgatggggatgctgtcctcttctctgatgagtctgaacattttaccaaggagcatgggctcgacaaattcttccagtatgatacattatgtgaaagtaagcctcttgctcagggtcccctaaaaggctttctggaagatttaggcagactgcaaaagaagttctatgccaaaaatgaacggttactttgtcctatcaggacctacctggttacagctaggagtgcagccagttcaggcgcccgtgtgctgaagacccttcgacgctggggtctagagatagacgaagctcttttccttgctggagcccccaaaagtcccatcttggtgaagatccggccccacatcttctttgatgaccacatgttccacattgaaggggcacagaggttaggttccatcgcagcttatggctttaataaaaaattcagtagttaggggcagggaggagaaataaagtggtgatagtctggtgttacagaagccacttcttttggctctctaggataattagataggtatttcagaaaattggaccttaaaactttgcttctttggaaaggttttctcctgattttttggaaaaccttttgaaccctcaagttaccatcaaactacttctctttgaactaccaatactgttgaatgccattacacctatctctgtgtaagtcataatgatgactctttaggataagtttagaacttgaatatttgcatgcttaaggcactgttttagaagcttacttagttttataaacactgctcatttttggatgtttgtagataacaatgaattgttacccatcagcattgtagaatagtgtcttcaaaggtagaaggagtatggttaagcacactcttgaaaactggagctttgtattctgtgactgctatggctagctttgtaaccaaagcaaaatgagaatttcactctacctgcatgagtataacaattttgatactgctcatttagaaataaatcatctggttgttcctcc

SEQ ID NO: 383592 - DNA, 2669 bp, Homo sapiens
agctagactgagcaagggaagtgacaggaaatggagctggggagacaaaaatgtggataacaacaaaagaatttcaacaggtaaaaaaatgagtcaaacatctctcaaacagaaaaagaatgagcctggaatgaggtcctcaaaagagagtctagaagcagaaaaaagaaaggaatctgacaaaacaggagttcgtctgagcaatcagggatcacaagaatcatcactgcggaagacagactctcgagggtaccttgtgcgcagtcaatggtctagaatatcccggagcccatccaccaaggctccatccatagatgagcctagaagcaggaacaccagtgctaagctccccagcagctccacgagctcccggactccatccacctccccaagcctgcatgactcctcaccgccgccgctgtccgggcagccctcgctccagccacccgcgtcgccccagctgccccggtcgctggactcgcggcctcccacgcccccagagcccgatcctggctcccggcgcagcaccaaaatgcaagagaatccggaggcctgggcccaaggcatcgtgcgggaaatccgccagacccgggactcgcagccgctggaatattcgcgcacgtcccccaccgagtggaagtcctccagccagcgcagggggatctaccccgcctccacccagctggaccgcaactctctgtccgagcagcagcagcagcagcgggaggacgaggacgactacgaggctgcctactgggcatccatgaggtcgttctacgagaagaacccgagctgctcgcgcccctggccgcccaaacccaagaacgccatcaccattgctctctcatcctgcgcgctcttcaacatggtggacggcaggaaaatctacgagcaagagggtctggaaaagtacatggagtatcagctcaccaatgagaacgtcatcctgaccccgggcccggcgttccgcttcgtcaaggcactacagtatgtcaatgctagactccgtgatctatatcctgatgaacaggacttatttgatattgtactgatgactaataaccatgcccaagtgggagtgcggcttataaacagcgtcaatcactacggcttactgattgaccgcttctgtctgaccgggggaaaagaccccattggctatttgaaggcatatcttaccaacttgtatattgctgcagattctgaaaaagtgcaagaggcaatacaagaaggtattgcctctgcgacaatgtttgatggagccaaagacatggcttactgtgacactcagctccgtgtagcctttgatggggatgctgtcctcttctctgatgagtctgaacattttaccaaggagcatgggctcgacaaattcttccagtatgatacattatgtgaaagtaagcctcttgctcagggtcccctaaaaggctttctggaagatttaggcagactgcaaaagaagttctatgccaaaaatgaacggttactttgtcctatcaggacctacctggttacagctaggagtgcagccagttcaggcgcccgtgtgctgaagacccttcgacgctggggtctagagatagacgaagctcttttccttgctggagcccccaaaagtcccatcttggtgaagatccggccccacatcttctttgatgaccacatgttccacattgaaggggcacagaggttaggttccatcgcagcttatggctttaataaaaaattcagtagttaggggcagggaggagaaataaagtggtgatagtctggtgttacagaagccacttcttttggctctctaggataattagataggtatttcagaaaattggaccttaaaactttgcttctttggaaaggttttctcctgattttttggaaaaccttttgaaccctcaagttaccatcaaactacttctctttgaactaccaatactgttgaatgccattacacctatctctgtgtaagtcataatgatgactctttaggataagtttagaacttgaatatttgcatgcttaaggcactgttttagaagcttacttagttttataaacactgctcatttttggatgtttgtagataacaatgaattgttacccatcagcattgtagaatagtgtcttcaaaggtagaaggagtatggttaagcacactcttgaaaactggagctttgtattctgtgactgctatggctagctttgtaaccaaagcaaaatgagaatttcactctacctgcatgagtataacaattttgatactgctcatttagaaataaatcatctggttgttcctccagggtactttctaagataagccttaaacagaaacccctaagaaaggttctctgaaaattatttggtgggttaaatgcctctgatccacagagtttcatatttgaagtctccggctttgggcctggcaggctggcacatccatatttgtatggaaaaaaaaaaaaaagaccctacgctaccacttcaaaaagtgacatgaagtgtagtatcctggcccttcattgtcattctctcatgatttttgttttgttttcaacaaaaattggttggtcattaaatatatcatatgttaggcacagtgacctggttattttcacatgttacttcattttcttatcaaattaaatgtttgtgacatagtatta

SEQ ID NO: 383593 - DNA, 2304 bp, Homo sapiens
agctagactgagcaagggaagtgacaggaaatggagctggggagacaaaaatgtggataacaacaaaagaatttcaacaggtaaaaaaatgagtcaaacatctctcaaacagaaaaagaatgagcctggaatgaggtcctcaaaagagagtctagaagcagaaaaaagaaaggaatctgacaaaacaggagttcgtctgagcaatcagggatcacaagaatcatcactgcggaagacagactctcgagggtaccttgtgcgcagtcaatggtctagaatatcccggagcccatccaccaaggctccatccatagatgagcctagaagcaggaacaccagtgctaagctccccagcagctccacgagctcccggactccatccacctccccaagcctgcatgactcctcaccgccgccgctgtccgggcagccctcgctccagccacccgcgtcgccccagctgccccggtcgctggactcgcggcctcccacgcccccagagcccgatcctggctcccggcgcagcaccaaaatgcaagagaatccggaggcctgggcccaaggcatcgtgcgggaaatccgccagacccgggactcgcagccgctggaatattcgcgcacgtcccccaccgagtggaagtcctccagccagcgcagggggatctaccccgcctccacccagctggaccgcaactctctgtccgagcagcagcagcagcagcgggaggacgaggacgactacgaggctgcctactgggcatccatgaggtcgttctacgagaagaacccgagctgctcgcgcccctggccgcccaaacccaagaacgccatcaccattgctctctcatcctgcgcgctcttcaacatggtggacggcaggaaaatctacgagcaagagggtctggaaaagtacatggagtatcagctcaccaatgagaacgtcatcctgaccccgggcccggcgttccgcttcgtcaaggcactacagtatgtcaatgctagactccgtgatctatatcctgatgaacaggacttatttgatattgtactgatgactaataaccatgcccaagtgggagtgcggcttataaacagcgtcaatcactacggcttactgattgaccgcttctgtctgaccgggggaaaagaccccattggctatttgaaggcatatcttaccaacttgtatattgctgcagattctgaaaaagtgcaagaggcaatacaagaaggtattgcctctgcgacaatgtttgatggagccaaagacatggcttactgtgacactcagctccgtgtagcctttgatggggatgctgtcctcttctctgatgagtctgaacattttaccaaggagcatgggctcgacaaattcttccagtatgatacattatgtgaaagtaagcctcttgctcagggtcccctaaaaggctttctggaagatttaggcagactgcaaaagaagttctatgccaaaaatgaacggttactttgtcctatcaggacctacctggttacagctaggagtgcagccagttcaggcgcccgtgtgctgaagacccttcgacgctggggtctagagatagacgaagctcttttccttgctggagcccccaaaagtcccatcttggtgaagatccggccccacatcttctttgatgaccacatgttccacattgaaggggcacagaggttaggttccatcgcagcttatggctttaataaaaaattcagtagttaggggcagggaggagaaataaagtggtgatagtctggtgttacagaagccacttcttttggctctctaggataattagataggtatttcagaaaattggaccttaaaactttgcttctttggaaaggttttctcctgattttttggaaaaccttttgaaccctcaagttaccatcaaactacttctctttgaactaccaatactgttgaatgccattacacctatctctgtgtaagtcataatgatgactctttaggataagtttagaacttgaatatttgcatgcttaaggcactgttttagaagcttacttagttttataaacactgctcatttttggatgtttgtagataacaatgaattgttacccatcagcattgtagaatagtgtcttcaaaggtagaaggagtatggttaagcacactcttgaaaactggagctttgtattctgtgactgctatggctagctttgtaaccaaagcaaaatgagaatttcactctacctgcatgagtataacaattttgatactgctcatttagaaataaatcatctggttgttcctcc

SEQ ID NO: 383594 - DNA, 636 bp, Homo sapiens
gacagagtgagactccatctaaaaaaaaaaaaaaaaaaaaagcctgtcttttagttactgggtttggtattccctgattttttgaattctttgaactctaccttgaggtgtcaagtataatcctgtttttgccattattgttacaaagagcatgctgtagagaagacacattagatttccaatgacgaaagcagagatacaggaaccgagcaaagataaggatgggtgtgttaccagcaccagaaggaatggaaggataaagtacagggtttgatagttaggatggcttcagtatccatgaactatgaaagtctaccaaaaaaatagtgacagtcaaacacaggagcaaatctgattctagggcacagagtaattattcactggcctattttcattttgttggggacagtttttactataggaccatttaataatatcactccttctcaaaccattgtgaaaaccgaaagtgctcatatttatttgttagtgcattaacggaagataatgccccagtggggaattgatgtttggggagatagaatttgatggttgtatacaaaatgaataagagggatcagatttaatagggatctgctctgctttcttttttttttaatattaatacctttaata

SEQ ID NO: 383595 - DNA, 525 bp, Homo sapiens
acagagcgagtcgacgtcacaaaaaaagtcttaattttaaaaaaagaaaagaaggaacaaccccgggctgcagatcagaccgcccccctggctccctcgcaatgcgggagtgctccctccaggtcaccgtgtcccctcccgcggcaccggtaggggagctggggagatcactggcagctccaaatggtttcgtaactggattgtttgtagcggatgcacccgcgggaaggcgcaggtcccaagtgattcggcagagttcagtccaagcagaacatcctgaacccccagctcggggcagccttcatcatcttcccttgctttggtgcagcgtttcagctcaaaatcggtttggtgtggagtttaaactcaaatccctactgggccaaagaaaattcgcacccgatggctgagtgcaagtggttcacacctgtaatcccagcactttgggagaccgaggcgggcggatcgcctaggcaacacagtgaggctcctctctacaagaaaagagagaaaaaaaagtattta

SEQ ID NO: 383596 - DNA, 886 bp, Homo sapiens
gcatgtgctggcagttgctctttggagcacccacttcacttctcccatgtagttcctgagtgcaggactctcctgaagaaggggcgtctaaaaggccagcccatgcatcttgttcagaccaggctgctccatctccgctaagcccaggatccacttaacctcgtcgcgacatttctcagaagccatgacatgtccctgcggctggaggcctttcaagggtggcccaggaggcctcaagggcccggtgtggcctgcaaaggaagagaacagctgttctcacggaaggatccaaagggttcaaaggcgaagggtgccatctgcttccccactgattcagaagataaacaggagaagtgtcctgtttcacccatattgctggtcctgatttttcaatagtgtccctaccctgaagctcttccattggtcatcatggagttagctaacagcccagggaactggtctcttttcccttttcccttaccacctggaactcacctggaaagggcaatcagctggctctatatcagacgccaccacctggtctttgaagtttctgtcctaccagtgccacagctccctctcccacttctgaactacctccaagagagaccatcctcagcagcctagtatgttatgctagtcctggaatggtgtattctggatgtctactcaaggccaaaccccagtattgcctttcgtttccctattcaaggccaaggctagattctcttcattgtctccatttctctttctccagagctcctatagggcaagacactgtttctcatatatttctggatccttggagcttagctcggagcttggcatacatgcccagcatgaacttttctgaataaaataatttcaaatgctgtatacaggaaac

SEQ ID NO: 383597 - DNA, 824 bp, Homo sapiens
gcatgtgctggcagttgctctttggagcacccacttcacttctcccatgtagttcctgagtgcaggactctcctgaagaaggggcgtctaaaagaacctcgtcgcgacatttctcagaagccatgacatgtccctgcggctggaggcctttcaagggtggcccaggaggcctcaagggcccggtgtggcctgcaaaggaagagaacagctgttctcacggaaggatccaaagggttcaaaggcgaagggtgccatctgcttccccactgattcagaagataaacaggagaagtgtcctgtttcacccatattgctggtcctgatttttcaatagtgtccctaccctgaagctcttccattggtcatcatggagttagctaacagcccagggaactggtctcttttcccttttcccttaccacctggaactcacctggaaagggcaatcagctggctctatatcagacgccaccacctggtctttgaagtttctgtcctaccagtgccacagctccctctcccacttctgaactacctccaagagagaccatcctcagcagcctagtatgttatgctagtcctggaatggtgtattctggatgtctactcaaggccaaaccccagtattgcctttcgtttccctattcaaggccaaggctagattctcttcattgtctccatttctctttctccagagctcctatagggcaagacactgtttctcatatatttctggatccttggagcttagctcggagcttggcatacatgcccagcatgaacttttctgaataaaataatttcaaatgctgtatacaggaaac

SEQ ID NO: 383598 - DNA, 1041 bp, Homo sapiens
gcatgtgctggcagttgctctttggagcacccacttcacttctcccatgtagttcctgagtgcaggactctcctgaagaaggggcgtctaaaaggccagcccatgcatcttgttcagaccaggctgctccatctccgctaagcccaggatccacttgtgtgtctttctgggataattgtctttagtggcagcctgggcctcggggaaggaagggcatgaggaatggccccggctgggatgtcaggggcccaggacaactcctgtctctaccaggaaattgccccctcttttcagaggctgccttgtcctagaacctcgtcgcgacatttctcagaagccatgacatgtccctgcggctggaggcctttcaagggtggcccaggaggcctcaagggcccggtgtggcctgcaaaggaagagaacagctgttctcacggaaggatccaaagggttcaaaggcgaagggtgccatctgcttccccactgattcagaagataaacaggagaagtgtcctgtttcacccatattgctggtcctgatttttcaatagtgtccctaccctgaagctcttccattggtcatcatggagttagctaacagcccagggaactggtctcttttcccttttcccttaccacctggaactcacctggaaagggcaatcagctggctctatatcagacgccaccacctggtctttgaagtttctgtcctaccagtgccacagctccctctcccacttctgaactacctccaagagagaccatcctcagcagcctagtatgttatgctagtcctggaatggtgtattctggatgtctactcaaggccaaaccccagtattgcctttcgtttccctattcaaggccaaggctagattctcttcattgtctccatttctctttctccagagctcctatagggcaagacactgtttctcatatatttctggatccttggagcttagctcggagcttggcatacatgcccagcatgaacttttctgaataaaataatttcaaatgctgtatacaggaaac

SEQ ID NO: 383599 - DNA, 1449 bp, Homo sapiens
gcatgtgctggcagttgctctttggagcacccacttcacttctcccatgtagttcctgagtgcaggactctcctgaagaaggggcgtctaaaaggccagcccatgcatcttgttcagaccaggctgctccatctccgctaagcccaggatccacttgtgtgtctttctgggataattgtctttagtggcagcctgggcctcggggaaggaagggcatgaggaatggccccggctgggatgtcaggggcccaggacaactcctgtctctaccaggaaattgccccctcttttcagaggctgccttgtcctaggtatctgatgtcctgcccttggcagttttcaactccagatgtaggtctgactcctattaggctaccatttctttgtgggaagacaggtatgaaattgcagcattcctaattctcttaatgtgaattgtcagagccccttcagaccggtggctggggccaggcatgagaggcaggtggtaagggcaagaggagcagcccctgtgcacttggggaggctggaagggttggcgaaaggagctgaaaacaccctagattccccaaatggcatgaagagatcccagccctgaggcacctcccactcaagccggagatgagcttttcccaaaatccaactctatgaggctctcactcaatgtgggctcctgatgctgaggggacatcctgacacccctgtgttctcttctgcagaacctcgtcgcgacatttctcagaagccatgacatgtccctgcggctggaggcctttcaagggtggcccaggaggcctcaagggcccggtgtggcctgcaaaggaagagaacagctgttctcacggaaggatccaaagggttcaaaggcgaagggtgccatctgcttccccactgattcagaagataaacaggagaagtgtcctgtttcacccatattgctggtcctgatttttcaatagtgtccctaccctgaagctcttccattggtcatcatggagttagctaacagcccagggaactggtctcttttcccttttcccttaccacctggaactcacctggaaagggcaatcagctggctctatatcagacgccaccacctggtctttgaagtttctgtcctaccagtgccacagctccctctcccacttctgaactacctccaagagagaccatcctcagcagcctagtatgttatgctagtcctggaatggtgtattctggatgtctactcaaggccaaaccccagtattgcctttcgtttccctattcaaggccaaggctagattctcttcattgtctccatttctctttctccagagctcctatagggcaagacactgtttctcatatatttctggatccttggagcttagctcggagcttggcatacatgcccagcatgaacttttctgaataaaataatttcaaatgctgtatacaggaaac

SEQ ID NO: 383600 - DNA, 1127 bp, Homo sapiens
gcatgtgctggcagttgctctttggagcacccacttcacttctcccatgtagttcctgagtgcaggactctcctgaagaaggggcgtctaaaaggccagcccatgcatcttgttcagaccaggctgctccatctccgctaagcccaggatccacttgtgtgtctttctgggataattgtctttagtggcagcctgggcctcggggaaggaagggcatgaggaatggccccggctgggatgtcaggggcccaggacaactcctgtctctaccaggaaattgccccctcttttcagaggctgccttgtcctaggtatctgatgtcctgcccttggcagttttcaactccagatgtaggtctgactcctattaggctaccatttctttgtgggaagacagaacctcgtcgcgacatttctcagaagccatgacatgtccctgcggctggaggcctttcaagggtggcccaggaggcctcaagggcccggtgtggcctgcaaaggaagagaacagctgttctcacggaaggatccaaagggttcaaaggcgaagggtgccatctgcttccccactgattcagaagataaacaggagaagtgtcctgtttcacccatattgctggtcctgatttttcaatagtgtccctaccctgaagctcttccattggtcatcatggagttagctaacagcccagggaactggtctcttttcccttttcccttaccacctggaactcacctggaaagggcaatcagctggctctatatcagacgccaccacctggtctttgaagtttctgtcctaccagtgccacagctccctctcccacttctgaactacctccaagagagaccatcctcagcagcctagtatgttatgctagtcctggaatggtgtattctggatgtctactcaaggccaaaccccagtattgcctttcgtttccctattcaaggccaaggctagattctcttcattgtctccatttctctttctccagagctcctatagggcaagacactgtttctcatatatttctggatccttggagcttagctcggagcttggcatacatgcccagcatgaacttttctgaataaaataatttcaaatgctgtatacaggaaac

SEQ ID NO: 383601 - DNA, 336 bp, Homo sapiens
tggaataaggttaagtaaaggttaagtaaaaatgtggaatataatatcttacacaaacattacaatctcatgtaagtataaaaatatgtataaaaataaaaatacatgaatgtgctaatagtaactgtctctgcatggtggcattggtgggaggagtattttcttctcattttctgtattttccgtattttaaaccatttaaatgtaaagagtctatgaatgggattatgtggaggagaaagaagcaaagactgatctggccaaacatgcaggagtccattacagtttggggcagcagctgtgttggcagaagtgagtctgggtgggcccggcagg

SEQ ID NO: 383602 - DNA, 506 bp, Homo sapiens
ggtgacggccgtcgtgagggaacacgggacgcccacgtgccctccaccacctcctcccacggcaaccctcgcagagtagccaggaccacattcggatccggactctgaaatgacagtcccacaaccaacagcatcgatgtggtcttcttaatgatcagaaacacacaggggattaatttactcttattctgcaaaataaacaagctctcaaattctttaaaggtgaatcccccccaaccgtcctccctccccagttacttcctccctaggacaccagtggaacatcccatgctctcccccttccatgttgataccgaataaaacacactgcatcagaagacccacgcatacgagtccaggggctgctacaaagcacggcgacgtctccgcggcgagctggccactccatggtcccggcgcagacactggggcaggcgccggctctgtcgtcgaggcgctcacaggcaggcacacgtgagctcctggaggacagggagagcggccgc

SEQ ID NO: 383603 - DNA, 471 bp, Homo sapiens
aaatcactattaaataggtttacatcacacaatctactacttataactttaaaattctgcttttgaatctgtctttttcaaagttcccttctttaccattctccttttggaagaagcatcctggcctccaggattccctggttatcatcaacacaaaacaattccactttaaggcataccagatgcattttagtgattgaaaaaactacgtcatgcaaataaccgtatctaccctccccagagaacaatcacacatcaatccagtctagtgtttcttgagcatgctctttgacatcttccctcctacttgaaaaaacaaaagtatttcaccatcaggactttgtagttctttggtccaatgctctactaatgtaattcaactccccttcaggtttctgctttgtttcccattttccgtttctccaacaattggccttttcgctctgtgctgtctgcttgccatttttccac

SEQ ID NO: 383604 - DNA, 456 bp, Homo sapiens
tattgtgtccagaattgtttccttccggtgggttcttggtctcgctaacttcaagaatgaagctgtggaccctcgcggacaccactggagacactggttattttagcaaggctttaactggattgccatactttcagatatgaacagatggcttcaacaaatcaaagttgacttatagagccaattaaagccccttgggaaaaactggcctgataccttgtccatgcagtccctgtacagggtttcctgacttgtgctaagtaaagaaggtcactttttgacaggctcaggagccccaggttaccttgggacttcaaaaggaaagggattcactcaatccatgcagttatttgcaggcaccaataaatctgtggctgggctcgaagctttaaaaggtttaatccaagattccgtataaataaaaattccagcaaagccaagttgcaaaggaactta

SEQ ID NO: 383605 - DNA, 345 bp, Homo sapiens
tgggcaacagaacaagaccctgtctctaaaaaaaattttttggctgagtgaggtggctcatgcctgtaatcccagcattttgggattacaggtgtgagccaccgcaccagccctaattttgctttctgctagcccttggctctgccatgtagttaattcctcattagcttcagatctcccagagtttcctgaaaatctccctggccccctgaagatcagaccgtagcaccccagcttctcctcaagactgaccaatatggaactccaatcacttggtggtggtctgatgtgtgtccatgctccccatccttctgagaccaggtatcaacaggagataatcacagg

SEQ ID NO: 383606 - DNA, 1055 bp, Homo sapiens
agagacgaggatgtgcgtgggggctcggcggctgggccgcgggccgtgtgcggctctgctcctcctgggcctggggctgagcaccgtgacggggctccactgtgtcggggacacctaccccagcaacgaccggtgctgccacgagtgcaggccaggcaacgggatggtgagccgctgcagccgctcccagaacacggtgtgccgtccgtgcgggccgggcttctacaacgacgtggtcagctccaagccgtgcaagccctgcacgtggtgtaacctcagaagtgggagtgagcggaagcagctgtgcacggccacacaggacacagtctgccgctgccgggcgggcacccagcccctggacagctacaagcctggagttgactgtgccccctgccctccagggcacttctccccaggcgacaaccaggcctgcaagccctggaccaactgcaccttggctgggaagcacaccctgcagccggccagcaatagctcggacgcaatctgtgaggacagggaccccccagccacgcagccccaggagacccagggccccccggccaggcccatcactgtccagcccactgaagcctggcccagaacctcacagggaccctccacccggcccgtggaggtccccgggggccgtgcggttgccgccatcctgggcctgggcctggtgctggggctgctgggccccctggccatcctgctggccctgtacctgctccggagggaccagaggctgccccccgatgcccacaagccccctgggggaggcagtttccggacccccatccaagaggagcaggccgacgcccactccaccctggccaagatctgacctgggcccaccaaggtggacgctgggccccgccaggctggagcccggagggtctgctgggcgagcagggcaggtgcaggccgcctgccccgccacgctcctgggccaactctgcaccgttctaggtgccgatggctgcctccggctctctgcttacgtatgccatgcatacctcctgccccgcgggaccacaataaaaaccttggcagac

SEQ ID NO: 383607 - DNA, 881 bp, Homo sapiens
cccaggggcaccccctctccctccgggggcccagactcggcccaggccacgtggagtcggggagaccacgctggccatgtggcctggccttgctggcctgagcagaagtgggagtgagcggaagcagctgtgcacggccacacaggacacagtctgccgctgccgggcgggcacccagcccctggacagctacaagcctggagttgactgtgccccctgccctccagggcacttctccccaggcgacaaccaggcctgcaagccctggaccaactgcaccttggctgggaagcacaccctgcagccggccagcaatagctcggacgcaatctgtgaggacagggaccccccagccacgcagccccaggagacccagggccccccggccaggcccatcactgtccagcccactgaagcctggcccagaacctcacagggaccctccacccggcccgtggaggtccccgggggccgtgcggttgccgccatcctgggcctgggcctggtgctggggctgctgggccccctggccatcctgctggccctgtacctgctccggagggaccagaggctgccccccgatgcccacaagccccctgggggaggcagtttccggacccccatccaagaggagcaggccgacgcccactccaccctggccaagatctgacctgggcccaccaaggtggacgctgggccccgccaggctggagcccggagggtctgctgggcgagcagggcaggtgcaggccgcctgccccgccacgctcctgggccaactctgcaccgttctaggtgccgatggctgcctccggctctctgcttacgtatgccatgcatacctcctgccccgcgggaccacaataaaaaccttggcagac

SEQ ID NO: 383608 - DNA, 1363 bp, Homo sapiens
agagacgaggatgtgcgtgggggctcggcggctgggccgcgggccgtgtgcggctctgctcctcctgggcctggggctgagcaccgtgacggggctccactgtgtcggggacacctaccccagcaacgaccggtgctgccacgagtgcaggccaggcaacgggatggtgagccgctgcagccgctcccagaacacggtgtgccgtccgtgcgggccgggcttctacaacgacgtggtcagctccaagccgtgcaagccctgcacgtggtgtaacctcagaagtgggagtgagcggaagcagctgtgcacggccacacaggacacagtctgccgctgccgggcgggcacccagcccctggacagctacaagcctggagttgactgtgccccctgccctccagggcacttctccccaggcgacaaccaggcctgcaagccctggaccaactgcaccttggctgggaagcacaccctgcagccggccagcaatagctcggacgcaatctgtgaggacagggaccccccagccacgcagccccaggagacccagggccccccggccaggcccatcactgtccagcccactgaagcctggcccagaacctcacagggaccctccacccggcccgtggaggtccccgggggccgtgcggttgccgccatcctgggcctgggcctggtgctggggctgctgggccccctggccatcctgctggccctgtacctgctccggagggaccagaggctgccccccgatgcccacaagccccctgggggaggcagtttccggacccccatccaagaggagcaggccgacgcccactccaccctggccaagatctgacctgggcccaccaaggtggacgctgggccccgccaggctggagcccggagggtctgctgggcggggcccagcgtccaccttggtgggcccaggtcagatcttggccagggtggagtggggcccagcataacatacagtgccgccaccagccccctgagccctgtttccccccactactcttccaaatttgtggagacagggctcagggggctggtggcggcactgtatgttatgctgggcatgacggccatgacttcggctatcttctgttttaggtccttgatttcctgatctttctgaaggatttgtccttgggcaatctcgagctgccgctttgcatcgcccagtgcggagaacaggtccagcttgattctcgtctctgcacttaagctgttctccaggtgcgtgtgatttgtcaaaagaaagccttctggatgctgttaagatgtacccttcaggtgaacctggtatcagacccacagtacttgctgtttgagaaaaaataaaaacaaaaaggtc

SEQ ID NO: 383609 - DNA, 608 bp, Homo sapiens
taatgagtgagaatctacacgtttaatttggagggtgtgagaacatcattttcttagtttgcaaaggctactgtcacaaattcccatggactggatgacttagaatgacagaaatttgttctctcatgcttctggagactagtgtgtgaaatcagggtgtcggcaggaccacactcccctgaaggctctgggtgggaagcagagggcggccctggcttctggggtcgcctgtgtcctgggctttgcttggtctgtggccacctccctcggttccctgcctccaggttcacatggccttctccacatctgttcaaatttctctctgcttacaagacaaccgtcatttgactggccctgtgtgaatcccatccaactttgtcttaactcaattgcagttacaaagaccctattttcaaataaggttgcatgatagcttctgggtgagtatgaatttgcagggagacactcttcaacccaatctgatcgcatttcatgtatgtacagaaatcttagaaataacacagtggcactctctactgacttcctctgcttacacgaaggtaatgttcagagaaatggtatggatgcatgggatgaggatccaactg

SEQ ID NO: 383610 - DNA, 231 bp, Homo sapiens
tttacttaattggtatagattgaggatcatgcatcagcaagcagttttgaaattgttcccaagtgattcttacctgcagcctgggtaagaagtcgcagggctcctggatagtcattaagtgaactgtggtaagcactgatgtagcaggattacctgccctactaggtgccggaactgcatttacttgctcacaagtaatttttttaaatgtatgctcgcatccctgccttg

SEQ ID NO: 383611 - DNA, 367 bp, Homo sapiens
tttcagaaatgaacatagtaaatgccaaattaaccttttgtggaagtagtccccacttatccactgttctcttcatgctttgagttacctacagtcaactgcagcttgaaaatattaaatggaagattccaaaaatgaacagtgtatatttcagttgcaccttgctctaaggattgtgatgaaatctcgtgctgtcccgctctgtcttgcccggtgcatgaatcatccctttgtctagcatttctacactgtatatactacccatctgtaagtcacccagtagctgtctccgttagatggagaaaacataggtgtgtaaggtttggtactatctggggtttcagggatccactgggggtcttagaac

SEQ ID NO: 383612 - DNA, 2684 bp, Homo sapiens
caggctggtacgcgccggaacggtcttatgatgcgcgggagcggacttaccttaccttctctgccttcggcgcgcttctcagccgggccgccgacccaaaggagccgtccgactatgtctaacatggagaaacacctgttcaacctgaagttcgcggccaaagaactgagtaggagtgccaaaaaatgcgataaggaggaaaaggccgaaaaggccaaaattaaaaaggccattcagaagggcaacatggaagttgcgaggatacacgccgaaaatgccatccgccagaagaaccaggcggtgaatttcttgagaatgagtgcgcgagtcgatgcagtggctgccagggtccagacggcggtgacgatgggcaaggtgaccaagtcgatggctggtgtggttaagtcgatggatgcgacattgaagaccatgaatctggagaagatttctgctttgatggacaaattcgagcaccagtttgagactctggacgtccagacgcagcaaatggaagacacgatgagcagcacgacgacgctcaccactccccagaaccaagtggatatgctgctccaggaaatggcagatgaggcgggcctcgacctcaacatggagctgccgcagggccagaccggctccgtgggcacgagcgtggcttcggcggagcaggatgaactgtctcagagactggcccgccttcgggatcaagtgtgacggcagaacccgctctgaggtttcctggccatagccaccctttgaaatgctctctgtgtgttagagagatactataccctagaaactctgaacacgccagaatgctgaaatgcccttctacctttgggtttacagccccctccacataaattaagaaattcagtatttctgcactcttagctggattctaaagttctgtatagctcgtaatgatggtatttttatagcagccttttaacagaactagttaatttcgtgtatatgaatctttctcgaagatctggtcaaaactgtattcagtttcctgcccagaatgatcagattgaaggtggttggtttttattattatttagtgtgattgatagtatctagaatggcaggtggtgcataaaagttaaagagaggggaaagattacttagtttggttatacagttataaacaccatgcagtgtattcggtggactgtgctatttctgtttatcctttgggttttggtttttgttttttttttttgccttcacagtgagactgcaaatgattgttctcataacgtatattattaataaatgtggtcctataatttatactgaaattaccttaggatatttttgcataatactctcttactgcttacattctataaatttttcacgtgataattgtctttgcgtaactgggaaaaatgccgaataacttcctttattatctggaaaaattaaatttgttcatttatattttctacttactaaattgagtttttaaaaagacttagtgtgacatttgacagtgtctttcaaacgaacttctctaacaagtttatagttattttcctgtttcaacactattagaagtcttataaattatgctaattagcatggcagtcatgttacacactcttaacattgccaaagaactgttgatttcgtttgagaaaaccctgggactgtgtgtgtgtaggttttgttttgattttaacaaccaaaaatagaaataaaattagaactgcgttttaagttctaatttgcatttattaatttgtccaaaagcaagaactcttggaaatccttgaaaatataagctggaatgttttacttagccatgcaagtcatttatgtatacatccagccagctggaaatctgagaagtaaagaggtaggactggaaggaaggagaaagcttgagtctttaaggctagagcccagctgtgctgcctgccatcttctcaggaatggcagtgcgtattttctggctgaaaagtaaagcatgtatccaccgctttctcatagcctcgaaacatggagaaaagcaacttgcttttgccttggcaagcatgctaacctaagttaattcaagttttttttaacttaccctttccttcactggaagatttttccataagagaattccattgtttcagaaaataattataggggcccttccaagttctttgaaagattcataaccaactattcactattataacatgtttcccagtgtaaatgagtaaggaaaaaaaaagtgtaacaggtgcgtgcagatgaggagtgaccctcatatttaagttattttatatttgactggacattgttcagaagtgtgctttaagggacacttgttggttgtctgcccagcatctctcaagaatatccctcctgtcctccacatggttgtgcagggccatgtgtgaagacagcatgagtcttaacccctcttttattttatttttgagacagagtctcgctctgttgcccaggctggagtgctgtggcgcgatctctgctcactgcaacctccacctcccgggttcaagtgattctcctgcctcagcctgccgagtagctggaattacaggtgtgcaccaccatgcccagctagtttttttgtatttttagtagagacagggtttcactatgttggccaggctggtcttgaactcctgacctcaggtgatccgcccacctcagcctcc

SEQ ID NO: 383613 - DNA, 1289 bp, Homo sapiens
agtgggaaaaacaaaggagcggcggccgggagcggacttaccttaccttctctgccttcggcgcgcttctcagccgggccgccgacccaaaggagccgtccgactatgtctaacatggagaaacacctgttcaacctgaagttcgcggccaaagaactgagtaggagtgccaaaaaatgcgataaggaggaaaaggccgaaaaggccaaaattaaaaaggccattcagaagggcaacatggaagttgcgaggatacacgccgaaaatgccatccgccagaagaaccaggcggtgaatttcttgagaatgagtgcgcgagtcgatgcagtggctgccagggtccagacggcggtgacgatgggcaaggtgaccaagtcgatggctggtgtggttaagtcgatggatgcgacattgaagaccatgaatctggagaagatttctgctttgatggacaaattcgagcaccagtttgagactctggacgtccagacgcagcaaatggaagacacgatgagcagcacgacgacgctcaccactccccagaaccaagtggatatgctgctccaggaaatggcagatgaggcgggcctcgacctcaacatggagctgccgcagggccagaccggctccgtgggcacgagcgtggcttcggcggagcaggatgaactgtctcagagactggcccgccttcgggatcaagtgtgacggcagaacccgctctgaggtttcctggccatagccaccctttgaaatgctctctgtgtgttagagagatactataccctagaaactctgaacacgccagaatgctgaaatgcccttctacctttgggtttacagccccctccacataaattaagaaattcagtatttctgcactcttagctggattctaaagttctgtatagctcgtaatgatggtatttttatagcagccttttaacagaactagttaatttcgtgtatatgaatctttctcgaagatctggtcaaaactgtattcagtttcctgcccagaatgatcagattgaaggtggttggtttttattattatttagtgtgattgatagtatctagaatggcaggtggtgcataaaagttaaagagaggggaaagattacttagtttggttatacagttataaacaccatgcagtgtattcggtggactgtgctatttctgtttatcctttgggttttggtttttgttttttttttttgccttcacagtgagactgcaaatgattgttctcataacgtatattattaataaatgtggtcctataattt

SEQ ID NO: 383614 - DNA, 2583 bp, Homo sapiens
cggacgcgtgggtcgacccacgcgtcggaaacacctgttcaacctgaagttcgcggccaaagaactgagtaggagtgccaaaaaatgcgataaggaggaaaaggccgaaaaggccaaaattaaaaaggccattcagaagggcaacatggaagttgcgaggatacacgccgaaaatgccatccgccagaagaaccaggcggtgaatttcttgagaatgagtgcgcgagtcgatgcagtggctgccagggtccagacggcggtgacgatgggcaaggtgaccaagtcgatggctggtgtggttaagtcgatggatgcgacattgaagaccatgaatctggagaagatttctgctttgatggacaaattcgagcaccagtttgagactctggacgtccagacgcagcaaatggaagacacgatgagcagcacgacgacgctcaccactccccagaaccaagtggatatgctgctccaggaaatggcagatgaggcgggcctcgacctcaacatggagctgccgcagggccagaccggctccgtgggcacgagcgtggcttcggcggagcaggatgaactgtctcagagactggcccgccttcgggatcaagtgtgacggcagaacccgctctgaggtttcctggccatagccaccctttgaaatgctctctgtgtgttagagagatactataccctagaaactctgaacacgccagaatgctgaaatgcccttctacctttgggtttacagccccctccacataaattaagaaattcagtatttctgcactcttagctggattctaaagttctgtatagctcgtaatgatggtatttttatagcagccttttaacagaactagttaatttcgtgtatatgaatctttctcgaagatctggtcaaaactgtattcagtttcctgcccagaatgatcagattgaaggtggttggtttttattattatttagtgtgattgatagtatctagaatggcaggtggtgcataaaagttaaagagaggggaaagattacttagtttggttatacagttataaacaccatgcagtgtattcggtggactgtgctatttctgtttatcctttgggttttggtttttgttttttttttttgccttcacagtgagactgcaaatgattgttctcataacgtatattattaataaatgtggtcctataatttatactgaaattaccttaggatatttttgcataatactctcttactgcttacattctataaatttttcacgtgataattgtctttgcgtaactgggaaaaatgccgaataacttcctttattatctggaaaaattaaatttgttcatttatattttctacttactaaattgagtttttaaaaagacttagtgtgacatttgacagtgtctttcaaacgaacttctctaacaagtttatagttattttcctgtttcaacactattagaagtcttataaattatgctaattagcatggcagtcatgttacacactcttaacattgccaaagaactgttgatttcgtttgagaaaaccctgggactgtgtgtgtgtaggttttgttttgattttaacaaccaaaaatagaaataaaattagaactgcgttttaagttctaatttgcatttattaatttgtccaaaagcaagaactcttggaaatccttgaaaatataagctggaatgttttacttagccatgcaagtcatttatgtatacatccagccagctggaaatctgagaagtaaagaggtaggactggaaggaaggagaaagcttgagtctttaaggctagagcccagctgtgctgcctgccatcttctcaggaatggcagtgcgtattttctggctgaaaagtaaagcatgtatccaccgctttctcatagcctcgaaacatggagaaaagcaacttgcttttgccttggcaagcatgctaacctaagttaattcaagttttttttaacttaccctttccttcactggaagatttttccataagagaattccattgtttcagaaaataattataggggcccttccaagttctttgaaagattcataaccaactattcactattataacatgtttcccagtgtaaatgagtaaggaaaaaaaaagtgtaacaggtgcgtgcagatgaggagtgaccctcatatttaagttattttatatttgactggacattgttcagaagtgtgctttaagggacacttgttggttgtctgcccagcatctctcaagaatatccctcctgtcctccacatggttgtgcagggccatgtgtgaagacagcatgagtcttaacccctcttttattttatttttgagacagagtctcgctctgttgcccaggctggagtgctgtggcgcgatctctgctcactgcaacctccacctcccgggttcaagtgattctcctgcctcagcctgccgagtagctggaattacaggtgtgcaccaccatgcccagctagtttttttgtatttttagtagagacagggtttcactatgttggccaggctggtcttgaactcctgacctcaggtgatccgcccacctcagcctcc

SEQ ID NO: 383615 - DNA, 1154 bp, Homo sapiens
agtgggaaaaacaaaggagcggcggccgggagcggacttaccttaccttctctgccttcggcgcgcttctcagccgggccgccgacccaaaggagccgtccgactatgtctaacatggagaaacacctgttcaacctgaagttcgcggccaaagaactgagtaggagtgccaaaaaatgcgataaggaggaaaaggccgaaaaggccaaaattaaaaaggccattcagaagggcaacatggaagttgcgaggatacacgccgaaaatgccatccgccagaagaaccaggcggtgaatttcttgagaatgagtgcgcgagtcgatgcagtggctgccagggtccagacggcggtgacgatgggcaaggtgaccaagtcgatggctggtgtggttaagtcgatggatgcgacattgaagaccatgaatctggagaagatttctgctttgatggacaaattcgagcaccagtttgagactctggacgtccagacgcagcaaatggaagacacgatgagcagcacgacgacgctcaccactccccagaaccaagtggatatgctgctccaggaaatggcagatgaggcgggcctcgacctcaacatggagctgccgcagggccagaccggctccgtgggcacgagcgtggcttcggcggagcaggatgaactgtctcagagactggcccgccttcgggatcaagtgtgacggcagaacccgctctgaggtttcctggccatagccaccctttgaaatgctctctgtgtgttagagagatactataccctagaaactctgaacacgccagaatgctgaaatgcccttctacctttgggtttacagccccctccacataaattaagaaattcagtatttctgcactcttagctggattctaaagttctgtatagctcgtaatgatggtatttttatagcagccttttaacagaactagttaatttcgtgtatatgaatctttctcgaagatctggtcaaaactgtattcagtttcctgcccagaatgatcagattgaaggtggttggtttttattattatttagtgtgattgatagtatctagaatggcaggtggtgcataaaagttaaagagaggggctcgttacggcgctcgttacggaggggtacgggctcgaattc

SEQ ID NO: 383616 - DNA, 1985 bp, Homo sapiens
  misc_feature (21)..(21): n is a, c, g, or t
  misc_feature (72)..(72): n is a, c, g, or t
gacagagatttcgagatgccncttggatcagggcgcagaccgttgagttctgcatagcaccttgaatgtttnggtgtagagagatactataccctagaaactctgaacacgccagaatgctgaaatgcccttctacctttgggtttacagccccctccacataaattaagaaattcagtatttctgcactcttagctggattctaaagttctgtatagctcgtaatgatggtatttttatagcagccttttaacagaactagttaatttcgtgtatatgaatctttctcgaagatctggtcaaaactgtattcagtttcctgcccagaatgatcagattgaaggtggttggtttttattattatttagtgtgattgatagtatctagaatggcaggtggtgcataaaagttaaagagaggggaaagattacttagtttggttatacagttataaacaccatgcagtgtattcggtggactgtgctatttctgtttatcctttgggttttggtttttgttttttttttttgccttcacagtgagactgcaaatgattgttctcataacgtatattattaataaatgtggtcctataatttatactgaaattaccttaggatatttttgcataatactctcttactgcttacattctataaatttttcacgtgataattgtctttgcgtaactgggaaaaatgccgaataacttcctttattatctggaaaaattaaatttgttcatttatattttctacttactaaattgagtttttaaaaagacttagtgtgacatttgacagtgtctttcaaacgaacttctctaacaagtttatagttattttcctgtttcaacactattagaagtcttataaattatgctaattagcatggcagtcatgttacacactcttaacattgccaaagaactgttgatttcgtttgagaaaaccctgggactgtgtgtgtgtaggttttgttttgattttaacaaccaaaaatagaaataaaattagaactgcgttttaagttctaatttgcatttattaatttgtccaaaagcaagaactcttggaaatccttgaaaatataagctggaatgttttacttagccatgcaagtcatttatgtatacatccagccagctggaaatctgagaagtaaagaggtaggactggaaggaaggagaaagcttgagtctttaaggctagagcccagctgtgctgcctgccatcttctcaggaatggcagtgcgtattttctggctgaaaagtaaagcatgtatccaccgctttctcatagcctcgaaacatggagaaaagcaacttgcttttgccttggcaagcatgctaacctaagttaattcaagttttttttaacttaccctttccttcactggaagatttttccataagagaattccattgtttcagaaaataattataggggcccttccaagttctttgaaagattcataaccaactattcactattataacatgtttcccagtgtaaatgagtaaggaaaaaaaaagtgtaacaggtgcgtgcagatgaggagtgaccctcatatttaagttattttatatttgactggacattgttcagaagtgtgctttaagggacacttgttggttgtctgcccagcatctctcaagaatatccctcctgtcctccacatggttgtgcagggccatgtgtgaagacagcatgagtcttaacccctcttttattttatttttgagacagagtctcgctctgttgcccaggctggagtgctgtggcgcgatctctgctcactgcaacctccacctcccgggttcaagtgattctcctgcctcagcctgccgagtagctggaattacaggtgtgcaccaccatgcccagctagtttttttgtatttttagtagagacagggtttcactatgttggccaggctggtcttgaactcctgacctcaggtgatccgcccacctcagcctcc

SEQ ID NO: 383617 - DNA, 759 bp, Homo sapiens
agtgggaaaaacaaaggagcggcggccgggagcggacttaccttaccttctctgccttcggcgcgcttctcagccgggccgccgacccaaaggagccgtccgactatgtctaacatggagaaacacctgttcaacctgaagttcgcggccaaagaactgagtaggagtgccaaaaaatgcgataaggaggaaaaggccgaaaaggccaaaattaaaaaggccattcagaagggcaacatggaagttgcgaggatacacgccgaaaatgccatccgccagaagaaccaggcggtgaatttcttgagaatgagtgcgcgagtcgatgcagtggctgccagggtccagacggcggtgacgatgggcaaggtgaccaagtcgatggctggtgtggttaagtcgatggatgcgacattgaagaccatgaatctggagaagatttctgctttgatggacaaattcgagcaccagtttgagactctggacgtccagacgcagcaaatggaagacacgatgagcagcacgacgacgctcaccactccccagaaccaagtggatatgctgctccaggaaatggcagatgaggcgggcctcgacctcaacatggagctgccgcagggccagaccggctccgtgggcacgagcgtggcttcggcggagcaggatgaactgtctcagagactggcccccgccttttcggggaatcaagtggtgtacccgggcagaaaacccccgcttcctggaggggttttctccctgggg

SEQ ID NO: 383618 - DNA, 2675 bp, Homo sapiens
agtgggaaaaacaaaggagcggcggccgggagcggacttaccttaccttctctgccttcggcgcgcttctcagccgggccgccgacccaaaggagccgtccgactatgtctaacatggagaaacacctgttcaacctgaagttcgcggccaaagaactgagtaggagtgccaaaaaatgcgataaggaggaaaaggccgaaaaggccaaaattaaaaaggccattcagaagggcaacatggaagttgcgaggatacacgccgaaaatgccatccgccagaagaaccaggcggtgaatttcttgagaatgagtgcgcgagtcgatgcagtggctgccagggtccagacggcggtgacgatgggcaaggtgaccaagtcgatggctggtgtggttaagtcgatggatgcgacattgaagaccatgaatctggagaagatttctgctttgatggacaaattcgagcaccagtttgagactctggacgtccagacgcagcaaatggaagacacgatgagcagcacgacgacgctcaccactccccagaaccaagtggatatgctgctccaggaaatggcagatgaggcgggcctcgacctcaacatggagctgccgcagggccagaccggctccgtgggcacgagcgtggcttcggcggagcaggatgaactgtctcagagactggcccgccttcgggatcaagtgtgacggcagaacccgctctgaggtttcctggccatagccaccctttgaaatgctctctgtgtgttagagagatactataccctagaaactctgaacacgccagaatgctgaaatgcccttctacctttgggtttacagccccctccacataaattaagaaattcagtatttctgcactcttagctggattctaaagttctgtatagctcgtaatgatggtatttttatagcagccttttaacagaactagttaatttcgtgtatatgaatctttctcgaagatctggtcaaaactgtattcagtttcctgcccagaatgatcagattgaaggtggttggtttttattattatttagtgtgattgatagtatctagaatggcaggtggtgcataaaagttaaagagaggggaaagattacttagtttggttatacagttataaacaccatgcagtgtattcggtggactgtgctatttctgtttatcctttgggttttggtttttgttttttttttttgccttcacagtgagactgcaaatgattgttctcataacgtatattattaataaatgtggtcctataatttatactgaaattaccttaggatatttttgcataatactctcttactgcttacattctataaatttttcacgtgataattgtctttgcgtaactgggaaaaatgccgaataacttcctttattatctggaaaaattaaatttgttcatttatattttctacttactaaattgagtttttaaaaagacttagtgtgacatttgacagtgtctttcaaacgaacttctctaacaagtttatagttattttcctgtttcaacactattagaagtcttataaattatgctaattagcatggcagtcatgttacacactcttaacattgccaaagaactgttgatttcgtttgagaaaaccctgggactgtgtgtgtgtaggttttgttttgattttaacaaccaaaaatagaaataaaattagaactgcgttttaagttctaatttgcatttattaatttgtccaaaagcaagaactcttggaaatccttgaaaatataagctggaatgttttacttagccatgcaagtcatttatgtatacatccagccagctggaaatctgagaagtaaagaggtaggactggaaggaaggagaaagcttgagtctttaaggctagagcccagctgtgctgcctgccatcttctcaggaatggcagtgcgtattttctggctgaaaagtaaagcatgtatccaccgctttctcatagcctcgaaacatggagaaaagcaacttgcttttgccttggcaagcatgctaacctaagttaattcaagttttttttaacttaccctttccttcactggaagatttttccataagagaattccattgtttcagaaaataattataggggcccttccaagttctttgaaagattcataaccaactattcactattataacatgtttcccagtgtaaatgagtaaggaaaaaaaaagtgtaacaggtgcgtgcagatgaggagtgaccctcatatttaagttattttatatttgactggacattgttcagaagtgtgctttaagggacacttgttggttgtctgcccagcatctctcaagaatatccctcctgtcctccacatggttgtgcagggccatgtgtgaagacagcatgagtcttaacccctcttttattttatttttgagacagagtctcgctctgttgcccaggctggagtgctgtggcgcgatctctgctcactgcaacctccacctcccgggttcaagtgattctcctgcctcagcctgccgagtagctggaattacaggtgtgcaccaccatgcccagctagtttttttgtatttttagtagagacagggtttcactatgttggccaggctggtcttgaactcctgacctcaggtgatccgcccacctcagcctcc

SEQ ID NO: 383619 - DNA, 2376 bp, Homo sapiens
agtgggaaaaacaaaggagcggcggccgggagcggacttaccttaccttctctgccttcggcgcgcttctcagccgggccgccgacccaaaggagccgtccgactatgtctaacatggagaaacacctgttcaacctgaagttcgcggccaaagaactgagtaggagtgccaaaaaatgcgataaggaggaaaaggccgaaaaggccaaaattaaaaaggccattcagaagggcaacatggaagttgcgaggatacacgccgaaaatgccatccgccagaagaaccaggcggtgaatttcttgagaatgagtgcgcgagtcgatgcagtggctgccagggtccagacggcggtgacgatgggcaaggtgaccaagtcgatggctggtgtggttaagtcgatggatgcgacattgaagaccatgaatctggagaagatttctgctttgatggacaaattcgagcaccagtttgagactctggacgtccagacgcagcaaatggaagacacgatgagcagcacgacgacgctcaccactccccagaaccaagtggatatgctgctccaggaaatggcagatgaggcgggcctcgacctcaacatggagctgccgcagggccagaccggctccgtgggcacgagcgtggcttcggcggagcaggatgaactgtctcagagactggcccgccttcgggatcaagtgtgacggcagaacccgctctgaggtttcctggccatagccaccctttgaaatgctctctgtgtgttagagagatactataccctagaaactctgaacacgccagaatgctgaaatgcccttctacctttgggtttacagccccctccacataaattaagaaattcagtatttctgcactcttagctggattctaaagttctgtatagctcgtaatgatggtatttttatagcagccttttaacagaactagttaatttcgtgtatatgaatctttctcgaagatctggtcaaaactgtattcagtttcctgcccagaatgatcagattgaaggtggttggtttttattattatttagtgtgattgatagtatctagaatggcaggtggtgcataaaagttaaagagaggggaaagattacttagtttggttatacagttataaacaccatgcagtgtattcggtggactgtgctatttctgtttatcctttgggttttggtttttgttttttttttttgccttcacagtgagactgcaaatgattgttctcataacgtatattattaataaatgtggtcctataatttatactgaaattaccttaggatatttttgcataatactctcttactgcttacattctataaatttttcacgtgataattgtctttgcgtaactgggaaaaatgccgaataacttcctttattatctggaaaaattaaatttgttcatttatattttctacttactaaattgagtttttaaaaagacttagtgtgacatttgacagtgtctttcaaacgaacttctctaacaagtttatagttattttcctgtttcaacactattagaagtcttataaattatgctaattagcatggcagtcatgttacacactcttaacattgccaaagaactgttgatttcgtttgagaaaaccctgggactgtgtgtgtgtaggttttgttttgattttaacaaccaaaaatagaaataaaattagaactgcgttttaagttctaatttgcatttattaatttgtccaaaagcaagaactcttggaaatccttgaaaatataagctggaatgttttacttagccatgcaagtcatttatgtatacatccagccagctggaaatctgagaattctttgaaagattcataaccaactattcactattataacatgtttcccagtgtaaatgagtaaggaaaaaaaaagtgtaacaggtgcgtgcagatgaggagtgaccctcatatttaagttattttatatttgactggacattgttcagaagtgtgctttaagggacacttgttggttgtctgcccagcatctctcaagaatatccctcctgtcctccacatggttgtgcagggccatgtgtgaagacagcatgagtcttaacccctcttttattttatttttgagacagagtctcgctctgttgcccaggctggagtgctgtggcgcgatctctgctcactgcaacctccacctcccgggttcaagtgattctcctgcctcagcctgccgagtagctggaattacaggtgtgcaccaccatgcccagctagtttttttgtatttttagtagagacagggtttcactatgttggccaggctggtcttgaactcctgacctcaggtgatccgcccacctcagcctcc

SEQ ID NO: 383620 - DNA, 2621 bp, Homo sapiens
agtgggaaaaacaaaggagcggcggccgggagcggacttaccttaccttctctgccttcggcgcgcttctcagccgggccgccgacccaaaggagccgtccgactatgtctaacatggagaaacacctgttcaacctgaagttcgcggccaaagaactgagtaggagtgccaaaaaatgcgataaggaggaaaaggccgaaaaggccaaaattaaaaaggccattcagaagggcaacatggaagttgcgaggatacacgccgaaaatgccatccgccagaagaaccaggcggtgaatttcttgagaatgagtgcgcgagtcgatgcagtggctgccagggtccagacggcggtgacgatgggcaaggtgaccaagtcgatggctggtgtggttaagtcgatggatgcgacattgaagaccatgaatctggagaagatttctgctttgatggacaaattcgagcaccagtttgagactctggacgtccagacgcagcaaatggaagacacgatgagcagcacgacgacgctcaccactccccagaaccaagtggatatgctgctccaggaaatggcagatgaggcgggcctcgacctcaacatggagctgccgcagggccagaccggctccgtgggcacgagcgtggcttcggcggagcaggatgaactgtctcagagactggcccgccttcgggatcaagtgtgacggcagaacccgctctgaggtttcctggccatagccaccctttgaaatgctctctgtgtgttagagagatactataccctagaaactctgaacacgccagaatgctgaaatgcccttctacctttgggtttacagccccctccacataaattaagaaattcagtattttatagcagccttttaacagaactagttaatttcgtgtatatgaatctttctcgaagatctggtcaaaactgtattcagtttcctgcccagaatgatcagattgaaggtggttggtttttattattatttagtgtgattgatagtatctagaatggcaggtggtgcataaaagttaaagagaggggaaagattacttagtttggttatacagttataaacaccatgcagtgtattcggtggactgtgctatttctgtttatcctttgggttttggtttttgttttttttttttgccttcacagtgagactgcaaatgattgttctcataacgtatattattaataaatgtggtcctataatttatactgaaattaccttaggatatttttgcataatactctcttactgcttacattctataaatttttcacgtgataattgtctttgcgtaactgggaaaaatgccgaataacttcctttattatctggaaaaattaaatttgttcatttatattttctacttactaaattgagtttttaaaaagacttagtgtgacatttgacagtgtctttcaaacgaacttctctaacaagtttatagttattttcctgtttcaacactattagaagtcttataaattatgctaattagcatggcagtcatgttacacactcttaacattgccaaagaactgttgatttcgtttgagaaaaccctgggactgtgtgtgtgtaggttttgttttgattttaacaaccaaaaatagaaataaaattagaactgcgttttaagttctaatttgcatttattaatttgtccaaaagcaagaactcttggaaatccttgaaaatataagctggaatgttttacttagccatgcaagtcatttatgtatacatccagccagctggaaatctgagaagtaaagaggtaggactggaaggaaggagaaagcttgagtctttaaggctagagcccagctgtgctgcctgccatcttctcaggaatggcagtgcgtattttctggctgaaaagtaaagcatgtatccaccgctttctcatagcctcgaaacatggagaaaagcaacttgcttttgccttggcaagcatgctaacctaagttaattcaagttttttttaacttaccctttccttcactggaagatttttccataagagaattccattgtttcagaaaataattataggggcccttccaagttctttgaaagattcataaccaactattcactattataacatgtttcccagtgtaaatgagtaaggaaaaaaaaagtgtaacaggtgcgtgcagatgaggagtgaccctcatatttaagttattttatatttgactggacattgttcagaagtgtgctttaagggacacttgttggttgtctgcccagcatctctcaagaatatccctcctgtcctccacatggttgtgcagggccatgtgtgaagacagcatgagtcttaacccctcttttattttatttttgagacagagtctcgctctgttgcccaggctggagtgctgtggcgcgatctctgctcactgcaacctccacctcccgggttcaagtgattctcctgcctcagcctgccgagtagctggaattacaggtgtgcaccaccatgcccagctagtttttttgtatttttagtagagacagggtttcactatgttggccaggctggtcttgaactcctgacctcaggtgatccgcccacctcagcctcc

SEQ ID NO: 383621 - DNA, 2630 bp, Homo sapiens
caggctggtacgcgccggaacggtcttatgatgcgcgggagcggacttaccttaccttctctgccttcggcgcgcttctcagccgggccgccgacccaaaggagccgtccgactatgtctaacatggagaaacacctgttcaacctgaagttcgcggccaaagaactgagtaggagtgccaaaaaatgcgataaggaggaaaaggccgaaaaggccaaaattaaaaaggccattcagaagggcaacatggaagttgcgaggatacacgccggagtcgatgcagtggctgccagggtccagacggcggtgacgatgggcaaggtgaccaagtcgatggctggtgtggttaagtcgatggatgcgacattgaagaccatgaatctggagaagatttctgctttgatggacaaattcgagcaccagtttgagactctggacgtccagacgcagcaaatggaagacacgatgagcagcacgacgacgctcaccactccccagaaccaagtggatatgctgctccaggaaatggcagatgaggcgggcctcgacctcaacatggagctgccgcagggccagaccggctccgtgggcacgagcgtggcttcggcggagcaggatgaactgtctcagagactggcccgccttcgggatcaagtgtgacggcagaacccgctctgaggtttcctggccatagccaccctttgaaatgctctctgtgtgttagagagatactataccctagaaactctgaacacgccagaatgctgaaatgcccttctacctttgggtttacagccccctccacataaattaagaaattcagtatttctgcactcttagctggattctaaagttctgtatagctcgtaatgatggtatttttatagcagccttttaacagaactagttaatttcgtgtatatgaatctttctcgaagatctggtcaaaactgtattcagtttcctgcccagaatgatcagattgaaggtggttggtttttattattatttagtgtgattgatagtatctagaatggcaggtggtgcataaaagttaaagagaggggaaagattacttagtttggttatacagttataaacaccatgcagtgtattcggtggactgtgctatttctgtttatcctttgggttttggtttttgttttttttttttgccttcacagtgagactgcaaatgattgttctcataacgtatattattaataaatgtggtcctataatttatactgaaattaccttaggatatttttgcataatactctcttactgcttacattctataaatttttcacgtgataattgtctttgcgtaactgggaaaaatgccgaataacttcctttattatctggaaaaattaaatttgttcatttatattttctacttactaaattgagtttttaaaaagacttagtgtgacatttgacagtgtctttcaaacgaacttctctaacaagtttatagttattttcctgtttcaacactattagaagtcttataaattatgctaattagcatggcagtcatgttacacactcttaacattgccaaagaactgttgatttcgtttgagaaaaccctgggactgtgtgtgtgtaggttttgttttgattttaacaaccaaaaatagaaataaaattagaactgcgttttaagttctaatttgcatttattaatttgtccaaaagcaagaactcttggaaatccttgaaaatataagctggaatgttttacttagccatgcaagtcatttatgtatacatccagccagctggaaatctgagaagtaaagaggtaggactggaaggaaggagaaagcttgagtctttaaggctagagcccagctgtgctgcctgccatcttctcaggaatggcagtgcgtattttctggctgaaaagtaaagcatgtatccaccgctttctcatagcctcgaaacatggagaaaagcaacttgcttttgccttggcaagcatgctaacctaagttaattcaagttttttttaacttaccctttccttcactggaagatttttccataagagaattccattgtttcagaaaataattataggggcccttccaagttctttgaaagattcataaccaactattcactattataacatgtttcccagtgtaaatgagtaaggaaaaaaaaagtgtaacaggtgcgtgcagatgaggagtgaccctcatatttaagttattttatatttgactggacattgttcagaagtgtgctttaagggacacttgttggttgtctgcccagcatctctcaagaatatccctcctgtcctccacatggttgtgcagggccatgtgtgaagacagcatgagtcttaacccctcttttattttatttttgagacagagtctcgctctgttgcccaggctggagtgctgtggcgcgatctctgctcactgcaacctccacctcccgggttcaagtgattctcctgcctcagcctgccgagtagctggaattacaggtgtgcaccaccatgcccagctagtttttttgtatttttagtagagacagggtttcactatgttggccaggctggtcttgaactcctgacctcaggtgatccgcccacctcagcctcc

SEQ ID NO: 383622 - DNA, 272 bp, Homo sapiens
gagccaagcagatacctgggaggagaatatcccaggcacagcaaatagctagagcacaggtcctaacattagagcttacttggcttgttcaagaagaagcaaaaagacaagtgcagctggaatggagtgaggaaagaatagttgaaaaggaagggctgggagcagtggctcacacctggaatcccagcgctttgggaggccgaggtgggtggatcacgaggtcaggagatcaagaccatcctggctaacacggtgaaaccccgtctctacta

SEQ ID NO: 383623 - DNA, 1088 bp, Homo sapiens
acggtcatttgtgtttgtctctctgtcaagaccgagtttttaaaaaatatgattatttttatttcttgtacctaacaccagaagatgcctaaaaagtatgaatgattactgaaacaaattaaaatacagcatttagtagtagttgtataaatgttaccagttacttcatttagatgttaccatcaatcacagaaacatgtaggctgaagcaatgaaatcataaatacagtgttttaatcttccattgtgtaaaaagatcaatttctatattgtatgtaaatgtaatataacattttaaatataggtttaatttttgagaagatacacagtatacttagtgattaaaaagttaggtatttaaatctatgagaaaatgggatcattatttggatatttaccagtgctaatcgaagcagttgctggtaaaggcgttggagttgatgcatatagatagaagttacttttgcaataaaacattagagtcaccatcagaacagaagacttgaaaaattttatttgactcaaattacaaactgagcatttatgggtgtctgtgtgtgcatagcactgaattagatcatctggagatacaaaagtgtgatagatgctttcaatataaaataaacgttacatagctactgaacaagacattatataaaggttcgttaatgacctaagatgtaaatttgtttataatttttatcatagttcaatttcatctaaaccttatgtgatttcagtgttttcctcagatttgtctcacactctagtctggtgatttccaggcttgtgcctgtcccagcacacctaaggaagagggaaaatgtccatcaataagtaacaggggtttactttcagtggacagggtggatggaaggagagatgagcaaatttggggtgaaaaataaaagccctccagtggttctgacaagctgtagctagaggggggtggcagttgcagaaggggcagtttctccgtcttgtattttttatttttttctttgattcttgaaaataagttcttatttttgataagatggaggattattattattattattttgagacagggcctcaaaaaaaaaaaa

SEQ ID NO: 383624 - DNA, 340 bp, Homo sapiens
aaaagagaggatttttaatgttcccaacacaaagaaataatcaatgtttgacttgaaggatatgctgattgttctgatttgatcattacacatggtatccatgtattgaaatatcacactatgccccataaatgtgtacattacatatcaactaacattaaaaggaaataaataatgtgtataacttttctcctattaatctattatcagttgatttcagcagactcagttatagaaccttcagagggcagaggtaaagtaccttttgccctgacaattcaaacatagctttagtcttcctaaatgagggaaaaaagtatgaaaagtgcttcaaaaatac

SEQ ID NO: 383625 - DNA, 480 bp, Homo sapiens
aactaaagttgcatgtaaaacttatagggaacataaacttggataaagtggaccatcaacttagacttatttgatgtcaccttgtcaaggagtgaaaacagaaagcaaaactgataaaaacacagacaccataatatcatatactatggaaataatttaaagacagttactaaattaattaaataacgctacatgattttttaaaacttacataagtacaattgcacttctgtttgttgatgtttaagtctctattcccaacttgatactcaggaaaacattacaccaaaaagtaaatagatattctaattcaatgcatttcatttaacgagcactaagtccaaagaaacacattactaggtgtttaattttctaattcaaagtgtgaaaattacatctctcttctgatttgagatcctcattcacactagggcattcagaaaaagatgttccccatcatatgagaattaaagaatatgt

SEQ ID NO: 383626 - DNA, 498 bp, Homo sapiens
ccaaatgtgagaaatctgaaaggaataaaaaatgctagtccttaatgttagccgtatggttggtgttagccaaaatgaagttcaggctgtgatgctctgtagccactgtatgacctacccaaaggcaatcagaactcactcgtttcttccttttttcttttcttcctcttttttttaaactaattggcccatgtttagtttactgaatgtcatctggactcagtaaaaagcaagtgacctgcattgaattagtgtaattgtaatacaaacagaatattgcatagttttggtcttatacaggaaaggagaaagttggaaagatttttctgtttgataaatagaaactgaagatgtgggaatccaggcctggttcatacttgattttacctttcatgtctctttgtaagatcagtatttggacttttaggcatttttcctctgtaaaaaaacattggttttcattttgaaatttattatgaaagaagtctgctttttgta

SEQ ID NO: 383627 - DNA, 448 bp, Homo sapiens
gggcacttctgtatgttgtctccttgaagtgtcacaatcactttgagacagaattagttttgttttagtcattatacagatggggaatgtgggtctcagttaagtaaattactcaggagacacgccaagagctggatctctttaacgccaaaggttaacctataaactaacgtgctacaccgcctgtactggcaaaatagaattaccataaaatgaaatttgcttccacaactgggcatgtgagttcggtgaggctggtgttacccattgctccatgggtcagaaattggtcttgctgaagcttggaaggagaagctcttggctcagggagtgaaaagttactgacaggttatatgagtgcaattgaagggttatgcgtccatagagcatgtgatggaatgagaacagagagaatcaaagagaatcacccagagcagactctgtctca

SEQ ID NO: 383628 - DNA, 359 bp, Homo sapiens
agcagctctgagtgaatgaagccataaactcaagcctgtgtctcatttgacactctgccaaccaccatgtaaatattcctagtacttaatgtattaatcgagaagaagagagaaactgggctcattatacatcccacatttgtgtttctctttaatacagtaaaagcctcttaagatattttccaggagagcaaccactaacgtcatcttgccagaaaaaaaacatctcaggggagagaccttggtgagcttcagactcagaatatgtatgtggaggcctatgcataggtatatatatgtttaattagtgtggtttcttgggaggacttttctataatatcaaattaaaatccagtaag

SEQ ID NO: 383629 - DNA, 1959 bp, Homo sapiens
gtagggaaactgtgagggcggcaccggaagtggcgagcagtctgcgcgcggatggccgcagcggcgatggcggcagcggcaggtggaggggctggcgcggcccgctccctctcgcgcttccgaggctgcctggctggcgcgctgctcggggactgcgtgggctccttctacgaggcccacgacaccgtcgacctgacgtcagtcctgcgtcatgtccagagtctggagccggaccccggcacgcccgggagtgagcggacagaagccttgtactacacagatgacacagccatggccagggccctggtgcagtccctgctagccaaggaggcctttgacgaggtggacatggctcacagatttgctcaggagtacaagaaagaccctgacaggggctatggtgctggagtagtcactgtcttcaagaagctcctgaaccccaaatgtcgcgatgtctttgagcctgcccgggcccagtttaacgggaaaggctcctatggcaatggaggtgccatgcgggtggctggcatctccctggcctatagcagtgtccaggatgtgcagaagtttgcccggctctcggcccagctgacacacgcctcctccctgggttacaatggcgccatcctgcaggccctggctgtgcacctggccttgcagggcgagtcttccagcgagcactttctcaagcaactcctgggccacatggaggatctggagggtgatgcccagtccgtcttggatgccagggagttgggcatggaggagcgtccatactccagccgcctgaagaagattggagagcttctagaccaggcatcggtgaccagggaggaagtggtgtctgagctagggaatggcattgctgcctttgagtcggtacccaccgccatctactgcttcctacgctgcatggagccagaccctgagatcccttctgccttcaatagcctccaaaggactctcatttattccatctcacttggtggggacacagacaccattgccaccatggctggggccattgctggtgcctactatgggatggatcaggtgccagagagctggcagcaaagctgtgaaggctacgaggagacagacatcctggcccaaagcctgcaccgtgtcttccagaagagttgatgagggctacagctgttggggctctgccaggtcccctgggaccaactacagctccaatcagaaaccctgcgcttccttgagtgtggcttcccacttttcctgcattgtggagctgactgagtacaccggtgaggctggggtctctgcaggggaggtcactggaacagcgagcaagggactggtgcctcgctggtgctgggtctctggtttgctgcagagccgtaggacactcctggctcctcagtaggacagacagacgcaggcgggtttattttggaggggtacttgtggcattttcctgtattgtcttggacatgggatgtggggaggtggaaatgatgagcagtagcatcatttctccctgttgggttttagccagtttgccagcaagcgcatcctagcagggtccccgagcagcaggttgtgtggatgaagggacaggcacttgcatccagctgatctaggtcacacctggctcttggctgccatgtggcttattaacagcttccagtggaagtcgcaataaacagtttttggtaaatctcaaaaaaaaaaaaaaaaaaaaaaaaaaaaaaaaaaaaaaaaaaaaaaaaaaaaaaaaaaaaaagggtgaaggagaggatcttatttgcggggggtgggaccaaaacaagaggtgtgcaaagagagcggacgagcgtggtaaagaaatgagatgtcaggggacaagccgcattttttgttgaacaaaagagggggataacaacgaggggagcgccccactttagaggagggcgtttataattgagaaagcggcgggttagcgcggttttagag

SEQ ID NO: 383630 - DNA, 1870 bp, Homo sapiens
ggtcgtaccactgcactgcagcttaggcaacagagtgagaccctgtaccaaaaaaataataatataaactaaaataaaaggtgagcagggccaggcacagtggctcaggcctataatcccagctctttgggaggccaaggcaggaggattgcttgagcccaggaattcaagaccagtctggacaacagagtgagaccctgtctctacaaaaaaataaaagtagctgggtgtgatgatgcatgcctatagtcccagctacttgagaggctgaggcagaaggatagcttgagcccaggagttcaagactgcagtgagccatgattgcaccagtgcactccagtctgggcaacagagcgagactctgtctccaaaaaaagcaaaaaacaacaacaaaaaaaacaaaggtgagcaggaggctctcatcctccctcctctccccacagaagccttgtactacacagatgacacagccatggccagggccctggtgcagtccctgctagccaaggaggcctttgacgaggtggacatggctcacagatttgctcaggagtacaagaaagaccctgacaggggctatggtgctggagtagtcactgtcttcaagaagctcctgaaccccaaatgtcgcgatgtctttgagcctgcccgggcccagtttaacgggaaaggctcctatggcaatggaggtgccatgcgggtggctggcatctccctggcctatagcagtgtccaggatgtgcagaagtttgcccggctctcggcccagctgacacacgcctcctccctgggttacaatggcgccatcctgcaggccctggctgtgcacctggccttgcagggcgagtcttccagcgagcactttctcaagcaactcctgggccacatggaggatctggagggtgatgcccagtccgtcttggatgccagggagttgggcatggaggagcgtccatactccagccgcctgaagaagattggagagcttctagaccaggcatcggtgaccagggaggaagtggtgtctgagctagggaatggcattgctgcctttgagtcggtacccaccgccatctactgcttcctacgctgcatggagccagaccctgagatcccttctgccttcaatagcctccaaaggactctcatttattccatctcacttggtggggacacagacaccattgccaccatggctggggccattgctggtgcctactatgggatggatcaggtgccagagagctggcagcaaagctgtgaaggctacgaggagacagacatcctggcccaaagcctgcaccgtgtcttccagaagagttgatgagggctacagctgttggggctctgccaggtcccctgggaccaactacagctccaatcagaaaccctgcgcttccttgagtgtggcttcccacttttcctgcattgtggagctgactgagtacaccggtgaggctggggtctctgcaggggaggtcactggaacagcgagcaagggactggtgcctcgctggtgctgggtctctggtttgctgcagagccgtaggacactcctggctcctcagtaggacagacagacgcaggcgggtttattttggaggggtacttgtggcattttcctgtattgtcttggacatgggatgtggggaggtggaaatgatgagcagtagcatcatttctccctgttgggttttagccagtttgccagcaagcgcatcctagcagggtccccgagcagcaggttgtgtggatgaagggacaggcacttgcatccagctgatctaggtcacacctggctcttggctgccatgtggcttattaacagcttccagtggaagtcgcaataaacagtttttggtaaatctca

SEQ ID NO: 383631 - DNA, 1592 bp, Homo sapiens
gtagggaaactgtgagggcggcaccggaagtggcgagcagtctgcgcgcggatggccgcagcggcgatggcggcagcggcaggtggaggggctggcgcggcccgctccctctcgcgcttccgaggctgcctggctggcgcgctgctcggggactgcgtgggctccttctacgaggcccacgacaccgtcgacctgacgtcagtcctgcgtcatgtccagagtctggagccggaccccggcacgcccgggagtgagcggacagatttgctcaggagtacaagaaagaccctgacaggggctatggtgctggagtagtcactgtcttcaagaagctcctgaaccccaaatgtcgcgatgtctttgagcctgcccgggcccagtttaacgggaaaggctcctatggcaatggaggtgccatgcgggtggctggcatctccctggcctatagcagtgtccaggatgtgcagaagtttgcccggctctcggcccagctgacacacgcctcctccctgggttacaatggcgccatcctgcaggccctggctgtgcacctggccttgcagggcgagtcttccagcgagcactttctcaagcaactcctgggccacatggaggatctggagggtgatgcccagtccgtcttggatgccagggagttgggcatggaggagcgtccatactccagccgcctgaagaagattggagagcttctagaccaggcatcggtgaccagggaggaagtggtgtctgagctagggaatggcattgctgcctttgagtcggtacccaccgccatctactgcttcctacgctgcatggagccagaccctgagatcccttctgccttcaatagcctccaaaggactctcatttattccatctcacttggtggggacacagacaccattgccaccatggctggggccattgctggtgcctactatgggatggatcaggtgccagagagctggcagcaaagctgtgaaggctacgaggagacagacatcctggcccaaagcctgcaccgtgtcttccagaagagttgatgagggctacagctgttggggctctgccaggtcccctgggaccaactacagctccaatcagaaaccctgcgcttccttgagtgtggcttcccacttttcctgcattgtggagctgactgagtacaccggtgaggctggggtctctgcaggggaggtcactggaacagcgagcaagggactggtgcctcgctggtgctgggtctctggtttgctgcagagccgtaggacactcctggctcctcagtaggacagacagacgcaggcgggtttattttggaggggtacttgtggcattttcctgtattgtcttggacatgggatgtggggaggtggaaatgatgagcagtagcatcatttctccctgttgggttttagccagtttgccagcaagcgcatcctagcagggtccccgagcagcaggttgtgtggatgaagggacaggcacttgcatccagctgatctaggtcacacctggctcttggctgccatgtggcttattaacagcttccagtggaagtcgcaataaacagtttttggtaaatctca

SEQ ID NO: 383632 - DNA, 1689 bp, Homo sapiens
gtagggaaactgtgagggcggcaccggaagtggcgagcagtctgcgcgcggatggccgcagcggcgatggcggcagcggcaggtggaggggctggcgcggcccgctccctctcgcgcttccgaggctgcctggctggcgcgctgctcggggactgcgtgggctccttctacgaggcccacgacaccgtcgacctgacgtcagtcctgcgtcatgtccagagtctggagccggaccccggcacgcccgggagtgagcggacagaagccttgtactacacagatgacacagccatggccagggccctggtgcagtccctgctagccaaggaggcctttgacgaggtggacatggctcacagatttgctcaggagtacaagaaagaccctgacaggggctatggtgctggagtagtcactgtcttcaagaagctcctgaaccccaaatgtcgcgatgtctttgagcctgcccgggcccagtttaacgggaaaggctcctatggcaatggaggtgccatgcgggtggctggcatctccctggcctatagcagtgtccaggatgtgcagaagtttgcccggctctcggcccagctgacacacgcctcctccctgggttacaatggcgccatcctgcaggccctggctgtgcacctggccttgcagggcgagtcttccagcgagcactttctcaagcaactcctgggccacatggaggatctggagggtgatgcccagtccgtcttggatgccagggagttgggcatggaggagcgtccatactccagccgcctgaagaagattggagagcttctagaccaggcatcggtgaccagggaggaagtggtgtctgagctagggaatggcattgctgcctttgagtcggtacccaccgccatctactgcttcctacgctgcatggagccagaccctgagatcccttctgccttcaatagcctccaaaggactctcatttattccatctcacttggtggggacacagacaccattgccaccatggctggggccattgctggtgcctactatgggatggatcaggtgccagagagctggcagcaaagctgtgaaggctacgaggagacagacatcctggcccaaagcctgcaccgtgtcttccagaagagttgatgagggctacagctgttggggctctgccaggtcccctgggaccaactacagctccaatcagaaaccctgcgcttccttgagtgtggcttcccacttttcctgcattgtggagctgactgagtacaccggtgaggctggggtctctgcaggggaggtcactggaacagcgagcaagggactggtgcctcgctggtgctgggtctctggtttgctgcagagccgtaggacactcctggctcctcagtaggacagacagacgcaggcgggtttattttggaggggtacttgtggcattttcctgtattgtcttggacatgggatgtggggaggtggaaatgatgagcagtagcatcatttctccctgttgggttttagccagtttgccagcaagcgcatcctagcagggtccccgagcagcaggttgtgtggatgaagggacaggcacttgcatccagctgatctaggtcacacctggctcttggctgccatgtggcttattaacagcttccagtggaagtcgcaataaacagtttttggtaaatctca

SEQ ID NO: 383633 - DNA, 819 bp, Homo sapiens
  misc_feature (29)..(29): n is a, c, g, or t
  misc_feature (36)..(36): n is a, c, g, or t
aagtggcttgggtgtaacccgcgcctccngggttancgggatgagcagtctgcgcgcggatggccgcagcggcgatggcggcagcggcaggtggaggggctggcgcggcccgctccctctcgcgcttccgaggctgcctggctggcgcgctgctcggggactgcgtgggctccttctacgaggcccacgacaccgtcgacctgacgtcagtcctgcgtcatgtccagagtctggagccggaccccggcacgcccgggagtgagcggacaggtgggcggggccgggcgcaagtcagaggccgtgcgggagggaggccgaaggggcgcggagcctccgggggcgacgggtcgggggtgcgcggggatgaggctgccgagggcaccggggccagagccggatgacccgcagacagcttgagctcagcgagtgccagtgcgatctccggccttatagacgtctcgccccgaacatcccgtgctcggggcgtggcagcaccggggcctcaaccgtgcagggtgtggataaacccatcgtaagttgaaaatacctgaagtggaaagtgcgctttcagcttagacgaccgttttatctggacgcagccccatcggacgtcgaggagcctatgaatgcgtatcagcgttatcagaaagccgaaaaaaacttaagttgaaccatcctaagtcggggactgtctgtccacccttgccgacttgacctctttttcccggttctctagagtcagtataccaccagcccgttctccaccccgcaaggcgtgctttggaagcctgactctaatcgcgtcctcccctgcctaaa

SEQ ID NO: 383634 - DNA, 1066 bp, Homo sapiens
ggccggaccggggccatggcgcccgcgcaggccccgctgctcccgctgctgctcctgctgttaccgctgccgccgccgcccttcgcgccccccgaggaccgccgccgcgccaactcggaccgctacgccgtctactggaaccgcagcaaccccaggttccacgcaggcgcgggggacgacggcgggggctacacggtggaggtgagcatcaatgactacctggacatctactgcccgcactatggggcgccgctgccgccggccgagcgcatggagcactacgtgctgtacatggtcaacggcgagggccacgcctcctgcgaccaccgccagcgcggcttcaagcgctgggagtgcaaccggcccgcggcgcccggggggccgctcaagttctcggagaagttccagctcttcacgcccttctccctgggcttcgagttccggcccggccacgagtattactacatctctgccacgcctcccaatgctgtggaccggccctgcctgcgactgaaggtgtacgtgcggccgaccaacgagaccctgtacgaggctcctgagcccatcttcaccagcaataactcgtgtagcagcccgggtggctgccgcctcttcctcagcaccatccccgtgctctggaccctcctgggttcctagtcccagccccgcaggacgccgaccctgcctggacggccccgcctggaccgcctgacctcggccctccggacccggctgcggcccccgcctccgagaccaaatagagacgctgcttctccctcgccaggagccgcccccgccgggcaggggccatccacccgccccaggaccagccctcagggaggggaaacggccgagagcccccccccggagcccgaggggccggggtgtggatgcggaccgtggccaggccatctcctctggggcgtcggagaacccgggcccgcgggccggttgcactcccagcgcttgaagcgggctggcggtggtcgcaggaggcgtggccctcgccgttgaccatgtacagcacgtagtgctccatgcgctcggccggcggcagcggcgcccc

SEQ ID NO: 383635 - DNA, 336 bp, Homo sapiens
ctaaaaaataaaaacacaaataccatataaatgaagttctcttctcatatatcagcaggtacaagatactcacatgataactttatttggctaagttggtgtttgccaggtttctctatagttacttttctttcccccctttcttactctagtctatatgaaagccagtcactaaatccaacccacacttgggaagagagatgggagtaagagagaattaagctttacttcctttctagagtgggaagcgtctacttaaattatttggaattttcccacaaggaagatgtctctcttctctatttgtttgtttagtcactcatatgtatttatatg

SEQ ID NO: 383636 - DNA, 862 bp, Homo sapiens
atgtgtccaaaaaaactccagtgtggttctaggatgagataataaaaacaggttgtctagggtagtgtggaaggtcctttcagtcttcctgtgcctatcagtgatcctcattgccatgttcccttctggtgctcaaccggaggctccctgacagatgagtcctctgccagaggaaggctaagatgtagaggacaaatcgtgtcaaggaaaagaagcttgaaggagctaagaatgcttagcttagagaagacaagaggaaacaggacatggctttgggaagttcaaggatggtccagtgaaatacatactatacttttgcaccccagctaagctgacccatgatcagtaagtaggaaataaaaggccaatttctggctactcttgcccccaaccccatttcagtgaactatgaacctctattagatatgcaaggccggtgctaaatgctggagggctttggccctttccctcaaggagctagtctagtagggggtcagaaatacagatgggcctgaacataatgatggtttgacttccagtttttcaactttaggattgtgcaaaagctatacacattcggtagaaacagtacttcaagtatccatacaatcagtacagtattcaataaattacatgagacattcaacactttattataaaataggctttgtgttagatgagtttgcccaactgtaagctaatgtaagtgatctgagtaggtttaaggtagcctaggtgtattaaatgcatttttcacttaacggtattttcaacttttgttgggtttattgggatgtagccccattataagctgaaaagcatctgtagtataataaatgtggggagtgctgtgagagaaata

SEQ ID NO: 383637 - DNA, 191 bp, Homo sapiens
atgtgtccaaaaaaactccagtgtggttctaggatgagataataaaaacaggttgtctagggtagtgtggaaggtcctttcagtcttcctgtgcctatcagtgatcctcattgccatgttcccttctggtgctctacatcttagccttctctggcagaggactcatctctcagggagctccggttgaggtc

SEQ ID NO: 383638 - DNA, 501 bp, Homo sapiens
atgtgtccaaaaaaactccagtgtggttctaggatgagataataaaaacaggttgtctagggtagtgtggaaggtcctttcagtcttcctgtgcctatcagtgatcctcattgccatgttcccttctggtgctcaaccggaggctccctgacagatgagtcctctgccagaggaaggctaagatgtagaggacaaatcgtgtcaaggaaaagaagcttgaaggagctaagaatgcttagcttagagaagacaagaggaaacaggacatggctttgggaagttcaaggatggtccagtgaaatacatactatacttttgcaccccagctaagctgacccatgatcagtaagtaggaaataaaaggccaatttctggctactcttgcccccaaccccatttcagtgaaaaatgcatttaatacacctaggctaccttaaacctactcagatcacttacattagcttacagttgggcaaactcatctaacacaaagcgtcgacg

SEQ ID NO: 383639 - DNA, 784 bp, Homo sapiens
cggcctgtgggccacgggttgggcaagcctgctgtgataaccattgctgtagtgcttgtcatctttgtaggaaggcgtgtagtgaggcttacaaattttgaacttgggaatgtctgtctgcctccgtcacatgggagctgagagccatattgaaatggtgctcacgtggtggatagaatagggtcttcaggctacgtgggagtcatagaggctacctgagagagaacaggcttttcttggttcagaaattctaggtttgagaaggaaagcctacatacagccatctccacactgcacaataggtgagcagttttcagcagacatctccacattggtgttcttattggtctaaatgtacacctggtcagaaatggttttcatggccccagatgttcaggaagagctacatgaactctgttgatgatgtctttttaattgttagacattttggccactgttcctggatcagcattttttgggcagacccattttcttaacaaactgtactctctgaggcagcttggatctatccaggaaagtttccactagttaatttgcatagctcatgttgacattatggagactcaacagtttatctgcagggtgtgaaattggggtattagtcagcaccataaggcagaaaaggtggccagacccactctttggactctggatcctggatttactgaaaccgcagataccctgagcctgaagatgccatgtccagtcctaatacctggttcctggaacccacctccaccactgttgccacttgaacaataaa

SEQ ID NO: 383640 - DNA, 782 bp, Homo sapiens
tctgcaacatccttttggttaaggtcagccctctccagtgtgagagcatactgcccaagggcttgaataccaggaagcaaagatgattggggtcattttggaggctgactactgttctctgcgctgtccctaagtcatgtcctcccacatgcacagtacactcctcccctcccaaagcccccaaaagttacatcccattagcacatcggtccaaaatcttatcctccaaaagcagcatggatttatactcctcaagtgggtatttctcgcactgtcacccagggctgggagtgcagtgggcagtatcacgggcttcactgtaggcctcgacctcctgggggcttagggcaatttcttccccacttcagttttcttcaagtagggtgcatggccacagatgccagactaatttttttaagaagcagagtctgctattttgtccaggctggtctcgaactcctggactcaagagatcctcccagcgcagcctaccaaactgctgggattacaggcatgagccaccacacccatcctaagatttcttgagtatagccctttgagtacaattttttgccccaacaaagtctagtggagtaggcataggagaattggtagaccctcccttttaaacaggaaaaatgatgcctatagtcccagctacatcagaggataaggcgggaggatcatttgagcccaggagtttgaggctgcagtgaggtatgatcacacctgtgaatagccactgcactccagcctgggtgacatagcgagagaccctgtcc

SEQ ID NO: 383641 - DNA, 325 bp, Homo sapiens
ctagaatatgcaaatgaactgtataatttatgagtgccagtgtctgtctaagagtgtttcacataatttacaaagtgagcctgagaggcatgaggaaggcagctcttccgattccattgccaggaaagcgctatatatttttctgtaagtgatccctcataatatcatcaagtgctatttaaaagaaatgaagatttcaaatgtacatgaaaggcaaagattttcctctcacttccttcacccattgattttttttcctaaaatttgcaagaaacttggactctaaagccttaaattttggatttaatttggaaaagaaaagtta

SEQ ID NO: 383642 - DNA, 770 bp, Homo sapiens
gcgaataataaccaggcgaataataaccagagtagctacactgacttttgataagatggacttgcatcttgtagttactcaattacacagttaaaaaggattgcctaatgatggtagaaggttaatttcatcagcaagttaaattgtagaagagctcaaaatatgtaaaacaagcagatgaaactttacagagaaattcaaaacactacccttagtctggaagccctcttctctcaagagctaaacagaaaacgaatgaagatagagatttgaacacacttcttcatgtaagtatttgtttcctattgctgctgacacagtaccacatacttagtggcttaaaacaatgcaggctggtacactggctcacgcctcttatcccagcacttttagaggctgaggcaggagcatcacttgagtccagaagtttgagaccagcctgctcgacatagaaacaccctgcctctacaaaaaaaaaaaaaaaaatttttaaggcagggtctccctctgtcacccaggctggagcagtggcgtgatcttggctccctacaacctccactcctgggctcaagcagtcctcccacctcagcctccctagtagctgggaccacaggtacttgccaccacacccagctaattctacaagaaaaatttaaaaaataagccatatgtagctactccagaggcggagttgggaggatcacttgagcctgggaggttgaggctacaatgagtcgtgatcccaccactgcactccagccctgcctcca

SEQ ID NO: 383643 - DNA, 485 bp, Homo sapiens
gataagatttattgagatacatacccatagaattgcctcataggacttcttgcagcactcaatctagagtgaatccctgtttacttagaccctcttccaaatcatgtaaaccaaatcccaaatcgtatagtgggttctttcttacattcttatggagacaccagtggttccctgtggtgtgagttctctcttgccatgagtaataggcccagctcattcaattgtaagagtagtacaatcagcttacaatttttcactttcaaaagtctgtgaatattgtttccaaagtcttctacatctcactttttcaagaggaggggtcacagactaaaatgtttcttcttcctttgtaggtaagatgttgtttcgttttgctttattttcttcctgcttgcttgttaaattatatcttgatatcgaaaattaaactgttttttaaaccaggtgttcacttttcattgatttttgcatagtacttggtgaac

SEQ ID NO: 383644 - DNA, 659 bp, Homo sapiens
gcgcatcagcaaggtctactcccgcgagtgaccacgggacagacgatcctctgaggtttccaggaagacccccgccctaatcctctgaaggtcggaggtcacaggtcaaagccgagaacagaagctggggtggggcacacagaggtggaaagaggggcctgagcatcgggcggccaccagcagggtcccctcctggccacaaggacgctcccgttccagtccccggaagagggtggctgcagccaccccggggatgaccagcagaggtcctcacggcctgcggcccggggagacctgagactcctaagctgagcacgtcagcgtctctacctccaccgcagacagaaagaccgggcggacccaagactgcaagctcaagccctggcggcagggcagcggggcctgtgagggccgagggtggacgctgctctgagccagacccgctcgtcagcagctcggcctcccccgctgctccccaccagcgcccgggcttgggtgtttggtgcttccaacttttcaagagaagcttgaaatctgtaattcttatgtgaaatcctgcctttcttaactaattaaagacttaaaattagctagttaaaattaattaaaattgattaaatttgtactaattaaaactaactgaattcttctcaaaacac

SEQ ID NO: 383645 - DNA, 736 bp, Homo sapiens
gttaattatagctaatgattatgtgcagtcagcctgacatctagccacagtaaactcctgttttcttgggatccaaacaccctgtgttttaccattagttttgttagtattgttaactttctttacacaagtaaaccatttccactaccaaaggtttagaaactatggatgaacaaaatgaatctccctgttcattttgagcctacatagacatagagaccaaatatgtcaaaaccttattcaaataaactctcttcagagtgaatacccagggtcaggacagactcagcaaaccttctatatcacttaattctgcccagtgaaaatcagtgaccctgaggcactgccagattctaaagtgcctttgggatcatcagagactgtctataaataatgcaaaatcttgatctggatgtcagtgtatcaaatcttatcaaatccattgacaaatcagtggtgctatactggaaatggctactcctttggatgaaggacctcatttcccagttgcttggaacaaaagagaatttacatattgctgtaagaagggagagacggcagttgttggtagacacacagataagggtgcccaagaataattctgtctggattaaaggtcccagggaagtgacggtgccatttctgtaccaagaggtgaatataatttgcatgttgagtgcagtaattaagaacaaacgactcgactccacaaattaaaccgtcctgttttctcttc

SEQ ID NO: 383646 - DNA, 887 bp, Homo sapiens
gttaattatagctaatgattatgtgcagtcagcctgacatctagccacagtaaactcctgttttcttgggatccaaacaccctgtgttttaccattagttttgttagtattgttaactttctttacacaagtaaaccatttccactaccaaaggtttagaaactatggatgaacaaaatgaatctccctgttcattttgagcctacatagacatagagaccaaatatgtcaaaaccttattcaaataaactctcttcagagtgaatacccagggtcaggacagactcagcaaaccttctatatcacttaattctgcccagtgaaaatcagtgaccctgaggcactgccagattctaaagtgcctttgggatcatcagagactgtctataaataatgcaaaatcttgatctggatgtcagtgtatcaaatcttatcaaatccattgacaaatcagtggtgctatactggaaatggctactcctttggatgaaggacctcatttcccagttgcttggaacaaaagagaatttacatattgctgtaagaagggagagacggcagttgttggtagacacacagataagggtgcccaagaataattctgtctggattaaaggtcccagggaagtgacggtgccatttctgtaccaagaggtgaatataatttgcatgttgagtgcagtaattaagaacaaacgactcgactccacaaattaaaccgtcctgttttctcttctttgcctgtgaaagtgttgcctctgtaagtcactaacaaccttctgccagcagttgactgtctatcttggatcagtgcggggagtctaagacgaaagagatgtgaaccttgccctcaactcacaagagagagacacctaagagctttttaa

SEQ ID NO: 383647 - DNA, 4626 bp, Homo sapiens
  misc_feature (1857)..(1857): n is a, c, g, or t
  misc_feature (2948)..(2948): n is a, c, g, or t
  misc_feature (4188)..(4188): n is a, c, g, or t
cttgaagatattaagtgtcttatcaggctagttacataaaggaaatttcaactgggatgaaatactagcatctggatcaaaggtgaaaagactccatttatttctaccaattcagacaatgcagtgttatacatacactgaatgaatattctggatggcattgatttggcaaaacaaaaacaaaccaatacagcaataactgctcccttggaaaagttggtggattcaaaatcatgaggttccctcaccccccatcctgagccaaacaaaacattctttacctgctcagtcatacctggtaatttcacaacgattaggtgatcgtgttccctgactctcatcggcagcagggctcctggaagtcctgcttctcattactactgtggactggagcctccccagagctccctggggtccttggcctgggtgaagatggatgaagatcagatccagcagctgtgggtagaggagggtccaggaagcaggcacaaagagaggtaattcatccacatggcaaaacagagcatgatctggggaagctggaggcctcccaaacagggtaagagagagcgatacccttccattttcagctcagatttctcttttgcctcccttgctccatgtgggcctattctagtcccaacctaggtgtcagattccctctcaaccgctggttgttcactggttcctcaaccagaacccacatcttggcctatgaaagttattaactccttcccttctacccttttctgtttctgctcaccaggaaacagtggttccgccaaccactgtggtgtttggaaggactaaactggatttgactttattttggccactgttttgctctgtgagtttgtatatgcgactcttgatctctatagctaattttctcatcagtgaaattgttggttgaactacccataactggcaaataggtctctttataaacaccaattcagaaatgctgttagtggcttcttgggtctctgtgtagagaaggatcctgaggtatgccgaggttcaggagagctagcacagtgggaccccattgcctgtagaacagttgctctcaaactgtagtgtacaactcattatctggagagctcattataacacagattgctgggtcccacacccagagtttctgattcagtaggtctggggtgtggtctgagaatttgtatttctaacaaatccccaggtaaggctgatgctgctggtccagggaccatgctttagaaacaccactgtggtatttaatttcttatggctcagtttggttttcttgaaacaatgtcagcctcatcaccagctagctgacgcgaatagacatagggatgcaaacttctttaagggagtttagagatttattaaataaaacaagttgcccatctggctttaaaaaacagagtagtacacctctaagcataaaattctatgattttgtagttcatatttaactagtatggtgagacagaaaatctatgggcttttgagtcagatttagccgagtttaatcctggctctatggtttaactatttgaccttggaccagttaccaaactcctcacctttaatttacacagtaaattcacaatctttttgttttctctcattgttctatgctcaatgtctaatttatagaaggcaatcaaaaatattctttgaatgaatatgcaataatctgtaatagacaaatctatagacccgcagaaattattttctctttttgtcctctcagggtgtggggattaacgaataaattctaaaggagctttcaagaacagaaagccaaacaccagatgttctcactcataagtgggagttgaacaatgagaacacatggacaaagggagnggaacatcacacaccagggcctgttggggagtggggtgctaggggagggatagcattaagagaaatactgaatgtagatgacaggttgatgggtgcagcaaaccaccatggcacgtgtatacctatgtaccaaacctgcacattctgcatatgtacctcagaacttaaagtatatataaaaaaaaaatgtcatctttaaatatgcaggaagtctgaactctatattatgactcaactgtggtaagaaaatgtagcttcttcctctctaaatcattctatgaggccaacatcatcttgataccaaaacctggcagagacacaacaaaaacagaaaactttaggccaatatccttgatgaactttgatgcaaaaatcttcagtaaaatacttgcaaactgaatccagcagcacattaaaaaggttactcaccatgatcaagtaggctttatccctgggatgcaaggttggttcaacatatgcaaatcaataaatgtgattcatcacatgaacagaactaaagacaaaaatcacatgattattacaatagatgtagaaaaggcttttgataaaattcaacaccccctcatgttaaaaactcaataaatcagtattaaaggaacacatctcaaaataataaaagccatctatgacaaaatcatagccaacatatactgaatgaggaaaagctgaaagcaccccccttgaaaactggcacaagccaaggatgtcctctctcaccacttctattcaacatagtattggaagtcctggccagaacaattgggcaaaaggaagaaggaaagggcatcgaaataggaaaagaggaagccaaaccgtccctgtttgcagatgacatgatcccatatctagaaaaccccatagtctctgcccaaaatctccttcaactgataaaaaaacttcagcaaagtctcaggatacaaaatcaacatacaaaaatcactaatactcctatacaccaataacagtcaagccaagagccaaatcaagaatggaattccatttacaattgccacaaaaaaataaaatacctaggaatacaggtaacagggaggtgaaaaatctctataagnagagctacaaaacactgctcagagaaatcagagattacacaaacaaatggaataacatcccagaatcaatattgttaaaaatggccaacccaaagtattttacagattcaatactatttttatcaaactaccaatgacattcttcacagaactagaaaaaaactcttttaaaaattatatggaaccaaaaaaaagaaaaaagcccaacagctgaggcaatcctgagcaaaaagaaagctggaggcatcatgctacccaacttcgaaatatactacagggcaacagtaatcaaaacagtacggtattggtacaaaaacacataaaccaatggaacagaatacagagcccaggaaaaaggctgcacacctacaactatctgatctttgacaaagtcaaaaaacacaagcaatgggaaaaaatactcccttttcaataaatggtgctgcaataaccatctagccatatgcagatgactgaaactggaccccttccttacaccatataaaaaagttaacccaagatggattaaagacttaaatgtaaaatccaaaactataaaaatcctgaaagacaacccaggcattatcattctggacataggaatggtcaaagatttcatgacaaagacactgaaagcaatcacaacaaaagcaaaaatgacaaatgggacctaattaaactaaagagcttccatacagcaaaagaacctatcaattgaataaaaagacaacgtacagaatgggagaaaatttttgcaaactatgcatctgacaaaggtctagtgtctggcatctataaggaacttaaacaaattaacaagagaaaaatgaacaactgtattaagaagtgggcaaaggacatgaacagacactttcaaaaggagacacacatgtggccaacaagcttatgaaaaaaagctcaacatcactaatcattagagaaatgcaaatcaaaaccgcaatgagagaccatctcacatcagtcagaatggctattactaaaaaggtaaaaataacaggtactggcaaggttgtggagaaaaaggagcacatatatattgtcggtgggagtataaattagttccaccatggtgaaaagcagtgtggtaattcctcaaagacctaaaaacaaacagcaatcacattactggatatataccaaaggaatataaatcattctatcataaacacacatgcatgagtatgttcattgcagcactattcacaatagcaatgacatngaatcaacctaaatgctcatcactggtagaatagataaagaaaatgtggtacatgtacaccatggcatactatgtagccataaaaaagaatgaggtcatgtctttgtagtgacatgaatggagttggagaccattatccttagcaaactaatgccggaacagaaaaccaaataccacatgttctcacttataagtgggagctaaatgatgagaacacatagacacataaaggggaacaacacacactgggggcctacctgagggtaaagagtgggaagaggaaggggatcagagaaaataactaatgagtactaggcttaataccttggtgatgagataatcaatacaacgaacccccatgacacgagtttacttatgtagcaaacctgcacaaacctgcacctgaacttaaaatataagttaaataaataaaaaggg

SEQ ID NO: 383648 - DNA, 703 bp, Homo sapiens
ttcccagcactttgggaggccaaggcaggtggatcaactgaggttgggagcttgagaacagcctgaccaacagggagaaaccctgtctctactaaaaatacaaaaaattagctgtgcgtgggggtgcatgcctgtaatcccagctacttgggaagctgaggcaggagaatcacttgaacccggaggtggaggttgcggggagccaagaacgtgccactgcactccagcctgggcaagaagagtgaaactcagtctcaaaaaaaaataataataataaataaagggcagaaatcaataacattgaaagcagaaaaacagagaaaatcaatgaaacaaaaagctggtcatttgaatagaatcaacaaaattaataaattttacgacaaagataaaaacagagaagacacaaaccaacaacatcacgaataaaacaggggttatcaaaaaggctcctgcagccgttaaagagtattaagcaaatactctaaacatcaccctcagactacccaagctggtctcttcaagaaggcactcagtgcaacttccacttccctaacaagacttgaaacaccttgaaaatcataaactaccaaaattcaggcaagatgaaatagataatctgaatcgtcctataaccattaaagaaataaaatttgtaattaagagcttctggaataagaaatctccaggcccagatgatttc

SEQ ID NO: 383649 - DNA, 614 bp, Homo sapiens
ctacatcaaactgatttgaagtcaatttaagaaactccctagggtcttaaggtgtggtccacaaatcagcaacaccgacatcacatggagcttgctgggatggcagagtcctaggccccactgcagactgctaaatcagaacctgcatttcaacaagattcccatctagcttgcatgtacactgaagttggagttataagcactgttataaagagtaaatttatcttaaaataatgctgctgttgcaaactttaatcagtgtaactgcaacactaccaacatgaattatttatcctcaactaagttcagtgtgttattttattgaaggtgtagccgggcacggtggctcacgcctgtatttgcagctctttgggaggccaaggcaggcagatcgctggagctcaggagttcaagaccagcctgggcaacatggtgaaatcctgtctctacaaaaaatacaaaaattagctgggcatggtggtgtgtgcctgtagtcccagctactgggcaggctgaggcgggaggatcacttgaacccaggaggcagaggttgcagtgagccaagatcatgtcactaaattccagcctgggcaacagagcaagactgtgtctca

SEQ ID NO: 383650 - DNA, 272 bp, Homo sapiens
tgaaaatgatgaagtaattccaattctgctgatagagacctggaaatgcactagggaaaaatgacaagagtgtaacacactgctgctgattatgtcataatgattattttatgcagtttgaagaagactcactgttctaaagaaccagcatccatttccaggaaagagcagggattctccatccatacctccatgggatgaaccacattgaaaataatgatttccttctaatagcttactctacattatataaagaattccttgggattcta

SEQ ID NO: 383651 - DNA, 970 bp, Homo sapiens
gtcaggacatcacaaaacatctgccaacatcgaaaagtcatcaggagccacccagacgtggggtgtattggtgggaagaaggagcatcttagtctgcttccttctgaggcccacagttccagaaggactagcgtcctcagagcatgtggtagtggctgttcttgtcttttcctggtggtggggcctggtgacccctaacaccaacggagctgttcccaggttcatttcgtccctttttctgtggtgagatgaggctcctcctgccctccttgctgggtggtctttctgttttgaccacatcccttggaagcgtggctgggctgcgtaactccagagcagcctggtggtagctggggctgccttctgagtttgggctggtggatgctgagtatttgcattcagagccttaggcattgaccttggctttctgggaccctacgcccctctgtttgcctttgtcagtagagaccttctcacatttagggattcattttttccaagatctgtttgctaggtgtgtgtcaaacttcctcccagagcagtgacatggatgggaattgtgagtgtgttgagagacctaccctaaaagatggggctgcagtcatcctcaggggacctcctgttctcagctccacctcagccacacttggctgtgggtcagcttcttctgaatcagcatccgcaggacagcgccacccagccctgccacacttgcttcctccgcgcttcttcagaggctggagcccacccccatgctcgtcgtctgttctgcttttttgatgcacttacttgtccctttcagcgtattgcttatgtcctatgttggttaaaaaaaaaaattgccggtaatcagccccagccatttctcagcatttctagtttggaacttcagagacttcaacttacgattcctttaaggcaggagtttctactttggcactgttgacattttgggtctggtggttcttca

SEQ ID NO: 383652 - DNA, 400 bp, Homo sapiens
tgcacaccccgagtctccacactttttcgggtcaggtcacactggacgaagttgttgacacgccgtagacccacacttggctgtgggtcagcttcttctgaatcagcatccgcaggacagcgccacccagccctgccacacttgcttcctccgcgcttcttcagaggctggagcccacccccatgctcgtcgtctgttctgcttttttgatgcacttacttgtccctttcagcgtattgcttatgtcctatgttggttaaaaaaaaaaattgccggtaatcagccccagccatttctcagcatttctagtttggaacttcagagacttcaacttacgattcctttaaggcaggagtttctactttggcactgttgacattttgggtctggtggttcttca

SEQ ID NO: 383653 - DNA, 461 bp, Homo sapiens
gggcactatccctcacattcacgatgtctagcatccctaatgcccttaatgaataccagctgcagccctattcatcgtaataaccaaaattactactgaaaatttcccaaatatcccctagagggaggtatgcatatacattgagaatcaagttttctaaatgcctgtagctgtgatattcccattcctggtcactagagggaggaagtagtctttaggatgatagtacgattctgttttgtctgccctcaaagttcaagtttaagctgatatagatcagcttggcaaaaatagatcatatttcagtaaaataactgtggcatagtttctcacatatgtttggtactctttattattacaatggaatcacatttctattttatttaggctatcactgttacaaaagtaatattttctcaggctaattatctagttatgatcactgcctgtgataatacttt

SEQ ID NO: 383654 - DNA, 398 bp, Homo sapiens
atgaaaacctttgcctacaaaaagagttgtaaacaaatgttggtggcagctttattaacaatagccaggtactggaaacaacctaaatttccatcagtaggtaagtaaaacaaatatacaccttagacaaaaataaatttcagctagattagatatttaattataaagaactaaattaaagtactagaaaacaataaagaatatgatattggggttgagaaagggattttattcgcttgataccaaaccataaaagaatgaaaaatgttatcttttggcccagcacagtggctaatgcctgtaatcccagtacattcagaggctaaggcaggaggatctcttgagcccaggagtttgagaccagcctaggcaatattggaagaccctgtctctacaac

SEQ ID NO: 383655 - DNA, 367 bp, Homo sapiens
gcaggagaggagaggtagttgggattcaagatatgaaggaaatacgcaggaagggagcaagagtagcaaaaattgcaaagctgtgagatagagaggaaatgcaggaaggatttcaaagcagagtataggcaaagaatgcctggcatacaatctggagaggaaaaagatggggaaaggaagtaggaagtgaaaaccgagggaagtggaaaagaaagtgaacatgtggatggtttggaagctgtcctcaaaaagtagaaatgtggcctggaatctatacaacacaaacgaaagggaatacaatgtttggggcaggagaggaaacacctgcttaagaagggtatttgaaaagtcagagccacacccagac

SEQ ID NO: 383656 - DNA, 348 bp, Homo sapiens
ggaggttgaaacatgcattcttgccactgggacaacatgaggcctctaacagcacgggcaggcatggggtcccctgggtggacgaggccgcttggcagccaggtttggagacctggcctcctggtcagctttggagggcccctcaacagagctggagccctgcaccccaacacggctggccatgtggcctcagaacactacttattactcaatgcctggtacttggccagccccagcggtcagtctataaatactcactgacaaggtggagggctggacggccatcaccactccccagacgttctccattgcctgtctcatttccctccctccctctgacacctttct

SEQ ID NO: 383657 - DNA, 255 bp, Homo sapiens
ccatggtatgttttcataattaacatgcaaatagatgtatagtttataattaatttcaactgggcacagtgaaaatcttgaaaacctcagcatggaggcatctttgttggtagaaattcaatgaaatccccaaacatctttggttttgcaatccataatttgcagattattaatacaataaatccttgttgtctgtgagagttggcatcgtacccatgaactcctgtgtagaaagcctacaaactaaaagtccaa

SEQ ID NO: 383658 - DNA, 356 bp, Homo sapiens
ggggggtgctaatatgagcagggaccctgctgtctccctgcctgcccccgtcccacgcccaagatctgcccttgggaggaggcgcatacatacacaggacatacacagagcccatctactggctcctgtggctgctggagctgatggtctgtcctagtggtggggctccctgtcgccctgtacgtgctgggaagggggagtacctgcccacctgttgccagtgccagtggaggaagctgtgtatgagcggatagggggcccttctccgacccttccatgaggagaagggactgtctgtcccaggatggagctgaggggagggaggtgaccaatgtctgtccatccagaggtctgta

SEQ ID NO: 383659 - DNA, 299 bp, Homo sapiens
atagctgtggtggtaacccaccagagtgagcatgcttgcttctgaggatagacggagggtagtgggattggggagaggcaggacagaggcttccgttgtgtctctctaattcattgtttcttaaaaaggatttgggcttacaagtttcaaatactaagatttgataaagtcacatggattttaaaaaatcactctattgtatgtttgaaacattccataatttaaataaaaggattggtattatatatgtacttgagttgctataatgttttacgttttttctttgcttcacttttgaa

SEQ ID NO: 383660 - DNA, 959 bp, Homo sapiens
taatctaaacttaacattatgatgtccgtcatgtttttataaaaagctccctattctcttttgcagctcaaaattcataaataaacccatatgaataaaaccccactaaaatggaagctttgtttatcttcaaaaatataggcataaggtcaatttccacacactaaacgtcatactgtctacgaagcctttttaatggaaaaagcaactaaaagaccaagtcctctctgataatgatacctccgcaaattagacaaattagtccaaagatttccctttgcttacattttaaagaaacatctgaaatcaatatcaatacgaaatttggtcaattatgtaagggcttagtgtataagagctaatgtttattgagccctgtctctgtaccagacactgttctaagcatttgacacgagttatttcattaatcctcaggacaactgaatgaggcaggtttattcatccattttatggatgaggaaaatgaggcatgcagaattatgtaatacacccagcgtcacatagatagataataggagagctggactccacacactgagccatttaggatttcccctcttgtgtcaagagaacaacagaaggagcctcagaggctattcactactacctcttaaagatcacttttcatgtcctgacctgtaggaagtgcttatacataaagctaaattcttcagactttctactcaccagggccttacagtctagttctccctacgtgacatccttctcttctgcagactacattaccctccctctccccatgttcaatgcacgtagaaatgaatgtcggaacatttgcaagtccctcgagccacaggtcttgaacttaactttgaatttgcctcctcttctcagacccccaaatctagccctgccgctgtgttaaaaggggatctgtcctcttttgtctcagtaagctacttctagcgcgcatcgct

SEQ ID NO: 383661 - DNA, 2180 bp, Homo sapiens
  misc_feature (1375)..(1375): n is a, c, g, or t
atttttggagtcttccctaaggatcctctaccggcttttcgagtcagtgctgccgccgctgcccgcggctttgcagagcaggatgaatgtgatagaccacgtgcgggacatggcggccgcggggctgcactccaacgtgcggctcctcagcagcttgttacttacaatgagtaataacaaccctgagttattctccccacctcagaagtaccagcttttggtgtatcatgcagattctctctttcatgataaggaatatcggaatgctgtgagtaagtataccatggctttacagcagaagaaagcgctaagtaaaacttcaaaagtgagaccttcaactggaaattctgcatctactccacaaagtcagtgtcttccatctgaaattgaagtgaaatacaaaatggctgaatgttatacaatgctaaaacaagataaagatgccattgctatacttgatgggatcccttcaagacaaagaactcccaaaataaacatgatgctggcaaacctgtacaagaaggctggtcaggagcgcccttcagtcaccagctataaggaggtgctgaggcagtgcccattagcccttgatgccattctaggcttgttgtccctttctgtaaaaggggcagaggtggcatccatgacaatgaatgtgatccaaaccgtgcctaacttggactggctctctgtgtggatcaaagcgtatgcttttgtgcacactggtgacaactcaagagcaatcagtaccatctgttcactagagaaaaaatccttattgcgagataacgtggacctattgggaagcttggcagatctgtacttcagagctggagacaataaaaactctgtcctcaagtttgaacaggcacagatgttggatccttatctgataaaaggaatggatgtatatggctacctactggcacgagaagggcggctagaggatgttgagaaccttggatgccgccttttcaatatctctgatcagcatgcagaaccgtgggtggtttctggctgtcacagcttctatagcaaacgctactcccgggccctctatttaggagccaaggccattcagctgaacagtaatagtgttcaagctctgctacttaagggagcagcacttaggaacatgggcagagtccaagaagcaataatccactttcgggaggccatacggctcgcaccttgtcgcttagattgttatgaaggtcttatcgaatgttacttagcctccaacagtattcgagaagcaatggtaatggctaacaacgtttacaaaactctgggagcaaatgcacagacccttacccttttagccaccgtttgtcttgaagacccagtgacacaggagaaagccaaaacattattngataaagccctgacccaaaggccagattacattaaggctgtggtgaaaaaagcagaactacttagcagagaacagaaatatgaagatggaattgctttgctgaggaacgcactggctaatcagagtgactgtgtcctgcatcggatcctaggagatttccttgtagctgtcaatgagtatcaggaggcaatggaccagtatagtatagcactaaggtaggcactagcctcccttgggggaaggccactgaggagggtagaggaggcagtgagctgtgtcacaggagttatggaaacacacacacactttgtgtccatggttgaaagcagaataataatagtaatggtagaagagttatttgtgaattcatgacttctaaaaattttttcttaaaatatattaacaacattagagaactgtttcactcataaccatcccacaccactataacatctgtgttcatttgtatagctcatcttctgtccttgcccacacacacatatttttatagggctgtacctagtatatattttatattcttctttttcaaatcaaagtattgtaagtactttcccatgtttctatctactgtagtcattaagaacttgaggtctgaagttttgaatactaccttcaccacctgtgatcttgggcaagttactaacacatttccttgtctatatctagctaccttattagatattaaatgatcgaatgagggttaaatgattatttcatgtaaagctcttagccctgtgcctggtacatagtaaatgctaaataaatagtggtattcttactgttt

SEQ ID NO: 383662 - DNA, 512 bp, Homo sapiens
gtcttatcctcccctggtgtcctctcagctcccagaaccagacctccagactgggagcagataaatatggatcaactgatcgatctaatgatacatctgtcttccactctagtagaagccagtgattcccaaagagggaggtgaggagacagcacccctggtaggaatatatttatctccgggggagagttttcagaccatccccccacctccccacacacaagcacacacacccttacttaagagtctggtgtgctcctctccttttgagaaccactgatgagtgaacacagtgtgtctgaatgatacaaaggcagaaagaagttgcagcacctctcctccagcttggtaggcgcacccttccacatgaccatttccctgacccttaacatgccccagacggaattcatccatctcctcacctagacaaatgacacaccatcgacttcccggacgaatgctgagaacttgccacgctctctccccagggccccatccctatccctgccgcc

SEQ ID NO: 383663 - DNA, 612 bp, Homo sapiens
  misc_feature (8)..(9): n is a, c, g, or t
  misc_feature (15)..(15): n is a, c, g, or t
cattgaanncctttntgtaggaaccgccaattgtgttggatccagggcattcggccattatggaaatagaagatgaatcattgattgaatagttataaagatgttatagtaaatttattttattttagatattaaatgatgttttattagataaatttcaatcagggtttttagattaaacaaacaaacaattgggtacccagttaaattttcatttcagataaacaacaaataattttttagtataagtacattattgtttatctgaaattttaattgaactaacaatcctagtttgatactcccagtcttgtcattgccagctgtgttggtagtgctgtgttgaattacggaataatgagttagaactattaaaacagccaaaactccacagtcaatattagtaatttcttgctggttgaaacttgtttattatgtacaaatagattcttataatattatttaaatgactgcatttttaaatacaaggctttatatttttaactttaagatgtttttatgtgctctccaaattttttttactgtttctgattgtatggaaatataaaagtaaatatgaaacatttaaaatataatttgttgtcaaagtaa

SEQ ID NO: 383664 - DNA, 1647 bp, Homo sapiens
ccgctgcaggaattcggcacgagcagagcacacaagcttctaggacaagagccaggaagaaaccaccggaaggaaccatctcactgtgtgtaaacatgacttccaagctggccgtggctctcttggcagccttcctgatttctgcagctctgtgtgaaggtgcagttttgccaaggagtgctaaagaacttagatgtcagtgcataaagacatactccaaacctttccaccccaaatttatcaaagaactgagagtgattgagagtggaccacactgcgccaacacagaaattattgtaaagctttctgatggaagagagctctgtctggaccccaaggaaaactgggtgcagagggttgtggagaagtttttgaagagggctgagaattcataaaaaaattcattctctgtggtatccaagaatcagtgaagatgccagtgaaacttcaagcaaatctacttcaacacttcatgtattgtgtgggtctgttgtagggttgccagatgcaatacaagattcctggttaaatttgaatttcagtaaacaatgaatagtttttcattgtaccatgaaatatccagaacatacttatatgtaaagtattatttatttgaatctacaaaaaacaacaaataatttttaaatataaggattttcctagatattgcacgggagaatatacaaatagcaaaattgaggccaagggccaagagaatatccgaactttaatttcaggaattgaatgggtttgctagaatgtgatatttgaagcatcacataaaaatgatgggacaataaattttgccataaagtcaaatttagctggaaatcctggatttttttctgttaaatctggcaaccctagtctgctagccaggatccacaagtccttgttccactgtgccttggtttctcctttatttctaagtggaaaaagtattagccaccatcttacctcacagtgatgttgtgaggacatgtggaagcactttaagttttttcatcataacataaattattttcaagtgtaacttattaacctatttattatttatgtatttatttaagcatcaaatatttgtgcaagaatttggaaaaatagaagatgaatcattgattgaatagttataaagatgttatagtaaatttattttattttagatattaaatgatgttttattagataaatttcaatcagggtttttagattaaacaaacaaacaattgggtacccagttaaattttcatttcagataaacaacaaataattttttagtataagtacattattgtttatctgaaattttaattgaactaacaatcctagtttgatactcccagtcttgtcattgccagctgtgttggtagtgctgtgttgaattacggaataatgagttagaactattaaaacagccaaaactccacagtcaatattagtaatttcttgctggttgaaacttgtttattatgtacaaatagattcttataatattatttaaatgactgcatttttaaatacaaggctttatatttttaactttaagatgtttttatgtgctctccaaattttttttactgtttctgattgtatggaaatataaaagtaaatatgaaacatttaaaatataatttgttgtcaaagtaa

SEQ ID NO: 383665 - DNA, 1652 bp, Homo sapiens
tgagggtgcataagttctctagtagggtgatgatataaaaagccaccggagcactccataaggcacaaactttcagagacagcagagcacacaagcttctaggacaagagccaggaagaaaccaccggaaggaaccatctcactgtgtgtaaacatgacttccaagctggccgtggctctcttggcagccttcctgatttctgcagctctgtgtgaaggtgcagttttgccaaggagtgctaaagaacttagatgtcagtgcataaagacatactccaaacctttccaccccaaatttatcaaagaactgagagtgattgagagtggaccacactgcgccaacacagaaattattgtaaagctttctgatggaagagagctctgtctggaccccaaggaaaactgggtgcagagggttgtggagaagtttttgaagagggctgagaattcataaaaaaattcattctctgtggtatccaagaatcagtgaagatgccagtgaaacttcaagcaaatctacttcaacacttcatgtattgtgtgggtctgttgtagggttgccagatgcaatacaagattcctggttaaatttgaatttcagtaaacaatgaatagtttttcattgtaccatgaaatatccagaacatacttatatgtaaagtattatttatttgaatctacaaaaaacaacaaataatttttaaatataaggattttcctagatattgcacgggagaatatacaaatagcaaaattgaggccaagggccaagagaatatccgaactttaatttcaggaattgaatgggtttgctagaatgtgatatttgaagcatcacatagatttttttctgttaaatctggcaaccctagtctgctagccaggatccacaagtccttgttccactgtgccttggtttctcctttatttctaagtggaaaaagtattagccaccatcttacctcacagtgatgttgtgaggacatgtggaagcactttaagttttttcatcataacataaattattttcaagtgtaacttattaacctatttattatttatgtatttatttaagcatcaaatatttgtgcaagaatttggaaaaatagaagatgaatcattgattgaatagttataaagatgttatagtaaatttattttattttagatattaaatgatgttttattagataaatttcaatcagggtttttagattaaacaaacaaacaattgggtacccagttaaattttcatttcagataaacaacaaataattttttagtataagtacattattgtttatctgaaattttaattgaactaacaatcctagtttgatactcccagtcttgtcattgccagctgtgttggtagtgctgtgttgaattacggaataatgagttagaactattaaaacagccaaaactccacagtcaatattagtaatttcttgctggttgaaacttgtttattatgtacaaatagattcttataatattatttaaatgactgcatttttaaatacaaggctttatatttttaactttaagatgtttttatgtgctctccaaattttttttactgtttctgattgtatggaaatataaaagtaaatatgaaacatttaaaatataatttgttgtcaaagtaa

SEQ ID NO: 383666 - DNA, 1652 bp, Homo sapiens
tgagggtgcataagttctctagtagggtgatgatataaaaagccaccggagcactccataaggcacaaactttcagagacagcagagcacacaagcttctaggacaagagccaggaagaaaccaccggaaggaaccatctcactgtgtgtaaacatgacttccaagctggccgtggctctcttggcagccttcctgatttctgcagctctgtgtgaaggtgcagttttgccaaggagtgctaaagaacttagatgtcagtgcataaagacatactccaaacctttccaccccaaatttatcaaagaactgagagtgattgagagtggaccacactgcgccaacacagaaattattgtaaagctttctgatggaagagagctctgtctggaccccaaggaaaactgggtgcagagggttgtggagaagtttttgaagagggctgagaattcataaaaaaattcattctctgtggtatccaagaatcagtgaagatgccagtgaaacttcaagcaaatctacttcaacacttcatgtattgtgtgggtctgttgtagggttgccagatgcaatacaagattcctggttaaatttgaatttcagtaaacaatgaatagtttttcattgtaccatgaaatatccagaacatacttatatgtaaagtattatttatttgaatctacaaaaaacaacaaataatttttaaatataaggattttcctagatattgcacgggagaatatacaaatagcaaaattgaggccaagggccaagagaatatccgaactttaatttcaggaattgaatgggtttgctagaatgtgatatttgaagcatcacataaaaatgatgggacaataaattttgccataaagtcaaatttagctggaaatcctggatttttttctgttaaatctggcaaccctagtctgctagccaggatccacaagtccttgttccactgtgccttggtttctcctttatttctaagtggaaaaagtattagccaccatcttacctcacagtgatgttgtgaggacatgtggaagcactttaagttttttcatcataacataaattattttcaagtgtaacttattaacctatttattatttatgtatttatttaagcatcaaatatttgtgcaagaatttggaattttattttagatattaaatgatgttttattagataaatttcaatcagggtttttagattaaacaaacaaacaattgggtacccagttaaattttcatttcagataaacaacaaataattttttagtataagtacattattgtttatctgaaattttaattgaactaacaatcctagtttgatactcccagtcttgtcattgccagctgtgttggtagtgctgtgttgaattacggaataatgagttagaactattaaaacagccaaaactccacagtcaatattagtaatttcttgctggttgaaacttgtttattatgtacaaatagattcttataatattatttaaatgactgcatttttaaatacaaggctttatatttttaactttaagatgtttttatgtgctctccaaattttttttactgtttctgattgtatggaaatataaaagtaaatatgaaacatttaaaatataatttgttgtcaaagtaa

SEQ ID NO: 383667 - DNA, 1640 bp, Homo sapiens
tgagggtgcataagttctctagtagggtgatgatataaaaagccaccggagcactccataaggcacaaactttcagagacagcagagcacacaagcttctaggacaagagccaggaagaaaccaccggaaggaaccatctcactgtgtgtaaacatgacttccaagctggccgtggctctcttggcagccttcctgatttctgcagctctgtgtgaaggtgcagttttgccaaggagtgctaaagaacttagatgtcagtgcataaagacatactccaaacctttccaccccaaatttatcaaagaactgagagtgattgagagtggaccacactgcgccaacacagaaattattgtaaagctttctgatggaagagagctctgtctggaccccaaggaaaactgggtgcagagggttgtggagaagtttttgaagagggctgagaattcataaaaaaattcattctctgtggtatccaagaatcagtgaagatgccagtgaaacttcaagcaaatctacttcaacacttcatgtattgtgtgggtctgttgtagggttgccagatgcaatacaagattcctggttaaatttgaatttcagtaaacaatgaatagtttttcattgtaccatgaaatatccagaacatacttatatgtaaagtattatttatttgaatctacaaaaaacaacaaataatttttaaatataaggattttcctagatattgcacgggagaatatacttgctagaatgtgatatttgaagcatcacataaaaatgatgggacaataaattttgccataaagtcaaatttagctggaaatcctggatttttttctgttaaatctggcaaccctagtctgctagccaggatccacaagtccttgttccactgtgccttggtttctcctttatttctaagtggaaaaagtattagccaccatcttacctcacagtgatgttgtgaggacatgtggaagcactttaagttttttcatcataacataaattattttcaagtgtaacttattaacctatttattatttatgtatttatttaagcatcaaatatttgtgcaagaatttggaaaaatagaagatgaatcattgattgaatagttataaagatgttatagtaaatttattttattttagatattaaatgatgttttattagataaatttcaatcagggtttttagattaaacaaacaaacaattgggtacccagttaaattttcatttcagataaacaacaaataattttttagtataagtacattattgtttatctgaaattttaattgaactaacaatcctagtttgatactcccagtcttgtcattgccagctgtgttggtagtgctgtgttgaattacggaataatgagttagaactattaaaacagccaaaactccacagtcaatattagtaatttcttgctggttgaaacttgtttattatgtacaaatagattcttataatattatttaaatgactgcatttttaaatacaaggctttatatttttaactttaagatgtttttatgtgctctccaaattttttttactgtttctgattgtatggaaatataaaagtaaatatgaaacatttaaaatataatttgttgtcaaagtaa

SEQ ID NO: 383668 - DNA, 1645 bp, Homo sapiens
tgagggtgcataagttctctagtagggtgatgatataaaaagccaccggagcactccataaggcacaaactttcagagacagcagagcacacaagcttctaggacaagagccaggaagaaaccaccggaaggaaccatctcactgtgtgtaaacatgacttccaagctggccgtggctctcttggcagccttcctgatttctgcagctctgtgtgaaggtgcagttttgccaaggagtgctaaagaacttagatgtcagtgcataaagacatactccaaacctttccaccccaaatttatcaaagaactgagagtgattgagagtggaccacactgcgccaacacagaaattattgtaaagctttctgatggaagagagctctgtctggaccccaaggaaaactgggtgcagagggttgtggagaagtttttgaagagggctgagaattcataaaaaaattcattctctgtggtatccaagaatcagtgaagatgccagtgaaacttcaagcaaatctacttcaacacttcatgtattgtgtgggtctgttgtagggttgccagatgcaatacaagattcctggttaaatttgaatttcagtaaacaatgaatagtttttcattgtaccatgaaatatccagaacatacttatatgtaaagtattatttatttgaatctacaaaatagcaaaattgaggccaagggccaagagaatatccgaactttaatttcaggaattgaatgggtttgctagaatgtgatatttgaagcatcacataaaaatgatgggacaataaattttgccataaagtcaaatttagctggaaatcctggatttttttctgttaaatctggcaaccctagtctgctagccaggatccacaagtccttgttccactgtgccttggtttctcctttatttctaagtggaaaaagtattagccaccatcttacctcacagtgatgttgtgaggacatgtggaagcactttaagttttttcatcataacataaattattttcaagtgtaacttattaacctatttattatttatgtatttatttaagcatcaaatatttgtgcaagaatttggaaaaatagaagatgaatcattgattgaatagttataaagatgttatagtaaatttattttattttagatattaaatgatgttttattagataaatttcaatcagggtttttagattaaacaaacaaacaattgggtacccagttaaattttcatttcagataaacaacaaataattttttagtataagtacattattgtttatctgaaattttaattgaactaacaatcctagtttgatactcccagtcttgtcattgccagctgtgttggtagtgctgtgttgaattacggaataatgagttagaactattaaaacagccaaaactccacagtcaatattagtaatttcttgctggttgaaacttgtttattatgtacaaatagattcttataatattatttaaatgactgcatttttaaatacaaggctttatatttttaactttaagatgtttttatgtgctctccaaattttttttactgtttctgattgtatggaaatataaaagtaaatatgaaacatttaaaatataatttgttgtcaaagtaa

SEQ ID NO: 383669 - DNA, 1678 bp, Homo sapiens
tgagggtgcataagttctctagtagggtgatgatataaaaagccaccggagcactccataaggcacaaactttcagagacagcagagcacacaagcttctaggacaagagccaggaagaaaccaccggaaggaaccatctcactgtgtgtaaacatgacttccaagctggccgtggctctcttggcagccttcctgatttctgcagctctgtgtgaaggtgcagttttgccaaggagtgctaaagaacttagatgtcagtgcataaagacatactccaaacctttccaccccaaatttatcaaagaactgagagtgattgagagtggaccacactgcgccaacacagaaattattgtaaagctttctgatggaagagagctctgtctggaccccaaggaaaactgggtgcagagggttgtggagaagtttttgaagagggctgagaattcataaaaaaattcattctctgtggtatccaagaatcagtgaagatgccagtgaaacttcaagcaaatctacttcaacacttcatgtattgtgtgggtctgttgtagggttgccagatgcaatacaagattcctggttaaatttgaatttcacatgaaatatccagaacatacttatatgtaaagtattatttatttgaatctacaaaaaacaacaaataatttttaaatataaggattttcctagatattgcacgggagaatatacaaatagcaaaattgaggccaagggccaagagaatatccgaactttaatttcaggaattgaatgggtttgctagaatgtgatatttgaagcatcacataaaaatgatgggacaataaattttgccataaagtcaaatttagctggaaatcctggatttttttctgttaaatctggcaaccctagtctgctagccaggatccacaagtccttgttccactgtgccttggtttctcctttatttctaagtggaaaaagtattagccaccatcttacctcacagtgatgttgtgaggacatgtggaagcactttaagttttttcatcataacataaattattttcaagtgtaacttattaacctatttattatttatgtatttatttaagcatcaaatatttgtgcaagaatttggaaaaatagaagatgaatcattgattgaatagttataaagatgttatagtaaatttattttattttagatattaaatgatgttttattagataaatttcaatcagggtttttagattaaacaaacaaacaattgggtacccagttaaattttcatttcagataaacaacaaataattttttagtataagtacattattgtttatctgaaattttaattgaactaacaatcctagtttgatactcccagtcttgtcattgccagctgtgttggtagtgctgtgttgaattacggaataatgagttagaactattaaaacagccaaaactccacagtcaatattagtaatttcttgctggttgaaacttgtttattatgtacaaatagattcttataatattatttaaatgactgcatttttaaatacaaggctttatatttttaactttaagatgtttttatgtgctctccaaattttttttactgtttctgattgtatggaaatataaaagtaaatatgaaacatttaaaatataatttgttgtcaaagtaa

SEQ ID NO: 383670 - DNA, 1613 bp, Homo sapiens
ggccggcacgagctcgtgccgaattcggcacgcggaaggaaccatctcactgtgtgtaaacatgacttccaagctggccgtggctctcttggcagccttcctgatttctgcagctctgtgtgaaggtgcagttttgccaaggagtgctaaagaacttagatgtcagtgcataaagacatactccaaacctttccaccccaaatttatcaaagaactgagagtgattgagagtggaccacactgcgccaacacagaaattattgtaaagctttctgatggaagagagctctgtctggaccccaaggaaaactgggtgcagagggttgtggagaagtttttgaagagggctgagaattcataaaaaaattcattctctgtggtatccaagaatcagtgaagatgccagtgaaacttcaagcaaatctacttcaacacttcatgtattgtgtgggtctgttgtagggttgccagatgcaatacaagattcctggttaaatttgaatttcagtaaacaatgaatagtttttcattgtaccatgaaatatccagaacatacttatatgtaaagtattatttatttgaatctacaaaaaacaacaaataatttttaaatataaggattttcctagatattgcacgggagaatatacaaatagcaaaattgaggccaagggccaagagaatatccgaactttaatttcaggaattgaatgggtttgctagaatgtgatatttgaagcatcacataaaaatgatgggacaataaattttgccataaagtcaaatttagctggaaatcctggatttttttctgttaaatctggcaaccctagtctgctagccaggatccacaagtccttgttccactgtgccttggtttctcctttatttctaagtggaaaaagtattagccaccatcttacctcacagtgatgttgtgaggacatgtggaagcactttaagttttttcatcataacataaattattttcaagtgtaacttattaacctatttattatttatgtatttatttaagcatcaaatatttgtgcaagaatttggaaaaatagaagatgaatcattgattgaatagttataaagatgttatagtaaatttattttattttagatattaaatgatgttttattagataaatttcaatcagggtttttagattaaacaaacaaacaattgggtacccagttaaattttcatttcagataaacaacaaataattttttagtataagtacattattgtttatctgaaattttaattgaactaacaatcctagtttgatactcccagtcttgtcattgccagctgtgttggtagtgctgtgttgaattacggaataatgagttagaactattaaaacagccaaaactccacagtcaatattagtaatttcttgctggttgaaacttgtttattatgtacaaatagattcttataatattatttaaatgactgcatttttaaatacaaggctttatatttttaactttaagatgtttttatgtgctctccaaattttttttactgtttctgattgtatggaaatataaaagtaaatatgaaacatttaaaatataatttgttgtcaaagtaa

SEQ ID NO: 383671 - DNA, 1653 bp, Homo sapiens
  misc_feature (7)..(7): n is a, c, g, or t
  misc_feature (20)..(20): n is a, c, g, or t
  misc_feature (24)..(24): n is a, c, g, or t
atcgacncccttcgcatgancccntggataggcgagccctctggtggacccggaattcggcctatggccggcacaaactttcagagacagcagagcacacaagcttctaggacaagagccaggaagaaaccaccggaaggaaccatctcactgtgtgtaaacatgacttccaagctggccgtggctctcttggcagccttcctgatttctgcagctctgtgtgaaggtgcagttttgccaaggagtgctaaagaacttagatgtcagtgcataaagacatactccaaacctttccaccccaaatttatcaaagaactgagagtgattgagagtggaccacactgcgccaacacagaaattattgtaaagctttctgatggaagagagctctgtctggaccccaaggaaaactgggtgcagagggttgtggagaagtttttgaagagtgaaacttcaagcaaatctacttcaacacttcatgtattgtgtgggtctgttgtagggttgccagatgcaatacaagattcctggttaaatttgaatttcagtaaacaatgaatagtttttcattgtaccatgaaatatccagaacatacttatatgtaaagtattatttatttgaatctacaaaaaacaacaaataatttttaaatataaggattttcctagatattgcacgggagaatatacaaatagcaaaattgaggccaagggccaagagaatatccgaactttaatttcaggaattgaatgggtttgctagaatgtgatatttgaagcatcacataaaaatgatgggacaataaattttgccataaagtcaaatttagctggaaatcctggatttttttctgttaaatctggcaaccctagtctgctagccaggatccacaagtccttgttccactgtgccttggtttctcctttatttctaagtggaaaaagtattagccaccatcttacctcacagtgatgttgtgaggacatgtggaagcactttaagttttttcatcataacataaattattttcaagtgtaacttattaacctatttattatttatgtatttatttaagcatcaaatatttgtgcaagaatttggaaaaatagaagatgaatcattgattgaatagttataaagatgttatagtaaatttattttattttagatattaaatgatgttttattagataaatttcaatcagggtttttagattaaacaaacaaacaattgggtacccagttaaattttcatttcagataaacaacaaataattttttagtataagtacattattgtttatctgaaattttaattgaactaacaatcctagtttgatactcccagtcttgtcattgccagctgtgttggtagtgctgtgttgaattacggaataatgagttagaactattaaaacagccaaaactccacagtcaatattagtaatttcttgctggttgaaacttgtttattatgtacaaatagattcttataatattatttaaatgactgcatttttaaatacaaggctttatatttttaactttaagatgtttttatgtgctctccaaattttttttactgtttctgattgtatggaaatataaaagtaaatatgaaacatttaaaatataatttgttgtcaaagtaa

SEQ ID NO: 383672 - DNA, 1583 bp, Homo sapiens
ccagcttggaagtcatgtttacacacagtgagatggttccaagctggccgtggctctcttggcagccttcctgatttctgcagctctgtgtgaaggtgcagttttgccaaggagtgctaaagaacttagatgtcagtgcataaagacatactccaaacctttccaccccaaatttatcaaagaactgagagtgattgagagtggaccacactgcgccaacacagaaattattgtaaagctttctgatggaagagagctctgtctggaccccaaggaaaactgggtgcagagggttgtggagaagtttttgaagagggctgagaattcataaaaaaattcattctctgtggtatccaagaatcagtgaagatgccagtgaaacttcaagcaaatctacttcaacacttcatgtattgtgtgggtctgttgtagggttgccagatgcaatacaagattcctggttaaatttgaatttcagtaaacaatgaatagtttttcattgtaccatgaaatatccagaacatacttatatgtaaagtattatttatttgaatctacaaaaaacaacaaataatttttaaatataaggattttcctagatattgcacgggagaatatacaaatagcaaaattgaggccaagggccaagagaatatccgaactttaatttcaggaattgaatgggtttgctagaatgtgatatttgaagcatcacataaaaatgatgggacaataaattttgccataaagtcaaatttagctggaaatcctggatttttttctgttaaatctggcaaccctagtctgctagccaggatccacaagtccttgttccactgtgccttggtttctcctttatttctaagtggaaaaagtattagccaccatcttacctcacagtgatgttgtgaggacatgtggaagcactttaagttttttcatcataacataaattattttcaagtgtaacttattaacctatttattatttatgtatttatttaagcatcaaatatttgtgcaagaatttggaaaaatagaagatgaatcattgattgaatagttataaagatgttatagtaaatttattttattttagatattaaatgatgttttattagataaatttcaatcagggtttttagattaaacaaacaaacaattgggtacccagttaaattttcatttcagataaacaacaaataattttttagtataagtacattattgtttatctgaaattttaattgaactaacaatcctagtttgatactcccagtcttgtcattgccagctgtgttggtagtgctgtgttgaattacggaataatgagttagaactattaaaacagccaaaactccacagtcaatattagtaatttcttgctggttgaaacttgtttattatgtacaaatagattcttataatattatttaaatgactgcatttttaaatacaaggctttatatttttaactttaagatgtttttatgtgctctccaaattttttttactgtttctgattgtatggaaatataaaagtaaatatgaaacatttaaaatataatttgttgtcaaagtaa

SEQ ID NO: 383673 - DNA, 1611 bp, Homo sapiens
  misc_feature (7)..(7): n is a, c, g, or t
  misc_feature (20)..(20): n is a, c, g, or t
  misc_feature (24)..(24): n is a, c, g, or t
atcgacncccttcgcatgancccntggataggcgagccctctggtggacccggaattcggcctatggccggcacaaactttcagagacagcagagcacacaagcttctaggacaagagccaggaagaaaccaccggaaggaaccatctcactgtgtgtaaacatgacttccaagctggccgtggctctcttggcagccttcctgatttctgcagctctgtgtgaaggtgcagttttgccaaggagtgctaaagaacttagatgtcagtgcataaagacatactccaaacctttccacccaaggaaaactgggtgcagagggttgtggagaagtttttgaagagggctgagaattcataaaaaaattcattctctgtggtatccaagaatcagtgaagatgccagtgaaacttcaagcaaatctacttcaacacttcatgtattgtgtgggtctgttgtagggttgccagatgcaatacaagattcctggttaaatttgaatttcagtaaacaatgaatagtttttcattgtaccatgaaatatccagaacatacttatatgtaaagtattatttatttgaatctacaaaaaacaacaaataatttttaaatataaggattttcctagatattgcacgggagaatatacaaatagcaaaattgaggccaagggccaagagaatatccgaactttaatttcaggaattgaatgggtttgctagaatgtgatatttgaagcatcacataaaaatgatgggacaataaattttgccataaagtcaaatttagctggaaatcctggatttttttctgttaaatctggcaaccctagtctgctagccaggatccacaagtccttgttccactgtgccttggtttctcctttatttctaagtggaaaaagtattagccaccatcttacctcacagtgatgttgtgaggacatgtggaagcactttaagttttttcatcataacataaattattttcaagtgtaacttattaacctatttattatttatgtatttatttaagcatcaaatatttgtgcaagaatttggaaaaatagaagatgaatcattgattgaatagttataaagatgttatagtaaatttattttattttagatattaaatgatgttttattagataaatttcaatcagggtttttagattaaacaaacaaacaattgggtacccagttaaattttcatttcagataaacaacaaataattttttagtataagtacattattgtttatctgaaattttaattgaactaacaatcctagtttgatactcccagtcttgtcattgccagctgtgttggtagtgctgtgttgaattacggaataatgagttagaactattaaaacagccaaaactccacagtcaatattagtaatttcttgctggttgaaacttgtttattatgtacaaatagattcttataatattatttaaatgactgcatttttaaatacaaggctttatatttttaactttaagatgtttttatgtgctctccaaattttttttactgtttctgattgtatggaaatataaaagtaaatatgaaacatttaaaatataatttgttgtcaaagtaa

SEQ ID NO: 383674 - DNA, 880 bp, Homo sapiens
tgagggtgcataagttctctagtagggtgatgatataaaaagccaccggagcactccataaggcacaaactttcagagacagcagagcacacaagcttctaggacaagagccaggaagaaaccaccggaaggaaccatctcactgtgtgtaaacatgacttccaagctggccgtggctctcttggcagccttcctgatttctgcagctctgtgtgaaggtgcagttttgccaaggagtgctaaagaacttagatgtcagtgcataaagacatactccaaacctttccaccccaaatttatcaaagaactgagagtgattgagagtggaccacactgcgccaacacagaaattattgtaaagctttctgatggaagagagctctgtctggaccccaaggaaaactgggtgcagagggttgtggagaagtttttgaagagggctgagaattcataaaaaaattcattctctgtggtatccaagaatcagtgaagatgccagtgaaacttcaagcaaatctacttcaacacttcatgtattgtgtgggtctgttgtagggttgccagatgcaatacaagattcctggttaaatttgaatttcagtaaacaatgaatagtttttcattgtaccatgaaatatccagaacatacttatatgtaaagtattatttatttgaatctacaaaaaacaacaaataatttttaaatataaggattttcctagatattgcacgggagaatatacaaatagcaaaattgaggccaagggccaagagaatatccgaactttaatttcaggaattgaatgggtaaaggggtttgagcccctaaaatgagggacacaatgtggctaaggccattgggaaccgggatccgggaagg

SEQ ID NO: 383675 - DNA, 1151 bp, Homo sapiens
  misc_feature (7)..(7): n is a, c, g, or t
  misc_feature (20)..(20): n is a, c, g, or t
  misc_feature (24)..(24): n is a, c, g, or t
atcgacncccttcgcatgancccntggataggcgagccctctggtggacccggaattcggcctatggccggcacaaactttcagagacagcagagcacacaagcttctaggacaagagccaggaagaaaccaccggaaggaaccatctcactgtgtgtaaacatgacttccaagctggccgtggctctcttggcagccttcctgatttctgcagctctgtgtgaaggtgcagttttgccaaggagtgctaaagaacttagatgtcagtgcataaagacatactccaaacctttccaccccaaatttatcaaagaactgagagtgattgagagtggaccacactgcgccaacacagaaattatcaaccctagtctgctagccaggatccacaagtccttgttccactgtgccttggtttctcctttatttctaagtggaaaaagtattagccaccatcttacctcacagtgatgttgtgaggacatgtggaagcactttaagttttttcatcataacataaattattttcaagtgtaacttattaacctatttattatttatgtatttatttaagcatcaaatatttgtgcaagaatttggaaaaatagaagatgaatcattgattgaatagttataaagatgttatagtaaatttattttattttagatattaaatgatgttttattagataaatttcaatcagggtttttagattaaacaaacaaacaattgggtacccagttaaattttcatttcagataaacaacaaataattttttagtataagtacattattgtttatctgaaattttaattgaactaacaatcctagtttgatactcccagtcttgtcattgccagctgtgttggtagtgctgtgttgaattacggaataatgagttagaactattaaaacagccaaaactccacagtcaatattagtaatttcttgctggttgaaacttgtttattatgtacaaatagattcttataatattatttaaatgactgcatttttaaatacaaggctttatatttttaactttaagatgtttttatgtgctctccaaattttttttactgtttctgattgtatggaaatataaaagtaaatatgaaacatttaaaatataatttgttgtcaaagtaa

SEQ ID NO: 383676 - DNA, 765 bp, Homo sapiens
atgtatttatttaagcatcaaatatttgtgcaagaatttggaaaaatagaagatgaatcattgattgaatagttataaagatgttatagtaaatttattttattttagatattaaatgatgttttattagataaattattttcaagtgtaacttattaacctatttattatttatgtatttatttaagcatcaaatatttgtgcaagaatttggaaaaatagaagatgaatcattgattgaatagttataaagatgttatagtaaatttattttattttagatattaaatgatgttttattagataaatttcaatcagggtttttagattaaacaaacaaacaattgggtacccagttaaattttcatttcagataaacaacaaataattttttagtataagtacattattgtttatctgaaattttaattgaactaacaatcctagtttgatactcccagtcttgtcattgccagctgtgttggtagtgctgtgttgaattacggaataatgagttagaactattaaaacagccaaaactccacagtcaatattagtaatttcttgctggttgaaacttgtttattatgtacaaatagattcttataatattatttaaatgactgcatttttaaatacaaggctttatatttttaactttaagatgtttttatgtgctctccaaattttttttactgtttctgattgtatggaaatataaaagtaaatatgaaacatttaaaatataatttgttgtcaaagtaa

SEQ ID NO: 383677 - DNA, 1003 bp, Homo sapiens
  misc_feature (7)..(7): n is a, c, g, or t
  misc_feature (20)..(20): n is a, c, g, or t
  misc_feature (24)..(24): n is a, c, g, or t
atcgacncccttcgcatgancccntggataggcgagccctctggtggacccggaattcggcctatggccggcacaaactttcagagacagcagagcacacaagcttctaggacaagagccaggaagaaaccaccggaaggaaccatctcactgtgtgtaaacatgacttccaagctggccgtggctctcttggcagccttcctgatttctgcagctctgtgtgaaggtgcagttttgccaaggagtgctaaagaacttagatgtcagtgcataaagacatactccaaacctttccaaagtccttgttccactgtgccttggtttctcctttatttctaagtggaaaaagtattagccaccatcttacctcacagtgatgttgtgaggacatgtggaagcactttaagttttttcatcataacataaattattttcaagtgtaacttattaacctatttattatttatgtatttatttaagcatcaaatatttgtgcaagaatttggaattttattttagatattaaatgatgttttattagataaatttcaatcagggtttttagattaaacaaacaaacaattgggtacccagttaaattttcatttcagataaacaacaaataattttttagtataagtacattattgtttatctgaaattttaattgaactaacaatcctagtttgatactcccagtcttgtcattgccagctgtgttggtagtgctgtgttgaattacggaataatgagttagaactattaaaacagccaaaactccacagtcaatattagtaatttcttgctggttgaaacttgtttattatgtacaaatagattcttataatattatttaaatgactgcatttttaaatacaaggctttatatttttaactttaagatgtttttatgtgctctccaaattttttttactgtttctgattgtatggaaatataaaagtaaatatgaaacatttaaaatataatttgttgtcaaagtaa

SEQ ID NO: 383678 - DNA, 530 bp, Homo sapiens
  misc_feature (7)..(7): n is a, c, g, or t
  misc_feature (20)..(20): n is a, c, g, or t
  misc_feature (24)..(24): n is a, c, g, or t
atcgacncccttcgcatgancccntggataggcgagccctctggtggacccggaattcggcctatggccggcacaaactttcagagacagcagagcacacaagcttctaggacaagagccaggaagaaaccaccggaaggaaccatctcactgtgtgtaaacatgacttccaagctggccgtggctctcttggcagccttcctgatttctgcagctctgtgtgaaggtgcagttttgccaaggagtgctaaagaacttagatgtcagtgcataaagacatactccaaacctttccaccccaaatttatcaaagaactgagagtgattgagagtggaccacactgcgccaacacagaaattattgtaaagctttctgatggaagagagctctgtctggaccccaaggaaaactgggtgcagagggttgtggagaagtttttgaagaggcagaggtccctgaaaacagggggatggattcataaactctcctcaaatccaagagaagcacagcaaactagtgatcatgggtc

SEQ ID NO: 383679 - DNA, 800 bp, Homo sapiens
  misc_feature (7)..(7): n is a, c, g, or t
  misc_feature (20)..(20): n is a, c, g, or t
  misc_feature (24)..(24): n is a, c, g, or t
atcgacncccttcgcatgancccntggataggcgagccctctggtggacccggaattcggcctatggccggcacaaactttcagagacagcagagcacacaagcttctaggacaagagccaggaagaaaccaccggaaggaaccatctcactgtgtgtaaacatgacttccaagctggccgtggctctcttggcagccttcctgatttctgcagctctgtgtgaaggtgcagttttgccaaggagtgctaaagaacttagatgtcagtgcataaagacatactccaaacctttccaccccaaatttatcaaagaactgagagtgattgagagtggaccacactgcgccaacacagaaattatgcttcttgtaccgctttcttgatggaagagagctctgtctggagccccaaggacaaattggtggttgccgcagggttgtggaagaaagtacccggacacaggggctgactggctgagaattcataaaaaaattcattctctgtggtatccaagaatcagtgaagatgccagtgaaacttcaagcaaatctacttcaacacttcatgtattgtgtgggtctgttgtagggttgccagatgcaatacaagattcctggttaaatttgaatttcagtaaacaatgaatagtttttcattgtaccatgaaatatccagaacatacttatatgtaagtcatatcataggaatctacccacaccacccatcattcaacctataggatttccacacatggcggggagatttaccataccaaactgaggccagggcagcccgacca

SEQ ID NO: 383680 - DNA, 559 bp, Homo sapiens
  misc_feature (7)..(7): n is a, c, g, or t
  misc_feature (20)..(20): n is a, c, g, or t
  misc_feature (24)..(24): n is a, c, g, or t
atcgacncccttcgcatgancccntggataggcgagccctctggtggacccggaattcggcctatggccggcacaaactttcagagacagcagagcacacaagcttctaggacaagagccaggaagaaaccaccggaaggaaccatctcactgtgtgtaaacatgacttccaagctggccgtggctctcttggcagccttcctgatttctgcagctctgtgtgaaggtaagcacatctttctgacctacagcgttttcctatgtctaaatgtgatccttagatagcaaagctattcttgatgctttggtaacaaacatcctttttattcagaaacagaatataatcttagcagtcaattaatgttaaattgaagatttagaagcttttataatttataccatgtagcatgcatatatttaacgtaaataagtaatttatagtatgtcctattgagaaccacggttacctatattatgtattaatattgagttgagcaaggtaactcagacaattccactccttgtagtatttcattgacaagcctcagatttgtcatta

SEQ ID NO: 383681 - DNA, 612 bp, Homo sapiens
aaagtcagcctataaatttctttctgttgctaaaaatcgtcattaggtatctgcctttttggttaaaaaaaaaaggaatagcatcaatagtgagtttgttgtactcatgaccagaaagaccatacatagtttgcccaggaaattctgggtttaagcttgtgtcctatactcttagtaaagttctttgtcactcccagtagtgtcctattttagatgataatttctttgatctccctatttatagttgagaatatagagcatttctaacacatgaatgtcaaagactatattgacttttcaagaaccctactttccttcttattaaacatagctcatctttatatttttaattttattttagggctgagggctgagaattcataaaaaaattcattctctgtggtatccaagaatcagtgaagatgccagtgaaacttcaagcaaatctacttcaacacttcatgtattgtgtgggtctgttgtagggttgccagatgcaatacaagattcctggttaaatttgaatttcagtaaacaatgaatagtttttcattgtaccatgaaatatccagaacatacttatatgtaaagtattatttatttgaatctaca

SEQ ID NO: 383682 - DNA, 1714 bp, Homo sapiens
  misc_feature (7)..(7): n is a, c, g, or t
  misc_feature (20)..(20): n is a, c, g, or t
  misc_feature (24)..(24): n is a, c, g, or t
atcgacncccttcgcatgancccntggataggcgagccctctggtggacccggaattcggcctatggccggcacaaactttcagagacagcagagcacacaagcttctaggacaagagccaggaagaaaccaccggaaggaaccatctcactgtgtgtaaacatgacttccaagctggccgtggctctcttggcagccttcctgatttctgcagctctgtgtgaaggtgcagttttgccaaggagtgctaaagaacttagatgtcagtgcataaagacatactccaaacctttccaccccaaatttatcaaagaactgagagtgattgagagtggaccacactgcgccaacacagaaattattgtaaagctttctgatggaagagagctctgtctggaccccaaggaaaactgggtgcagagggttgtggagaagtttttgaagagggctgagaattcataaaaaaattcattctctgtggtatccaagaatcagtgaagatgccagtgaaacttcaagcaaatctacttcaacacttcatgtattgtgtgggtctgttgtagggttgccagatgcaatacaagattcctggttaaatttgaatttcagtaaacaatgaatagtttttcattgtaccatgaaatatccagaacatacttatatgtaaagtattatttatttgaatctacaaaaaacaacaaataatttttaaatataaggattttcctagatattgcacgggagaatatacaaatagcaaaattgaggccaagggccaagagaatatccgaactttaatttcaggaattgaatgggtttgctagaatgtgatatttgaagcatcacataaaaatgatgggacaataaattttgccataaagtcaaatttagctggaaatcctggatttttttctgttaaatctggcaaccctagtctgctagccaggatccacaagtccttgttccactgtgccttggtttctcctttatttctaagtggaaaaagtattagccaccatcttacctcacagtgatgttgtgaggacatgtggaagcactttaagttttttcatcataacataaattattttcaagtgtaacttattaacctatttattatttatgtatttatttaagcatcaaatatttgtgcaagaatttggaaaaatagaagatgaatcattgattgaatagttataaagatgttatagtaaatttattttattttagatattaaatgatgttttattagataaatttcaatcagggtttttagattaaacaaacaaacaattgggtacccagttaaattttcatttcagataaacaacaaataattttttagtataagtacattattgtttatctgaaattttaattgaactaacaatcctagtttgatactcccagtcttgtcattgccagctgtgttggtagtgctgtgttgaattacggaataatgagttagaactattaaaacagccaaaactccacagtcaatattagtaatttcttgctggttgaaacttgtttattatgtacaaatagattcttataatattatttaaatgactgcatttttaaatacaaggctttatatttttaactttaagatgtttttatgtgctctccaaattttttttactgtttctgattgtatggaaatataaaagtaaatatgaaacatttaaaatataatttgttgtcaaagtaa

SEQ ID NO: 383683 - DNA, 1031 bp, Homo sapiens
  misc_feature (7)..(7): n is a, c, g, or t
  misc_feature (20)..(20): n is a, c, g, or t
  misc_feature (24)..(24): n is a, c, g, or t
atcgacncccttcgcatgancccntggataggcgagccctctggtggacccggaattcggcctatggccggcacaaactttcagagacagcagagcacacaagcttctaggacaagagccaggaagaaaccaccggaaggaaccatctcactgtgtgtaaacatgacttccaagctggccgtggctctcttggcagccttcctgatttctgcagctctgtgtgaaggtgcagttttgccaaggagtgctaaagaacttagatgtcagtgcataaagacatactccaaacctttccacaaccctagtctgctagccaggatccacaagtccttgttccactgtgccttggtttctcctttatttctaagtggaaaaagtattagccaccatcttacctcacagtgatgttgtgaggacatgtggaagcactttaagttttttcatcataacataaattattttcaagtgtaacttattaacctatttattatttatgtatttatttaagcatcaaatatttgtgcaagaatttggaattttattttagatattaaatgatgttttattagataaatttcaatcagggtttttagattaaacaaacaaacaattgggtacccagttaaattttcatttcagataaacaacaaataattttttagtataagtacattattgtttatctgaaattttaattgaactaacaatcctagtttgatactcccagtcttgtcattgccagctgtgttggtagtgctgtgttgaattacggaataatgagttagaactattaaaacagccaaaactccacagtcaatattagtaatttcttgctggttgaaacttgtttattatgtacaaatagattcttataatattatttaaatgactgcatttttaaatacaaggctttatatttttaactttaagatgtttttatgtgctctccaaattttttttactgtttctgattgtatggaaatataaaagtaaatatgaaacatttaaaatataatttgttgtcaaagtaa

SEQ ID NO: 383684 - DNA, 758 bp, Homo sapiens
  misc_feature (7)..(7): n is a, c, g, or t
  misc_feature (20)..(20): n is a, c, g, or t
  misc_feature (24)..(24): n is a, c, g, or t
atcgacncccttcgcatgancccntggataggcgagccctctggtggacccggaattcggcctatggccggcacaaactttcagagacagcagagcacacaagcttctaggacaagagccaggaagaaaccaccggaaggaaccatctcactgtgtgtaaacatgacttccaagctggccgtggctctcttggcagccttcctgatttctgcagctctgtgtgaagtgtaaagctttctgatggaagagagctctgtctggaccccaaggaaaactgggtgcagagggttgtggagaagtttttgaagagggctgagaattcataaaaaaattcattctctgtggtatccaagaatcagtgaagatgccagtgaaacttcaagcaaatctacttcaacacttcatgtattgtgtgggtctgttgtagggttgccagatgcaatacaagattcctggttaaatttgaatttcagtaaacaatgaatagtttttcattgtaccatgaaatatccagaacatacttatatgtaaagtattatttatttgaatctacaaaaaacaacaaataatttttaaatataaggattttcctagatattgcacgggagaatatacaaatagcaaaattgaggccaagggccaagagaatatccgaactttaatttcaggaattgaatgggtttgctagaatgtgatatttgaagcatcacatattttttctgtaaatctggaaccctagcctgctgccaggatcacag

SEQ ID NO: 383685 - DNA, 1706 bp, Homo sapiens
tgagggtgcataagttctctagtagggtgatgatataaaaagccaccggagcactccataaggcacaaactttcagagacagcagagcacacaagcttctaggacaagagccaggaagaaaccaccggaaggaaccatctcactgtgtgtaaacatgacttccaagctggccgtggctctcttggcagccttcctgatttctgcagctctgtgtgaaggtgcagttttgccaaggagtgctaaagaacttagatgtcagtgcataaagacatactccaaacctttccaccccaaatttatcaaagaactgagagtgattgagagtggaccacactgcgccaacacagaaattattgtaaagctttctgatggaagagagctctgtctggaccccaaggaaaactgggtgcagagggttgtggagaagtttttgaagagggctgagaattcataaaaaaattcattctctgtggtatccaagaatcagtgaagatgccagtgaaacttcaagcaaatctacttcaacacttcatgtattgtgtgggtctgttgtagggttgccagatgcaatacaagattcctggttaaatttgaatttcagtaaacaatgaatagtttttcattgtaccatgaaatatccagaacatacttatatgtaaagtattatttatttgaatctacaaaaaacaacaaataatttttaaatataaggattttcctagatattgcacgggagaatatacaaatagcaaaattgaggccaagggccaagagaatatccgaactttaatttcaggaattgaatgggtttgctagaatgtgatatttgaagcatcacataaaaatgatgggacaataaattttgccataaagtcaaatttagctggaaatcctggatttttttctgttaaatctggcaaccctagtctgctagccaggatccacaagtccttgttccactgtgccttggtttctcctttatttctaagtggaaaaagtattagccaccatcttacctcacagtgatgttgtgaggacatgtggaagcactttaagttttttcatcataacataaattattttcaagtgtaacttattaacctatttattatttatgtatttatttaagcatcaaatatttgtgcaagaatttggaaaaatagaagatgaatcattgattgaatagttataaagatgttatagtaaatttattttattttagatattaaatgatgttttattagataaatttcaatcagggtttttagattaaacaaacaaacaattgggtacccagttaaattttcatttcagataaacaacaaataattttttagtataagtacattattgtttatctgaaattttaattgaactaacaatcctagtttgatactcccagtcttgtcattgccagctgtgttggtagtgctgtgttgaattacggaataatgagttagaactattaaaacagccaaaactccacagtcaatattagtaatttcttgctggttgaaacttgtttattatgtacaaatagattcttataatattatttaaatgactgcatttttaaatacaaggctttatatttttaactttaagatgtttttatgtgctctccaaattttttttactgtttctgattgtatggaaatataaaagtaaatatgaaacatttaaaatataatttgttgtcaaagtaa

SEQ ID NO: 383686 - DNA, 925 bp, Homo sapiens
taggcagcaggccgcggtcaatcggacgaggagattggtgcagagatggcattacgaacctttggccacttgctgagatatggggagcctacactccggagggctgtacctttagcactggccctcatctctgtttcaaatccacgactcaacatcctggataccctaagcaaattctctcatgatgctgatccagaagtttcctataactccatttttgccatgggcatggtgggcagtggtaccaataatgcccgtctggctgcaatgctgcgccagttagctcaatatcatgccaaggacccaaacaacctcttcatggtgcgcttggcacagggcctgacacatttagggaagggcacccttaccctctgcccctaccacagcgaccggcagcttatgagccaggtggccgtggctggactgctcactgtgcttgtctctttcctggatgttcgaaacattattctaggcaaatcacactatgtattgtatgggctggtggctgccatgcagccccgaatgctggttacgtttgatgaggagctgcggccattgccagtgtctgtccgtgtgggccaggcagtggatgtggtgggccaggctggcaagccgaagactatcacagggttccagacgcatacaaccccagtgttgttggcccacggggaacgggcagaattggccactgaggagtttcttcctgttacccccattctggaaggttttgttatccttcggaagaaccccaattatgatctctaagtgaccaccaggggctctgaactgcagctgatgttatcagcaggccatgcatcctgctgccaagggtggacacggctgcagacttctgggggaattgtcgcctcctgctcttttgttactgagtgagataaggttgttcaataaagacttttatccccaa

SEQ ID NO: 383687 - DNA, 828 bp, Homo sapiens
cttgctgcatcgttgggtatgtgttggggaccgcctttccatggcttttgcaggctaggcttggcttatgctggctcaaatcgtgaagatgtcctaacactgctgctgcctgtgatgggagattcaaagtccagcatggaggtgagtagaggctattgagcatttagagtaagtagggaaggtgctttgagtcttactttctgtgataaataatgaaaaagaagtaagtgtgtgcatgtgtgcatacatgtacatgcctgttggtgtgtattgaggggcgtcacctcagtgaaaccccttgatctgggattctaagcctctggtggttttaaggctaaagagttaacattttaggcctggcacggtggctcgtgcctataatcccagcactttgggaggctgcagtgggcggatcacttgagcccaggagttcgagaccaacctgggcaagattgtgaaaccccatttctaccaaaaaataaacagaaaaattagccgggtgtggtgtgctcgcctgtagtgccagctactagggaagctgaggtgggcgcattgcttgaacccagaggtggaggttgcagtgagctgagatcgcgccactgcactcctgtctgggttacagagtgagaccctgtctttaaaagaaaaaaaggggggacattttagtgttgagttctgtcccttggaatctctgagaaactacttggactagagtgaagtgtaacttaacacagcctggggttgatgattctccttagtattgtagtcattggtcagccttaaatgttcatacttgtgcagagtcattaatggataaatacagcatgg

SEQ ID NO: 383688 - DNA, 592 bp, Homo sapiens
  misc_feature (506)..(506): n is a, c, g, or t
  misc_feature (529)..(529): n is a, c, g, or t
cttgctgcatcgttgggtatgtgttggggaccgcctttccatggcttttgcaggctaggcttggcttatgctggctcaaatcgtgaagatgtcctaacactgctgctgcctgtgatgggagattcaaagtccagcatggaggtggcaggtgtcacagctttagcctgtggaatgatagcagtagggtcctgcaatggagatgtaacttccactatccttcagaccatcatggagaagtcagagactgagctcaaggatacttatgctcgttggcttcctcttggactgggtctcaaccacctggggaagggtgaggccatcgaggcaatcctggctgcactggaggttgtgtcagagccattccgcagttttgccaacacactggtggatgtgtgtgcatatgcaggctctgggaatgtgctgaaggtgcagcagctgctccacatttgtagcgaacactttgactccaaagagaaggaggaagacaaagacaagaacggcgaagnacgagaagcggcgaagaaacganaagcggcgaagaacgagaagcggcgaagaacgagaagcggtgaagaaacgagaagcggggaag

SEQ ID NO: 383689 - DNA, 2986 bp, Homo sapiens
ggaggaggaggggcgccgcgaccgacgcgcgcgagttggtctgggaaaaagggcggtgcgagcgggtgcgcgcgcagcgggccggcagtggcggcggagatggaggagggaggccgggacaaggcgccggtgcagccccagcagtctccagcggcggcccccggcggcacggacgagaagccgagcggcaaggagcggcgggatgccggggacaaggacaaagaacaggagctgtctgaagaggataaacagcttcaagatgaactggagatgctcgtggaacgactaggggagaaggatacatccctgtatcgaccagcgctggaggaattgcgaaggcagattcgttcttctacaacttccatgacttcagtgcccaagcctctcaaatttctgcgtccacactatggcaaactgaaggaaatctatgagaacatggcccctggggagaataagcgttttgctgctgacatcatctccgttttggccatgaccatgagtggggagcgtgagtgcctcaagtatcggctagtgggctcccaggaggaattggcatcatggggtcatgagtatgtcaggcatctggcaggagaagtggctaaggagtggcaggagctggatgacgcagagaaggtccagcgggagcctctgctcactctggtgaaggaaatcgtcccctataacatggcccacaatgcagagcatgaggcttgcgacctgcttatggaaattgagcaggtggacatgctggagaaggacattgatgaaaatgcatatgcaaaggtctgcctttatctcaccagttgtgtgaattacgtgcctgagcctgagaactcagccctactgcgttgtgccctgggtgtgttccgaaagtttagccgcttccctgaagctctgagattggcattgatgctcaatgacatggagttggtagaagacatcttcacctcctgcaaggatgtggtagtacagaaacagatggcattcatgctaggccggcatggggtgttcctggagctgagtgaagatgtcgaggagtatgaggacctgacagagatcatgtccaatgtacagctcaacagcaacttcttggccttagctcgggagctggacatcatggagcccaaggtgcctgatgacatctacaaaacccacctagagaacaacaggtttgggggcagtggctctcaggtggactctgcccgcatgaacctggcctcctcttttgtgaatggctttgtgaatgcagcttttggccaagacaagctgctaacagatgatggcaacaaatggctttacaagaacaaggaccacggaatgttgagtgcagctgcatctcttgggatgattctgctgtgggatgtggatggtggcctcacccagattgacaagtacctgtactcctctgaggactacattaagtcaggagctcttcttgcctgtggcatagtgaactctggggtccggaatgagtgtgaccctgctctggcactgctctcagactatgttctccacaacagcaacaccatgagacttggttccatctttgggctaggcttggcttatgctggctcaaatcgtgaagatgtcctaacactgctgctgcctgtgatgggagattcaaagtccagcatggaggtggcaggtgtcacagctttagcctgtggaatgatagcagtagggtcctgcaatggagatgtaacttccactatccttcagaccatcatggagaagtcagagactgagctcaaggatacttatgctcgttggcttcctcttggactgggtctcaaccacctggggaagggtgaggccatcgaggcaatcctggctgcactggaggttgtgtcagagccattccgcagttttgccaacacactggtggatgtgtgtgcatatgcaggctctgggaatgtgctgaaggtgcagcagctgctccacatttgtagcgaacactttgactccaaagagaaggaggaagacaaagacaagaaggaaaagaaagacaaggacaagaaggaagcccctgctgacatgggagcacatcagggagtggctgttctggggattgcccttattgctatgggggaggagattggtgcagagatggcattacgaacctttggccacttgctgagatatggggagcctacactccggagggctgtacctttagcactggccctcatctctgtttcaaatccacgactcaacatcctggataccctaagcaaattctctcatgatgctgatccagaagtttcctataactccatttttgccatgggcatggtgggcagtggtaccaataatgcccgtctggctgcaatgctgcgccagttagctcaatatcatgccaaggacccaaacaacctcttcatggtgcgcttggcacagggcctgacacatttagggaagggcacccttaccctctgcccctaccacagcgaccggcagcttatgagccaggtggccgtggctggactgctcactgtgcttgtctctttcctggatgttcgaaacattattctaggcaaatcacactatgtattgtatgggctggtggctgccatgcagccccgaatgctggttacgtttgatgaggagctgcggccattgccagtgtctgtccgtgtgggccaggcagtggatgtggtgggccaggctggcaagccgaagactatcacagggttccagacgcatacaaccccagtgttgttggcccacggggaacgggcagaattggccactgaggagtttcttcctgttacccccattctggaaggttttgttatccttcggaagaaccccaattatgatctctaagtgaccaccaggggctctgaactgcagctgatgttatcagcaggccatgcatcctgctgccaagggtggacacggctgcagacttctgggggaattgtcgcctcctgctcttttgttactgagtgagataaggttgttcaataaagacttttatccccaa

SEQ ID NO: 383690 - DNA, 746 bp, Homo sapiens
tgaggataggtacgaggcctgggtgttacggagatggaggagggaggccgggacaaggcgccggtgcagccccagcagtctccagcggcggcccccggcggcacggacgagaagccgagcggcaaggagcggcgggatgccggggacaaggacaaagaacaggagctgtctgaagaggataaacagcttcaagatgaactggagatgctcgtggaacgactaggggagaaggatacatccctgtatcgaccagcgctggaggaattgcgaaggcagattcgttcttctacaacttccatgacttcagtgcccaagcctctcaaatttctgcgtccacactatggcaaactgaaggaaatctatgagaacatggcccctggggagaataagcgttttgctgctgacatcatctccgttttggccatgaccatgagtggggagcgtgagtgcctcaagtatcggctagtgggctcccaggaggaattggcatcatggggtcatgagtatgtcaggcatctggcaggagaagtggctaaggagtggcaggagctggatgacgcagagaaggtccagcgggagcctctgctcactctggtgaaggaaatcgtcccctataacatggcccacaatgcagagcatgaggcttgcgacctgcttatggaaattgagcaggtggacatgctggagaaggacattgatgaaaatgcatatgcaaaggttttatccccaaggtctctctgtgtctg

SEQ ID NO: 383691 - DNA, 671 bp, Homo sapiens
atcattaaagaccatttccatccagtttcgaaagcccaggggaaagccagtctgtgggaatgttgcggtcgagtatcttaaggactccaacctcctgttcttcggggggctgctggtggccatcgcggtggaacactggaacctgcataaacgcatcgccctccgtgtcctgctcactgtgcttgtctctttcctggatgttcgaaacattattctaggcaaatcacactatgtattgtatgggctggtggctgccatgcagccccgaatgctggttacgtttgatgaggagctgcggccattgccagtgtctgtccgtgtgggccaggcagtggatgtggtgggccaggctggcaagccgaagactatcacagggttccagacgcatacaaccccagtgttgttggcccacggggaacgggcagaattggccactgaggagtttcttcctgttacccccattctggaaggttttgttatccttcggaagaaccccaattatgatctctaagtgaccaccaggggctctgaactgcagctgatgttatcagcaggccatgcatcctgctgccaagggtggacacggctgcagacttctgggggaattgtcgcctcctgctcttttgttactgagtgagataaggttgttcaataaagacttttatccccaa

SEQ ID NO: 383692 - DNA, 2944 bp, Homo sapiens
gggggggacccaaacatgcaggtcgaggctggtttcgggccggcagtggcggcggagatggaggagggaggccgggacaaggcgccggtgcagccccagcagtctccagcggcggcccccggcggcacggacgagaagccgagcggcaaggagcggcgggatgccggggacaaggacaaagaacaggagctgtctgaagaggataaacagcttcaagatgaactggagatgctcgtggaacgactaggggagaaggatacatccctgtatcgaccagcgctggaggaattgcgaaggcagattcgttcttctacaacttccatgacttcagtgcccaagcctctcaaatttctgcgtccacactatggcaaactgaaggaaatctatgagaacatggcccctggggagaataagcgttttgctgctgacatcatctccgttttggccatgaccatgagtggggagcgtgagtgcctcaagtatcggctagtgggctcccaggaggaattggcatcatggggtcatgagtatgtcaggcatctggcaggagaagtggctaaggagtggcaggagctggatgacgcagagaaggtccagcgggagcctctgctcactctggtgaaggaaatcgtcccctataacatggcccacaatgcagagcatgaggcttgcgacctgcttatggaaattgagcaggtggacatgctggagaaggacattgatgaaaatgcatatgcaaaggtctgcctttatctcaccagttgtgtgaattacgtgcctgagcctgagaactcagccctactgcgttgtgccctgggtgtgttccgaaagtttagccgcttccctgaagctctgagattggcattgatgctcaatgacatggagttggtagaagacatcttcacctcctgcaaggatgtggtagtacagaaacagatggcattcatgctaggccggcatggggtgttcctggagctgagtgaagatgtcgaggagtatgaggacctgacagagatcatgtccaatgtacagctcaacagcaacttcttggccttagctcgggagctggacatcatggagcccaaggtgcctgatgacatctacaaaacccacctagagaacaacaggtttgggggcagtggctctcaggtggactctgcccgcatgaacctggcctcctcttttgtgaatggctttgtgaatgcagcttttggccaagacaagctgctaacagatgatggcaacaaatggctttacaagaacaaggaccacggaatgttgagtgcagctgcatctcttgggatgattctgctgtgggatgtggatggtggcctcacccagattgacaagtacctgtactcctctgaggactacattaagtcaggagctcttcttgcctgtggcatagtgaactctggggtccggaatgagtgtgaccctgctctggcactgctctcagactatgttctccacaacagcaacaccatgagacttggttccatctttgggctaggcttggcttatgctggctcaaatcgtgaagatgtcctaacactgctgctgcctgtgatgggagattcaaagtccagcatggaggtggcaggtgtcacagctttagcctgtggaatgatagcagtagggtcctgcaatggagatgtaacttccactatccttcagaccatcatggagaagtcagagactgagctcaaggatacttatgctcgttggcttcctcttggactgggtctcaaccacctggggaagggtgaggccatcgaggcaatcctggctgcactggaggttgtgtcagagccattccgcagttttgccaacacactggtggatgtgtgtgcatatgcaggctctgggaatgtgctgaaggtgcagcagctgctccacatttgtagcgaacactttgactccaaagagaaggaggaagacaaagacaagaaggaaaagaaagacaaggacaagaaggaagcccctgctgacatgggagcacatcagggagtggctgttctggggattgcccttattgctatgggggaggagattggtgcagagatggcattacgaacctttggccacttgctgagatatggggagcctacactccggagggctgtacctttagcactggccctcatctctgtttcaaatccacgactcaacatcctggataccctaagcaaattctctcatgatgctgatccagaagtttcctataactccatttttgccatgggcatggtgggcagtggtaccaataatgcccgtctggctgcaatgctgcgccagttagctcaatatcatgccaaggacccaaacaacctcttcatggtgcgcttggcacagggcctgacacatttagggaagggcacccttaccctctgcccctaccacagcgaccggcagcttatgagccaggtggccgtggctggactgctcactgtgcttgtctctttcctggatgttcgaaacattattctaggcaaatcacactatgtattgtatgggctggtggctgccatgcagccccgaatgctggttacgtttgatgaggagctgcggccattgccagtgtctgtccgtgtgggccaggcagtggatgtggtgggccaggctggcaagccgaagactatcacagggttccagacgcatacaaccccagtgttgttggcccacggggaacgggcagaattggccactgaggagtttcttcctgttacccccattctggaaggttttgttatccttcggaagaaccccaattatgatctctaagtgaccaccaggggctctgaactgcagctgatgttatcagcaggccatgcatcctgctgccaagggtggacacggctgcagacttctgggggaattgtcgcctcctgctcttttgttactgagtgagataaggttgttcaataaagacttttatccccaa

SEQ ID NO: 383693 - DNA, 3061 bp, Homo sapiens
  misc_feature (3032)..(3032): n is a, c, g, or t
gggggggacccaaacatgcaggtcgaggctggtttcgggccggcagtggcggcggagatggaggagggaggccgggacaaggcgccggtgcagccccagcagtctccagcggcggcccccggcggcacggacgagaagccgagcggcaaggagcggcgggatgccggggacaaggacaaagaacaggagctgtctgaagaggataaacagcttcaagatgaactggagatgctcgtggaacgactaggggagaaggatacatccctgtatcgaccagcgctggaggaattgcgaaggcagattcgttcttctacaacttccatgacttcagtgcccaagcctctcaaatttctgcgtccacactatggcaaactgaaggaaatctatgagaacatggcccctggggagaataagcgttttgctgctgacatcatctccgttttggccatgaccatgagtggggagcgtgagtgcctcaagtatcggctagtgggctcccaggaggaattggcatcatggggtcatgagtatgtcaggcatctggcaggagaagtggctaaggagtggcaggagctggatgacgcagagaaggtccagcgggagcctctgctcactctggtgaaggaaatcgtcccctataacatggcccacaatgcagagcatgaggcttgcgacctgcttatggaaattgagcaggtggacatgctggagaaggacattgatgaaaatgcatatgcaaaggtctgcctttatctcaccagttgtgtgaattacgtgcctgagcctgagaactcagccctactgcgttgtgccctgggtgtgttccgaaagtttagccgcttccctgaagctctgagattggcattgatgctcaatgacatggagttggtagaagacatcttcacctcctgcaaggatgtggtagtacagaaacagatggcattcatgctaggccggcatggggtgttcctggagctgagtgaagatgtcgaggagtatgaggacctgacagagatcatgtccaatgtacagctcaacagcaacttcttggccttagctcgggagctggacatcatggagcccaaggtgcctgatgacatctacaaaacccacctagagaacaacaggtttgggggcagtggctctcaggtggactctgcccgcatgaacctggcctcctcttttgtgaatggctttgtgaatgcagcttttggccaagacaagctgctaacagatgatggcaacaaatggctttacaagaacaaggaccacggaatgttgagtgcagctgcatctcttgggatgattctgctgtgggatgtggatggtggcctcacccagattgacaagtacctgtactcctctgaggactacattaagtcaggagctcttcttgcctgtggcatagtgaactctggggtccggaatgagtgtgaccctgctctggcactgctctcagactatgttctccacaacagcaacaccatgagacttggttccatctttgggctaggcttggcttatgctggctcaaatcgtgaagatgtcctaacactgctgctgcctgtgatgggagattcaaagtccagcatggaggtggcaggtgtcacagctttagcctgtggaatgatagcagtagggtcctgcaatggagatgtaacttccactatccttcagaccatcatggagaagtcagagactgagctcaaggatacttatgctcgttggcttcctcttggactgggtctcaaccacctggggaagggtgaggccatcgaggcaatcctggctgcactggaggttgtgtcagagccattccgcagttttgccaacacactggtggatgtgtgtgcatatgcaggctctgggaatgtgctgaaggtgcagcagctgctccacatttgtagcgaacactttgactccaaagagaaggaggaagacaaagacaagaaggaaaagaaagacaaggacaagaaggaagcccctgctgacatgggagcacatcagggagtggctgttctggggattgcccttattgctatgggggaggagattggtgcagagatggcattacgaacctttggccacttgctgagatatggggagcctacactccggagggctgtacctttagcactggccctcatctctgtttcaaatccacgactcaacatcctggataccctaagcaaattctctcatgatgctgatccagaagtttcctataactccatttttgccatgggcatggtgggcagtggtaccaataatgcccgtctggctgcaatgctgcgccagttagctcaatatcatgccaaggacccaaacaacctcttcatggtgcgcttggcacagggcctgacacatttagggaagggcacccttaccctctgcccctaccacagcgaccggcagcttatgagccaggtggccgtggctggactgctcactgtgcttgtctctttcctggatgttcgaaacattattctaggcaaatcacactatgtattgtatgggctggtggctgccatgcagccccgaatgctggttacgtttgatgaggagctgcggccattgccagtgtctgtccgtgtgggccaggcagtggatgtggtgggccaggctggcaagccgaagactatcacagggttccagacgcatacaaccccagtgttgttggcccacggggaacgggcagaattggccactgaggagtttcttcctgttacccccattctggaaggttttgttatccttcggaagaaccccaattatgatctctaagtgaccaccaggggctctgaactgcagctgatgttatcagcaggccatgcatcctgctgccaagggtggacacggctgcagacttctgggggaattgtcgcctcctgctcttttgttactgagtgagataaggttgttcaataaagacttttatccccaaaaaaaaaacgaacacacaacaaccacaaaaaaacaaccaccgccacgacaagaggggggcaaaaagcgtaaaggacacgaacaagcanaacaacaaacaaccgataagatgagacac

SEQ ID NO: 383694 - DNA, 3320 bp, Homo sapiens
gggggggacccaaacatgcaggtcgaggctggtttcgggccggcagtggcggcggagatggaggagggaggccgggacaaggcgccggtgcagccccagcagtctccagcggcggcccccggcggcacggacgagaagccgagcggcaaggagcggcgggatgccggggacaaggacaaagaacaggagctgtctgaagaggataaacagcttcaagatgaactggagatgctcgtggaacgactaggggagaaggatacatccctgtatcgaccagcgctggaggaattgcgaaggcagattcgttcttctacaacttccatgacttcagtgcccaagcctctcaaatttctgcgtccacactatggcaaactgaaggaaatctatgagaacatggcccctggggagaataagcgttttgctgctgacatcatctccgttttggccatgaccatgagtggggagcgtgagtgcctcaagtatcggctagtgggctcccaggaggaattggcatcatggggtcatgagtatgtcaggcatctggcaggagaagtggctaaggagtggcaggagctggatgacgcagagaaggtccagcgggagcctctgctcactctggtgaaggaaatcgtcccctataacatggcccacaatgcagagcatgaggcttgcgacctgcttatggaaattgagcaggtggacatgctggagaaggacattgatgaaaatgcatatgcaaaggtctgcctttatctcaccagttgtgtgaattacgtgcctgagcctgagaactcagccctactgcgttgtgccctgggtgtgttccgaaagtttagccgcttccctgaagctctgagattggcattgatgctcaatgacatggagttggtagaagacatcttcacctcctgcaaggatgtggtagtacagaaacagatggcattcatgctaggccggcatggggtgttcctggagctgagtgaagatgtcgaggagtatgaggacctgacagagatcatgtccaatgtacagctcaacagcaacttcttggccttagctcgggagctggacatcatggagcccaaggtgcctgatgacatctacaaaacccacctagagaacaacaggtttgggggcagtggctctcaggtggactctgcccgcatgaacctggcctcctcttttgtgaatggctttgtgaatgcagcttttggccaagacaagctgctaacagatgatggcaacaaatggctttacaagaacaaggaccacggaatgttgagtgcagctgcatctcttgggatgattctgctgtgggatgtggatggtggcctcacccagattgacaagtacctgtactcctctgaggactacattaagtcaggagctcttcttgcctgtggcatagtgaactctggggtccggaatgagtgtgaccctgctctggcactgctctcagactatgttctccacaacagcaacaccatgagacttggttccatctttgggctaggcttggcttatgctggctcaaatcgtgaagatgtcctaacactgctgctgcctgtgatgggagattcaaagtccagcatggaggtggcaggtgtcacagctttagcctgtggaatgatagcagtagggtcctgcaatggagatgtaacttccactatccttcagaccatcatggagaagtcagagactgagctcaaggatacttatgctcgttggcttcctcttggactgggtctcaaccacctggggaagggtgaggccatcgaggcaatcctggctgcactggaggttgtgtcagagccattccgcagttttgccaacacactggtggatgtgtgtgcatatgcaggctctgggaatgtgctgaaggtgcagcagctgctccacatttgtagcgaacactttgactccaaagagaaggaggaagacaaagacaagaaggaaaagaaagacaaggacaagaaggaagcccctgctgacatgggagcacatcagggagtggctgttctggggattgcccttattgctatgggggaggagattggtgcagagatggcattacgaacctttggccacttgctgagatatggggagcctacactccggagggctgtacctttagcactggccctcatctctgtttcaaatccacgactcaacatcctggataccctaagcaaattctctcatgatgctgatccagaagtttcctataactccatttttgccatgggcatggtgggcagtggtaccaataatgcccgtctggctgcaatgctgcgccagttagctcaatatcatgccaaggacccaaacaacctcttcatggtgcgcttggcacagggcctgacacatttagggaagggcacccttaccctctgcccctaccacagcgaccggcagcttatgagccaggtggccgtggctggactgctcactgtgcttgtctctttcctggatgttcgaaacattattctaggcaaatcacactatgtattgtatgggctggtggctgccatgcagccccgaatgctggttacgtttgatgaggagctgcggccattgccagtgtctgtccgtgtgggccaggcagtggatgtggtgggccaggctggcaagccgaagactatcacagggttccagacgcatacaaccccagtgttgttggcccacggggaacgggcagaattggccactgaggagtttcttcctgttacccccattctggaaggttttgttatccttcggaagaaccccaattatgatctctaagtgaccaccaggggctctgaactgcagctgatgttatcagcaggccatgcatcctgctgccaagggtggacacggctgcagacttctgggggaattgtcgcctcctgctcttttgttactgagtgagataaggttgttcaataaagacttttatccccaaaaaaaaaaaaaaaaaaaaaaagggggggggcgccgcaaaaaaaaaccccggggggggcccaaagaaagcggaaaaccccagttttgtgcaaagggggcccccacaatgaggggcggcataatgaaaacgcacaaacacggggagccagccgtaaaaaacggccgcggcgttgcgggcgaaacgcggaccatgcaggggatgctttgtgtgaaacgaacccactcgtcgggtcggggagtaacatgcggggggaaacaacccacacaagaaaatataagccccacgcgacaaacaaaaacagttgacgggtatttgtggtaaccaacgcgctatgcacggcggcgaagtaggccacggactagtactgagaaattac

SEQ ID NO: 383695 - DNA, 3345 bp, Homo sapiens
gggggggacccaaacatgcaggtcgaggctggtttcgggccggcagtggcggcggagatggaggagggaggccgggacaaggcgccggtgcagccccagcagtctccagcggcggcccccggcggcacggacgagaagccgagcggcaaggagcggcgggatgccggggacaaggacaaagaacaggagctgtctgaagaggataaacagcttcaagatgaactggagatgctcgtggaacgactaggggagaaggatacatccctgtatcgaccagcgctggaggaattgcgaaggcagattcgttcttctacaacttccatgacttcagtgcccaagcctctcaaatttctgcgtccacactatggcaaactgaaggaaatctatgagaacatggcccctggggagaataagcgttttgctgctgacatcatctccgttttggccatgaccatgagtggggagcgtgagtgcctcaagtatcggctagtgggctcccaggaggaattggcatcatggggtcatgagtatgtcaggcatctggcaggagaagtggctaaggagtggcaggagctggatgacgcagagaaggtccagcgggagcctctgctcactctggtgaaggaaatcgtcccctataacatggcccacaatgcagagcatgaggcttgcgacctgcttatggaaattgagcaggtggacatgctggagaaggacattgatgaaaatgcatatgcaaaggtctgcctttatctcaccagttgtgtgaattacgtgcctgagcctgagaactcagccctactgcgttgtgccctgggtgtgttccgaaagtttagccgcttccctgaagctctgagattggcattgatgctcaatgacatggagttggtagaagacatcttcacctcctgcaaggatgtggtagtacagaaacagatggcattcatgctaggccggcatggggtgttcctggagctgagtgaagatgtcgaggagtatgaggacctgacagagatcatgtccaatgtacagctcaacagcaacttcttggccttagctcgggagctggacatcatggagcccaaggtgcctgatgacatctacaaaacccacctagagaacaacaggtttgggggcagtggctctcaggtggactctgcccgcatgaacctggcctcctcttttgtgaatggctttgtgaatgcagcttttggccaagacaagctgctaacagatgatggcaacaaatggctttacaagaacaaggaccacggaatgttgagtgcagctgcatctcttgggatgattctgctgtgggatgtggatggtggcctcacccagattgacaagtacctgtactcctctgaggactacattaagtcaggagctcttcttgcctgtggcatagtgaactctggggtccggaatgagtgtgaccctgctctggcactgctctcagactatgttctccacaacagcaacaccatgagacttggttccatctttgggctaggcttggcttatgctggctcaaatcgtgaagatgtcctaacactgctgctgcctgtgatgggagattcaaagtccagcatggaggtggcaggtgtcacagctttagcctgtggaatgatagcagtagggtcctgcaatggagatgtaacttccactatccttcagaccatcatggagaagtcagagactgagctcaaggatacttatgctcgttggcttcctcttggactgggtctcaaccacctggggaagggtgaggccatcgaggcaatcctggctgcactggaggttgtgtcagagccattccgcagttttgccaacacactggtggatgtgtgtgcatatgcaggctctgggaatgtgctgaaggtgcagcagctgctccacatttgtagcgaacactttgactccaaagagaaggaggaagacaaagacaagaaggaaaagaaagacaaggacaagaaggaagcccctgctgacatgggagcacatcagggagtggctgttctggggattgcccttattgctatgggggaggagattggtgcagagatggcattacgaacctttggccacttgctgagatatggggagcctacactccggagggctgtacctttagcactggccctcatctctgtttcaaatccacgactcaacatcctggataccctaagcaaattctctcatgatgctgatccagaagtttcctataactccatttttgccatgggcatggtgggcagtggtaccaataatgcccgtctggctgcaatgctgcgccagttagctcaatatcatgccaaggacccaaacaacctcttcatggtgcgcttggcacagggcctgacacatttagggaagggcacccttaccctctgcccctaccacagcgaccggcagcttatgagccaggtggccgtggctggactgctcactgtgcttgtctctttcctggatgttcgaaacattattctaggcaaatcacactatgtattgtatgggctggtggctgccatgcagccccgaatgctggttacgtttgatgaggagctgcggccattgccagtgtctgtccgtgtgggccaggcagtggatgtggtgggccaggctggcaagccgaagactatcacagggttccagacgcatacaaccccagtgttgttggcccacggggaacgggcagaattggccactgaggagtttcttcctgttacccccattctggaaggttttgttatccttcggaagaaccccaattatgatctctaagtgaccaccaggggctctgaactgcagctgatgttatcagcaggccatgcatcctgctgccaagggtggacacggctgcagacttctgggggaattgtcgcctcctgctcttttgttactgagtgagataaggttgttcaataaagacttttatccccaaaaaaaaaaaaaaaaaaaaaaaaaacaaaaaaaaaaaaaaaaaaaaagggggggggcgccgcaaaaaaaaaccccggggggggcccaaagaaagcggaaaaccccagttttgtgcaaagggggcccccacaatgaggggcggcataatgaaaacgcacaaacacggggagccagccgtaaaaaacggccgcggcgttgcgggcgaaacgcggaccatgcaggggatgctttgtgtgaaacgaacccactcgtcgggtcggggagtaacatgcggggggaaacaacccacacaagaaaatataagccccacgcgacaaacaaaaacagttgacgggtatttgtggtaaccaacgcgctatgcacggcggcgaagtaggccacggactagtactgagaaattac

SEQ ID NO: 383696 - DNA, 2984 bp, Homo sapiens
gggggggacccaaacatgcaggtcgaggctggtttcgggccggcagtggcggcggagatggaggagggaggccgggacaaggcgccggtgcagccccagcagtctccagcggcggcccccggcggcacggacgagaagccgagcggcaaggagcggcgggatgccggggacaaggacaaagaacaggagctgtctgaagaggataaacagcttcaagatgaactggagatgctcgtggaacgactaggggagaaggatacatccctgtatcgaccagcgctggaggaattgcgaaggcagattcgttcttctacaacttccatgacttcagtgcccaagcctctcaaatttctgcgtccacactatggcaaactgaaggaaatctatgagaacatggcccctggggagaataagcgttttgctgctgacatcatctccgttttggccatgaccatgagtggggagcgtgagtgcctcaagtatcggctagtgggctcccaggaggaattggcatcatggggtcatgagtatgtcaggcatctggcaggagaagtggctaaggagtggcaggagctggatgacgcagagaaggtccagcgggagcctctgctcactctggtgaaggaaatcgtcccctataacatggcccacaatgcagagcatgaggcttgcgacctgcttatggaaattgagcaggtggacatgctggagaaggacattgatgaaaatgcatatgcaaaggtctgcctttatctcaccagttgtgtgaattacgtgcctgagcctgagaactcagccctactgcgttgtgccctgggtgtgttccgaaagtttagccgcttccctgaagctctgagattggcattgatgctcaatgacatggagttggtagaagacatcttcacctcctgcaaggatgtggtagtacagaaacagatggcattcatgctaggccggcatggggtgttcctggagctgagtgaagatgtcgaggagtatgaggacctgacagagatcatgtccaatgtacagctcaacagcaacttcttggccttagctcgggagctggacatcatggagcccaaggtgcctgatgacatctacaaaacccacctagagaacaacaggtttgggggcagtggctctcaggtggactctgcccgcatgaacctggcctcctcttttgtgaatggctttgtgaatgcagcttttggccaagacaagctgctaacagatgatggcaacaaatggctttacaagaacaaggaccacggaatgttgagtgcagctgcatctcttgggatgattctgctgtgggatgtggatggtggcctcacccagattgacaagtacctgtactcctctgaggactacattaagtcaggagctcttcttgcctgtggcatagtgaactctggggtccggaatgagtgtgaccctgctctggcactgctctcagactatgttctccacaacagcaacaccatgagacttggttccatctttgggctaggcttggcttatgctggctcaaatcgtgaagatgtcctaacactgctgctgcctgtgatgggagattcaaagtccagcatggaggtggcaggtgtcacagctttagcctgtggaatgatagcagtagggtcctgcaatggagatgtaacttccactatccttcagaccatcatggagaagtcagagactgagctcaaggatacttatgctcgttggcttcctcttggactgggtctcaaccacctggggaagggtgaggccatcgaggcaatcctggctgcactggaggttgtgtcagagccattccgcagttttgccaacacactggtggatgtgtgtgcatatgcaggctctgggaatgtgctgaaggtgcagcagctgctccacatttgtagcgaacactttgactccaaagagaaggaggaagacaaagacaagaaggaaaagaaagacaaggacaagaaggaagcccctgctgacatgggagcacatcagggagtggctgttctggggattgcccttattgctatgggggaggagattggtgcagagatggcattacgaacctttggccacttgctgagatatggggagcctacactccggagggctgtacctttagcactggccctcatctctgtttcaaatccacgactcaacatcctggataccctaagcaaattctctcatgatgctgatccagaagtttcctataactccatttttgccatgggcatggtgggcagtggtaccaataatgcccgtctggctgcaatgctgcgccagttagctcaatatcatgccaaggacccaaacaacctcttcatggtgcgcttggcacagggcctgacacatttagggaagggcacccttaccctctgcccctaccacagcgaccggcagcttatgagccaggtggccgtggctggactgctcactgtgcttgtctctttcctggatgttcgaaacattattctaggcaaatcacactatgtattgtatgggctggtggctgccatgcagccccgaatgctggttacgtttgatgaggagctgcggccattgccagtgtctgtccgtgtgggccaggcagtggatgtggtgggccaggctggcaagccgaagactatcacagggttccagacgcatacaaccccagtgttgttggcccacggggaacgggcagaattggccactgaggagtttcttcctgttacccccattctggaaggttttgttatccttcggaagaaccccaattatgatctctaagtgaccaccaggggctctgaactgcagctgatgttatcagcaggccatgcatcctgctgccaagggtggacacggctgcagacttctgggggaattgtcgcctcctgctcttttgttactgagtgagataaggttgttcaataaagacttttatccccaagtatacccgagtaagtgtcatattctgtcctgttttgtgt

SEQ ID NO: 383697 - DNA, 3125 bp, Homo sapiens
gggggggacccaaacatgcaggtcgaggctggtttcgggccggcagtggcggcggagatggaggagggaggccgggacaaggcgccggtgcagccccagcagtctccagcggcggcccccggcggcacggacgagaagccgagcggcaaggagcggcgggatgccggggacaaggacaaagaacaggagctgtctgaagaggataaacagcttcaagatgaactggagatgctcgtggaacgactaggggagaaggatacatccctgtatcgaccagcgctggaggaattgcgaaggcagattcgttcttctacaacttccatgacttcagtgcccaagcctctcaaatttctgcgtccacactatggcaaactgaaggaaatctatgagaacatggcccctggggagaataagcgttttgctgctgacatcatctccgttttggccatgaccatgagtggggagcgtgagtgcctcaagtatcggctagtgggctcccaggaggaattggcatcatggggtcatgagtatgtcaggcatctggcaggagaagtggctaaggagtggcaggagctggatgacgcagagaaggtccagcgggagcctctgctcactctggtgaaggaaatcgtcccctataacatggcccacaatgcagagcatgaggcttgcgacctgcttatggaaattgagcaggtggacatgctggagaaggacattgatgaaaatgcatatgcaaaggtctgcctttatctcaccagttgtgtgaattacgtgcctgagcctgagaactcagccctactgcgttgtgccctgggtgtgttccgaaagtttagccgcttccctgaagctctgagattggcattgatgctcaatgacatggagttggtagaagacatcttcacctcctgcaaggatgtggtagtacagaaacagatggcattcatgctaggccggcatggggtgttcctggagctgagtgaagatgtcgaggagtatgaggacctgacagagatcatgtccaatgtacagctcaacagcaacttcttggccttagctcgggagctggacatcatggagcccaaggtgcctgatgacatctacaaaacccacctagagaacaacaggtttgggggcagtggctctcaggtggactctgcccgcatgaacctggcctcctcttttgtgaatggctttgtgaatgcagcttttggccaagacaagctgctaacagatgatggcaacaaatggctttacaagaacaaggaccacggaatgttgagtgcagctgcatctcttgggatgattctgctgtgggatgtggatggtggcctcacccagattgacaagtacctgtactcctctgaggactacattaagtcaggagctcttcttgcctgtggcatagtgaactctggggtccggaatgagtgtgaccctgctctggcactgctctcagactatgttctccacaacagcaacaccatgagacttggttccatctttgggctaggcttggcttatgctggctcaaatcgtgaagatgtcctaacactgctgctgcctgtgatgggagattcaaagtccagcatggaggtggcaggtgtcacagctttagcctgtggaatgatagcagtagggtcctgcaatggagatgtaacttccactatccttcagaccatcatggagaagtcagagactgagctcaaggatacttatgctcgttggcttcctcttggactgggtctcaaccacctggggaagggtgaggccatcgaggcaatcctggctgcactggaggttgtgtcagagccattccgcagttttgccaacacactggtggatgtgtgtgcatatgcaggctctgggaatgtgctgaaggtgcagcagctgctccacatttgtagcgaacactttgactccaaagagaaggaggaagacaaagacaagaaggaaaagaaagacaaggacaagaaggaagcccctgctgacatgggagcacatcagggagtggctgttctggggattgcccttattgctatgggggaggagattggtgcagagatggcattacgaacctttggccacttgctgagatatggggagcctacactccggagggctgtacctttagcactggccctcatctctgtttcaaatccacgactcaacatcctggataccctaagcaaattctctcatgatgctgatccagaagtttcctataactccatttttgccatgggcatggtgggcagtggtaccaataatgcccgtctggctgcaatgctgcgccagttagctcaatatcatgccaaggacccaaacaacctcttcatggtgcgcttggcacaggtaaagaatagaactcctccacagagcgtgccggggaagtatctgtggtgatggaaggaggaacatggagtgttggcccaggaggaaagatgtgaccaagtgggagatttctgtttggctgggttaggcgatgtctcctcagtggtaactcctcacctctacttccctctgtttttttcagggcctgacacatttagggaagggcacccttaccctctgcccctaccacagcgaccggcagcttatgagccaggtggccgtggctggactgctcactgtgcttgtctctttcctggatgttcgaaacattattctaggcaaatcacactatgtattgtatgggctggtggctgccatgcagccccgaatgctggttacgtttgatgaggagctgcggccattgccagtgtctgtccgtgtgggccaggcagtggatgtggtgggccaggctggcaagccgaagactatcacagggttccagacgcatacaaccccagtgttgttggcccacggggaacgggcagaattggccactgaggagtttcttcctgttacccccattctggaaggttttgttatccttcggaagaaccccaattatgatctctaagtgaccaccaggggctctgaactgcagctgatgttatcagcaggccatgcatcctgctgccaagggtggacacggctgcagacttctgggggaattgtcgcctcctgctcttttgttactgagtgagataaggttgttcaataaagacttttatccccaa

SEQ ID NO: 383698 - DNA, 3138 bp, Homo sapiens
gggggggacccaaacatgcaggtcgaggctggtttcgggccggcagtggcggcggagatggaggagggaggccgggacaaggcgccggtgcagccccagcagtctccagcggcggcccccggcggcacggacgagaagccgagcggcaaggagcggcgggatgccggggacaaggacaaagaacaggagctgtctgaagaggataaacagcttcaagatgaactggagatgctcgtggaacgactaggggagaaggatacatccctgtatcgaccagcgctggaggaattgcgaaggcagattcgttcttctacaacttccatgacttcagtgcccaagcctctcaaatttctgcgtccacactatggcaaactgaaggaaatctatgagaacatggcccctggggagaataagcgttttgctgctgacatcatctccgttttggccatgaccatgagtggggagcgtgagtgcctcaagtatcggctagtgggctcccaggaggaattggcatcatggggtcatgagtatgtcaggcatctggcaggagaagtggctaaggagtggcaggagctggatgacgcagagaaggtccagcgggagcctctgctcactctggtgaaggaaatcgtcccctataacatggcccacaatgcagagcatgaggcttgcgacctgcttatggaaattgagcaggtggacatgctggagaaggacattgatgaaaatgcatatgcaaaggtctgcctttatctcaccagttgtgtgaattacgtgcctgagcctgagaactcagccctactgcgttgtgccctgggtgtgttccgaaagtttagccgcttccctgaagctctgagattggcattgatgctcaatgacatggagttggtagaagacatcttcacctcctgcaaggatgtggtagtacagaaacagatggcattcatgctaggccggcatggggtgttcctggagctgagtgaagatgtcgaggagtatgaggacctgacagagatcatgtccaatgtacagctcaacagcaacttcttggccttagctcgggagctggacatcatggagcccaaggtgcctgatgacatctacaaaacccacctagagaacaacaggtttgggggcagtggctctcaggtggactctgcccgcatgaacctggcctcctcttttgtgaatggctttgtgaatgcagcttttggccaagacaagctgctaacagatgatggcaacaaatggctttacaagaacaaggaccacggaatgttgagtgcagctgcatctcttgggatgattctgctgtgggatgtggatggtggcctcacccagattgacaagtacctgtactcctctgaggactacattaagtcaggagctcttcttgcctgtggcatagtgaactctggggtccggaatgagtgtgaccctgctctggcactgctctcagactatgttctccacaacagcaacaccatgagacttggttccatctttgggctaggcttggcttatgctggctcaaatcgtgaagatgtcctaacactgctgctgcctgtgatgggagattcaaagtccagcatggaggtggcaggtgtcacagctttagcctgtggaatgatagcagtagggtcctgcaatggagatgtaacttccactatccttcagaccatcatggagaagtcagagactgagctcaaggatacttatgctcgttggcttcctcttggactgggtctcaaccacctggggaagggtgaggccatcgaggcaatcctggctgcactggaggttgtgtcagagccattccgcagttttgccaacacactggtggatgtgtgtgcatatgcaggtctgtgtctttatgagtctgtcttgtgcttccccagtgactcctcacttctttcttggtccttattttcaggttgtttctcctttctccttcattctgatctgctctagattctttagacttctcctgttttccaaagcttttccttggtaacttctcatttctgtccattctccctcaccaccctgacgcaggctctgggaatgtgctgaaggtgcagcagctgctccacatttgtagcgaacactttgactccaaagagaaggaggaagacaaagacaagaaggaaaagaaagacaaggacaagaaggaagcccctgctgacatgggagcacatcagggagtggctgttctggggattgcccttattgctatgggggaggagattggtgcagagatggcattacgaacctttggccacttgctgagatatggggagcctacactccggagggctgtacctttagcactggccctcatctctgtttcaaatccacgactcaacatcctggataccctaagcaaattctctcatgatgctgatccagaagtttcctataactccatttttgccatgggcatggtgggcagtggtaccaataatgcccgtctggctgcaatgctgcgccagttagctcaatatcatgccaaggacccaaacaacctcttcatggtgcgcttggcacagggcctgacacatttagggaagggcacccttaccctctgcccctaccacagcgaccggcagcttatgagccaggtggccgtggctggactgctcactgtgcttgtctctttcctggatgttcgaaacattattctaggcaaatcacactatgtattgtatgggctggtggctgccatgcagccccgaatgctggttacgtttgatgaggagctgcggccattgccagtgtctgtccgtgtgggccaggcagtggatgtggtgggccaggctggcaagccgaagactatcacagggttccagacgcatacaaccccagtgttgttggcccacggggaacgggcagaattggccactgaggagtttcttcctgttacccccattctggaaggttttgttatccttcggaagaaccccaattatgatctctaagtgaccaccaggggctctgaactgcagctgatgttatcagcaggccatgcatcctgctgccaagggtggacacggctgcagacttctgggggaattgtcgcctcctgctcttttgttactgagtgagataaggttgttcaataaagacttttatccccaa

SEQ ID NO: 383699 - DNA, 3176 bp, Homo sapiens
gggggggacccaaacatgcaggtcgaggctggtttcgggccggcagtggcggcggagatggaggagggaggccgggacaaggcgccggtgcagccccagcagtctccagcggcggcccccggcggcacggacgagaagccgagcggcaaggagcggcgggatgccggggacaaggacaaagaacaggagctggtgaggcgcgaccccgagagtcggcgaaggaggctgcggggctgagtcacggcggctccgcaggcctcaggcccgacacccaactaccccaccgcgccagggagagggcggttggggcgaccctcgggactcccggcaccttgcctctctgctcctcattctccgttccgcgctgtcacctccgccgtccccaccaaccctcaccaccgccgcgtgaagtggactcgggcagtctgaagaggataaacagcttcaagatgaactggagatgctcgtggaacgactaggggagaaggatacatccctgtatcgaccagcgctggaggaattgcgaaggcagattcgttcttctacaacttccatgacttcagtgcccaagcctctcaaatttctgcgtccacactatggcaaactgaaggaaatctatgagaacatggcccctggggagaataagcgttttgctgctgacatcatctccgttttggccatgaccatgagtggggagcgtgagtgcctcaagtatcggctagtgggctcccaggaggaattggcatcatggggtcatgagtatgtcaggcatctggcaggagaagtggctaaggagtggcaggagctggatgacgcagagaaggtccagcgggagcctctgctcactctggtgaaggaaatcgtcccctataacatggcccacaatgcagagcatgaggcttgcgacctgcttatggaaattgagcaggtggacatgctggagaaggacattgatgaaaatgcatatgcaaaggtctgcctttatctcaccagttgtgtgaattacgtgcctgagcctgagaactcagccctactgcgttgtgccctgggtgtgttccgaaagtttagccgcttccctgaagctctgagattggcattgatgctcaatgacatggagttggtagaagacatcttcacctcctgcaaggatgtggtagtacagaaacagatggcattcatgctaggccggcatggggtgttcctggagctgagtgaagatgtcgaggagtatgaggacctgacagagatcatgtccaatgtacagctcaacagcaacttcttggccttagctcgggagctggacatcatggagcccaaggtgcctgatgacatctacaaaacccacctagagaacaacaggtttgggggcagtggctctcaggtggactctgcccgcatgaacctggcctcctcttttgtgaatggctttgtgaatgcagcttttggccaagacaagctgctaacagatgatggcaacaaatggctttacaagaacaaggaccacggaatgttgagtgcagctgcatctcttgggatgattctgctgtgggatgtggatggtggcctcacccagattgacaagtacctgtactcctctgaggactacattaagtcaggagctcttcttgcctgtggcatagtgaactctggggtccggaatgagtgtgaccctgctctggcactgctctcagactatgttctccacaacagcaacaccatgagacttggttccatctttgggctaggcttggcttatgctggctcaaatcgtgaagatgtcctaacactgctgctgcctgtgatgggagattcaaagtccagcatggaggtggcaggtgtcacagctttagcctgtggaatgatagcagtagggtcctgcaatggagatgtaacttccactatccttcagaccatcatggagaagtcagagactgagctcaaggatacttatgctcgttggcttcctcttggactgggtctcaaccacctggggaagggtgaggccatcgaggcaatcctggctgcactggaggttgtgtcagagccattccgcagttttgccaacacactggtggatgtgtgtgcatatgcaggctctgggaatgtgctgaaggtgcagcagctgctccacatttgtagcgaacactttgactccaaagagaaggaggaagacaaagacaagaaggaaaagaaagacaaggacaagaaggaagcccctgctgacatgggagcacatcagggagtggctgttctggggattgcccttattgctatgggggaggagattggtgcagagatggcattacgaacctttggccacttgctgagatatggggagcctacactccggagggctgtacctttagcactggccctcatctctgtttcaaatccacgactcaacatcctggataccctaagcaaattctctcatgatgctgatccagaagtttcctataactccatttttgccatgggcatggtgggcagtggtaccaataatgcccgtctggctgcaatgctgcgccagttagctcaatatcatgccaaggacccaaacaacctcttcatggtgcgcttggcacagggcctgacacatttagggaagggcacccttaccctctgcccctaccacagcgaccggcagcttatgagccaggtggccgtggctggactgctcactgtgcttgtctctttcctggatgttcgaaacattattctaggcaaatcacactatgtattgtatgggctggtggctgccatgcagccccgaatgctggttacgtttgatgaggagctgcggccattgccagtgtctgtccgtgtgggccaggcagtggatgtggtgggccaggctggcaagccgaagactatcacagggttccagacgcatacaaccccagtgttgttggcccacggggaacgggcagaattggccactgaggagtttcttcctgttacccccattctggaaggttttgttatccttcggaagaaccccaattatgatctctaagtgaccaccaggggctctgaactgcagctgatgttatcagcaggccatgcatcctgctgccaagggtggacacggctgcagacttctgggggaattgtcgcctcctgctcttttgttactgagtgagataaggttgttcaataaagacttttatccccaa

SEQ ID NO: 383700 - DNA, 3393 bp, Homo sapiens
gggggggacccaaacatgcaggtcgaggctggtttcgggccggcagtggcggcggagatggaggagggaggccgggacaaggcgccggtgcagccccagcagtctccagcggcggcccccggcggcacggacgagaagccgagcggcaaggagcggcgggatgccggggacaaggacaaagaacaggagctgtctgaagaggataaacagcttcaagatgaactggagatgctcgtggaacgactaggggagaaggatacatccctgtatcgaccagcgctggaggaattgcgaaggcagattcgttcttctacaacttccatgacttcagtgcccaagcctctcaaatttctgcgtccacactatggcaaactgaaggaaatctatgagaacatggcccctggggagaataagcgttttgctgctgacatcatctccgttttggccatgaccatgagtggggagcgtgagtgcctcaagtatcggctagtgggctcccaggaggaattggcatcatggggtcatgagtatgtcaggcatctggcaggagaagtggctaaggagtggcaggagctggatgacgcagagaaggtccagcgggagcctctgctcactctggtgaaggaaatcgtcccctataacatggcccacaatgcagagcatgaggcttgcgacctgcttatggaaattgagcaggtggacatgctggagaaggacattgatgaaaatgcatatgcaaaggtctgcctttatctcaccagttgtgtgaattacgtgcctgagcctgagaactcagccctactgcgttgtgccctgggtgtgttccgaaagtttagccgcttccctgaagctctgagattggcattgatgctcaatgacatggagttggtagaagacatcttcacctcctgcaaggatgtggtagtacagaaacagatggcattcatgctaggccggcatggggtgttcctggagctgagtgaagatgtcgaggagtatgaggacctgacagagatcatgtccaatgtacagctcaacagcaacttcttggccttagctcgggagctggacatcatggagcccaaggtgcctgatgacatctacaaaacccacctagagaacaacaggtttgggggcagtggctctcaggtggactctgcccgcatgaacctggcctcctcttttgtgaatggctttgtgaatgcagcttttggccaagacaagctgctaacagatgatggcaacaaatggctttacaagaacaaggaccacggaatgttgagtgcagctgcatctcttgggatgattctgctgtgggatgtggatggtggcctcacccagattgacaagtacctgtactcctctgaggactacattaagtcaggagctcttcttgcctgtggcatagtgaactctggggtccggaatgagtgtgaccctgctctggcactgctctcagactatgttctccacaacagcaacaccatgagacttggttccatctttgggctaggcttggcttatgctggctcaaatcgtgaagatgtcctaacactgctgctgcctgtgatgggagattcaaagtccagcatggaggtggcaggtgtcacagctttagcctgtggaatgatagcagtagggtcctgcaatggagatgtaacttccactatccttcagaccatcatggagaagtcagagactgagctcaaggatacttatgctcgttggcttcctcttggactgggtctcaaccacctggggaagggtgaggccatcgaggcaatcctggctgcactggaggttgtgtcagagccattccgcagttttgccaacacactggtggatgtgtgtgcatatgcaggtctgtgtctttatgagtctgtcttgtgcttccccagtgactcctcacttctttcttggtccttattttcaggttgtttctcctttctccttcattctgatctgctctagattctttagacttctcctgttttccaaagcttttccttggtaacttctcatttctgtccattctccctcaccaccctgacgcaggctctgggaatgtgctgaaggtgcagcagctgctccacatttgtagcgaacactttgactccaaagagaaggaggaagacaaagacaagaaggaaaagaaagacaaggacaagaaggaagcccctgctgacatgggagcacatcaggtaatatgggcagctgggcacttgcagagaggctgtgagaagagataagcatataggggaggctgggtttggtttttgctttagggcctctctgggtattgccatgtattgaaatagcgtgtgactgggttctgtatgtaaggggtaaaggtgttccccacaggatggctttttattttcagatgggacttgagtcaagggtgactgttttttattccttgagcttaatgggttctgctctctcttcaattgcagggagtggctgttctggggattgcccttattgctatgggggaggagattggtgcagagatggcattacgaacctttggccacttgctgagatatggggagcctacactccggagggctgtacctttagcactggccctcatctctgtttcaaatccacgactcaacatcctggataccctaagcaaattctctcatgatgctgatccagaagtttcctataactccatttttgccatgggcatggtgggcagtggtaccaataatgcccgtctggctgcaatgctgcgccagttagctcaatatcatgccaaggacccaaacaacctcttcatggtgcgcttggcacagggcctgacacatttagggaagggcacccttaccctctgcccctaccacagcgaccggcagcttatgagccaggtggccgtggctggactgctcactgtgcttgtctctttcctggatgttcgaaacattattctaggcaaatcacactatgtattgtatgggctggtggctgccatgcagccccgaatgctggttacgtttgatgaggagctgcggccattgccagtgtctgtccgtgtgggccaggcagtggatgtggtgggccaggctggcaagccgaagactatcacagggttccagacgcatacaaccccagtgttgttggcccacggggaacgggcagaattggccactgaggagtttcttcctgttacccccattctggaaggttttgttatccttcggaagaaccccaattatgatctctaagtgaccaccaggggctctgaactgcagctgatgttatcagcaggccatgcatcctgctgccaagggtggacacggctgcagacttctgggggaattgtcgcctcctgctcttttgttactgagtgagataaggttgttcaataaagacttttatccccaa

SEQ ID NO: 383701 - DNA, 3252 bp, Homo sapiens
gggggggacccaaacatgcaggtcgaggctggtttcgggccggcagtggcggcggagatggaggagggaggccgggacaaggcgccggtgcagccccagcagtctccagcggcggcccccggcggcacggacgagaagccgagcggcaaggagcggcgggatgccggggacaaggacaaagaacaggagctggtgaggcgcgaccccgagagtcggcgaaggaggctgcggggctgagtcacggcggctccgcaggcctcaggcccgacacccaactaccccaccgcgccagggagagggcggttggggcgaccctcgggactcccggcaccttgcctctctgctcctcattctccgttccgcgctgtcacctccgccgtccccaccaaccctcaccaccgccgcgtgaagtggactcgggcagtctgaagaggataaacagcttcaagatgaactggagatgctcgtggaacgactaggggagaaggatacatccctgtatcgaccagcgctggaggaattgcgaaggcagattcgttcttctacaacttccatgacttcagtgcccaagcctctcaaatttctgcgtccacactatggcaaactgaaggaaatctatgagaacatggcccctggggagaataagcgttttgctgctgacatcatctccgttttggccatgaccatgagtggggagcgtgagtgcctcaagtatcggctagtgggctcccaggaggaattggcatcatggggtcatgagtatgtcagacgctggattccttgacccacagagaagtgcttcccctgaagctgtgctctcttaatcgtctgggactatctgtaggcatctggcaggagaagtggctaaggagtggcaggagctggatgacgcagagaaggtccagcgggagcctctgctcactctggtgaaggaaatcgtcccctataacatggcccacaatgcagagcatgaggcttgcgacctgcttatggaaattgagcaggtggacatgctggagaaggacattgatgaaaatgcatatgcaaaggtctgcctttatctcaccagttgtgtgaattacgtgcctgagcctgagaactcagccctactgcgttgtgccctgggtgtgttccgaaagtttagccgcttccctgaagctctgagattggcattgatgctcaatgacatggagttggtagaagacatcttcacctcctgcaaggatgtggtagtacagaaacagatggcattcatgctaggccggcatggggtgttcctggagctgagtgaagatgtcgaggagtatgaggacctgacagagatcatgtccaatgtacagctcaacagcaacttcttggccttagctcgggagctggacatcatggagcccaaggtgcctgatgacatctacaaaacccacctagagaacaacaggtttgggggcagtggctctcaggtggactctgcccgcatgaacctggcctcctcttttgtgaatggctttgtgaatgcagcttttggccaagacaagctgctaacagatgatggcaacaaatggctttacaagaacaaggaccacggaatgttgagtgcagctgcatctcttgggatgattctgctgtgggatgtggatggtggcctcacccagattgacaagtacctgtactcctctgaggactacattaagtcaggagctcttcttgcctgtggcatagtgaactctggggtccggaatgagtgtgaccctgctctggcactgctctcagactatgttctccacaacagcaacaccatgagacttggttccatctttgggctaggcttggcttatgctggctcaaatcgtgaagatgtcctaacactgctgctgcctgtgatgggagattcaaagtccagcatggaggtggcaggtgtcacagctttagcctgtggaatgatagcagtagggtcctgcaatggagatgtaacttccactatccttcagaccatcatggagaagtcagagactgagctcaaggatacttatgctcgttggcttcctcttggactgggtctcaaccacctggggaagggtgaggccatcgaggcaatcctggctgcactggaggttgtgtcagagccattccgcagttttgccaacacactggtggatgtgtgtgcatatgcaggctctgggaatgtgctgaaggtgcagcagctgctccacatttgtagcgaacactttgactccaaagagaaggaggaagacaaagacaagaaggaaaagaaagacaaggacaagaaggaagcccctgctgacatgggagcacatcagggagtggctgttctggggattgcccttattgctatgggggaggagattggtgcagagatggcattacgaacctttggccacttgctgagatatggggagcctacactccggagggctgtacctttagcactggccctcatctctgtttcaaatccacgactcaacatcctggataccctaagcaaattctctcatgatgctgatccagaagtttcctataactccatttttgccatgggcatggtgggcagtggtaccaataatgcccgtctggctgcaatgctgcgccagttagctcaatatcatgccaaggacccaaacaacctcttcatggtgcgcttggcacagggcctgacacatttagggaagggcacccttaccctctgcccctaccacagcgaccggcagcttatgagccaggtggccgtggctggactgctcactgtgcttgtctctttcctggatgttcgaaacattattctaggcaaatcacactatgtattgtatgggctggtggctgccatgcagccccgaatgctggttacgtttgatgaggagctgcggccattgccagtgtctgtccgtgtgggccaggcagtggatgtggtgggccaggctggcaagccgaagactatcacagggttccagacgcatacaaccccagtgttgttggcccacggggaacgggcagaattggccactgaggagtttcttcctgttacccccattctggaaggttttgttatccttcggaagaaccccaattatgatctctaagtgaccaccaggggctctgaactgcagctgatgttatcagcaggccatgcatcctgctgccaagggtggacacggctgcagacttctgggggaattgtcgcctcctgctcttttgttactgagtgagataaggttgttcaataaagacttttatccccaa

SEQ ID NO: 383702 - DNA, 2254 bp, Homo sapiens
gggggggacccaaacatgcaggtcgaggctggtttcgggccggcagtggcggcggagatggaggagggaggccgggacaaggcgccggtgcagccccagcagtctccagcggcggcccccggcggcacggacgagaagccgagcggcaaggagcggcgggatgccggggacaaggacaaagaacaggagctgtctgaagaggataaacagcttcaagatgaactggagatgctcgtggaacgactaggggagaaggatacatccctgtatcgaccagcgctggaggaattgcgaaggcagattcgttcttctacaacttccatgacttcagtgcccaagcctctcaaatttctgcgtccacactatggcaaactgaaggaaatctatgagaacatggcccctggggagaataagcgttttgctgctgacatcatctccgttttggccatgaccatgagtggggagcgtgagtgcctcaagtatcggctagtgggctcccaggaggaattggcatcatggggtcatgagtatgtcaggcatctggcaggagaagtggctaaggagtggcaggagctggatgacgcagagaaggtccagcgggagcctctgctcactctggtgaaggaaatcgtcccctataacatggcccacaatgcagagcatgaggcttgcgacctgcttatggaaattgagcaggtggacatgctggagaaggacattgatgaaaatgcatatgcaaaggtctgcctttatctcaccagttgtgtgaattacgtgcctgagcctgagaactcagccctactgcgttgtgccctgggtgtgttccgaaagtttagccgcttccctgaagctctgagattggcattgatgctcaatgacatggagttggtagaagacatcttcacctcctgcaaggatgtggtagtacagaaacagatggcattcatgctaggccggcatggggtgttcctggagctgagtgaagatgtcgaggagtatgaggacctgacagagatcatgtccaatgtacagctcaacagcaacttcttggccttagctcgggagctggacatcatggagcccaaggtgcctgatgacatctacaaaacccacctagagaacaacaggtttgggggcagtggctctcaggtggactctgcccgcatgaacctggcctcctcttttgtgaatggctttgtgaatgcagcttttggccaagacaagctgctaacagatgatggcaacaaatggctttacaagaacaaggaccacggaatgttgagtgcagctgcatctcttgggatgattctgctgtgggatgtggatggtggcctcacccagattgacaagtacctgtactcctctgaggactacattaagtcaggagctcttcttgcctgtggcatagtgaactctggggtccggaatgagtgtgaccctgctctggcactgctctcagactatgttctccacaacagcaacaccatgagacttggttccatctttgggctaggcttggcttatgctggctcaaatcgtgaagatgtcctaacactgctgctgcctgtgatgggagattcaaagtccagcatggaggtggcaggtgtcacagctttagcctgtggaatgatagcagtagggtcctgcaatggagatgtaacttccactatccttcagaccatcatggagaagtcagagactgagctcaaggatacttatgctcgttggcttcctcttggactgggtctcaaccacctggggaagggtgaggccatcgaggcaatcctggctgcactggaggttgtgtcagagccattccgcagttttgccaacacactggtggatgtgtgtgcatatgcaggctctgggaatgtgctgaaggtgcagcagctgctccacatttgtagcgaacactttgactccaaagagaaggaggaagacaaagacaagaaggaaaagaaagacaaggacaagaaggaagcccctgctgacatgggagcacatcagggagtggctgttctggggattgcccttattgctatgggggaggagattggtgcagagatggcattacgaacctttggccacttggtgagtatagcatgaagaaaattggaatatactggttttgatggcctggggttccccagggaagatttttctgatgggttttcttggtggagagctggtctttttgctgtagccttttctttcttttttcttttcttttttgaagcggagttttgctctagag

SEQ ID NO: 383703 - DNA, 2509 bp, Homo sapiens
gggggggacccaaacatgcaggtcgaggctggtttcgggccggcagtggcggcggagatggaggagggaggccgggacaaggcgccggtgcagccccagcagtctccagcggcggcccccggcggcacggacgagaagccgagcggcaaggagcggcgggatgccggggacaaggacaaagaacaggagctgtctgaagaggataaacagcttcaagatgaactggagatgctcgtggaacgactaggggagaaggatacatccctgtatcgaccagcgctggaggaattgcgaaggcagattcgttcttctacaacttccatgacttcagtgcccaagcctctcaaatttctgcgtccacactatggcaaactgaaggaaatctatgagaacatggcccctggggagaataagcgttttgctgctgacatcatctccgttttggccatgaccatgagtggggagcgtgagtgcctcaagtatcggctagtgggctcccaggaggaattggcatcatggggtcatgagtatgtcaggcatctggcaggagaagtggctaaggagtggcaggagctggatgacgcagagaaggtccagcgggagcctctgctcactctggtgaaggaaatcgtcccctataacatggcccacaatgcagagcatgaggcttgcgacctgcttatggaaattgagcaggtggacatgctggagaaggacattgatgaaaatgcatatgcaaaggtctgcctttatctcaccagttgtgtgaattacgtgcctgagcctgagaactcagccctactgcgttgtgccctgggtgtgttccgaaagtttagccgcttccctgaagctctgagattggcattgatgctcaatgacatggagttggtagaagacatcttcacctcctgcaaggatgtggtagtacagaaacagatggcattcatgctaggccggcatggggtgttcctggagctgagtgaagatgtcgaggagtatgaggacctgacagagatcatgtccaatgtacagctcaacagcaacttcttggccttagctcgggagctggacatcatggagcccaaggtgcctgatgacatctacaaaacccacctagagaacaacaggtttgggggcagtggctctcaggtggactctgcccgcatgaacctggcctcctcttttgtgaatggctttgtgaatgcagcttttggccaagacaagctgctaacagatgatggcaacaaatggctttacaagaacaaggaccacggaatgttgagtgcagctgcatctcttgggatgattctgctgtgggatgtggatggtggcctcacccagattgacaagtacctgtactcctctgaggactacattaagtcaggagctcttcttgcctgtggcatagtgaactctggggtccggaatgagtgtgaccctgctctggcactgctctcagactatgttctccacaacagcaacaccatgagacttggttccatctttgggctaggcttggcttatgctggctcaaatcgtgaagatgtcctaacactgctgctgcctgtgatgggagattcaaagtccagcatggaggtggcaggtgtcacagctttagcctgtggaatgatagcagtagggtcctgcaatggagatgtaacttccactatccttcagaccatcatggagaagtcagagactgagctcaaggatacttatgctcgttggcttcctcttggactgggtctcaaccacctggggaagggtgaggccatcgaggcaatcctggctgcactggaggttgtgtcagagccattccgcagttttgccaacacactggtggatgtgtgtgcatatgcaggctctgggaatgtgctgaaggtgcagcagctgctccacatttgtagcgaacactttgactccaaagagaaggaggaagacaaagacaagaaggaaaagaaagacaaggacaagaaggaagcccctgctgacatgggagcacatcaggtaatatgggcagctgggcacttgcagagaggctgtgagaagagataagcatataggggaggctgggtttggtttttgctttagggcctctctgggtattgccatgtattgaaatagcgtgtgactgggttctgtatgtaaggggtaaaggtgttccccacaggatggctttttattttcagatgggacttgagtcaagggtgactgttttttattccttgagcttaatgggttctgctctctcttcaattgcagggagtggctgttctggggattgcccttattgctatgggggaggagattggtgcagagatggcattacgaacctttggccacttggtgagtatagcatgaagaaaattggaatatactggttttgatggcctggggttccccagggaagatttttctgatgggttttcttggtggagagctggtctttttgctgtagccttttctttcttttttcttttcttttttgaagcggagttttgctctagag

SEQ ID NO: 383704 - DNA, 2283 bp, Homo sapiens
gggggggacccaaacatgcaggtcgaggctggtttcgggccggcagtggcggcggagatggaggagggaggccgggacaaggcgccggtgcagccccagcagtctccagcggcggcccccggcggcacggacgagaagccgagcggcaaggagcggcgggatgccggggacaaggacaaagaacaggagctgtctgaagaggataaacagcttcaagatgaactggagatgctcgtggaacgactaggggagaaggatacatccctgtatcgaccagcgctggaggaattgcgaaggcagattcgttcttctacaacttccatgacttcagtgcccaagcctctcaaatttctgcgtccacactatggcaaactgaaggaaatctatgagaacatggcccctggggagaataagcgttttgctgctgacatcatctccgttttggccatgaccatgagtggggagcgtgagtgcctcaagtatcggctagtgggctcccaggaggaattggcatcatggggtcatgagtatgtcaggcatctggcaggagaagtggctaaggagtggcaggagctggatgacgcagagaaggtccagcgggagcctctgctcactctggtgaaggaaatcgtcccctataacatggcccacaatgcagagcatgaggcttgcgacctgcttatggaaattgagcaggtggacatgctggagaaggacattgatgaaaatgcatatgcaaaggtctgcctttatctcaccagttgtgtgaattacgtgcctgagcctgagaactcagccctactgcgttgtgccctgggtgtgttccgaaagtttagccgcttccctgaagctctgagattggcattgatgctcaatgacatggagttggtagaagacatcttcacctcctgcaaggatgtggtagtacagaaacagatggcattcatgctaggccggcatggggtgttcctggagctgagtgaagatgtcgaggagtatgaggacctgacagagatcatgtccaatgtacagctcaacagcaacttcttggccttagctcgggagctggacatcatggagcccaaggtgcctgatgacatctacaaaacccacctagagaacaacaggtttgggggcagtggctctcaggtggactctgcccgcatgaacctggcctcctcttttgtgaatggctttgtgaatgcagcttttggccaagacaagctgctaacagatgatggcaacaaatggctttacaagaacaaggaccacggaatgttgagtgcagctgcatctcttgggatgattctgctgtgggatgtggatggtggcctcacccagattgacaagtacctgtactcctctgaggactacattaagtcaggagctcttcttgcctgtggcatagtgaactctggggtccggaatgagtgtgaccctgctctggcactgctctcagactatgttctccacaacagcaacaccatgagacttggttccatctttgggctaggcttggcttatgctggctcaaatcgtgaagatgtcctaacactgctgctgcctgtgatgggagattcaaagtccagcatggaggtgagtagaggctattgagcatttagagtaagtagggaaggtgctttgagtcttactttctgtgataaataatgaaaaagaagtaagtgtgtgcatgtgtgcatacatgtacatgcctgttggtgtgtattgaggggcgtcacctcagtgaaaccccttgatctgggattctaagcctctggtggttttaaggctaaagagttaacattttaggcctggcacggtggctcgtgcctataatcccagcactttgggaggctgcagtgggcggatcacttgagcccaggagttcgagaccaacctgggcaagattgtgaaaccccatttctaccaaaaaataaacagaaaaattagccgggtgtggtgtgctcgcctgtagtgccagctactagggaagctgaggtgggcgcattgcttgaacccagaggtggaggttgcagtgagctgagatcgcgccactgcactcctgtctgggttacagagtgagaccctgtctttaaaagaaaaaaaggggggacattttagtgttgagttctgtcccttggaatctctgagaaactacttggactagagtgaagtgtaacttaacacagcctggggttgatgattctccttagtattgtagtcattggtcagccttaaatgttcatacttgtgcagagtcattaatggataaatacagcatgg

SEQ ID NO: 383705 - DNA, 770 bp, Homo sapiens
gggggggacccaaacatgcaggtcgaggctggtttcgggccggcagtggcggcggagatggaggagggaggccgggacaaggcgccggtgcagccccagcagtctccagcggcggcccccggcggcacggacgagaagccgagcggcaaggagcggcgggatgccggggacaaggacaaagaacaggagctgtctgaagaggataaacagcttcaagatgaactggagatgctcgtggaacgactaggggagaaggatacatccctgtatcgaccagcgctggaggaattgcgaaggcagattcgttcttctacaacttccatgacttcagtgcccaagcctctcaaatttctgcgtccacactatggcaaactgaaggaaatctatgagaacatggcccctggggagaataagcgttttgctgctgacatcatctccgttttggccatgaccatgagtggggagcgtgagtgcctcaagtatcggctagtgggctcccaggaggaattggcatcatggggtcatgagtatgtcaggcatctggcaggagaagtggctaaggagtggcaggagctggatgacgcagagaaggtccagcgggagcctctgctcactctggtgaaggaaatcgtcccctataacatggcccacaatgcagagcatgaggcttgcgacctgcttatggaaattgagcaggtggacatgctggagaaggacattgatgaaaatgcatatgcaaaggttttatccccaaggtctctctgtgtctg

SEQ ID NO: 383706 - DNA, 1003 bp, Homo sapiens
  misc_feature (90)..(90): n is a, c, g, or t
ggacgcgtgggtcgacccacgcgtcgcaaacaacctcttcatggtgcgcttggcacagggcctgacacatttagggaagggcacccttancctctgcccctacagcagtctccagcggcggcccccggcggcacggacgagaagccgagcggcaaggagcggcgggatgccggggacaaggacaaagaacaggagctggtgaggcgcgaccccgagagtcggcgaaggaggctgcggggctgagtcacggcggctccgcaggcctcaggcccgacacccaactaccccaccgcgccagggagagggcggttggggcgaccctcgggactcccggcaccttgcctctctgctcctcattctccgttccgcgctgtcacctccgccgtccccaccaaccctcaccaccgccgcgtgaagtggactcgggcagtctgaagaggataaacagcttcaagatgaactggagatgctcgtggaacgactaggggagaaggatacatccctgtatcgaccagcgctggaggaattgcgaaggcagattcgttcttctacaacttccatgacttcagtgcccaagcctctcaaatttctgcgtccacactatggcaaactgaaggaaatctatgagaacatggcccctggggagaataagggaaatatgtgtgaaatgttataggaggtagattcagcaggactcctgtttggtttcagtttgatttttggttgtggttgggaggaaggaggaggaattgaggatgttcggggtcactagttagatggtgcggccattcagagcaagagagggaatacaggaagaggaacaaatttgaaggattaagcaatgttataatttcttcaccaatttgtcatcaactgggaaatgttacaccaattattttaactctcttgggaaagaaatgtatgtagtactgaatattgaaaaaagacttgaagtagctggaggagtaatcggaggcctcttgattgggaccgtgattgggac

SEQ ID NO: 383707 - DNA, 423 bp, Homo sapiens
cagcgctgaggtgggctctcaatgtttctggccaggcctgtctttttgtctcttaactttttgtcctgtctgcttccctcagttattctaggcaaatcacactatgtattgtatgggctggtggctgccatgcagccccgaatgctggttacgtttgatgaggagctgcggccattgccagtgtctgtccgtgtgggccaggtgagaggctgagtagaggggagggctcaggctgtattctcaaactggagaatgtacatatacttgctttgctgaaactggcgtgggcggtggcttgtcgctacttttccatctctcttttcaattttcttaccctacaggcagtggatgtggtgggccaggctggcaagccgaagactatcacagggttccagacgcatacaaccccagtgttgttggccc

SEQ ID NO: 383708 - DNA, 299 bp, Homo sapiens
tgacatcatctccgttttggccatgaccatgagtggggagcgtgagtgcctcaagtatcggctagtgggctcccaggaggaattggcatcatggggtcatgagtatgtcaggtaagatctttcttcttgggaatccgaagggggctctgaggctctgagataattcagaattttcttgtggagtacaatctgtcttggagcatcagtgtattgaatttcccagacgctggattccttgacccacagagaagtgcttcccctgaagctgtgctctcttaatcgtctgggactatctgtag

SEQ ID NO: 383709 - DNA, 647 bp, Homo sapiens
ggacgcgtgggtcgacccacgcgtcgcaaacaacctcttcatggtgcgcttggcacagggcctgacacatttagggaagggcacccttaccctctgcccctaccacagcgaccggcagcttatgagccaggtggccgtggctggactgctcactgtgcttgtctctttcctggatgttcgaaacattattctaggcaaatcacactatgtattgtatgggctggtggctgccatgcagccccgaatgctggttacgtttgatgaggagctgcggccattgccagtgtctgtccgtgtgggccaggcagtggatgtggtgggccaggctggcaagccgaagactatcacagggttccagacgcatacaaccccagtgttgttggcccacggggaacgggcagaattggccactgaggagtttcttcctgttacccccattctggaaggttttgttatccttcggaagaaccccaattatgatctctaagtgaccaccaggggctctgaactgcagctgatgttatcagcaggccatgcatcctgctgccaagggtggacacggctgcagacttctgggggaattgtcgcctcctgctcttttgttactgagtgagataaggttgttcaataaagacttttatccccaa

SEQ ID NO: 383710 - DNA, 926 bp, Homo sapiens
  misc_feature (827)..(827): n is a, c, g, or t
  misc_feature (894)..(894): n is a, c, g, or t
  misc_feature (915)..(915): n is a, c, g, or t
ggaggaggaggggcgccgcgaccgacgcgcgcgagttggtctgggaaaaagggcggtgcgagcgggtgcgcgcgcagcgggccggcagtggcggcggagatggaggagggaggccgggacaaggcgccggtgcagccccagcagtctccagcggcggcccccggcggcacggacgagaagccgagcggcaaggagcggcgggatgccggggacaaggacaaagaacaggagctgtctgaagaggataaacagcttcaagatgaactggagatgctcgtggaacgactaggggagaaggatacatccctgtatcgaccagcgctggaggaattgcgaaggcagattcgttcttctacaacttccatgacttcagtgcccaagcctctcaaatttctgcgtccacactatggcaaactgaaggaaatctatgagaacatggcccctggggagaataagcgttttgctgctgacatcatctccgttttggccatgaccatgagtggggagcgtgagtgcctcaagtatcggctagtgggctcccaggaggaattggcatcatggggtcatgagtatgtcaggcatctggcaggagaagtggctaaggagtggcaggagctggatgacgcagagaaggtccagcgggagcctctgctcactctggtgaaggaaatcgtcccctataacatggcccacaatgcagagcatgaggcttgcgacctgcttatggaaattgagcaggtggacatgctggagaaggacattgatgaaaatgcatatgcaaaggtctgcctttatctcaccagttacgtgcctgagctgagaatcanctatgggtgtgcctgggtgtgtccaagttaccgttcctgacttggatgcttgtctatgctgattgtnaaaatttactctgaagttgancgacgtgatct

SEQ ID NO: 383711 - DNA, 267 bp, Homo sapiens
tgctggcggaacgactaggggagaaggatacatccctgtatcgaccagcgctggaggaattgcgaaggcagattcgttcttctacaacttccatgacttcagtgcccaagcctctcaaatttctgcgtccacactatggcaaactgaaggaaatctatgagaacatggcccctggggagaataagcgttttgctgctgacatcatctccgttttggccatgaccatgagtggggagcaccaccaatacagtgagcaccaccaataca

SEQ ID NO: 383712 - DNA, 326 bp, Homo sapiens
cgagctcggtaccctgagaacatggcccctggggagaataagcgttttgctgctgacatcatctccgttttggccatgaccatgagtggggagcgtgagtgcctcaagtatcggctagtgggctcccaggaggaattggcatcatggggtcatgagtatgtcaggcatctggcaggagaagtggctaaggagtggcaggagctggatgacgcagaaatttgagaggcttgggcactgaagtcatggaagttgtagaagaacgaatctgccttcgcaattcctccagcgctggtcgatacagggatgtatcctcgtggggtagaggt

SEQ ID NO: 383713 - DNA, 2950 bp, Homo sapiens
  misc_feature (90)..(90): n is a, c, g, or t
ggacgcgtgggtcgacccacgcgtcgcaaacaacctcttcatggtgcgcttggcacagggcctgacacatttagggaagggcacccttancctctgcccctacagcagtctccagcggcggcccccggcggcacggacgagaagccgagcggcaaggagcggcgggatgccggggacaaggacaaagaacaggagctgtctgaagaggataaacagcttcaagatgaactggagatgctcgtggaacgactaggggagaaggatacatccctgtatcgaccagcgctggaggaattgcgaaggcagattcgttcttctacaacttccatgacttcagtgcccaagcctctcaaatttctgcgtccacactatggcaaactgaaggaaatctatgagaacatggcccctggggagaataagcgttttgctgctgacatcatctccgttttggccatgaccatgagtggggagcgtgagtgcctcaagtatcggctagtgggctcccaggaggaattggcatcatggggtcatgagtatgtcaggcatctggcaggagaagtggctaaggagtggcaggagctggatgacgcagagaaggtccagcgggagcctctgctcactctggtgaaggaaatcgtcccctataacatggcccacaatgcagagcatgaggcttgcgacctgcttatggaaattgagcaggtggacatgctggagaaggacattgatgaaaatgcatatgcaaaggtctgcctttatctcaccagttgtgtgaattacgtgcctgagcctgagaactcagccctactgcgttgtgccctgggtgtgttccgaaagtttagccgcttccctgaagctctgagattggcattgatgctcaatgacatggagttggtagaagacatcttcacctcctgcaaggatgtggtagtacagaaacagatggcattcatgctaggccggcatggggtgttcctggagctgagtgaagatgtcgaggagtatgaggacctgacagagatcatgtccaatgtacagctcaacagcaacttcttggccttagctcgggagctggacatcatggagcccaaggtgcctgatgacatctacaaaacccacctagagaacaacaggtttgggggcagtggctctcaggtggactctgcccgcatgaacctggcctcctcttttgtgaatggctttgtgaatgcagcttttggccaagacaagctgctaacagatgatggcaacaaatggctttacaagaacaaggaccacggaatgttgagtgcagctgcatctcttgggatgattctgctgtgggatgtggatggtggcctcacccagattgacaagtacctgtactcctctgaggactacattaagtcaggagctcttcttgcctgtggcatagtgaactctggggtccggaatgagtgtgaccctgctctggcactgctctcagactatgttctccacaacagcaacaccatgagacttggttccatctttgggctaggcttggcttatgctggctcaaatcgtgaagatgtcctaacactgctgctgcctgtgatgggagattcaaagtccagcatggaggtggcaggtgtcacagctttagcctgtggaatgatagcagtagggtcctgcaatggagatgtaacttccactatccttcagaccatcatggagaagtcagagactgagctcaaggatacttatgctcgttggcttcctcttggactgggtctcaaccacctggggaagggtgaggccatcgaggcaatcctggctgcactggaggttgtgtcagagccattccgcagttttgccaacacactggtggatgtgtgtgcatatgcaggctctgggaatgtgctgaaggtgcagcagctgctccacatttgtagcgaacactttgactccaaagagaaggaggaagacaaagacaagaaggaaaagaaagacaaggacaagaaggaagcccctgctgacatgggagcacatcagggagtggctgttctggggattgcccttattgctatgggggaggagattggtgcagagatggcattacgaacctttggccacttgctgagatatggggagcctacactccggagggctgtacctttagcactggccctcatctctgtttcaaatccacgactcaacatcctggataccctaagcaaattctctcatgatgctgatccagaagtttcctataactccatttttgccatgggcatggtgggcagtggtaccaataatgcccgtctggctgcaatgctgcgccagttagctcaatatcatgccaaggacccaaacaacctcttcatggtgcgcttggcacagggcctgacacatttagggaagggcacccttaccctctgcccctaccacagcgaccggcagcttatgagccaggtggccgtggctggactgctcactgtgcttgtctctttcctggatgttcgaaacattattctaggcaaatcacactatgtattgtatgggctggtggctgccatgcagccccgaatgctggttacgtttgatgaggagctgcggccattgccagtgtctgtccgtgtgggccaggcagtggatgtggtgggccaggctggcaagccgaagactatcacagggttccagacgcatacaaccccagtgttgttggcccacggggaacgggcagaattggccactgaggagtttcttcctgttacccccattctggaaggttttgttatccttcggaagaaccccaattatgatctctaagtgaccaccaggggctctgaactgcagctgatgttatcagcaggccatgcatcctgctgccaagggtggacacggctgcagacttctgggggaattgtcgcctcctgctcttttgttactgagtgagataaggttgttcaataaagacttttatccccaa

SEQ ID NO: 383714 - DNA, 3214 bp, Homo sapiens
  misc_feature (3065)..(3065): n is a, c, g, or t
  misc_feature (3129)..(3129): n is a, c, g, or t
  misc_feature (3185)..(3185): n is a, c, g, or t
gggggggacccaaacatgcaggtcgaggctggtttcgggccggcagtggcggcggagatggaggagggaggccgggacaaggcgccggtgcagccccagcagtctccagcggcggcccccggcggcacggacgagaagccgagcggcaaggagcggcgggatgccggggacaaggacaaagaacaggagctgtctgaagaggataaacagcttcaagatgaactggagatgctcgtggaacgactaggggagaaggatacatccctgtatcgaccagcgctggaggaattgcgaaggcagattcgttcttctacaacttccatgacttcagtgcccaagcctctcaaatttctgcgtccacactatggcaaactgaaggaaatctatgagaacatggcccctggggagaataagcgttttgctgctgacatcatctccgttttggccatgaccatgagtggggagcgtgagtgcctcaagtatcggctagtgggctcccaggaggaattggcatcatggggtcatgagtatgtcaggcatctggcaggagaagtggctaaggagtggcaggagctggatgacgcagagaaggtccagcgggagcctctgctcactctggtgaaggaaatcgtcccctataacatggcccacaatgcagagcatgaggcttgcgacctgcttatggaaattgagcaggtggacatgctggagaaggacattgatgaaaatgcatatgcaaaggtctgcctttatctcaccagttgtgtgaattacgtgcctgagcctgagaactcagccctactgcgttgtgccctgggtgtgttccgaaagtttagccgcttccctgaagctctgagattggcattgatgctcaatgacatggagttggtagaagacatcttcacctcctgcaaggatgtggtagtacagaaacagatggcattcatgctaggccggcatggggtgttcctggagctgagtgaagatgtcgaggagtatgaggacctgacagagatcatgtccaatgtacagctcaacagcaacttcttggccttagctcgggagctggacatcatggagcccaaggtgcctgatgacatctacaaaacccacctagagaacaacaggtttgggggcagtggctctcaggtggactctgcccgcatgaacctggcctcctcttttgtgaatggctttgtgaatgcagcttttggccaagacaagctgctaacagatgatggcaacaaatggctttacaagaacaaggaccacggaatgttgagtgcagctgcatctcttgggatgattctgctgtgggatgtggatggtggcctcacccagattgacaagtacctgtactcctctgaggactacattaagtcaggagctcttcttgcctgtggcatagtgaactctggggtccggaatgagtgtgaccctgctctggcactgctctcagactatgttctccacaacagcaacaccatgagacttggttccatctttgggctaggcttggcttatgctggctcaaatcgtgaagatgtcctaacactgctgctgcctgtgatgggagattcaaagtccagcatggaggtggcaggtgtcacagctttagcctgtggaatgatagcagtagggtcctgcaatggagatgtaacttccactatccttcagaccatcatggagaagtcagagactgagctcaaggatacttatgctcgttggcttcctcttggactgggtctcaaccacctggggaagggtgaggccatcgaggcaatcctggctgcactggaggttgtgtcagagccattccgcagttttgccaacacactggtggatgtgtgtgcatatgcaggctctgggaatgtgctgaaggtgcagcagctgctccacatttgtagcgaacactttgactccaaagagaaggaggaagacaaagacaagaaggaaaagaaagacaaggacaagaaggaagcccctgctgacatgggagcacatcagggagtggctgttctggggattgcccttattgctatgggggaggagattggtgcagagatggcattacgaacctttggccacttgctgagatatggggagcctacactccggagggctgtacctttagcactggccctcatctctgtttcaaatccacgactcaacatcctggataccctaagcaaattctctcatgatgctgatccagaagtttcctataactccatttttgccatgggcatggtgggcagtggtaccaataatgcccgtctggctgcaatgctgcgccagttagctcaatatcatgccaaggacccaaacaacctcttcatggtgcgcttggcacagggcctgacacatttagggaagggcacccttaccctctgcccctaccacagcgaccggcagcttatgagccaggtggccgtggctggactgctcactgtgcttgtctctttcctggatgttcgaaacattattctaggcaaatcacactatgtattgtatgggctggtggctgccatgcagccccgaatgctggttacgtttgatgaggagctgcggccattgccagtgtctgtccgtgtgggccaggcagtggatgtggtgggccaggctggcaagccgaagactatcacagggttccagacgcatacaaccccagtgttgttggcccacggggaacgggcagaattggccactgaggagtttcttcctgttacccccattctggaaggttttgttatccttcggaagaaccccaattatgatctctaagtgaccaccaggggctctgaactgcagctgatgttatcagcaggccatgcatcctgctgccaagggtggacacggctgcagacttctgggggaattgtcgcctcctgctcttttgttactgagtgagataaggttgttcaataaagacttttatccccaaaaaaaaaaaaaaaaaaaaaaaaaacccgcggggggcacctaattgcgggtggtcgacaacaagggttctgcagcggccttggtctaaggctgtttcctcgaaccggttcttgtaccagggnaaacggcgggcccctaaggagcggttaattcgaaagccgtaacgtagtttctcgcacacaactnaaagcaggacacacgagaggcgataacgagctcgaacgcagaacacgaacaagcanaacaacaaacaaccgataagatgagacac

SEQ ID NO: 383715 - DNA, 3371 bp, Homo sapiens
gggggggacccaaacatgcaggtcgaggctggtttcgggccggcagtggcggcggagatggaggagggaggccgggacaaggcgccggtgcagccccagcagtctccagcggcggcccccggcggcacggacgagaagccgagcggcaaggagcggcgggatgccggggacaaggacaaagaacaggagctgtctgaagaggataaacagcttcaagatgaactggagatgctcgtggaacgactaggggagaaggatacatccctgtatcgaccagcgctggaggaattgcgaaggcagattcgttcttctacaacttccatgacttcagtgcccaagcctctcaaatttctgcgtccacactatggcaaactgaaggaaatctatgagaacatggcccctggggagaataagcgttttgctgctgacatcatctccgttttggccatgaccatgagtggggagcgtgagtgcctcaagtatcggctagtgggctcccaggaggaattggcatcatggggtcatgagtatgtcaggcatctggcaggagaagtggctaaggagtggcaggagctggatgacgcagagaaggtccagcgggagcctctgctcactctggtgaaggaaatcgtcccctataacatggcccacaatgcagagcatgaggcttgcgacctgcttatggaaattgagcaggtggacatgctggagaaggacattgatgaaaatgcatatgcaaaggtctgcctttatctcaccagttgtgtgaattacgtgcctgagcctgagaactcagccctactgcgttgtgccctgggtgtgttccgaaagtttagccgcttccctgaagctctgagattggcattgatgctcaatgacatggagttggtagaagacatcttcacctcctgcaaggatgtggtagtacagaaacagatggcattcatgctaggccggcatggggtgttcctggagctgagtgaagatgtcgaggagtatgaggacctgacagagatcatgtccaatgtacagctcaacagcaacttcttggccttagctcgggagctggacatcatggagcccaaggtgcctgatgacatctacaaaacccacctagagaacaacaggtttgggggcagtggctctcaggtggactctgcccgcatgaacctggcctcctcttttgtgaatggctttgtgaatgcagcttttggccaagacaagctgctaacagatgatggcaacaaatggctttacaagaacaaggaccacggaatgttgagtgcagctgcatctcttgggatgattctgctgtgggatgtggatggtggcctcacccagattgacaagtacctgtactcctctgaggactacattaagtcaggagctcttcttgcctgtggcatagtgaactctggggtccggaatgagtgtgaccctgctctggcactgctctcagactatgttctccacaacagcaacaccatgagacttggttccatctttgggctaggcttggcttatgctggctcaaatcgtgaagatgtcctaacactgctgctgcctgtgatgggagattcaaagtccagcatggaggtggcaggtgtcacagctttagcctgtggaatgatagcagtagggtcctgcaatggagatgtaacttccactatccttcagaccatcatggagaagtcagagactgagctcaaggatacttatgctcgttggcttcctcttggactgggtctcaaccacctggggaagggtgaggccatcgaggcaatcctggctgcactggaggttgtgtcagagccattccgcagttttgccaacacactggtggatgtgtgtgcatatgcaggctctgggaatgtgctgaaggtgcagcagctgctccacatttgtagcgaacactttgactccaaagagaaggaggaagacaaagacaagaaggaaaagaaagacaaggacaagaaggaagcccctgctgacatgggagcacatcagggagtggctgttctggggattgcccttattgctatgggggaggagattggtgcagagatggcattacgaacctttggccacttgctgagatatggggagcctacactccggagggctgtacctttagcactggccctcatctctgtttcaaatccacgactcaacatcctggataccctaagcaaattctctcatgatgctgatccagaagtttcctataactccatttttgccatgggcatggtgggcagtggtaccaataatgcccgtctggctgcaatgctgcgccagttagctcaatatcatgccaaggacccaaacaacctcttcatggtgcgcttggcacagggcctgacacatttagggaagggcacccttaccctctgcccctaccacagcgaccggcagcttatgagccaggtggccgtggctggactgctcactgtgcttgtctctttcctggatgttcgaaacattattctaggcaaatcacactatgtattgtatgggctggtggctgccatgcagccccgaatgctggttacgtttgatgaggagctgcggccattgccagtgtctgtccgtgtgggccaggcagtggatgtggtgggccaggctggcaagccgaagactatcacagggttccagacgcatacaaccccagtgttgttggcccacggggaacgggcagaattggccactgaggagtttcttcctgttacccccattctggaaggttttgttatccttcggaagaaccccaattatgatctctaagtgaccaccaggggctctgaactgcagctgatgttatcagcaggccatgcatcctgctgccaagggtggacacggctgcagacttctgggggaattgtcgcctcctgctcttttgttactgagtgagataaggttgttcaataaagacttttatccccaaaaaaaaaaacggaacggagagagagaacagaagcggaaaggagcaagagcgacgtgagaggaggaggaaggagagaggtgacaggtcgacgaacgacgaacgcaggaagagaaaacagatgcggagggcgtgggcggcgagaagagagcgagacacacaacaaaagcggaggggcgcggcgcaagcaggagtacgaacagggcgagcaaccagagcgaccacgaagacagcacccgaggaagagaaagaggagagaggagaggaagacacacacacagacacaccaagcagccgcgggagacaagccgagagcccaaagaacaagagacagacgagaggtgagtggacgagaggacgacaagccgggagacgagacaacaaaggggagcagacgccagcaccaggcacaccaacaaaaacagcgccg

SEQ ID NO: 383716 - DNA, 2973 bp, Homo sapiens
  misc_feature (2973)..(2973): n is a, c, g, or t
gggggggacccaaacatgcaggtcgaggctggtttcgggccggcagtggcggcggagatggaggagggaggccgggacaaggcgccggtgcagccccagcagtctccagcggcggcccccggcggcacggacgagaagccgagcggcaaggagcggcgggatgccggggacaaggacaaagaacaggagctgtctgaagaggataaacagcttcaagatgaactggagatgctcgtggaacgactaggggagaaggatacatccctgtatcgaccagcgctggaggaattgcgaaggcagattcgttcttctacaacttccatgacttcagtgcccaagcctctcaaatttctgcgtccacactatggcaaactgaaggaaatctatgagaacatggcccctggggagaataagcgttttgctgctgacatcatctccgttttggccatgaccatgagtggggagcgtgagtgcctcaagtatcggctagtgggctcccaggaggaattggcatcatggggtcatgagtatgtcaggcatctggcaggagaagtggctaaggagtggcaggagctggatgacgcagagaaggtccagcgggagcctctgctcactctggtgaaggaaatcgtcccctataacatggcccacaatgcagagcatgaggcttgcgacctgcttatggaaattgagcaggtggacatgctggagaaggacattgatgaaaatgcatatgcaaaggtctgcctttatctcaccagttgtgtgaattacgtgcctgagcctgagaactcagccctactgcgttgtgccctgggtgtgttccgaaagtttagccgcttccctgaagctctgagattggcattgatgctcaatgacatggagttggtagaagacatcttcacctcctgcaaggatgtggtagtacagaaacagatggcattcatgctaggccggcatggggtgttcctggagctgagtgaagatgtcgaggagtatgaggacctgacagagatcatgtccaatgtacagctcaacagcaacttcttggccttagctcgggagctggacatcatggagcccaaggtgcctgatgacatctacaaaacccacctagagaacaacaggtttgggggcagtggctctcaggtggactctgcccgcatgaacctggcctcctcttttgtgaatggctttgtgaatgcagcttttggccaagacaagctgctaacagatgatggcaacaaatggctttacaagaacaaggaccacggaatgttgagtgcagctgcatctcttgggatgattctgctgtgggatgtggatggtggcctcacccagattgacaagtacctgtactcctctgaggactacattaagtcaggagctcttcttgcctgtggcatagtgaactctggggtccggaatgagtgtgaccctgctctggcactgctctcagactatgttctccacaacagcaacaccatgagacttggttccatctttgggctaggcttggcttatgctggctcaaatcgtgaagatgtcctaacactgctgctgcctgtgatgggagattcaaagtccagcatggaggtggcaggtgtcacagctttagcctgtggaatgatagcagtagggtcctgcaatggagatgtaacttccactatccttcagaccatcatggagaagtcagagactgagctcaaggatacttatgctcgttggcttcctcttggactgggtctcaaccacctggggaagggtgaggccatcgaggcaatcctggctgcactggaggttgtgtcagagccattccgcagttttgccaacacactggtggatgtgtgtgcatatgcaggctctgggaatgtgctgaaggtgcagcagctgctccacatttgtagcgaacactttgactccaaagagaaggaggaagacaaagacaagaaggaaaagaaagacaaggacaagaaggaagcccctgctgacatgggagcacatcagggagtggctgttctggggattgcccttattgctatgggggaggagattggtgcagagatggcattacgaacctttggccacttgctgagatatggggagcctacactccggagggctgtacctttagcactggccctcatctctgtttcaaatccacgactcaacatcctggataccctaagcaaattctctcatgatgctgatccagaagtttcctataactccatttttgccatgggcatggtgggcagtggtaccaataatgcccgtctggctgcaatgctgcgccagttagctcaatatcatgccaaggacccaaacaacctcttcatggtgcgcttggcacagggcctgacacatttagggaagggcacccttaccctctgcccctaccacagcgaccggcagcttatgagccaggtggccgtggctggactgctcactgtgcttgtctctttcctggatgttcgaaacattattctaggcaaatcacactatgtattgtatgggctggtggctgccatgcagccccgaatgctggttacgtttgatgaggagctgcggccattgccagtgtctgtccgtgtgggccaggcagtggatgtggtgggccaggctggcaagccgaagactatcacagggttccagacgcatacaaccccagtgttgttggcccacggggaacgggcagaattggccactgaggagtttcttcctgttacccccattctggaaggttttgttatccttcggaagaaccccaattatgatctctaagtgaccaccaggggctctgaactgcagctgatgttatcagcaggccatgcatcctgctgccaagggtggacacggctgcagacttctgggggaattgtcgcctcctgctcttttgttactgagtgagataaggttgttcaataaagacttttatccccaataactatcatgccctgcgcgtgcggccgn

SEQ ID NO: 383717 - DNA, 2987 bp, Homo sapiens
gggggggacccaaacatgcaggtcgaggctggtttcgggccggcagtggcggcggagatggaggagggaggccgggacaaggcgccggtgcagccccagcagtctccagcggcggcccccggcggcacggacgagaagccgagcggcaaggagcggcgggatgccggggacaaggacaaagaacaggagctgtctgaagaggataaacagcttcaagatgaactggagatgctcgtggaacgactaggggagaaggatacatccctgtatcgaccagcgctggaggaattgcgaaggcagattcgttcttctacaacttccatgacttcagtgcccaagcctctcaaatttctgcgtccacactatggcaaactgaaggaaatctatgagaacatggcccctggggagaataagcgttttgctgctgacatcatctccgttttggccatgaccatgagtggggagcgtgagtgcctcaagtatcggctagtgggctcccaggaggaattggcatcatggggtcatgagtatgtcaggcatctggcaggagaagtggctaaggagtggcaggagctggatgacgcagagaaggtccagcgggagcctctgctcactctggtgaaggaaatcgtcccctataacatggcccacaatgcagagcatgaggcttgcgacctgcttatggaaattgagcaggtggacatgctggagaaggacattgatgaaaatgcatatgcaaaggtctgcctttatctcaccagttgtgtgaattacgtgcctgagcctgagaactcagccctactgcgttgtgccctgggtgtgttccgaaagtttagccgcttccctgaagctctgagattggcattgatgctcaatgacatggagttggtagaagacatcttcacctcctgcaaggatgtggtagtacagaaacagatggcattcatgctaggccggcatggggtgttcctggagctgagtgaagatgtcgaggagtatgaggacctgacagagatcatgtccaatgtacagctcaacagcaacttcttggccttagctcgggagctggacatcatggagcccaaggtgcctgatgacatctacaaaacccacctagagaacaacaggtttgggggcagtggctctcaggtggactctgcccgcatgaacctggcctcctcttttgtgaatggctttgtgaatgcagcttttggccaagacaagctgctaacagatgatggcaacaaatggctttacaagaacaaggaccacggaatgttgagtgcagctgcatctcttgggatgattctgctgtgggatgtggatggtggcctcacccagattgacaagtacctgtactcctctgaggactacattaagtcaggagctcttcttgcctgtggcatagtgaactctggggtccggaatgagtgtgaccctgctctggcactgctctcagactatgttctccacaacagcaacaccatgagacttggttccatctttgggctaggcttggcttatgctggctcaaatcgtgaagatgtcctaacactgctgctgcctgtgatgggagattcaaagtccagcatggaggtggcaggtgtcacagctttagcctgtggaatgatagcagtagggtcctgcaatggagatgtaacttccactatccttcagaccatcatggagaagtcagagactgagctcaaggatacttatgctcgttggcttcctcttggactgggtctcaaccacctggggaagggtgaggccatcgaggcaatcctggctgcactggaggttgtgtcagagccattccgcagttttgccaacacactggtggatgtgtgtgcatatgcaggctctgggaatgtgctgaaggtgcagcagctgctccacatttgtagcgaacactttgactccaaagagaaggaggaagacaaagacaagaaggaaaagaaagacaaggacaagaaggaagcccctgctgacatgggagcacatcagggagtggctgttctggggattgcccttattgctatgggggaggagattggtgcagagatggcattacgaacctttggccacttgctgagatatggggagcctacactccggagggctgtacctttagcactggccctcatctctgtttcaaatccacgactcaacatcctggataccctaagcaaattctctcatgatgctgatccagaagtttcctataactccatttttgccatgggcatggtgggcagtggtaccaataatgcccgtctggctgcaatgctgcgccagttagctcaatatcatgccaaggacccaaacaacctcttcatggtgcgcttggcacagggcctgacacatttagggaagggcacccttaccctctgcccctaccacagcgaccggcagcttatgagccaggtggccgtggctggactgctcactgtgcttgtctctttcctggatgttcgaaacattattctaggcaaatcacactatgtattgtatgggctggtggctgccatgcagccccgaatgctggttacgtttgatgaggagctgcggccattgccagtgtctgtccgtgtgggccaggcagtggatgtggtgggccaggctggcaagccgaagactatcacagggttccagacgcatacaaccccagtgttgttggcccacggggaacgggcagaattggccactgaggagtttcttcctgttacccccattctggaaggttttgttatccttcggaagaaccccaattatgatctctaagtgaccaccaggggctctgaactgcagctgatgttatcagcaggccatgcatcctgctgccaagggtggacacggctgcagacttctgggggaattgtcgcctcctgctcttttgttactgagtgagataaggttgttcaataaagacttttatccccaaagatgcggccgaaccacaccactcctactcatcaccgccattg

SEQ ID NO: 383718 - DNA, 3032 bp, Homo sapiens
gggggggacccaaacatgcaggtcgaggctggtttcgggccggcagtggcggcggagatggaggagggaggccgggacaaggcgccggtgcagccccagcagtctccagcggcggcccccggcggcacggacgagaagccgagcggcaaggagcggcgggatgccggggacaaggacaaagaacaggagctgtctgaagaggataaacagcttcaagatgaactggagatgctcgtggaacgactaggggagaaggatacatccctgtatcgaccagcgctggaggaattgcgaaggcagattcgttcttctacaacttccatgacttcagtgcccaagcctctcaaatttctgcgtccacactatggcaaactgaaggaaatctatgagaacatggcccctggggagaataagcgttttgctgctgacatcatctccgttttggccatgaccatgagtggggagcgtgagtgcctcaagtatcggctagtgggctcccaggaggaattggcatcatggggtcatgagtatgtcaggcatctggcaggagaagtggctaaggagtggcaggagctggatgacgcagagaaggtccagcgggagcctctgctcactctggtgaaggaaatcgtcccctataacatggcccacaatgcagagcatgaggcttgcgacctgcttatggaaattgagcaggtggacatgctggagaaggacattgatgaaaatgcatatgcaaaggtctgcctttatctcaccagttgtgtgaattacgtgcctgagcctgagaactcagccctactgcgttgtgccctgggtgtgttccgaaagtttagccgcttccctgaagctctgagattggcattgatgctcaatgacatggagttggtagaagacatcttcacctcctgcaaggatgtggtagtacagaaacagatggcattcatgctaggccggcatggggtgttcctggagctgagtgaagatgtcgaggagtatgaggacctgacagagatcatgtccaatgtacagctcaacagcaacttcttggccttagctcgggagctggacatcatggagcccaaggtgcctgatgacatctacaaaacccacctagagaacaacaggtttgggggcagtggctctcaggtggactctgcccgcatgaacctggcctcctcttttgtgaatggctttgtgaatgcagcttttggccaagacaagctgctaacagatgatggcaacaaatggctttacaagaacaaggaccacggaatgttgagtgcagctgcatctcttgggatgattctgctgtgggatgtggatggtggcctcacccagattgacaagtacctgtactcctctgaggactacattaagtcaggagctcttcttgcctgtggcatagtgaactctggggtccggaatgagtgtgaccctgctctggcactgctctcagactatgttctccacaacagcaacaccatgagacttggttccatctttgggctaggcttggcttatgctggctcaaatcgtgaagatgtcctaacactgctgctgcctgtgatgggagattcaaagtccagcatggaggtggcaggtgtcacagctttagcctgtggaatgatagcagtagggtcctgcaatggagatgtaacttccactatccttcagaccatcatggagaagtcagagactgagctcaaggatacttatgctcgttggcttcctcttggactgggtctcaaccacctggggaagggtgaggccatcgaggcaatcctggctgcactggaggttgtgtcagagccattccgcagttttgccaacacactggtggatgtgtgtgcatatgcaggctctgggaatgtgctgaaggtgcagcagctgctccacatttgtagcgaacactttgactccaaagagaaggaggaagacaaagacaagaaggaaaagaaagacaaggacaagaaggaagcccctgctgacatgggagcacatcagggagtggctgttctggggattgcccttattgctatgggggaggagattggtgcagagatggcattacgaacctttggccacttgctgagatatggggagcctacactccggagggctgtacctttagcactggccctcatctctgtttcaaatccacgactcaacatcctggataccctaagcaaattctctcatgatgctgatccagaagtttcctataactccatttttgccatgggcatggtgggcagtggtgagtatccggcagaagaaggtcataaacagattgggggaagatttgaagccccttttttcacttctgtaatgcttaacatttccaggtaccaataatgcccgtctggctgcaatgctgcgccagttagctcaatatcatgccaaggacccaaacaacctcttcatggtgcgcttggcacagggcctgacacatttagggaagggcacccttaccctctgcccctaccacagcgaccggcagcttatgagccaggtggccgtggctggactgctcactgtgcttgtctctttcctggatgttcgaaacattattctaggcaaatcacactatgtattgtatgggctggtggctgccatgcagccccgaatgctggttacgtttgatgaggagctgcggccattgccagtgtctgtccgtgtgggccaggcagtggatgtggtgggccaggctggcaagccgaagactatcacagggttccagacgcatacaaccccagtgttgttggcccacggggaacgggcagaattggccactgaggagtttcttcctgttacccccattctggaaggttttgttatccttcggaagaaccccaattatgatctctaagtgaccaccaggggctctgaactgcagctgatgttatcagcaggccatgcatcctgctgccaagggtggacacggctgcagacttctgggggaattgtcgcctcctgctcttttgttactgagtgagataaggttgttcaataaagacttttatccccaa

SEQ ID NO: 383719 - DNA, 3120 bp, Homo sapiens
gggggggacccaaacatgcaggtcgaggctggtttcgggccggcagtggcggcggagatggaggagggaggccgggacaaggcgccggtgcagccccagcagtctccagcggcggcccccggcggcacggacgagaagccgagcggcaaggagcggcgggatgccggggacaaggacaaagaacaggagctgtctgaagaggataaacagcttcaagatgaactggagatgctcgtggaacgactaggggagaaggatacatccctgtatcgaccagcgctggaggaattgcgaaggcagattcgttcttctacaacttccatgacttcagtgcccaagcctctcaaatttctgcgtccacactatggcaaactgaaggaaatctatgagaacatggcccctggggagaataagcgttttgctgctgacatcatctccgttttggccatgaccatgagtggggagcgtgagtgcctcaagtatcggctagtgggctcccaggaggaattggcatcatggggtcatgagtatgtcaggcatctggcaggagaagtggctaaggagtggcaggagctggatgacgcagagaaggtccagcgggagcctctgctcactctggtgaaggaaatcgtcccctataacatggcccacaatgcagagcatgaggcttgcgacctgcttatggaaattgagcaggtggacatgctggagaaggacattgatgaaaatgcatatgcaaaggtctgcctttatctcaccagttgtgtgaattacgtgcctgagcctgagaactcagccctactgcgttgtgccctgggtgtgttccgaaagtttagccgcttccctgaagctctgagattggcattgatgctcaatgacatggagttggtagaagacatcttcacctcctgcaaggatgtggtagtacagaaacagatggcattcatgctaggccggcatggggtgttcctggagctgagtgaagatgtcgaggagtatgaggacctgacagagatcatgtccaatgtacagctcaacagcaacttcttggccttagctcgggagctggacatcatggagcccaaggtgcctgatgacatctacaaaacccacctagagaacaacaggtttgggggcagtggctctcaggtggactctgcccgcatgaacctggcctcctcttttgtgaatggctttgtgaatgcagcttttggccaagacaagctgctaacagatgatggcaacaaatggctttacaagaacaaggaccacggtataattctgttcctgctttgtcttttgttttgctttgatcacttcttttgtcctcttggagtcataagttatctgacaagggatccaccatgcagttctttggagagctctttataataacaggatcctcaggatagggccattttaagactaatagattcttccctggtataggaatgttgagtgcagctgcatctcttgggatgattctgctgtgggatgtggatggtggcctcacccagattgacaagtacctgtactcctctgaggactacattaagtcaggagctcttcttgcctgtggcatagtgaactctggggtccggaatgagtgtgaccctgctctggcactgctctcagactatgttctccacaacagcaacaccatgagacttggttccatctttgggctaggcttggcttatgctggctcaaatcgtgaagatgtcctaacactgctgctgcctgtgatgggagattcaaagtccagcatggaggtggcaggtgtcacagctttagcctgtggaatgatagcagtagggtcctgcaatggagatgtaacttccactatccttcagaccatcatggagaagtcagagactgagctcaaggatacttatgctcgttggcttcctcttggactgggtctcaaccacctggggaagggtgaggccatcgaggcaatcctggctgcactggaggttgtgtcagagccattccgcagttttgccaacacactggtggatgtgtgtgcatatgcaggctctgggaatgtgctgaaggtgcagcagctgctccacatttgtagcgaacactttgactccaaagagaaggaggaagacaaagacaagaaggaaaagaaagacaaggacaagaaggaagcccctgctgacatgggagcacatcagggagtggctgttctggggattgcccttattgctatgggggaggagattggtgcagagatggcattacgaacctttggccacttgctgagatatggggagcctacactccggagggctgtacctttagcactggccctcatctctgtttcaaatccacgactcaacatcctggataccctaagcaaattctctcatgatgctgatccagaagtttcctataactccatttttgccatgggcatggtgggcagtggtaccaataatgcccgtctggctgcaatgctgcgccagttagctcaatatcatgccaaggacccaaacaacctcttcatggtgcgcttggcacagggcctgacacatttagggaagggcacccttaccctctgcccctaccacagcgaccggcagcttatgagccaggtggccgtggctggactgctcactgtgcttgtctctttcctggatgttcgaaacattattctaggcaaatcacactatgtattgtatgggctggtggctgccatgcagccccgaatgctggttacgtttgatgaggagctgcggccattgccagtgtctgtccgtgtgggccaggcagtggatgtggtgggccaggctggcaagccgaagactatcacagggttccagacgcatacaaccccagtgttgttggcccacggggaacgggcagaattggccactgaggagtttcttcctgttacccccattctggaaggttttgttatccttcggaagaaccccaattatgatctctaagtgaccaccaggggctctgaactgcagctgatgttatcagcaggccatgcatcctgctgccaagggtggacacggctgcagacttctgggggaattgtcgcctcctgctcttttgttactgagtgagataaggttgttcaataaagacttttatccccaa

SEQ ID NO: 383720 - DNA, 3084 bp, Homo sapiens
gggggggacccaaacatgcaggtcgaggctggtttcgggccggcagtggcggcggagatggaggagggaggccgggacaaggcgccggtgcagccccagcagtctccagcggcggcccccggcggcacggacgagaagccgagcggcaaggagcggcgggatgccggggacaaggacaaagaacaggagctgtctgaagaggataaacagcttcaagatgaactggagatgctcgtggaacgactaggggagaaggatacatccctgtatcgaccagcgctggaggaattgcgaaggcagattcgttcttctacaacttccatgacttcagtgcccaagcctctcaaatttctgcgtccacactatggcaaactgaaggaaatctatgagaacatggcccctggggagaataagcgttttgctgctgacatcatctccgttttggccatgaccatgagtggggagcgtgagtgcctcaagtatcggctagtgggctcccaggaggaattggcatcatggggtcatgagtatgtcaggcatctggcaggagaagtggctaaggagtggcaggagctggatgacgcagagaaggtccagcgggagcctctgctcactctggtgaaggaaatcgtcccctataacatggcccacaatgcagagcatgaggcttgcgacctgcttatggaaattgagcaggtggacatgctggagaaggacattgatgaaaatgcatatgcaaaggtctgcctttatctcaccagttgtgtgaattacgtgcctgagcctgagaactcagccctactgcgttgtgccctgggtgtgttccgaaagtttagccgcttccctgaagctctgagattggcattgatgctcaatgacatggagttggtagaagacatcttcacctcctgcaaggatgtggtagtacagaaacagatggcattcatgctaggccggcatggggtgttcctggagctgagtgaagatgtcgaggagtatgaggacctgacagagatcatgtccaatgtacagctcaacagcaacttcttggccttagctcgggagctggacatcatggagcccaaggtgcctgatgacatctacaaaacccacctagagaacaacaggtttgggggcagtggctctcaggtggactctgcccgcatgaacctggcctcctcttttgtgaatggctttgtgaatgcagcttttggccaagacaagctgctaacagatgatggcaacaaatggctttacaagaacaaggaccacggaatgttgagtgcagctgcatctcttgggatgattctgctgtgggatgtggatggtggcctcacccagattgacaagtacctgtactcctctgaggactacattaagtcaggagctcttcttgcctgtggcatagtgaactctggggtccggaatgagtgtgaccctgctctggcactgctctcagactatgttctccacaacagcaacaccatgagacttggttccatctttgggctaggcttggcttatgctggctcaaatcgtgaagatgtcctaacactgctgctgcctgtgatgggagattcaaagtccagcatggaggtggcaggtgtcacagctttagcctgtggaatgatagcagtagggtcctgcaatggagatgtaacttccactatccttcagaccatcatggagaagtcagagactgagctcaaggatacttatgctcgttggcttcctcttggactgggtctcaaccacctggggaagggtgaggccatcgaggcaatcctggctgcactggaggttgtgtcagagccattccgcagttttgccaacacactggtggatgtgtgtgcatatgcaggctctgggaatgtgctgaaggtgcagcagctgctccacatttgtagcgaacactttgactccaaagagaaggaggaagacaaagacaagaaggaaaagaaagacaaggacaagaaggaagcccctgctgacatgggagcacatcagggagtggctgttctggggattgcccttattgctatgggggaggagattggtgcagagatggcattacgaacctttggccacttgctgagatatggggagcctacactccggagggctgtacctttagcactggccctcatctctgtttcaaatccacgactcaacatcctggataccctaagcaaattctctcatgatgctgatccagaagtttcctataactccatttttgccatgggcatggtgggcagtggtaccaataatgcccgtctggctgcaatgctgcgccagttagctcaatatcatgccaaggacccaaacaacctcttcatggtgcgcttggcacagggcctgacacatttagggaagggcacccttaccctctgcccctaccacagcgaccggcagcttatgagccaggtggccgtggctggactgctcactgtgcttgtctctttcctggatgttcgaaacattattctaggcaaatcacactatgtattgtatgggctggtggctgccatgcagccccgaatgctggttacgtttgatgaggagctgcggccattgccagtgtctgtccgtgtgggccaggtgagaggctgagtagaggggagggctcaggctgtattctcaaactggagaatgtacatatacttgctttgctgaaactggcgtgggcggtggcttgtcgctacttttccatctctcttttcaattttcttaccctacaggcagtggatgtggtgggccaggctggcaagccgaagactatcacagggttccagacgcatacaaccccagtgttgttggcccacggggaacgggcagaattggccactgaggagtttcttcctgttacccccattctggaaggttttgttatccttcggaagaaccccaattatgatctctaagtgaccaccaggggctctgaactgcagctgatgttatcagcaggccatgcatcctgctgccaagggtggacacggctgcagacttctgggggaattgtcgcctcctgctcttttgttactgagtgagataaggttgttcaataaagacttttatccccaa

SEQ ID NO: 383721 - DNA, 2587 bp, Homo sapiens
gggggggacccaaacatgcaggtcgaggctggtttcgggccggcagtggcggcggagatggaggagggaggccgggacaaggcgccggtgcagccccagcagtctccagcggcggcccccggcggcacggacgagaagccgagcggcaaggagcggcgggatgccggggacaaggacaaagaacaggagctgtctgaagaggataaacagcttcaagatgaactggagatgctcgtggaacgactaggggagaaggatacatccctgtatcgaccagcgctggaggaattgcgaaggcagattcgttcttctacaacttccatgacttcagtgcccaagcctctcaaatttctgcgtccacactatggcaaactgaaggaaatctatgagaacatggcccctggggagaataagcgttttgctgctgacatcatctccgttttggccatgaccatgagtggggagcgtgagtgcctcaagtatcggctagtgggctcccaggaggaattggcatcatggggtcatgagtatgtcaggcatctggcaggagaagtggctaaggagtggcaggagctggatgacgcagagaaggtccagcgggagcctctgctcactctggtgaaggaaatcgtcccctataacatggcccacaatgcagagcatgaggcttgcgacctgcttatggaaattgagcaggtggacatgctggagaaggacattgatgaaaatgcatatgcaaaggtctgcctttatctcaccagttgtgtgaattacgtgcctgagcctgagaactcagccctactgcgttgtgccctgggtgtgttccgaaagtttagccgcttccctgaagctctgagattggcattgatgctcaatgacatggagttggtagaagacatcttcacctcctgcaaggatgtggtagtacagaaacagatggcattcatgctaggccggcatggggtgttcctggagctgagtgaagatgtcgaggagtatgaggacctgacagagatcatgtccaatgtacagctcaacagcaacttcttggccttagctcgggagctggacatcatggagcccaaggtgcctgatgacatctacaaaacccacctagagaacaacaggtttgggggcagtggctctcaggtggactctgcccgcatgaacctggcctcctcttttgtgaatggctttgtgaatgcagcttttggccaagacaagctgctaacagatgatggcaacaaatggctttacaagaacaaggaccacggaatgttgagtgcagctgcatctcttgggatgattctgctgtgggatgtggatggtggcctcacccagattgacaagtacctgtactcctctgaggactacattaagtcaggagctcttcttgcctgtggcatagtgaactctggggtccggaatgagtgtgaccctgctctggcactgctctcagactatgttctccacaacagcaacaccatgagacttggttccatctttgggctaggcttggcttatgctggctcaaatcgtgaagatgtcctaacactgctgctgcctgtgatgggagattcaaagtccagcatggaggtggcaggtgtcacagctttagcctgtggaatgatagcagtagggtcctgcaatggagatgtaacttccactatccttcagaccatcatggagaagtcagagactgagctcaaggatacttatgctcgttggcttcctcttggactgggtctcaaccacctggggaagggtgaggccatcgaggcaatcctggctgcactggaggttgtgtcagagccattccgcagttttgccaacacactggtggatgtgtgtgcatatgcaggctctgggaatgtgctgaaggtgcagcagctgctccacatttgtagcgaacactttgactccaaagagaaggaggaagacaaagacaagaaggaaaagaaagacaaggacaacctcttcatggtgcgcttggcacagggcctgacacatttagggaagggcacccttaccctctgcccctaccacagcgaccggcagcttatgagccaggtggccgtggctggactgctcactgtgcttgtctctttcctggatgttcgaaacattattctaggcaaatcacactatgtattgtatgggctggtggctgccatgcagccccgaatgctggttacgtttgatgaggagctgcggccattgccagtgtctgtccgtgtgggccaggcagtggatgtggtgggccaggctggcaagccgaagactatcacagggttccagacgcatacaaccccagtgttgttggcccacggggaacgggcagaattggccactgaggagtttcttcctgttacccccattctggaaggttttgttatccttcggaagaaccccaattatgatctctaagtgaccaccaggggctctgaactgcagctgatgttatcagcaggccatgcatcctgctgccaagggtggacacggctgcagacttctgggggaattgtcgcctcctgctcttttgttactgagtgagataaggttgttcaataaagacttttatccccaa

SEQ ID NO: 383722 - DNA, 2734 bp, Homo sapiens
gggggggacccaaacatgcaggtcgaggctggtttcgggccggcagtggcggcggagatggaggagggaggccgggacaaggcgccggtgcagccccagcagtctccagcggcggcccccggcggcacggacgagaagccgagcggcaaggagcggcgggatgccggggacaaggacaaagaacaggagctgtctgaagaggataaacagcttcaagatgaactggagatgctcgtggaacgactaggggagaaggatacatccctgtatcgaccagcgctggaggaattgcgaaggcagattcgttcttctacaacttccatgacttcagtgcccaagcctctcaaatttctgcgtccacactatggcaaactgaaggaaatctatgagaacatggcccctggggagaataagcgttttgctgctgacatcatctccgttttggccatgaccatgagtggggagcgtgagtgcctcaagtatcggctagtgggctcccaggaggaattggcatcatggggtcatgagtatgtcaggcatctggcaggagaagtggctaaggagtggcaggagctggatgacgcagagaaggtccagcgggagcctctgctcactctggtgaaggaaatcgtcccctataacatggcccacaatgcagagcatgaggcttgcgacctgcttatggaaattgagcaggtggacatgctggagaaggacattgatgaaaatgcatatgcaaaggtctgcctttatctcaccagttgtgtgaattacgtgcctgagcctgagaactcagccctactgcgttgtgccctgggtgtgttccgaaagtttagccgcttccctgaagctctgagattggcattgatgctcaatgacatggagttggtagaagacatcttcacctcctgcaaggatgtggtagtacagaaacagatggcattcatgctaggccggcatggggtgttcctggagctgagtgaagatgtcgaggagtatgaggacctgacagagatcatgtccaatgtacagctcaacagcaacttcttggccttagctcgggagctggacatcatggagcccaaggtgcctgatgacatctacaaaacccacctagagaacaacaggtttgggggcagtggctctcaggtggactctgcccgcatgaacctggcctcctcttttgtgaatggctttgtgaatgcagcttttggccaagacaagctgctaacagatgatggcaacaaatggctttacaagaacaaggaccacggaatgttgagtgcagctgcatctcttgggatgattctgctgtgggatgtggatggtggcctcacccagattgacaagtacctgtactcctctgaggactacattaagtcaggagctcttcttgcctgtggcatagtgaactctggggtccggaatgagtgtgaccctgctctggcactgctctcagactatgttctccacaacagcaacaccatgagacttggttccatctttgggctaggcttggcttatgctggctcaaatcgtgaagatgtcctaacactgctgctgcctgtgatgggagattcaaagtccagcatggaggtggcaggtgtcacagctttagcctgtggaatgatagcagtagggtcctgcaatggagatgtaacttccactatccttcagaccatcatggagaagtcagagactgagctcaaggatacttatgctcgttggcttcctcttggactgggtctcaaccacctggggaagggtgaggccatcgaggcaatcctggctgcactggaggttgtgtcagagccattccgcagttttgccaacacactggtggatgtgtgtgcatatgcaggctctgggaatgtgctgaaggtgcagcagctgctccacatttgtagcgaacactttgactccaaagagaaggaggaagacaaagacaagaaggaaaagaaagacaaggacaagaaggaagcccctgctgacatgggagcacatcagggagtggctgttctggggattgcccttattgctatgggggaggagattggtgcagagatggcattacgaacctttggccacttgctgagatatggggagcctacactccggagggctgtacctttagcactggccctcatctctgtttcaaatccacgactcaacatcctggataccctaagcaaattctctcatgatgctgatccagaagtttcctataactccatttttgccatgggcatggtgggcagtggtaccaataatgcccgtctggctgcaatgctgcgccagttagctcaatatcatgccaaggacccaaacaacctcttcatggtgcgcttggcacaggtaaagaatagaactcctccacagagcgtgccggggaagtatctgtggtgatggaaggaggaacatggagtgttggcccaggaggaaagatgtgaccaagtgggagatttctgtttggctgggattacaggtgtaagccactgtgccctgcctgtggtgtcttgggaaactcatgagtactatgtgtctgttgtaatagagggaaataagtggtttttcacagtgatttgtagtggactgtgaaattttagggattcaggtcagagttgtcacacaggttgtagtcagggtgagaactgggtcatgatgcagtatgaaaaagtttgagagccactttggagagaacttgagataggccacctaccagtgtgggaaccag

SEQ ID NO: 383723 - DNA, 2215 bp, Homo sapiens
gggggggacccaaacatgcaggtcgaggctggtttcgggccggcagtggcggcggagatggaggagggaggccgggacaaggcgccggtgcagccccagcagtctccagcggcggcccccggcggcacggacgagaagccgagcggcaaggagcggcgggatgccggggacaaggacaaagaacaggagctgtctgaagaggataaacagcttcaagatgaactggagatgctcgtggaacgactaggggagaaggatacatccctgtatcgaccagcgctggaggaattgcgaaggcagattcgttcttctacaacttccatgacttcagtgcccaagcctctcaaatttctgcgtccacactatggcaaactgaaggaaatctatgagaacatggcccctggggagaataagcgttttgctgctgacatcatctccgttttggccatgaccatgagtggggagcgtgagtgcctcaagtatcggctagtgggctcccaggaggaattggcatcatggggtcatgagtatgtcaggcatctggcaggagaagtggctaaggagtggcaggagctggatgacgcagagaaggtccagcgggagcctctgctcactctggtgaaggaaatcgtcccctataacatggcccacaatgcagagcatgaggcttgcgacctgcttatggaaattgagcaggtggacatgctggagaaggacattgatgaaaatgcatatgcaaaggtctgcctttatctcaccagttgtgtgaattacgtgcctgagcctgagaactcagccctactgcgttgtgccctgggtgtgttccgaaagtttagccgcttccctgaagctctgagattggcattgatgctcaatgacatggagttggtagaagacatcttcacctcctgcaaggatgtggtagtacagaaacagatggcattcatgctaggccggcatggggtgttcctggagctgagtgaagatgtcgaggagtatgaggacctgacagagatcatgtccaatgtacagctcaacagcaacttcttggccttagctcgggagctggacatcatggagcccaaggtgcctgatgacatctacaaaacccacctagagaacaacaggtttgggggcagtggctctcaggtggactctgcccgcatgaacctggcctcctcttttgtgaatggctttgtgaatgcagcttttggccaagacaagctgctaacagatgatggcaacaaatggctttacaagaacaaggaccacggaatgttgagtgcagctgcatctcttgggatgattctgctgtgggatgtggatggtggcctcacccagattgacaagtacctgtactcctctgaggactacattaagtcaggagctcttcttgcctgtggcatagtgaactctggggtccggaatgagtgtgaccctgctctggcactgctctcagactatgttctccacaacagcaacaccatgagacttggttccatctttgggctaggcttggcttatgctggctcaaatcgtgaagatgtcctaacactgctgctgcctgtgatgggagattcaaagtccagcatggaggtggcaggtgtcacagctttagcctgtggaatgatagcagtagggtcctgcaatggagatgtaacttccactatccttcagaccatcatggagaagtcagagactgagctcaaggatacttatgctcgttggcttcctcttggactgggtctcaaccacctggggaagggtgaggccatcgaggcaatcctggctgcactggaggttgtgtcagagccattccgcagttttgccaacacactggtggatgtgtgtgcatatgcaggctctgggaatgtgctgaaggtgcagcagctgctccacatttgtagcgaacactttgactccaaagagaaggaggaagacaaagacaagaaggaaaagaaagacaaggacaagaaggaagcccctgctgacatgggagcacatcaggagtggtgttctgggggatgccttatgctatggggggcggacaattggtgcagatggcttacgaacttttggcacttgctgagattgggggcctacactccgggggtggtctttaatggctcattctgtttaatcccatcatcctggtacttagcattttctgtgtgtccaaatcctccaccctttccggggggggggggcgccaacc

SEQ ID NO: 383724 - DNA, 1995 bp, Homo sapiens
gggggggacccaaacatgcaggtcgaggctggtttcgggccggcagtggcggcggagatggaggagggaggccgggacaaggcgccggtgcagccccagcagtctccagcggcggcccccggcggcacggacgagaagccgagcggcaaggagcggcgggatgccggggacaaggacaaagaacaggagctgtctgaagaggataaacagcttcaagatgaactggagatgctcgtggaacgactaggggagaaggatacatccctgtatcgaccagcgctggaggaattgcgaaggcagattcgttcttctacaacttccatgacttcagtgcccaagcctctcaaatttctgcgtccacactatggcaaactgaaggaaatctatgagaacatggcccctggggagaataagcgttttgctgctgacatcatctccgttttggccatgaccatgagtggggagcgtgagtgcctcaagtatcggctagtgggctcccaggaggaattggcatcatggggtcatgagtatgtcaggcatctggcaggagaagtggctaaggagtggcaggagctggatgacgcagagaaggtccagcgggagcctctgctcactctggtgaaggaaatcgtcccctataacatggcccacaatgcagagcatgaggcttgcgacctgcttatggaaattgagcaggtggacatgctggagaaggacattgatgaaaatgcatatgcaaaggtctgcctttatctcaccagttgtgtgaattacgtgcctgagcctgagaactcagccctactgcgttgtgccctgggtgtgttccgaaagtttagccgcttccctgaagctctgagattggcattgatgctcaatgacatggagttggtagaagacatcttcacctcctgcaaggatgtggtagtacagaaacagatggcattcatgctaggccggcatggggtgttcctggagctgagtgaagatgtcgaggagtatgaggacctgacagagatcatgtccaatgtacagctcaacagcaacttcttggccttagctcgggagctggacatcatggagcccaaggtgcctgatgacatctacaaaacccacctagagaacaacaggtttgggggcagtggctctcaggtggactctgcccgcatgaacctggcctcctcttttgtgaatggctttgtgaatgcagcttttggccaagacaagctgctaacagatgatggcaacaaatggctttacaagaacaaggaccacggaatgttgagtgcagctgcatctcttgggatgattctgctgtgggatgtggatggtggcctcacccagattgacaagtacctgtactcctctgaggactacattaagtcaggagctcttcttgcctgtggcatagtgaactctggggtccggaatgagtgtgaccctgctctggcactgctctcagactatgttctccacaacagcaacaccatgagacttggttccatctttgggctaggcttggcttatgctggctcaaatcgtgaagatgtcctaacactgctgctgcctgtgatgggagattcaaagtccagcatggaggtggcaggtgtcacagctttagcctgtggaatgatagcagtagggtcctgcaatggagatgtaacttccactatccttcagaccatcatggagaagtcagagactgagctcaaggatacttatgctcgttggcttcctcttggactgggtctcaaccacctggggaagggtgaggccatcgaggcaatcctggctgcactggaggttgtgtcagagccattccgcagttttgccaacacactggtggatgtgtgtgcatatgcaggctctgggaatgtgctgaaggtgcagcagctgctccacatttgtagcgaacactttgactccaaagagaaggaggaagacaaagacaagaacagtcgaggtatgacagaagtccagaatgccgggccaggtata

SEQ ID NO: 383725 - DNA, 1660 bp, Homo sapiens
gggggggacccaaacatgcaggtcgaggctggtttcgggccggcagtggcggcggagatggaggagggaggccgggacaaggcgccggtgcagccccagcagtctccagcggcggcccccggcggcacggacgagaagccgagcggcaaggagcggcgggatgccggggacaaggacaaagaacaggagctgtctgaagaggataaacagcttcaagatgaactggagatgctcgtggaacgactaggggagaaggatacatccctgtatcgaccagcgctggaggaattgcgaaggcagattcgttcttctacaacttccatgacttcagtgcccaagcctctcaaatttctgcgtccacactatggcaaactgaaggaaatctatgagaacatggcccctggggagaataagcgttttgctgctgacatcatctccgttttggccatgaccatgagtggggagcgtgagtgcctcaagtatcggctagtgggctcccaggaggaattggcatcatggggtcatgagtatgtcaggcatctggcaggagaagtggctaaggagtggcaggagctggatgacgcagagaaggtccagcgggagcctctgctcactctggtgaaggaaatcgtcccctataacatggcccacaatgcagagcatgaggcttgcgacctgcttatggaaattgagcaggtggacatgctggagaaggacattgatgaaaatgcatatgcaaaggtctgcctttatctcaccagttgtgtgaattacgtgcctgagcctgagaactcagccctactgcgttgtgccctgggtgtgttccgaaagtttagccgcttccctgaagctctgagattggcattgatgctcaatgacatggagttggtagaagacatcttcacctcctgcaaggatgtggtagtacagaaacagatggcattcatgctaggccggcatggggtgttcctggagctgagtgaagatgtcgaggagtatgaggacctgacagagatcatgtccaatgtacagctcaacagcaacttcttggccttagctcgggagctggacatcatggagcccaaggtgcctgatgacatctacaaaacccacctagagaacaacaggtttgggggcagtggctctcaggtggactctgcccgcatgaacctggcctcctcttttgtgaatggctttgtgaatgcagcttttggccaagacaagctgctaacagatgatggcaacaaatggctttacaagaacaaggaccacggaatgttgagtgcagctgcatctcttgggatgattctgctgtgggatgtggatggtggcctcacccagattgacaagtacctgtactcctctgaggactacattaagtcaggagctcttcttgcctgtggcatagtgaactctggggtccggaatgagtgtgaccctgctctggcactgctctcagactatgttctccacaacagcaacaccatgagacttggttccatctttgggctaggcttggcttatgctggctcaaatcgtgaagatgtcctaacactgctgctgcctgtgatgggagattcaaagtccagcatggaggtggcagtgtcacagctttagcctgtggaatgatacagcaccacgattcgccgaagatcctgat

SEQ ID NO: 383726 - DNA, 1471 bp, Homo sapiens
gggggggacccaaacatgcaggtcgaggctggtttcgggccggcagtggcggcggagatggaggagggaggccgggacaaggcgccggtgcagccccagcagtctccagcggcggcccccggcggcacggacgagaagccgagcggcaaggagcggcgggatgccggggacaaggacaaagaacaggagctgtctgaagaggataaacagcttcaagatgaactggagatgctcgtggaacgactaggggagaaggatacatccctgtatcgaccagcgctggaggaattgcgaaggcagattcgttcttctacaacttccatgacttcagtgcccaagcctctcaaatttctgcgtccacactatggcaaactgaaggaaatctatgagaacatggcccctggggagaataagcgttttgctgctgacatcatctccgttttggccatgaccatgagtggggagcgtgagtgcctcaagtatcggctagtgggctcccaggaggaattggcatcatggggtcatgagtatgtcaggcatctggcaggagaagtggctaaggagtggcaggagctggatgacgcagagaaggtccagcgggagcctctgctcactctggtgaaggaaatcgtcccctataacatggcccacaatgcagagcatgaggcttgcgacctgcttatggaaattgagcaggtggacatgctggagaaggacattgatgaaaatgcatatgcaaaggtctgcctttatctcaccagttgtgtgaattacgtgcctgagcctgagaactcagccctactgcgttgtgccctgggtgtgttccgaaagtttagccgcttccctgaagctctgagattggcattgatgctcaatgacatggagttggtagaagacatcttcacctcctgcaaggatgtggtagtacagaaacagatggcattcatgctaggccggcatggggtgttcctggagctgagtgaagatgtcgaggagtatgaggacctgacagagatcatgtccaatgtacagctcaacagcaacttcttggccttagctcgggagctggacatcatggagcccaaggtgcctgatgacatctacaaaacccacctagagaacaacaggtttgggggcagtggctctcaggtggactctgcccgcatgaacctggcctcctcttttgtgaatggctttgtgaatgcagcttttggccaagacaagctgctaacagatgatggcaacaaatggctttacaagaacaaggaccacggaatgttgagtgcagctgcatctcttgggatgattctgctgtgggatgtggatggtggcctcacccagattgacaagtacctgtactcctctgaggactacattaaggttggtctgcatacagcctgctcatggggacttccccgttccatattctagtgcctagcagtgcctctctttcactgatgaggtctgccca

SEQ ID NO: 383727 - DNA, 884 bp, Homo sapiens
  misc_feature (785)..(785): n is a, c, g, or t
  misc_feature (852)..(852): n is a, c, g, or t
  misc_feature (873)..(873): n is a, c, g, or t
gggggggacccaaacatgcaggtcgaggctggtttcgggccggcagtggcggcggagatggaggagggaggccgggacaaggcgccggtgcagccccagcagtctccagcggcggcccccggcggcacggacgagaagccgagcggcaaggagcggcgggatgccggggacaaggacaaagaacaggagctgtctgaagaggataaacagcttcaagatgaactggagatgctcgtggaacgactaggggagaaggatacatccctgtatcgaccagcgctggaggaattgcgaaggcagattcgttcttctacaacttccatgacttcagtgcccaagcctctcaaatttctgcgtccacactatggcaaactgaaggaaatctatgagaacatggcccctggggagaataagcgttttgctgctgacatcatctccgttttggccatgaccatgagtggggagcgtgagtgcctcaagtatcggctagtgggctcccaggaggaattggcatcatggggtcatgagtatgtcaggcatctggcaggagaagtggctaaggagtggcaggagctggatgacgcagagaaggtccagcgggagcctctgctcactctggtgaaggaaatcgtcccctataacatggcccacaatgcagagcatgaggcttgcgacctgcttatggaaattgagcaggtggacatgctggagaaggacattgatgaaaatgcatatgcaaaggtctgcctttatctcaccagttacgtgcctgagctgagaatcanctatgggtgtgcctgggtgtgtccaagttaccgttcctgacttggatgcttgtctatgctgattgtnaaaatttactctgaagttgancgacgtgatct

SEQ ID NO: 383728 - DNA, 1435 bp, Homo sapiens
gggggggacccaaacatgcaggtcgaggctggtttcgggccggcagtggcggcggagatggaggagggaggccgggacaaggcgccggtgcagccccagcagtctccagcggcggcccccggcggcacggacgagaagccgagcggcaaggagcggcgggatgccggggacaaggacaaagaacaggagctgtctgaagaggataaacagcttcaagatgaactggagatgctcgtggaacgactaggggagaaggatacatccctgtatcgaccagcgctggaggaattgcgaaggcagattcgttcttctacaacttccatgacttcagtgcccaagcctctcaaatttctgcgtccacactatggcaaactgaaggaaatctatgagaacatggcccctggggagaataagcgttttgctgctgacatcatctccgttttggccatgaccatgagtggggagcgtgagtgcctcaagtatcggctagtgggctcccaggaggaattggcatcatggggtcatgagtatgtcagttgtgtgaattacgtgcctgagcctgagaactcagccctactgcgttgtgccctgggtgtgttccgaaagtttagccgcttccctgaagctctgagattggcattgatgctcaatgacatggagttggtagaagacatcttcacctcctgcaaggatgtggtagtacagaaacagatggcattcatgctaggccggcatggggtgttcctggagctgagtgaagatgtcgaggagtatgaggacctgacagagatcatgtccaatgtacagctcaacagcaacttcttggccttagctcgggagctggacatcatggagcccaaggtgcctgatgacatctacaaaacccacctagagaacaacaggtttgggggcagtggctctcaggtggactctgcccgcatgaacctggcctcctcttttgtgaatggctttgtgaatgcagcttttggccaagacaagctgctaacagatgatggcaacaaatggctttacaagaacaaggaccacggaatgttgagtgcagctgcatctcttgggatgattctgctgtgggatgtggatggtggcctcacccagattgacaagtacctgtactcctctgaggactacattaagtcaggagctcttcttgcctgtggcatagtgaactctggggtccggaatgagtgtgaccctgctctggcactgctctcagactatgttctccacaacagcaacaccatgagacttggttccatctttgggctaggcttggcttatgctggctcaaatcgtgaagatgtcctaacactgctgctgcctgtgatgggagattcaaagtccagcatggaggtggcagtgtcacagctttagcctgtggaatgatacagcaccacgattcgccgaagatcctgat

SEQ ID NO: 383729 - DNA, 385 bp, Homo sapiens
gatctggcaaccaattatgtaaatagtcatatgaatccttcagaatggataacacagcttttctgactggtgtgaaatagttttcaggtgctcattctttacttcattagcttatcttatatcattagcttatcctccattcaggtataacagatcttttttttctgataaatatggcagtttagggaaataaactatggcataatatgctaggccattcttctaggccacgcttcttgattgtaaccttaaaccctttatcagaacctaaacaacttttcaaaagatctatacatatttttatccaatgtttaaggctatgagtaattcattatgtcactcttcatttttttcacctgataatgatctcgacaaaaatgttgag

SEQ ID NO: 383730 - DNA, 399 bp, Homo sapiens
gagagattaagaaacttctattattttaatagttagcagagttcggatttaaactcaatcctgttagacttcaaagccatatttgtaaccattttactatgccgatttgttctgtctggcctacaaataagaatgtatttgtttgtttaatacttatttgttggatatctactatgtgataaaaaaacaacgcatatataaccacaggcaaggttccaattaagaaataaatcttaggaggggcctgtggtgaaatacaatgtgaccaaatctttatatatcttttcaagtgtataaactgcagatggttacagacataaatattggtaacttcatataccagtttcagttagccaagtctgttgaagaatttcaccaaattattattattattattat

SEQ ID NO: 383731 - DNA, 1131 bp, Homo sapiens
tttttctcaatcaactttttattaatattcataacatttatgcaacatgaagattctgaagggtctttgttgtctgagaacacatctatttcagatctgcggagtgtatcactttttgctgtgtcttcaaagtgactcttggtttattgcctgctaaggctaataaatgtataataaatctgcttgttgtgtcacttgcaggtgctatggtctttagaattgggtcactggatttctgaggagccgttcgaactgtctcaccacttccctgcagctcccgtaagtcagatgttgttttacgatggtaaatgcagtttgctgttctcaagaaattattataaacataagggtggacttaagtttttatccagtcaagcacaattatgcccataattaaaaagacattcacagaacttaacaccttttatcaatttattcgcgagaacaaatgtgagaacgtgagaccattgtgcaaaaagtagtgaggaatgcagtccaaagaaaatttgacgattaacatcctcagaactgagaaaaacaaaaatgaaaaaagactgaattcttgggcaggtagtcttatatcttgcttaatgtttttactgttaatagaaatagaactgataggtataaagattatggcttgctggtgctgtgataacagtatttatatttttatggctttcctaaattccacttcaactttcaaatgcttcattgaaaagttctgggttctaattttttttaagattaagtaataattaagtggataatttaaagtttgcttggatacaggattgtgcagaagttgcctttcctgttcaaaaatgttaatttgtttgtcacagtttattcattcaaaagattaatagctgaaagataaatggtgatttttatctgccactggtgttgttatttagctgtttgagtaggccatatgactaaaacataacaaggagttgaactgtgctccctgatcactgtagttatctaggttgttgggttgttttgttttcatttttaagattactgtttgatttcctttcagctttataaacattttcttaaggagagacaaaagctcctctcagcaaaactgtttgtttgaaataccgtgtaaggaattgaagtgta

SEQ ID NO: 383732 - DNA, 674 bp, Homo sapiens
attgttttattactgagaacaactagagaactctgcaagtttcttggcttagactcgatctttattaatacattatctattaggtaggaaagacatttgtcagctattaaggtgacttttatctagcggagattcctctcttaaagtaatgaaaggagataggtatggggggtgttatacaggataattggtgacatctgagtgtcttacttctgcaagcctgctttatggtgagcaaagcatcaccagcaagtgatcacaatgtccactggccgctttttgcctgccgtcctcgagatgaaattggcagttggggctgattcacagaaacaccgatttgtggctgagcacggtggctcacacctgtcatcccagccctttgggaggctgaggtggacagatcacttgaggtcaggagttcgagaccagcctgaccaacgcagcaaaacccatctctactaaaaatacaaaaatcagctgggtgtggtggcacacacctgtggtcccagctcctcaggagtctgaggcagaagaatcgcttgaacccaagaggcagaggttgcagtgagccaaggttgcagtgaatcaagattgctccactgcacgtccagcctgggcaacagagtaactctccttctcaaataaataaataaataaataagaaacaaaaaagt

SEQ ID NO: 383733 - DNA, 2891 bp, Homo sapiens
agcggagtgcccgcccgcgccgccaggctcgcaagcaccgcgtaggccagctggccggatcccgccgtctgtcatggcggcccccatcctgaaagatgtagtggcctatgttgaagtgtggtcatccaatggaacagaaaattattcaaagacatttacaacacagcttgtggatatgggggcaaaggtttcaaaaacttttaacaaacaagtaactcacgttatcttcaaagatggctaccagagcacttgggacaaagctcagaagagaggcgtaaagctcgtttcggtgctctgggttgaaaaatgcaggacagctggagcacacattgatgaatcattgttccctgcagctaatatgaatgaacacttatcaagcctaattaaaaaaaaacgtaaatgtatgcagcccaaagattttaattttaaaacaccagaaaatgataagagatttcagaagaaatttgagaaaatggctaaagagctacaaaggcaaaaaacaaatctagatgatgatgtacctattctcttatttgaatctaatggttcattaatatatactcccacaattgaaattaatagtagtcaccacagcgcaatggagaagagattacaagagatgaaggagaaaagggaaaatctttcccccacctcttcccaaatgattcagcagtctcatgataatccaagtaactctctgtgtgaagcacctttgaacatttcacgtgatactttgtgttcagatgaatactttgctggtggcttacactcatcttttgatgatctttgtggaaactcaggatgtggaaatcaggaaaggaagttggaaggatccattaatgacattaaaagtgatgtgtgtatttcttcacttgtattgaaagcaaataatattcattcatcaccatctttcactcacctcgataaatcaagtcctcagaaatttctgagtaatctttcaaaggaagaaataaacttgcaaagaaatattgcaggtaaagtagtcacccctcaccaaaagcaggctgcaggtatgtctcaggagacgtttgaagagaagtatcgtttgtctcctaccttatcttcaacaaaaggccaccttttgatacattcaagacccaggagttcctcagtaaagagaaaaagagtatcacatggctcccattcacctccgaaggaaaaatgcaagagaaagaggagcaccaggagatctatcatgccgaggctgcagctgtgcaggtcggaaggcaggctgcagcacgtggcgggacctgccctggaggctcttagctgtggggagtcttcatatgatgactatttttcacctgataatcttaaggaaaggtattcagagaatcttcctcctgaatctcagctgccatcaagccctgctcagttgagctgcagaagtctttctaagaaggagagaacaagcatatttgaaatgtctgatttttcctgcgttggcaaaaaaaccagaacagttgacattaccaatttcacagcaaaaaccatctccagtcctcggaaaactggaaatggtgaaggccgtgcaacttcgagttgcgtgacttctgcccctgaagaagccctaaggtgttgtagacaggctgggaaagaagacgcatgcccagagggaaatggcttttcttacaccattgaggaccctgctcttccaaaaggacatgatgatgatttaactcctttggaaggaagccttgaagaaatgaaagaagcggttggtctgaaaagcacacagaacaaaggtaccacttccaaaatatcaaactcctctgaaggcgaagcccagagtgaacatgagccatgttttatagttgactgtaacatggagacgtctacagaagagaaggaaaacttacccggaggatacagtggaagtgttaaaaatagaccaacaaggcatgatgttttagatgactcatgtgacggctttaaggacctcatcaaacctcatgaggaattgaagaaaagtgggagaggcaaaaagccaacaagaacattagtcatgacaagcatgccatctgaaaagcagaatgtcgtcatccaggttgtggataaattgaaaggcttttcaattgcaccagacgtctgtgagaccacgactcacgtgctttccgggaagccacttcgcaccctgaatgtgctgctgggaattgcgcgtggctgctgggttctctcttatgattgggtgctatggtctttagaattgggtcactggatttctgaggagccgttcgaactgtctcaccacttccctgcagctcccctgtgccgaagcgagtgccacttgtctgcagggccgtaccgcggaaccctctttgccgaccagccagcgatgtttgtctcgcctgccagcagccccccagtggccaagctctgtgaactagtccacctgtgcggaggccgggtcagccaagtcccccgccaggccagcatcgtcatcgggccctacagcggaaagaagaaagccacagtcaagtatctgtctgagaaatgggtcttagattccatcacccagcacaaggtctgtgcccctgaaaactacctattgtcacaatgacagtgacctcactggcctgtggtgactgcacacagctcgcaaaactgtctttggatgttcaaatgagaaacaaaactgtgaagagaaggaactggcgtatacaagatgacttctgatatcatgtttgccatgtgttgtggttcttaagaactcataggtgactttctgatgactgaatgtctgtttcagagacgcttcgggcctttttatttttattttattttttattttttgagacggagtccagcctgggcaacagagtaactctccttctcaaataaataaataaataaataagaaacaaaaaagt

SEQ ID NO: 383734 - DNA, 3139 bp, Homo sapiens
agcggagtgcccgcccgcgccgccaggctcgcaagcaccgcgtaggccagctggccggatcccgccgtctgtcatggcggcccccatcctgaaagatgtagtggcctatgttgaagtgtggtcatccaatggaacagaaaattattcaaagacatttacaacacagcttgtggatatgggggcaaaggtttcaaaaacttttaacaaacaagtaactcacgttatcttcaaagatggctaccagagcacttgggacaaagctcagaagagaggcgtaaagctcgtttcggtgctctgggttgaaaaatgcaggacagctggagcacacattgatgaatcattgttccctgcagctaatatgaatgaacacttatcaagcctaattaaaaaaaaacgtaaatgtatgcagcccaaagattttaattttaaaacaccagaaaatgataagagatttcagaagaaatttgagaaaatggctaaagagctacaaaggcaaaaaacaaatctagatgatgatgtacctattctcttatttgaatctaatggttcattaatatatactcccacaattgaaattaatagtagtcaccacagcgcaatggagaagagattacaagagatgaaggagaaaagggaaaatctttcccccacctcttcccaaatgattcagcagtctcatgataatccaagtaactctctgtgtgaagcacctttgaacatttcacgtgatactttgtgttcagatgaatactttgctggtggcttacactcatcttttgatgatctttgtggaaactcaggatgtggaaatcaggaaaggaagttggaaggatccattaatgacattaaaagtgatgtgtgtatttcttcacttgtattgaaagcaaataatattcattcatcaccatctttcactcacctcgataaatcaagtcctcagaaatttctgagtaatctttcaaaggaagaaataaacttgcaaagaaatattgcaggtaaagtagtcacccctcaccaaaagcaggctgcaggtatgtctcaggagacgtttgaagagaagtatcgtttgtctcctaccttatcttcaacaaaaggccaccttttgatacattcaagacccaggagttcctcagtaaagagaaaaagagtatcacatggctcccattcacctccgaaggaaaaatgcaagagaaagaggagcaccaggagatctatcatgccgaggctgcagctgtgcaggtcggaaggcaggctgcagcacgtggcgggacctgccctggaggctcttagctgtggggagtcttcatatgatgactatttttcacctgataatcttaaggaaaggtattcagagaatcttcctcctgaatctcagctgccatcaagccctgctcagttgagctgcagaagtctttctaagaaggagagaacaagcatatttgaaatgtctgatttttcctgcgttggcaaaaaaaccagaacagttgacattaccaatttcacagcaaaaaccatctccagtcctcggaaaactggaaatggtgaaggccgtgcaacttcgagttgcgtgacttctgcccctgaagaagccctaaggtgttgtagacaggctgggaaagaagacgcatgcccagagggaaatggcttttcttacaccattgaggaccctgctcttccaaaaggacatgatgatgatttaactcctttggaaggaagccttgaagaaatgaaagaagcggttggtctgaaaagcacacagaacaaaggtaccacttccaaaatatcaaactcctctgaaggcgaagcccagagtgaacatgagccatgttttatagttgactgtaacatggagacgtctacagaagagaaggaaaacttacccggaggatacagtggaagtgttaaaaatagaccaacaaggcatgatgttttagatgactcatgtgacggctttaaggacctcatcaaacctcatgaggaattgaagaaaagtgggagaggcaaaaagccaacaagaacattagtcatgacaagcatgccatctgaaaagcagaatgtcgtcatccaggttgtggataaattgaaaggcttttcaattgcaccagacgtctgtgagaccacgactcacgtgctttccgggaagccacttcgcaccctgaatgtgctgctgggaattgcgcgtggctgctgggttctctcttatgattgggtgctatggtctttagaattgggtcactggatttctgaggagccgttcgaactgtctcaccacttccctgcagctcccgtaagtcagatgttgttttacgatggtaaatgcagtttgctgttctcaagaaattattataaacataagggtggacttaagtttttatccagtcaagcacaattatgcccataattaaaaagacattcacagaacttaacaccttttatcaatttattcgcgagaacaaatgtgagaacgtgagaccattgtgcaaaaagtagtgaggaatgcagtccaaagaaaatttgacgattaacatcctcagaactgagaaaaacaaaaatgaaaaaagactgaattcttgggcaggtagtcttatatcttgcttaatgtttttactgttaatagaaatagaactgataggtataaagattatggcttgctggtgctgtgataacagtatttatatttttatggctttcctaaattccacttcaactttcaaatgcttcattgaaaagttctgggttctaattttttttaagattaagtaataattaagtggataatttaaagtttgcttggatacaggattgtgcagaagttgcctttcctgttcaaaaatgttaatttgtttgtcacagtttattcattcaaaagattaatagctgaaagataaatggtgatttttatctgccactggtgttgttatttagctgtttgagtaggccatatgactaaaacataacaaggagttgaactgtgctccctgatcactgtagttatctaggttgttgggttgttttgttttcatttttaagattactgtttgatttcctttcagctttataaacattttcttaaggagagacaaaagctcctctcagcaaaactgtttgtttgaaataccgtgtaaggaattgaagtgta

SEQ ID NO: 383735 - DNA, 3315 bp, Homo sapiens
agcggagtgcccgcccgcgccgccaggctcgcaagcaccgcgtaggccagctggccggatcccgccgtctgtcatggcggcccccatcctgaaagatgtagtggcctatgttgaagtgtggtcatccaatggaacagaaaattattcaaagacatttacaacacagcttgtggatatgggggcaaaggtttcaaaaacttttaacaaacaagtaactcacgttatcttcaaagatggctaccagagcacttgggacaaagctcagaagagaggcgtaaagctcgtttcggtgctctgggttgaaaaatgcaggacagctggagcacacattgatgaatcattgttccctgcagctaatatgaatgaacacttatcaagcctaattaaaaaaaaacgtaaatgtatgcagcccaaagattttaattttaaaacaccagaaaatgataagagatttcagaagaaatttgagaaaatggctaaagagctacaaaggcaaaaaacaaatctagatgatgatgtacctattctcttatttgaatctaatggttcattaatatatactcccacaattgaaattaatagtagtcaccacagcgcaatggagaagagattacaagagatgaaggagaaaagggaaaatctttcccccacctcttcccaaatgattcagcagtctcatgataatccaagtaactctctgtgtgaagcacctttgaacatttcacgtgatactttgtgttcagatgaatactttgctggtggcttacactcatcttttgatgatctttgtggaaactcaggatgtggaaatcaggaaaggaagttggaaggatccattaatgacattaaaagtgatgtgtgtatttcttcacttgtattgaaagcaaataatattcattcatcaccatctttcactcacctcgataaatcaagtcctcagaaatttctgagtaatctttcaaaggaagaaataaacttgcaaagaaatattgcaggtaaagtagtcacccctcaccaaaagcaggctgcaggtatgtctcaggagacgtttgaagagaagtatcgtttgtctcctaccttatcttcaacaaaaggccaccttttgatacattcaagacccaggagttcctcagtaaagagaaaaagagtatcacatggctcccattcacctccgaaggaaaaatgcaagagaaagaggagcaccaggagatctatcatgccgaggctgcagctgtgcaggtcggaaggcaggctgcagcacgtggcgggacctgccctggaggctcttagctgtggggagtcttcatatgatgactatttttcacctgataatcttaaggaaaggtattcagagaatcttcctcctgaatctcagctgccatcaagccctgctcagttgagctgcagaagtctttctaagaaggagagaacaagcatatttgaaatgtctgatttttcctgcgttggcaaaaaaaccagaacagttgacattaccaatttcacagcaaaaaccatctccagtcctcggaaaactggaaatggtgaaggccgtgcaacttcgagttgcgtgacttctgcccctgaagaagccctaaggtgttgtagacaggctgggaaagaagacgcatgcccagagggaaatggcttttcttacaccattgaggaccctgctcttccaaaaggacatgatgatgatttaactcctttggaaggaagccttgaagaaatgaaagaagcggttggtctgaaaagcacacagaacaaaggtaccacttccaaaatatcaaactcctctgaaggcgaagcccagagtgaacatgagccatgttttatagttgactgtaacatggagacgtctacagaagagaaggaaaacttacccggaggatacagtggaagtgttaaaaatagaccaacaaggcatgatgttttagatgactcatgtgacggctttaaggacctcatcaaacctcatgaggaattgaagaaaagtgggagaggcaaaaagccaacaagaacattagtcatgacaagcatgccatctgaaaagcagaatgtcgtcatccaggttgtggataaattgaaaggcttttcaattgcaccagacgtctgtgagaccacgactcacgtgctttccgggaagccacttcgcaccctgaatgtgctgctgggaattgcgcgtggctgctgggttctctcttatgattgggtgctatggtctttagaattgggtcactggatttctgaggagccgttcgaactgtctcaccacttccctgcagctcccctgtgccgaagcgagtgccacttgtctgcagggccgtaccgcggaaccctctttgccgaccagccagcgatgtttgtctcgcctgccagcagccccccagtggccaagctctgtgaactagtccacctgtgcggaggccgggtcagccaagtcccccgccaggccagcatcgtcatcgggccctacagcggaaagaagaaagccacagtcaagtatctgtctgagaaatgggtcttagactggcaagcttcccaccctgcccactgagtgtcctgacacaacgggaacgtgccctgcatctaatgggacatgtggctaccaagcacttgaactggccagtgtgactgagaactgaatgtttcattgtattgaatttcgtttcacgttaatttaaaaagattccatcacccagcacaaggtctgtgcccctgaaaactacctattgtcacaatgacagtgacctcactggcctgtggtgactgcacacagctcgcaaaactgtctttggatgttcaaatgagaaacaaaactgtgaagagaaggaactggcgtatacaagatgacttctgatatcatgtttgccatgtgttgtggttcttaagaactcataggtgactttctgatgactgaatgtctgtttcagagacgcttcgggcctttttatttttattttattttttattttttgagacggagtcctgccctgtttcccaggctggagtgcaatggcacaatctcggctcactgcaacctccacctcccaggttcaagcgattctgctgcctcagcctcctgagtagctgggattacagatgtgtgccaccatgcctggctaatttttgtagttttagtagagacagggtttcgccatgttggccaggctggtctcaaacgcctgagctcaggtgatctgtcaggcctcttctatagaattccagtctttgtgtcttagtcatgatcataattgaaaggtcacagaacctttgtcattagagcacagtactgccaaataaagaatggaaattcaa

SEQ ID NO: 383736 - DNA, 2539 bp, Homo sapiens
agcggagtgcccgcccgcgccgccaggctcgcaagcaccgcgtaggccagctggccggatcccgccgtctgtcatggcggcccccatcctgaaagatgtagtggcctatgttgaagtgtggtcatccaatggaacagaaaattattcaaagacatttacaacacagcttgtggatatgggggcaaaggtttcaaaaacttttaacaaacaagtaactcacgttatcttcaaagatggctaccagagcacttgggacaaagctcagaagagaggcgtaaagctcgtttcggtgctctgggttgaaaaatgcaggacagctggagcacacattgatgaatcattgttccctgcagctaatatgaatgaacacttatcaagcctaattaaaaaaaaacgtaaatgtatgcagcccaaagattttaattttaaaacaccagaaaatgataagagatttcagaagaaatttgagaaaatggctaaagagctacaaaggcaaaaaacaaatctagatgatgatgtacctattctcttatttgaatctaatggttcattaatatatactcccacaattgaaattaatagtagtcaccacagcgcaatggagaagagattacaagagatgaaggagaaaagggaaaatctttcccccacctcttcccaaatgattcagcagtctcatgataatccaagtaactctctgtgtgaagcacctttgaacatttcacgtgatactttgtgttcagatgaatactttgctggtggcttacactcatcttttgatgatctttgtggaaactcaggatgtggaaatcaggaaaggaagttggaaggatccattaatgacattaaaagtgatgtgtgtatttcttcacttgtattgaaagcaaataatattcattcatcaccatctttcactcacctcgataaatcaagtcctcagaaatttctgagtaatctttcaaaggaagaaataaacttgcaaagaaatattgcaggtaaagtagtcacccctcaccaaaagcaggctgcaggtatgtctcaggagacgtttgaagagaagtatcgtttgtctcctaccttatcttcaacaaaaggccaccttttgatacattcaagacccaggagttcctcagtaaagagaaaaagagtatcacatggctcccattcacctccgaaggaaaaatgcaagagaaagaggagcaccaggagatctatcatgccgaggctgcagctgtgcaggtcggaaggcaggctgcagcacgtggcgggacctgccctggaggctcttagctgtggggagtcttcatatgatgactatttttcacctgataatcttaaggaaaggtattcagagaatcttcctcctgaatctcagctgccatcaagccctgctcagttgagctgcagaagtctttctaagaaggagagaacaagcatatttgaaatgtctgatttttcctgcgttggcaaaaaaaccagaacagttgacattaccaatttcacagcaaaaaccatctccagtcctcggaaaactggaaatggtgaaggccgtgcaacttcgagttgcgtgacttctgcccctgaagaagccctaaggtgttgtagacaggctgggaaagaagacgcatgcccagagggaaatggcttttcttacaccattgaggaccctgctcttccaaaaggacatgatgatgatttaactcctttggaaggaagccttgaagaaatgaaagaagcggttggtctgaaaagcacacagaacaaaggtaccacttccaaaatatcaaactcctctgaaggcgaagcccagagtgaacatgagccatgttttatagttgactgtaacatggagacgtctacagaagagaaggaaaacttacccggaggatacagtggaagtgttaaaaatagaccaacaaggcatgatgttttagatgactcatgtgacggctttaaggacctcatcaaacctcatgaggaattgaagaaaagtgggagaggcaaaaagccaacaagaacattagtcatgacaagcatgccatctgaaaagcagaatgtcgtcatccaggttgtggataaattgaaaggcttttcaattgcaccagacgtctgtgagaccacgactcacgtgctttccgggaagccacttcgcaccctgaatgtgctgctgggaattgcgcgtggctgctgggttctctcttatgattgggtgctatggtctttagaattgggtcactggatttctgaggagccgttcgaactgtctcaccacttccctgcagctcccctgtgccgaagcgagtgccacttgtctgcagggccgtaccgcggaaccctctttgccgaccagccagcgatgtttgtctcgcctgccagcagccccccagtggccaagctctgtgaactagtccacctgtgcggaggttgcagtgagccaaggttgcagtgaatcaagattgctccactgcacgtccagcctgggcaacagagtaactctccttctcaaataaataaataaataaataagaaacaaaaaagt

SEQ ID NO: 383737 - DNA, 483 bp, Homo sapiens
acttcaatttctttacgtcccttctacctctgaattatctgttttatggcctgtttactattaaatgatccatttaatagcatttacccttagctttatgagtaccatgcactaataattttgaagtatgctacaagtcaaaaattgttgtgtaaaaattgtacttcctttacctgcctcttgcttctgttatacttaaataccagatagagatgattttgggaagtttgatttatactgacttttgtatttgctgttgtatttattttttaaaagtctgttaaaatgacctagctatggatttcttaaattgctaatacatgtgcagatttagtgctgtgtcaatgtataatagaagcaaatactcattagactaccttaatttaattatacagatgcaggacagctggagcacacattgatgaatcattgttccctgcagctaatatgaatgaacacttatcaagcctaattaaaaaaaaa

SEQ ID NO: 383738 - DNA, 3079 bp, Homo sapiens
agcggagtgcccgcccgcgccgccaggctcgcaagcaccgcgtaggccagctggccggatcccgccgtctgtcatggcggcccccatcctgaaagatgtagtggcctatgttgaagtgtggtcatccaatggaacagaaaattattcaaagacatttacaacacagcttgtggatatgggggcaaaggtttcaaaaacttttaacaaacaagtaactcacgttatcttcaaagatggctaccagagcacttgggacaaagctcagaagagaggcgtaaagctcgtttcggtgctctgggttgaaaaatgcaggacagctggagcacacattgatgaatcattgttccctgcagctaatatgaatgaacacttatcaagcctaattaaaaaaaaacgtaaatgtatgcagcccaaagattttaattttaaaacaccagaaaatgataagagatttcagaagaaatttgagaaaatggctaaagagctacaaaggcaaaaaacaaatctagatgatgatgtacctattctcttatttgaatctaatggttcattaatatatactcccacaattgaaattaatagtagtcaccacagcgcaatggagaagagattacaagagatgaaggagaaaagggaaaatctttcccccacctcttcccaaatgattcagcagtctcatgataatccaagtaactctctgtgtgaagcacctttgaacatttcacgtgatactttgtgttcagatgaatactttgctggtggcttacactcatcttttgatgatctttgtggaaactcaggatgtggaaatcaggaaaggaagttggaaggatccattaatgacattaaaagtgatgtgtgtatttcttcacttgtattgaaagcaaataatattcattcatcaccatctttcactcacctcgataaatcaagtcctcagaaatttctgagtaatctttcaaaggaagaaataaacttgcaaagaaatattgcaggtaaagtagtcacccctcaccaaaagcaggctgcaggtatgtctcaggagacgtttgaagagaagtatcgtttgtctcctaccttatcttcaacaaaaggccaccttttgatacattcaagacccaggagttcctcagtaaagagaaaaagagtatcacatggctcccattcacctccgaaggaaaaatgcaagagaaagaggagcaccaggagatctatcatgccgaggctgcagctgtgcaggtcggaaggcaggctgcagcacgtggcgggacctgccctggaggctcttagctgtggggagtcttcatatgatgactatttttcacctgataatcttaaggaaaggtattcagagaatcttcctcctgaatctcagctgccatcaagccctgctcagttgagctgcagaagtctttctaagaaggagagaacaagcatatttgaaatgtctgatttttcctgcgttggcaaaaaaaccagaacagttgacattaccaatttcacagcaaaaaccatctccagtcctcggaaaactggaaatggtgaaggccgtgcaacttcgagttgcgtgacttctgcccctgaagaagccctaaggtgttgtagacaggctgggaaagaagacgcatgcccagagggaaatggcttttcttacaccattgaggaccctgctcttccaaaaggacatgatgatgatttaactcctttggaaggaagccttgaagaaatgaaagaagcggttggtctgaaaagcacacagaacaaaggtaccacttccaaaatatcaaactcctctgaaggcgaagcccagagtgaacatgagccatgttttatagttgactgtaacatggagacgtctacagaagagaaggaaaacttacccggaggatacagtggaagtatgtgaatctccttttccaagtcaccttcgctaaataaacatgtaacagtgcatccatattttaaatttatcacaactttttcataacttatttccccatttactcctctttttacttaaagaatgtgcatttgatcattccaatgataaactctttaggaatagatgacttgctgtcttgtggaacttctagacttattggttaagtctgttaggaatctatttctccaagacttttccttcttataggtcaaaaggataagtagtccatagtatgaataactgaggggagtgaagtctttttccttattccattggagtcttggcgctgcagcgtgtgtaaagatgtatacgatagagagtattttaaaacctaggttcttaatagtgaggctatttaaagaaagaaattaaggtagattaagccatcgattgtatcaaagagaaagtgtgaaaaactacttttagaaatctgttgtcaatattgatttttgaagaaactttggtcagtgttaactatgaagaaacatttaaacatttttgctcatttgtaacaagccttgtttaacttgtacttattttgcttgaagcatcacttgaaaaggtttactcctattcataatttaattgtaattataataaaccatatcattttattaaaagtcaaaacaataaaaaattttgcacttcacagttataagcacaaataggttccagcaaccaaaattgaagaaatcttgaactttgaccgtctttacctaaagattaggttaaaatttgagtgagaacgcattctctctgcatgatttctctgctctacaaatgttttaactgcctctttgaaggtggagaagtcatggtagcgtttgaaatcatcacagacatgttacataccttttccttgagtatacgctccccaaaattgtttcacaaaaagaatgaaaataattttatgtttttggcctgctatttatatcttggctttctgaacatatattaaatttgacaagaaactgtattttatgttccattagccttagtatgtgttttcaaaatatttattttaaaatgttgactcaaaagttaatataaaacaatagatgtgtaaaattctgtggtagttaagaatatcctgttctgaggtttacattctccatctttccagttttcaccttgtgt

SEQ ID NO: 383739 - DNA, 3155 bp, Homo sapiens
agcggagtgcccgcccgcgccgccaggctcgcaagcaccgcgtaggccagctggccggatcccgccgtctgtcatggcggcccccatcctgaaagatgtagtggcctatgttgaagtgtggtcatccaatggaacagaaaattattcaaagacatttacaacacagcttgtggatatgggggcaaaggtttcaaaaacttttaacaaacaagtaactcacgttatcttcaaagatggctaccagagcacttgggacaaagctcagaagagaggcgtaaagctcgtttcggtgctctgggttgaaaaatgcaggacagctggagcacacattgatgaatcattgttccctgcagctaatatgaatgaacacttatcaagcctaattaaaaaaaaacgtaaatgtatgcagcccaaagattttaattttaaaacaccagaaaatgataagagatttcagaagaaatttgagaaaatggctaaagagctacaaaggcaaaaaacaaatctagatgatgatgtacctattctcttatttgaatctaatggttcattaatatatactcccacaattgaaattaatagtagtcaccacagcgcaatggagaagagattacaagagatgaaggagaaaagggaaaatctttcccccacctcttcccaaatgattcagcagtctcatgataatccaagtaactctctgtgtgaagcacctttgaacatttcacgtgatactttgtgttcagatgaatactttgctggtggcttacactcatcttttgatgatctttgtggaaactcaggatgtggaaatcaggaaaggaagttggaaggatccattaatgacattaaaagtgatgtgtgtatttcttcacttgtattgaaagcaaataatattcattcatcaccatctttcactcacctcgataaatcaagtcctcagaaatttctgagtaatctttcaaaggaagaaataaacttgcaaagaaatattgcaggtaaagtagtcacccctcaccaaaagcaggctgcaggtatgtctcaggagacgtttgaagagaagtatcgtttgtctcctaccttatcttcaacaaaaggccaccttttgatacattcaagacccaggagttcctcagtaaagagaaaaagagtatcacatggctcccattcacctccgaaggaaaaatgcaagagaaagaggagcaccaggagatctatcatgccgaggctgcagctgtgcaggtcggaaggcaggctgcagcacgtggcgggacctgccctggaggctcttagctgtggggagtcttcatatgatgactatttttcacctgataatcttaaggaaaggtattcagagaatcttcctcctgaatctcagctgccatcaagccctgctcagttgagctgcagaagtctttctaagaaggagagaacaagcatatttgaaatgtctgatttttcctgcgttggcaaaaaaaccagaacagttgacattaccaatttcacagcaaaaaccatctccagtcctcggaaaactggaaatggtgaaggccgtgcaacttcgagttgcgtgacttctgcccctgaagaagccctaaggtgttgtagacaggctgggaaagaagacgcatgcccagagggaaatggcttttcttacaccattgaggaccctgctcttccaaaaggacatgatgatgatttaactcctttggaaggaagccttgaagaaatgaaagaagcggttggtctgaaaagcacacagaacaaaggtaccacttccaaaatatcaaactcctctgaaggcgaagcccagagtgaacatgagccatgttttatagttgactgtaacatggagacgtctacagaagagaaggaaaacttacccggaggatacagtggaagtgttaaaaatagaccaacaaggcatgatgttttagatgactcatgtgacggctttaaggacctcatcaaacctcatgaggaattgaagaaaagtgggagaggcaaaaagccaacaagaacattagtcatgacaagcatgccatctgaaaagcagaatgtcgtcatccaggttgtggataaattgaaaggcttttcaattgcaccagacgtctgtgagaccacgactcacgtgctttccgggaagccacttcgcaccctgaatgtgctgctgggaattgcgcgtggctgctgggttctctcttatgattgggtgctatggtctttagaattgggtcactggatttctgaggagccgttcgaactgtctcaccacttccctgcagctcccctgtgccgaagcgagtgccacttgtctgcagggccgtaccgcggaaccctctttgccgaccagccagcgatgtttgtctcgcctgccagcagccccccagtggccaagctctgtgaactagtccacctgtgcggaggccgggtcagccaagtcccccgccaggccagcatcgtcatcgggccctacagcggaaagaagaaagccacagtcaagtatctgtctgagaaatgggtcttagattccatcacccagcacaaggtctgtgcccctgaaaactacctattgtcacaatgacagtgacctcactggcctgtggtgactgcacacagctcgcaaaactgtctttggatgttcaaatgagaaacaaaactgtgaagagaaggaactggcgtatacaagatgacttctgatatcatgtttgccatgtgttgtggttcttaagaactcataggtgactttctgatgactgaatgtctgtttcagagacgcttcgggcctttttatttttattttattttttattttttgagacggagtcctgccctgtttcccaggctggagtgcaatggcacaatctcggctcactgcaacctccacctcccaggttcaagcgattctgctgcctcagcctcctgagtagctgggattacagatgtgtgccaccatgcctggctaatttttgtagttttagtagagacagggtttcgccatgttggccaggctggtctcaaacgcctgagctcaggtgatctgtcaggcctcttctatagaattccagtctttgtgtcttagtcatgatcataattgaaaggtcacagaacctttgtcattagagcacagtactgccaaataaagaatggaaattcaa

SEQ ID NO: 383740 - DNA, 2036 bp, Homo sapiens
agcggagtgcccgcccgcgccgccaggctcgcaagcaccgcgtaggccagctggccggatcccgccgtctgtcatggcggcccccatcctgaaagatgtagtggcctatgttgaagtgtggtcatccaatggaacagaaaattattcaaagacatttacaacacagcttgtggatatgggggcaaaggtttcaaaaacttttaacaaacaagtaactcacgttatcttcaaagatggctaccagagcacttgggacaaagctcagaagagaggcgtaaagctcgtttcggtgctctgggttgaaaaatgcaggacagctggagcacacattgatgaatcattgttccctgcagctaatatgaatgaacacttatcaagcctaattaaaaaaaaacgtaaatgtatgcagcccaaagattttaattttaaaacaccagaaaatgataagagatttcagaagaaatttgagaaaatggctaaagagctacaaaggcaaaaaacaaatctagatgatgatgtacctattctcttatttgaatctaatggttcattaatatatactcccacaattgaaattaatagtagtcaccacagcgcaatggagaagagattacaagagatgaaggagaaaagggaaaatctttcccccacctcttcccaaatgattcagcagtctcatgataatccaagtaactctctgtgtgaagcacctttgaacatttcacgtgatactttgtgttcagatgaatactttgctggtggcttacactcatcttttgatgatctttgtggaaactcaggatgtggaaatcaggaaaggaagttggaaggatccattaatgacattaaaagtgatgtgtgtatttcttcacttgtattgaaagcaaataatattcattcatcaccatctttcactcacctcgataaatcaagtcctcagaaatttctgagtaatctttcaaaggaagaaataaacttgcaaagaaatattgcaggtaaagtagtcacccctcaccaaaagcaggctgcaggtatgtctcaggagacgtttgaagagaagtatcgtttgtctcctaccttatcttcaacaaaaggccaccttttgatacattcaagacccaggagttcctcagtaaagagaaaaagagtatcacatggctcccattcacctccgaaggaaaaatgcaagagaaagaggagcaccaggagatctatcatgccgaggctgcagctgtgcaggtcggaaggcaggctgcagcacgtggcgggacctgccctggaggctcttagctgtggggagtcttcatatgatgactatttttcacctgataatcttaaggaaaggtattcagagaatcttcctcctgaatctcagctgccatcaagccctgctcagttgagctgcagaagtctttctaagaaggagagaacaagcatatttgaaatgtctgatttttcctgcgttggcaaaaaaaccagaacagttgacattaccaatttcacagcaaaaaccatctccagtcctcggaaaactggaaatggtgaaggccgtgcaacttcgagttgcgtgacttctgcccctgaagaagccctaaggtgttgtagacaggctgggaaagaagacgcatgcccagagggaaatggcttttcttacaccattgaggaccctgctcttccaaaaggacatgatgatgatttaactcctttggaaggaagccttgaagaaatgaaagaagcggttggtctgaaaagcacacagaacaaaggtaccacttccaaaatatcaaactcctctgaaggcgaagcccagagtgaacatgagccatgttttatagttgactgtaacatggagacgtctacagaagagaaggaaaacttacccggaggatacagtggaagtgttaaaaatagaccaacaaggcatgatgttttagatgactcatgtgacggctttaaggacctcatcaaacctcatgaggaattgaagaaaagtgggagaggcaaaaaggtcagtgtgtaaaaatattattttaaac

SEQ ID NO: 383741 - DNA, 472 bp, Homo sapiens
acaaatttaccccagtttgacttctgctgctaagactccagcttgcagagctctgccaggcctgagccccagcacgttgtgagatgctttatatagaagagcactgatgacccaaacagattaaagacaaggctttacaaccattatctgcttcaatgttcatcacctctacgtggaagttaccatcatcacacgagagatggtgggtgaagccaaggcttaaggtttttaaactccaactaggcttcaaacggagcactgattagccagaacttttgtaacttccatacacagtttcctgagtagtttcaaaggatattgatacagctcgtcctgagaagtgttcagaagtgcagatcgtcagccccacaagggtaatcacggtttgttttgttcactgatgcaaaccaagaatctgcagcagaggcgcataatcatcacacaataaatgcttgttgaatgaatgaatgaa

SEQ ID NO: 383742 - DNA, 309 bp, Homo sapiens
ctaattatcatctatctacatcacagagttcagggaaatcacagagcagactaagaacaatactacatatgggtgccttactttgcaataagctggctctaagaaaagtggtgtggcattcatctgtacaaacagttgtcttttccctgccattaagggaggaaggtgttgaattcatgatggtaatggacattctttaacctaccaagaaagttagggcatgctattttatcatatggagccataatctcccaatagtttaaataaggaggtgaacagataattactaaggttctcttagattctaaa

SEQ ID NO: 383743 - DNA, 337 bp, Homo sapiens
agaatagatttacaatataaagcagctggtgctataaaatacaaaatttaattaatttacctctggaaatttagaaataaaaaagagcaaaaattaataaggaaacataatagcataagagaatgaatgctattcatagtggtatgctaagaaatttgaaaatcttaattgtaactttctagaaaaatataaatttcaactttagataatttttttcaaaatacagaagaacattaaagttaaaaatttatttaataaaattagcattatcttgacaaagatgtcaccaaaaaagtcttagaataatcttatatatgtacacagatgaaaaaagaaa

SEQ ID NO: 383744 - DNA, 397 bp, Homo sapiens
atttaatatcttacattacattaatagattcttaatactaaaacaattatacttatatattgaatctgaatactgaaccttaatactttcaattttacaattaattctgttctgttatgggtttttttgtttttgttttttttgtgagatgcagtcttgctctgtcacccaggctggagggtaagagtgcattggcacgatctcggcttaactgcaacctctgcctcccaggttcaagtgattctcccacctcagcctcttgagtagctgggattacaggcgtgcaccactgcaggcagataattttattttttatttttagtatagacagggtttcaccatgttggccaggctggtctggaactcctgacctcaagtgagccaccagccttggcct

SEQ ID NO: 383745 - DNA, 406 bp, Homo sapiens
aaaggcaaaactatggagacaggaaaaagatcagtggttgccaggggttagtggggaggaaggggtgataggtggaacacagaggatgtttaggacagtgaaagtattcctgtattaaactttaatggtgaatacatgtcattatacatttgtcaaaactcatagaacatacatcaagagggaagcctaatgtaaactatgaactttgggggataatgatacatcagtgttggttcactgtaacaatgaatcactctaacaggggatgttgatagtgagggagcttatgtgtatgtagggggaaggggatacatgtgaaatctatactttctgctcaattttgctgtgaaccccaaattgttctagaaataaattgtattaaaaaaatcaatgccattgaatgagg

SEQ ID NO: 383746 - DNA, 175 bp, Homo sapiens
gcgtgccggaatttaagtcatgggggagagtctgaggctgaattagtaatgagttcagagaaagctaagcaagaagaaaagcaaaggcgattattaacttcagggaaacagctcagagttcgggtgagaacaggcggccacggtggacctggcaccaagctagtccccggcgccc

SEQ ID NO: 383747 - DNA, 370 bp, Homo sapiens
cagaaagctcctttaattaccacaacctatcaattaaataagattataaattacatttaattgctgttctaaaatgtagttgaaaaattcatttgtaccctatttgaatgcctggattatctatcacctcactgctctcatctaaatgcaactgcttaacccatcttacagtttttaaatgcaatgagttatccacaaaaaagacagaattaaaaaaataaaatctacaatctccttttattctttggccctatgctaaccatagaaaatgtacacattccctatatctgcttcctccaccccttaatacattaaggactcttacatattaaagttgcataagattttaataaaagcatttgagacttcc

SEQ ID NO: 383748 - DNA, 639 bp, Homo sapiens
gcggcacgagggtgtcagtcaagaggcaacactaggaggcaaggaatctgcatttctttcagaccttggcagagagcgccctgggaaatgcggatatagaaggtcaggagaacatctctcctggttatacagcattccaggactcctcatctgtttttaagagggaaatctgagttttcaaggaaagccgaatacagttgccaagttgccagtcaaagaaacaatgtcaacacctgctcatagagatggaattcctaacccggaatattgcccttgaattacaacgagaaaaagaacacttcttattcctgtagcacctcttcaagtgagatggcagaccacctcaggatggaaatgtatttcttcatccccctctctacttccctgtgacctcctgcaaataagggagagacaaagagaagagcagaagaacagaagaatggagtggcaaagagaagagaaggagtgactgaacattgacaagactttggttggggatggtcagagaggagattagctgctagacggccacactgcggagaaagatcattttcccactccatcccccttccagctccccatccatctcaccaagagccagctccaccactcaataaaaccttacattcatctttcaag

SEQ ID NO: 383749 - DNA, 634 bp, Homo sapiens
tttcatgtggttgaggataatatcattagcaccaaaggtgaaaatccgtggaagctcatcttatttcagcagaagagtaggatgggccttgtggcacgagtaagccaaacaagggaaaggcattcaccatcaattgactcctcatctgtttttaagagggaaatctgagttttcaaggaaagccgaatacagttgccaagttgccagtcaaagaaacaatgtcaacacctgctcatagagatggaattcctaacccggaatattgcccttgaattacaacgagaaaaagaacacttcttattcctgtagcacctcttcaagtgagatggcagaccacctcaggatggaaatgtatttcttcatccccctctctacttccctgtgacctcctgcaaataagggagagacaaagagaagagcagaagaacagaagaatggagtggcaaagagaagagaaggagtgactgaacattgacaagactttggttggggatggtcagagaggagattagctgctagacggccacactgcggagaaagatcattttcccactccatcccccttccagctccccatccatctcaccaagagccagctccaccactcaataaaaccttacattcatctttcaag

SEQ ID NO: 383750 - DNA, 614 bp, Homo sapiens
tttcatgtggttgaggataatatcattagcaccaaaggtgaaaatccgtggaagctcatcttatttcagcagaagagtaggatgggccttgtggcacgagtaagccaaacaagggaaaggcattcaccatcaattgactcctcatctgtttttaagagggaaatctgagttttcaaggaaagccgaatacagttgccaagttgccagtcaaagaaacaatgtcaacacctgctcatagagatggaattcctaacccggaatattgcccttgaattacaacgagaaaaagcacctcttcaagtgagatggcagaccacctcaggatggaaatgtatttcttcatccccctctctacttccctgtgacctcctgcaaataagggagagacaaagagaagagcagaagaacagaagaatggagtggcaaagagaagagaaggagtgactgaacattgacaagactttggttggggatggtcagagaggagattagctgctagacggccacactgcggagaaagatcattttcccactccatcccccttccagctccccatccatctcaccaagagccagctccaccactcaataaaaccttacattcatctttcaag

SEQ ID NO: 383751 - DNA, 619 bp, Homo sapiens
gcggcacgagggtgtcagtcaagaggcaacactaggaggcaaggaatctgcatttctttcagaccttggcagagagcgccctgggaaatgcggatatagaaggtcaggagaacatctctcctggttatacagcattccaggactcctcatctgtttttaagagggaaatctgagttttcaaggaaagccgaatacagttgccaagttgccagtcaaagaaacaatgtcaacacctgctcatagagatggaattcctaacccggaatattgcccttgaattacaacgagaaaaagaacacttcttattcctgtagcacctcttcaagtgagatggcagaccacctcaggatggaaatgtatttcttcatccccctctctacttccctgtgacctcctgcaaataagggagagacaaagagaagagcagaagaacagaagaatggagtggcaaagagaagagaaggagtgactgaacattgacaagactttggttggggatggtcagagaggagattagctgctagacggccacactgcggagaaagatcattttcccactccatcccccttccagctccccatccatctcgtctcttctcttgtacatctcgtctcttct

SEQ ID NO: 383752 - DNA, 347 bp, Homo sapiens
atttttttttgtatttttagtggagacaggatttcactatgttggccaggctggtctcaagactcctgacgttgtgatccacctgcctcggcctcccaaagtgctgggattacagatgtgagctaccgtgcccggccaggaattttttgtgctataaatcatattttccttttattaaaggcagtgtcaatatctatagtataattttgaggaggctggctatttattgctgtgtagaagctggcttattagtggtcaaggggtcatctagaattgactataaagatagtattgagcagaaaattcttaaaatacctgcatatttgtttcagtcattaaattaatgg

SEQ ID NO: 383753 - DNA, 1618 bp, Homo sapiens
ccggtccccatcctcagggcctcgagcccctctgcgccaggtcacactccacggctgggcccttcctgccctggctctgcaccactgcccaggctgtgcctcctgctacatgcccttcctttccccctcctcgggtgctgcgatttcctggaagcttcctctgccagtgccccaacctggagagaatgtgtcacattgcccccctctgcagccatgttctgggagggaggtctgcatcttgtcccaggtctggtgccaggacaaagcagcactcctgggaaatggcatttcccctgggtgcacaaaactgtagggaccatagcctaggttccggggactgctggctcactcactcccacactcgctgcccacagacactcctcgctggtggcatcgtggaactctgtgccttaaacgcccgctctggtccctctactcaagctgctggctcacacagggtgttccggcgcctggggagtgtgtcagtgcccttagcgccacccacacccctctgtgagggggctccctcacacccctggctcctctgaagctccatgcccacgtcacacagactttcttttgcatttggcacaaatcaccaagtgaggttgcaggtcacaggtgcacaccttcccactgggtgtacacggtggaactgaagccccaggcgtccctggaggggcccgagggagatgataagcagtccccaggacagctgagtggccccatcccacctgcatcttagggggctggtggtgctgacgggctcatcatgagtcctgtggtccttgcctggcccacactggagctggcttccagcttcccacgtctgcccagtgatgtttcatccacagataggcccagcccccatttgctagggtggtgcccagacccgaacccctgggctagttgggatctccagaggaggcatctgcctggagggtggcttccagtgtgtcccacccactgcccccacgcctaccagctggtgccctctcctccacctggggcttatccttccggccaccctctgtgaccctggtcttcccctccctaccttggatacaactgtgggcagcccacctgagctcccaagagctgggcagtggcacagacacagagactaccagcgaggcagggatgtggccccagaaggtcctgagcttgcaaaggattgttctggctgtctcagccagctcttgctgttccacctgccccagaacctccgcatcagttgagggtcgtggggttggaatgtgtggcgaagtaggtctgtggcagtggagttgggccatgctgagcctgtgactgcccaggagagaattggaaactaaaaggtgcaaaagcagtcagagactccctaccaccccctcactgtgaacattggcccagcggcctctggggcagtcgctgtaaccatccgcgtggcaccctcggttctcagaggctgagacctccgtggctggagatgcttattttctgctcagttgttgttctgtagaacttatttctgtctacatcctgcctcatccctgagcctgccccacctggtccacattgcctttttttttttgataaagttttattgagatatgactgactagcggcacagttcacc

SEQ ID NO: 383754 - DNA, 488 bp, Homo sapiens
actctgtctcaaaaaaaaaaaaaaaaaaaaaaagtggcagaaataacactgtgtgagttctagtagctaggcgttaaaaggtctcagctttgcctttgctctcctggacagtggccctgaccccatacataaagaagccagttcagccgactggaggatgagagtccatgagtagaatctgagcagccccagcactgattccagacatgtggatggggccatcttagatcttccaatctaaccacgagctcccatgagtgagccgaaggagcccagcagcagagccaccatgccaacctacacaaaaaagtaacgaactgcggtggttttaagccactacatttttaaatcacttgttatatagcaaatgctaactgaaaaagaaatcaagcttgccttagtgaccagctctcacagaagacactttgtgcccctattttaatcatcacacttggatgtaagacactttgagccaattccaaaaaccc

SEQ ID NO: 383755 - DNA, 532 bp, Homo sapiens
gggagaccaagactggcggatcacttgaggtcaggagttcgagaccagcccggccaacatgatgaaaacccatctctactaaaaatacaaaaattagccaggcgtggtggtggtgtctgtagttccagctactcaggaggttgaggcaggagaatcacttgaacctgtgaggtgggggtggaatgagtccagatcgtgctactgcactccagcctgggtgacaaagcgagactctgtctcaggaaaaaaaaagaaccaaaaccatatatatggctatctcatcaatcagaaccacaacaactataaaacaactatatttaaggttttttgcaaaaaaaaaagttaaagaaaatattaagtaaataatagatcatttgcttcaagatttggcaaatgtaaggataggaaacgctgttctatgttatcctgcttggccttttttccaacttctcagaggcgttctgccttcaaactccctcttgaggaaaataaacacccacaaagatttttgcatcatctgcaaatatgattc

SEQ ID NO: 383756 - DNA, 130 bp, Homo sapiens
cagggccagggcactggaagggatggctagggccaccggaggtcgtccctgagctctggggttgtgtttgttcccaggtgtgctctccagggtccaggaggactcgtgggagctcgaggctggggtccca

SEQ ID NO: 383757 - DNA, 555 bp, Homo sapiens
aaggttgaggatgggtacccatgacacagtctcaggaggtcatgacaacatgtgcccaaggtggttggggcacagcttgtttttatgcattttagggagacatgagacatcaatcaatatatgtaagatgtacactggttctgtctggtgaggtgggacaattcaagcaaggagggggcttccaggtcacatgtaggtgaaagacaaatgatggcattcctttgagtttctgattagcctttccaaaggaggcaatcagataccccattatctcagtgagcagagggatgactttggatggaatgggaggcaggtttgccctaaacagttccctgcttgacttttccctttagcttagtgattttggggccccaagattcattttcctttcacaagtaactggccacaagagaaacagaaacaggattaagaaagagccctaacccctcccatcacaggctccatcagcacattagagaggagtacactaggtgactatatatacatatttgtgcctgtgataattgcaaataaaatgacactaaccattgtaaa

SEQ ID NO: 383758 - DNA, 323 bp, Homo sapiens
agagcaagactccatctcaaaaacagagttctgagaacaaagggccatgaattgcaggacgaaatatggaaaacagaattggagaatcccagagctccaaggacacttagaaatcatctaacagtaccccaccccaggcatctacatacgcggtaccggtagagaaagcctgattttggagtctgtcctggacacacttggtgttttatgtatttcatcaaatcctcatacccatcctgtgaggtgtcattattaccatttcactgatgagacatccaagcatcaacaaaaccctgaagtggaaagaggggtaaggactcatt

SEQ ID NO: 383759 - DNA, 287 bp, Homo sapiens
gacacagagaagttggcagtctgcaacctggaagaggccctcatcagaacctgcccatgcatgaaacaccccgatcttgaacttctaccctccagaactgcctgccagaatgaaaataaagaacaaagacaacaaagaaaacagccgacaggaacaggatcttgggagccaaatatcagggtctcactctgtcaccctggctagagtgcagtggtgcaatctcaactcactgcagtgtcaaccttctgggctcgagtgatcctcccacctcagcctcctgagtaact

SEQ ID NO: 383760 - DNA, 446 bp, Homo sapiens
ttttggagatggagtcttgctctgttgcccaggctggagttcaatggcacaaactcggctcactgcaacctccgcctcccaggttcaagcaattttcctgcctcagcctcccgagtagctggaattacaggcacacgccaccatgcccagctaatttttgtattttagtagagacgggggtttcaccatgttggccaggctggtctcaaactcctgaactcaggtgatccactccctcggcctcccaaagggttgggattgcaggcgtgagccaccacgcccagccatgatccttaaacttgttttaagaggtataataactggaaatcatgatgctctttaaggaataccaattggatgtattattgatgtatttaattccatcatatgaagtagaaacagtttcattagcagaaggcattatattatagctacacaatataaag

SEQ ID NO: 383761 - DNA, 207 bp, Homo sapiens
cttaagtgtggaaatacagaagcaaaggaaaaaacctcaataaaatcatattgtgaacaaactgcttcccagtcactgcacacaaatgctgccaaacacttcagaatcaaagccagacacaatggtcaaaaatataagccatattctagcttcaggtagaaataaatctcttcagggaaagaagctacaatgagaactaaagggagg

SEQ ID NO: 383762 - DNA, 606 bp, Homo sapiens
tatgttaaaattataactcaatcaccagtctttataaatttgcttttttatatttaaaccaaacctaatgctaattgtgatatgttatttattctcacctgatttgaatcattggattcaattaaatgagtaattatcattaaataattctaagagaaataatgtctattcggatggtgggaattttcttcctacatgcagccccattctgaatgaatgaaatcaaatcacgtgaagatcagggtcctagagtaacttaatattttgtacattggttatttgactcctcatttttatattacatgttatatcaagggagggggtataaaagaaatacaaaaattgcagaggtatctggaatgtacctatttgttaattctatttgtcatttcttttgtttcatcttttgagtaataagctgcttggaaaagtttctgttctttagctgattttttagctataaaaatgtatttgaaaagctcataaatttcaggattgaaaagataattgaaagttttaaagaaacctaattcattgaagtaataaacaaataattttcaatcttgattcaactgtgattcaaatcttacaccatttgcccacttc

SEQ ID NO: 383763 - DNA, 388 bp, Homo sapiens
ctgattgtctaaagacttcttgctcccactggtgcctggactcccactgcatgtccatgatgctgcgtgcccatgacagtggttgctgaaggccttgtctccttgaccacactctggagggcctactgctcacccagcagctccaggccagctccagcctgactacaccatcaaacttctccgctatccagtggctgaactacagcttttccaacaaagtccaaactccttccaagtttgcccttccttgggcatttatgaaaatactacagctaacatcatactaacggtagaagactgagtaacttccccctaacatcaggaataaggatgtccgcccttatcattcaacattgtactagcgtttctagccagtgccatcagtcaa

SEQ ID NO: 383764 - DNA, 487 bp, Homo sapiens
cccagcaaaccttgctcagaggtagaccacaccgagcaacagaaagaatgccacttggctaacataggggtgttggcaagctgtggcccactgtctgtttttataaataaagttttattggcacagccacggccatttgtttaggtaggtgtatggctccctccactctacaatggcagagttgagtagttatgccagagattccatgacctgtaaagcctcagatatttactatgtagccatttccagaaaaaagtttgccaacctcttgtcaaacattagccaaatccaggtccctcttcctcacagtttcattctgacagcctttaaaaacgagaaaatggaaactacctaaaaaacaggcagcacttgcttcctaaagaaacgaacaacaaaagcaactgattttcaaagactcttcttaatagatgagttgtcttatcatcaaagcatgtgttctgggccaagtatagaagcagctctgtga

SEQ ID NO: 383765 - DNA, 353 bp, Homo sapiens
gcccatcctggctaacacggtgaaaccccgtctctactaaaaatacaaaaaattagccaggcgtggtggcgggtgcctgtagtcccagctacttgggaggctgaggcaggagaatggcatgaacccgggaggtggagcttgcaatgagccaagattgcgccactgcactccagcatgggcgacggagcaagactctgtctcaaaaaaataataataataataaaataaaaagtttgttagtattagcagatacatattactaggtaccccccatgctcaatgaagtgttgggttactctgaaaaagtgtccaatcttacaggtgtgacttcctctggaactgcaagttcttga

SEQ ID NO: 383766 - DNA, 265 bp, Homo sapiens
cacaacaaaaggtctatcacagtgttatggtattatcaaaacattatgatgataaaaataactttctgtaataatgttgaagatatgagtgctagaaggaggttcagagagaaaaatcaaagcattatagataatagtgggacaacacagtggcatatgtagggcagagtagagaaatatctgggagtgaagttggtaccagtttaaaaggacatggtcccattccctagaattcccatagaaaactgagacaaatgcttcaaat

SEQ ID NO: 383767 - DNA, 425 bp, Homo sapiens
attcggcacgcgcggctttttaaatgaccccaggcgtgtgtggagcagaagcaaactggaagcctcttgcattttcacgtctccttgcctcctcctgtaccagatgaacacctactcatctttctggactgagctcagatgtcaccttctgaagagacccttcctaactactgcttttccctgttccccagtccccattagaagttggcagcccagtccttgcagctccagctgctctgtgcacactgtggcccaacacccatgaggcttcacggggttccctgatggctgtgagtctcttctgtaatctcagcttctgggggataggcatggtgttccattctgcatgctgctcgtcacataataggccctccagaaatactactgaatgaataaatgcatctaatagtctgataattttatct

SEQ ID NO: 383768 - DNA, 477 bp, Homo sapiens
tctttatatgtgtgcctcagcaactttttgtggtttataggataatgtccactctccttaacagctgcacctagagtcctctgccttctgctgctgccagaaggagcagaagcaaactggaagcctcttgcattttcacgtctccttgcctcctcctgtaccagatgaacacctactcatctttctggactgagctcagatgtcaccttctgaagagacccttcctaactactgcttttccctgttccccagtccccattagaagttggcagcccagtccttgcagctccagctgctctgtgcacactgtggcccaacacccatgaggcttcacggggttccctgatggctgtgagtctcttctgtaatctcagcttctgggggataggcatggtgttccattctgcatgctgctcgtcacataataggccctccagaaatactactgaatgaataaatgcatctaatagtctgata

SEQ ID NO: 383769 - DNA, 511 bp, Homo sapiens
catgatgtattttcacatatgttgtctttaatttactcctcttaataacccttgaagaagcatgacagccattgtcatcattcctgttttcccgattaagaaattgagattcagagaggtcaaataacttgcttaagatgaccgaaaagagtctaggcttttaattaatcctagacctggcactcgtcagtttcagaacttttcgggaatgacattggatttgctaatttcatcaagataatctgattgggggtgaacatttcaggttaaggaaaatactagtttttttcttttttgcctcattttatgggaattgctattatgtgttaggataatttggtttgaagcaactttgtacaatgtggcatcaaatagcagttaccttctaaaactgtactgaatcatataagtactgccatccagcaataaatatatgtataataaaattaaccttattgagcagagtagtgtggtactactttggtaggacttcctgtttgtgatccttatt

SEQ ID NO: 383770 - DNA, 188 bp, Homo sapiens
aaatgtaatgtcctctatacatttcctcctttgaaaaatggggatctgggaagattggtaagatctttagcattagactttcatttctgcatcatcttgatttactgtgtctgtgcccaataccccatcatatcacatataatcgttccaataacctagatctactgaaaaaaacctttgaaaaatga

SEQ ID NO: 383771 - DNA, 308 bp, Homo sapiens
ccctctcaccctttgttttcctttaatcctcactattattctaaaaggaggtgctcttattaaccccactgtataggtgagaactgagccactgcatatggggctaaaaggaaacaaacacccctgtaaaaaccccatcattttaaattatctatttaatcgttaagaaatggtggttaggccacgttcggtggctcaagcctgtaatcccagcactttgggaggctgaggcgggcggatcacgaggtaaggagttcaagaccagcctggccaacgtagtgaaaccctgtctctactaaaaatccaaa

SEQ ID NO: 383772 - DNA, 1478 bp, Homo sapiens
  misc_feature (10)..(10): n is a, c, g, or t
  misc_feature (198)..(198): n is a, c, g, or t
  misc_feature (202)..(202): n is a, c, g, or t
  misc_feature (206)..(206): n is a, c, g, or t
  misc_feature (228)..(228): n is a, c, g, or t
  misc_feature (378)..(378): n is a, c, g, or t
  misc_feature (500)..(500): n is a, c, g, or t
  misc_feature (517)..(517): n is a, c, g, or t
  misc_feature (568)..(568): n is a, c, g, or t
ctggtgcacngagggtcccacaggcatgggtgtccttcctatatcacatggccttcactgagactggtatatggattgcacctatcagagaccaaggacaggacctccctggaaatctctgaggacctggcctgtgatccagttgctgccttgtcctcttcctgctatgtcatggcttatcttctttcacccattcantcantcantcaattcattcagcagtattantcaatgtctcttgtaatgcctgcacctgctagatggtccccgagtttaccattactggaaaagacatttaagaaattcaccaagggctctatgagaggccatacacggtggacctgactagggtgtggcttccctgaggagctgaagttncccagaggcccagagaaggggagctgagcacgtttgaaccactgaacctgctctggacctcgcctccttccttcggtgcctcccagcatcctatcctctttaaagagcagggttcagggaanccctggatggtgattcncagggcagctcccctctcacctgccgcgatgactaccccgccccatctcanacacacaagctcacgcatgcgggactggagcccttgaggacatgtggcccaaagacaggaggtacaggggctcagtgcgtgcagtggaatgaactgggcttcatctctggaagggtaaggggccatcttccgggttcaccgccgcatccccacccccggcacagcgcctcctggcgactaacatcggtgacttagtgaaaggactaagaaagacccgaggcgaggccggaacaggccgatttctagccgccaagtggagaacaggttggagcggtgcgccgggcttagcggcggttgctggaggaacgggcgccggcggtggcgtcacaaaaggcgggaccacagtggtgtccgagaagtcaggcacgtagctcagcggcggccgcggcgcgtgcgtctgtgcctctgcgcgggtctcctggtccttctgccatcatgccgatgttcatcgtaaacaccaacgtgccccgcgcctccgtgccggacgggttcctctccgagctcacccagcagctggcgcaggccaccggcaagcccccccagtacatcgcggtgcacgtggtcccggaccagctcatggccttcggcggctccagcgagccgtgcgcgctctgcagcctgcacagcatcggcaagatcggcggcgcgcagaaccgctcctacagcaagctgctgtgcggcctgctggccgagcgcctgcgcatcagcccggacagggtctacatcaactattacgacatgaacgcggccaatgtgggctggaacaactccaccttcgcctaagagccgcagggacccacgctgtctgcgctggctccacccgggaacccgccgcacgctgtgttctaggcccgcccaccccaaccttctggtggggagaaataaacggtttagagactaaaaaaaaaaa

SEQ ID NO: 383773 - DNA, 594 bp, Homo sapiens
gcacaatagctagtagaggcctggttaatcggcgagggagaagtcaggcacgtagctcagcggcggccgcggcgcgtgcgtctgtgcctctgcgcgggtctcctggtccttctgccatcatgccgatgttcatcgtaaacaccaacgtgccccgcgcctccgtgccggacgggttcctctccgagctcacccagcagctggcgcaggccaccggcaagcccccccagtacatcgcggtgcacgtggtcccggaccagctcatggccttcggcggctccagcgagccgtgcgcgctctgcagcctgcacagcatcggcaagatcggcggcgcgcagaaccgctcctacagcaagctgctgtgcggcctgctggccgagcgcctgcgcatcagcccggacagggtctacatcaactattacgacatgaacgcggccaatgtgggctggaacaactccaccttcgcctaagagccgcagggacccacgctgtctgcgctggctccacccgggaacccgccgcacgctgtgttctaggcccgcccaccccaaccttctggtggggagaaataaacggtttagagactaaaaaaaaaaa

SEQ ID NO: 383774 - DNA, 578 bp, Homo sapiens
ccgggcgacaacttaggctaggtcgaggctgggtgttagctcagcggcggccgcggcgcgtgcgtctgtgcctctgcgcgggtctcctggtccttctgccatcatgccgatgttcatcgtaaacaccaacgtgccccgcgcctccgtgccggacgggttcctctccgagctcacccagcagctggcgcaggccaccggcaagcccccccagtacatcgcggtgcacgtggtcccggaccagctcatggccttcggcggctccagcgagccgtgcgcgctctgcagcctgcacagcatcggcaagatcggcggcgcgcagaaccgctcctacagcaagctgctgtgcggcctgctggccgagcgcctgcgcatcagcccggacagggtctacatcaactattacgacatgaacgcggccaatgtgggctggaacaactccaccttcgcctaagagccgcagggacccacgctgtctgcgctggctccacccgggaacccgccgcacgctgtgttctaggcccgcccaccccaaccttctggtggggagaaataaacggtttagagactaaaaaaaaaaa

SEQ ID NO: 383775 - DNA, 594 bp, Homo sapiens
caattcaggctaggtgcgggctgggtgttgaatcggccgagggtcaggcacgtagctcagcggcggccgcggcgcgtgcgtctgtgcctctgcgcgggtctcctggtccttctgccatcatgccgatgttcatcgtaaacaccaacgtgccccgcgcctccgtgccggacgggttcctctccgagctcacccagcagctggcgcaggccaccggcaagcccccccagtacatcgcggtgcacgtggtcccggaccagctcatggccttcggcggctccagcgagccgtgcgcgctctgcagcctgcacagcatcggcaagatcggcggcgcgcagaaccgctcctacagcaagctgctgtgcggcctgctggccgagcgcctgcgcatcagcccggacagggtctacatcaactattacgacatgaacgcggccaatgtgggctggaacaactccaccttcgcctaagagccgcagggacccacgctgtctgcgctggctccacccgggaacccgccgcacgctgtgttctaggcccgcccaccccaaccttctggtggggagaaataaacggtttagagactaaaaaaaaaaa

SEQ ID NO: 383776 - DNA, 971 bp, Homo sapiens
caattcaggctaggtgcgggctgggtgttgaatcggccgagggtcaggcacgtagctcagcggcggccgcggcgcgtgcgtctgtgcctctgcgcgggtctcctggtccttctgccatcatgccgatgttcatcgtaaacaccaacgtgccccgcgcctccgtgccggacgggttcctctccgagctcacccagcagctggcgcaggccaccggcaagcccccccagtacatcgcggtgcacgtggtcccggaccagctcatggccttcggcggctccagcgagccgtgcgcgctctgcagcctgcacagcatcggcaagatcggcggcgcgcagaaccgctcctacagcaagctgctgtgcggcctgctggccgagcgcctgcgcatcagcccggacagggtctacatcaactattacgacatgaacgcggccaatgtgggctggaacaactccaccttcgcctaagagccgcagggacccacgctgtctgcgctggctccacccgggaacccgccgcacgctgtgttctaggcccgcccaccccaaccttctggtggggagaaataaacggtttagagactaaaaaaaaaaataaccaaacaaaaaaacaaaaaaacaacacacacacaaaccggggggcacaaggggggggggggaaaaagggcaacaaaatgtggccagcggcacacaagggtccggacccagtctcgggaaccacgcggaaaactggggcaccccaagaggagcgcataaggcgaacacgcgggtaccggttagacgggcacacttccacaggccgagcaccgcgagaacgaggggcacacacagggaggagcacaacaggagacacacgacacaacacggaagaacccaacgacacacacaagacaagaacacagacaaaaagagaagaaaagagaagagacgacgacggacccccgagacggcacgcacggctagacgagcccg

SEQ ID NO: 383777 - DNA, 569 bp, Homo sapiens
ggctagtcgaggctgggtggtaatcggccgaggcagcggcggcgcggcgcgtgcgtctgtgcctctgcgcgggtctcctggtccttctgccatcatgccgatgttcatcgtaaacaccaacgtgccccgcgcctccgtgccggacgggttcctctccgagctcacccagcagctggcgcaggccaccggcaagcccccccagtacatcgcggtgcacgtggtcccggaccagctcatggccttcggcggctccagcgagccgtgcgcgctctgcagcctgcacagcatcggcaagatcggcggcgcgcagaaccgctcctacagcaagctgctgtgcggcctgctggccgagcgcctgcgcatcagcccggaccagggtctacatcaactattacgacatgaacgcggccaatgtgggctggaacaactccaccttcgcctaagagccgcgggacccacgctgtctgcgctggctccacccgggaacccgccgcacgctgtgttctaggcccgcccaccccaaccttctggtggggagaaataaacggtttagagactaaaaaaaaaaa

SEQ ID NO: 383778 - DNA, 1115 bp, Homo sapiens
attacaaaaacaggatgtcaaaatattggaaagacatatatgtatcgccccattatgtaaaaaaaacaaaattgaaaaaaggggaaagttgtacaaagccaaaaagtagggaaacccaaggttattacccagacaaaacgttttaaaaacaaggcccaatgaattgtaaaaaactcaactataggcaaatatgggtaacaggcccccttagggcacaagtaagatctaagtatagttttggtgagtgtatacacttgggaaacaccaccgcgatcaagatggaacctttaccctaccccaaggcacccacatgcccatttgctatcagtaacccaccccagtcccagacctggggaaccactgacctgctttctgcctcaattggtcagatttgccttttttcagaatctgaagtcattccgtactgtatgtacacatttgtgtctggcttggctccagataaagtttttgggattcatgaatgttgttgcacgtattaggagagactcctttgtattgctgagtagtattcccctctgtggttagaccatgatttatttatccatctacctgttggtgaacattttggctgtttctaattcttggccatcatgaataaaactgctgtgaatgttcctacaataataattgtctaaacatatgtttttatttcttttgtgtcttagtccgtcgggctgctataactaagaaccacagcctgggtggcttataaacaacagaaatttatttttcatggttctggaggctgggaagtccaagatcaaggtgccagtggattcagtgtctgttgagggcccatgtcttgattcatagatggcggtcttcttgctgtgttctcctagacatggcagaaggggcaagggagctctctggggtctcttttataagggcaccaatcccattcatgcaggctctgccctcatgacctaatcacctcccaagaggcccaaaggccctacctccaagtaccatcatatgagggattaggtttcaaggtatgaacctggggaggacataaacagtcagtctagctttttgggtaaatgaattgctgggcttaataataaatgtatatttaactgtaaaaaaaaaaa

SEQ ID NO: 383779 - DNA, 557 bp, Homo sapiens
aagcagtggtatcaacgcagagtgcccattacggccgggggcggcgcgtgcgtctgtgcctctgcgcgggtctcctggtccttctgccatcatgccgatgttcatcgtaaacaccaacgtgccccgcgcctccgtgccggacgggttcctctccgagctcacccagcagctggcgcaggccaccggcaagcccccccagtacatcgcggtgcacgtggtcccggaccagctcatggccttcggcggctccagcgagccgtgcgcgctctgcagcctgcacagcatcggcaagatcggcggcgcgcagaaccgctcctacagcaagctgctgtgcggcctgctggccgagcgcctgcgcatcagcccggaccagggtctacatcaactattacgacatgaacgcggccaatgtgggctggaacaactccaccttcgcctaagagccgcagggacccacgctgtctgcgctggctccacccgggaacccgccgcacgctgtgttctaggcccgcccaccccaaccttctggtggggagaaataaacggtttagagacta

SEQ ID NO: 383780 - DNA, 231 bp, Homo sapiens
  misc_feature (10)..(10): n is a, c, g, or t
gcggccgccnactactactactactgctcgaattcaagcttctaacgatgtacggggacatgaacgcggccaatgtgggctggaacaactccaccttcgcctaagagccgcagggacccacgctgtctgcgctggctccacccgggaacccgccgcacgctgtgttctaggcccgcccaccccaaccttctggtggggagaaataaacggtttagagactaaaaaaaaaaa

SEQ ID NO: 383781 - DNA, 858 bp, Homo sapiens
  misc_feature (576)..(576): n is a, c, g, or t
aggacccgtccgcggttgaaactctgcggccacggacggcggctacgccgtagctcagcggcggcgcggcgcgtgcgtctgtgcctctgcgcgggtctcctggtccttctgccatcatgccgatgttcatcgtaaacaccaacgtgccccgcgcctccgtgccggacgggttcctctccgagctcacccagcagctggcgcaggccaccggcaagcccccccagcagtacatcgcggtgcacgtggtcccggaccagctcatggccttcggcggctccagcgagccgtgcgcgctctgcagcctgcacagcatcggcaagatcggcggcgcgcagaaccgctcctacagcaagctgctgtgcggcctgctggccgagcgcctgcgcatcagcccggaccagggtctacatcaactattacgacatgaacgcggccaatgtgggctggaacaactccaccttcgcctaagagccgcaccttcgcctaagagccgcagggacccacgctgtctgcgctggctccacccgggaacccgccgcacgctgtgttctaggccggccaacccaacttcgtgcntggcgggagacaactacgcgggtttaggagacttacaaacacagccacaaccaacgaccacaccaacacttgttgcggcggcccgcggccccgggaaaaaggttctctacccccctcccgtgtgggcgccggccccccatgtgtcagcggacacgcggccatacggggcccacaggaaacccgggcctgcacggggggggccccccaataaaaacgcgcgggcgccccggggtttcggacccccagggggttgagcacccggctccacggagccacggcgtc

SEQ ID NO: 383782 - DNA, 758 bp, Homo sapiens
  misc_feature (571)..(572): n is a, c, g, or t
cttagggctaggtacgaggcctgggtgttgcacgtagctcagcggcggccgcggcgcgtgcgtctgtgcctctgcgcgggtctcctggtccttctgccatcatgccgatgttcatcgtaaacaccaacgtgccccgcgcctccgtgccggacgggttcctctccgagctcacccagcagctggcgcaggccaccggcaagcccccccagcagtacatcgcggtgcacgtggtcccggaccagctcatggccttcggcggctccagcgagccgtgcgcgctctgcagcctgcacagcatcggcaagatcggcggcgcgcagaaccgctcctacagcaagctgctgtgcggcctgctggccgagcgcctgcgcatcagcccggaccagggtctacatcaactattacgacatgaacgcggccaatgtgggctggaacaactccaccttcgcctaagagccgcagggacccacgctgtctgcgctggctccacccgggaacccgccgcacgctgtgttctaggcccgcccaccccaaccttctggtggggagaaataaacggtttagagactannaaaaaaaaaaaaaaaacaaaacaaaaaaaaaaaaaaacccgggggctcatttgggggggggggagaaaaaggggtaaaaaggggccggggccaaggggccggaccacatttttggcacaagaggggaaaaagggcgggccccaaagagggggcggaaaaaggaaaacgcgggaccgataagaacga

SEQ ID NO: 383783 - DNA, 619 bp, Homo sapiens
gaatggtttaccattagaaagtttattgatgtaactgatctcattaacagattaaaggagaatacccatatgatcatcttaatagatgcacgaaaagcatgcaataaaatacctatttattataactgctaatattttgtgtttttccttaaaaatgcagtgtttttaggaattaaagttcagagcagcaaaagtcaaacaaaaaccaagtctgagcaatagagctactacagtgcccatcacagtgtctgctcaggtgacttcttaaggtcatgtccagctctatgtttctgtgaccacaaatagcatctttggcaagtctagtttcagttggtctttgtccagctcctggattcctccatgcagggcctgagaagccctgagggataaaagattaatccggttcagtggactctgtggttcctcaactccaagtgcccccagcataagtcggacctgcctctcacgcaatggatcccctggcggcaacccgagaccggttctcctacccgcattccgccaagtctctcgctctgcccaggacgcacagatgagagcgctccgaagactggtgggtctatctttcggtctttcctaattttcccgtcctctggggaaa

SEQ ID NO: 383784 - DNA, 570 bp, Homo sapiens
cttagggctaggtacgaggcctgggtgttgcacgtagctcagcggcggccgcggcgcgtgcgtctgtgcctctgcgcgggtctcctggtccttctgccatcatgccgatgttcatcgtaaacaccaacgtgccccgcgcctccgtgccggacgggttcctctccgagctcacccagcagctggcgcaggccaccggcaagcccccccagcagtacatcgcggtgcacgtggtcccggaccagctcatggccttcggcggctccagcgagccgtgcgcgctctgcagcctgcacagcatcggcaagatcggcggcgcgcagaaccgctcctacagcaagctgctgtgcggcctgctggccgagcgcctgcgcatcagcccggaccagggtctacatcaactattacgacatgaacgcggccaatgtgggctggaacaactccaccttcgcctaagagccgcagggacccacgctgtctgcgctggctccacccgggaacccgccgcacgctgtgttctaggcccgcccaccccaaccttctggtggggagaaataaacggtttagagacta

SEQ ID NO: 383785 - DNA, 579 bp, Homo sapiens
ccggcagtggcgaccggcgcagggaatcgcgcagggttgcggctgaggtcagaccagcgagagacagagacccgcagacatttagtccagagactgtagcaaaggagggggacgaggggccagagccggaatttcgggggaggacttgggagcgcggcgaccagagtcgcttgctggcacttgcgagggcgaatgcaggggcttggccgagatgaccttggaccagagctcccttccggcctgcagagatgagcttggggcttagccgagtaaggagtgagcggcttttcagcctcagtgctgcggcagaggcggatggaggatgaactggagccgtccttacggcctcggacgcagattcagggcaggatcctgctcctgaccatctgcgctgccggcattggtgggacttttcagtttggctataacctctctatcatcaatgccccgaccttggtatgtatcctctctgggtggagactgtccctgtctgagtgggtactggctaacagctgcccactgaggggcttcagccaggcatccactaggtggcactttctgccacaagtttgtctccat

SEQ ID NO: 383786 - DNA, 1755 bp, Homo sapiens
  misc_feature (10)..(10): n is a, c, g, or t
  misc_feature (198)..(198): n is a, c, g, or t
  misc_feature (202)..(202): n is a, c, g, or t
  misc_feature (206)..(206): n is a, c, g, or t
  misc_feature (228)..(228): n is a, c, g, or t
  misc_feature (378)..(378): n is a, c, g, or t
  misc_feature (500)..(500): n is a, c, g, or t
  misc_feature (517)..(517): n is a, c, g, or t
  misc_feature (568)..(568): n is a, c, g, or t
  misc_feature (1631)..(1631): n is a, c, g, or t
ctggtgcacngagggtcccacaggcatgggtgtccttcctatatcacatggccttcactgagactggtatatggattgcacctatcagagaccaaggacaggacctccctggaaatctctgaggacctggcctgtgatccagttgctgccttgtcctcttcctgctatgtcatggcttatcttctttcacccattcantcantcantcaattcattcagcagtattantcaatgtctcttgtaatgcctgcacctgctagatggtccccgagtttaccattactggaaaagacatttaagaaattcaccaagggctctatgagaggccatacacggtggacctgactagggtgtggcttccctgaggagctgaagttncccagaggcccagagaaggggagctgagcacgtttgaaccactgaacctgctctggacctcgcctccttccttcggtgcctcccagcatcctatcctctttaaagagcagggttcagggaanccctggatggtgattcncagggcagctcccctctcacctgccgcgatgactaccccgccccatctcanacacacaagctcacgcatgcgggactggagcccttgaggacatgtggcccaaagacaggaggtacaggggctcagtgcgtgcagtggaatgaactgggcttcatctctggaagggtaaggggccatcttccgggttcaccgccgcatccccacccccggcacagcgcctcctggcgactaacatcggtgacttagtgaaaggactaagaaagacccgaggcgaggccggaacaggccgatttctagccgccaagtggagaacaggttggagcggtgcgccgggcttagcggcggttgctggaggaacgggcggagtcgcccagggtcctgccctgcgggggtcgagccgaggcaggcggtgacttccccactcggggcggagccgcagcctcgcgggggcggggcctggcgccggcggtggcgtcacaaaaggcgggaccacagtggtgtccgagaagtcaggcacgtagctcagcggcggccgcggcgcgtgcgtctgtgcctctgcgcgggtctcctggtccttctgccatcatgccgatgttcatcgtaaacaccaacgtgccccgcgcctccgtgccggacgggttcctctccgagctcacccagcagctggcgcaggccaccggcaagcccccccagtacatcgcggtgcacgtggtcccggaccagctcatggccttcggcggctccagcgagccgtgcgcgctctgcagcctgcacagcatcggcaagatcggcggcgcgcagaaccgctcctacagcaagctgctgtgcggcctgctggccgagcgcctgcgcatcagcccggacagggtctacatcaactattacgacatgaacgcggccaatgtgggctggaacaactccaccttcgcctaagagccgcagggacccacgctgtctgcgctggctccacccgggaacccgccgcacgctgtgttctaggcccgcccaccccaaccttctggtggggagaaataaacggtttagagactaaaaaaaaaaaaacaaaaaaaaaacaaaaaaaaacaaaaaaacaaacaaaaacacaaaaaaaacnacaaacaaaacaaacacaccgcggccaggcaaacataagaggcgcggcgcggggagacaaagaagcggcgacagcacaccgccgcgaccggcggtcccacaactcggcgtctcccgcacgcccc

SEQ ID NO: 383787 - DNA, 1927 bp, Homo sapiens
  misc_feature (10)..(10): n is a, c, g, or t
  misc_feature (198)..(198): n is a, c, g, or t
  misc_feature (202)..(202): n is a, c, g, or t
  misc_feature (206)..(206): n is a, c, g, or t
  misc_feature (228)..(228): n is a, c, g, or t
  misc_feature (378)..(378): n is a, c, g, or t
  misc_feature (500)..(500): n is a, c, g, or t
  misc_feature (517)..(517): n is a, c, g, or t
  misc_feature (568)..(568): n is a, c, g, or t
  misc_feature (1612)..(1612): n is a, c, g, or t
  misc_feature (1637)..(1638): n is a, c, g, or t
  misc_feature (1644)..(1644): n is a, c, g, or t
ctggtgcacngagggtcccacaggcatgggtgtccttcctatatcacatggccttcactgagactggtatatggattgcacctatcagagaccaaggacaggacctccctggaaatctctgaggacctggcctgtgatccagttgctgccttgtcctcttcctgctatgtcatggcttatcttctttcacccattcantcantcantcaattcattcagcagtattantcaatgtctcttgtaatgcctgcacctgctagatggtccccgagtttaccattactggaaaagacatttaagaaattcaccaagggctctatgagaggccatacacggtggacctgactagggtgtggcttccctgaggagctgaagttncccagaggcccagagaaggggagctgagcacgtttgaaccactgaacctgctctggacctcgcctccttccttcggtgcctcccagcatcctatcctctttaaagagcagggttcagggaanccctggatggtgattcncagggcagctcccctctcacctgccgcgatgactaccccgccccatctcanacacacaagctcacgcatgcgggactggagcccttgaggacatgtggcccaaagacaggaggtacaggggctcagtgcgtgcagtggaatgaactgggcttcatctctggaagggtaaggggccatcttccgggttcaccgccgcatccccacccccggcacagcgcctcctggcgactaacatcggtgacttagtgaaaggactaagaaagacccgaggcgaggccggaacaggccgatttctagccgccaagtggagaacaggttggagcggtgcgccgggcttagcggcggttgctggaggaacgggcggagtcgcccagggtcctgccctgcgggggtcgagccgaggcaggcggtgacttccccactcggggcggagccgcagcctcgcgggggcggggcctggcgccggcggtggcgtcacaaaaggcgggaccacagtggtgtccgagaagtcaggcacgtagctcagcggcggccgcggcgcgtgcgtctgtgcctctgcgcgggtctcctggtccttctgccatcatgccgatgttcatcgtaaacaccaacgtgccccgcgcctccgtgccggacgggttcctctccgagctcacccagcagctggcgcaggccaccggcaagcccccccagtacatcgcggtgcacgtggtcccggaccagctcatggccttcggcggctccagcgagccgtgcgcgctctgcagcctgcacagcatcggcaagatcggcggcgcgcagaaccgctcctacagcaagctgctgtgcggcctgctggccgagcgcctgcgcatcagcccggacagggtctacatcaactattacgacatgaacgcggccaatgtgggctggaacaactccaccttcgcctaagagccgcagggacccacgctgtctgcgctggctccacccgggaacccgccgcacgctgtgttctaggcccgcccaccccaaccttctggtggggagaaataaacggtttagagactaaaaaaaaaaaaaaaacaaaaataaaaaaaaaaaaaaaaaaaaaanaaaaaaaaacaaaaaaaaaataaannaaaaanaaaggggggggcggcggccgcaagaaaaaatcccccccgcggggagggccccccatattggagggcgcataccccggccttttttttgatcaacacaggggggtcccccccaaaggaggcggtgccattatacgaacgccgcgccggggggccgcccttgtaacacacacccgctcgtgtgcgcgggaacacacgacgtgcgctccgtgcgagcgactctggcgggggagacacccccatccacgtggggggggacaagccttgtggcgcacgatcccgctca

SEQ ID NO: 383788 - DNA, 1720 bp, Homo sapiens
  misc_feature (10)..(10): n is a, c, g, or t
  misc_feature (198)..(198): n is a, c, g, or t
  misc_feature (202)..(202): n is a, c, g, or t
  misc_feature (206)..(206): n is a, c, g, or t
  misc_feature (228)..(228): n is a, c, g, or t
  misc_feature (378)..(378): n is a, c, g, or t
  misc_feature (500)..(500): n is a, c, g, or t
  misc_feature (517)..(517): n is a, c, g, or t
  misc_feature (568)..(568): n is a, c, g, or t
ctggtgcacngagggtcccacaggcatgggtgtccttcctatatcacatggccttcactgagactggtatatggattgcacctatcagagaccaaggacaggacctccctggaaatctctgaggacctggcctgtgatccagttgctgccttgtcctcttcctgctatgtcatggcttatcttctttcacccattcantcantcantcaattcattcagcagtattantcaatgtctcttgtaatgcctgcacctgctagatggtccccgagtttaccattactggaaaagacatttaagaaattcaccaagggctctatgagaggccatacacggtggacctgactagggtgtggcttccctgaggagctgaagttncccagaggcccagagaaggggagctgagcacgtttgaaccactgaacctgctctggacctcgcctccttccttcggtgcctcccagcatcctatcctctttaaagagcagggttcagggaanccctggatggtgattcncagggcagctcccctctcacctgccgcgatgactaccccgccccatctcanacacacaagctcacgcatgcgggactggagcccttgaggacatgtggcccaaagacaggaggtacaggggctcagtgcgtgcagtggaatgaactgggcttcatctctggaagggtaaggggccatcttccgggttcaccgccgcatccccacccccggcacagcgcctcctggcgactaacatcggtgacttagtgaaaggactaagaaagacccgaggcgaggccggaacaggccgatttctagccgccaagtggagaacaggttggagcggtgcgccgggcttagcggcggttgctggaggaacgggcggagtcgcccagggtcctgccctgcgggggtcgagccgaggcaggcggtgacttccccactcggggcggagccgcagcctcgcgggggcggggcctggcgccggcggtggcgtcacaaaaggcgggaccacagtggtgtccgagaagtcaggcacgtagctcagcggcggccgcggcgcgtgcgtctgtgcctctgcgcgggtctcctggtccttctgccatcatgccgatgttcatcgtaaacaccaacgtgccccgcgcctccgtgccggacgggttcctctccgagctcacccagcagctggcgcaggccaccggcaagcccccccagtacatcgcggtgcacgtggtcccggaccagctcatggccttcggcggctccagcgagccgtgcgcgctctgcagcctgcacagcatcggcaagatcggcggcgcgcagaaccgctcctacagcaagctgctgtgcggcctgctggccgagcgcctgcgcatcagcccggacagggtctacatcaactattacgacatgaacgcggccaatgtgggctggaacaactccaccttcgcctaagagccgcagggacccacgctgtctgcgctggctccacccgggaacccgccgcacgctgtgttctaggcccgcccaccccaaccttctggtggggagaaataaacggtttagagactaaaaaaaaaaacaaaacaaacaaaaaaaaacccgcggggccctctattgccgggggggcggccacaaagggcgcctggaactgggccccaggggccacaacgggttcctggcccccgtttccgtggcccaccggggaacctcgcgcgggcccca

SEQ ID NO: 383789 - DNA, 1559 bp, Homo sapiens
  misc_feature (10)..(10): n is a, c, g, or t
  misc_feature (198)..(198): n is a, c, g, or t
  misc_feature (202)..(202): n is a, c, g, or t
  misc_feature (206)..(206): n is a, c, g, or t
  misc_feature (228)..(228): n is a, c, g, or t
  misc_feature (378)..(378): n is a, c, g, or t
  misc_feature (500)..(500): n is a, c, g, or t
  misc_feature (517)..(517): n is a, c, g, or t
  misc_feature (568)..(568): n is a, c, g, or t
  misc_feature (1534)..(1534): n is a, c, g, or t
ctggtgcacngagggtcccacaggcatgggtgtccttcctatatcacatggccttcactgagactggtatatggattgcacctatcagagaccaaggacaggacctccctggaaatctctgaggacctggcctgtgatccagttgctgccttgtcctcttcctgctatgtcatggcttatcttctttcacccattcantcantcantcaattcattcagcagtattantcaatgtctcttgtaatgcctgcacctgctagatggtccccgagtttaccattactggaaaagacatttaagaaattcaccaagggctctatgagaggccatacacggtggacctgactagggtgtggcttccctgaggagctgaagttncccagaggcccagagaaggggagctgagcacgtttgaaccactgaacctgctctggacctcgcctccttccttcggtgcctcccagcatcctatcctctttaaagagcagggttcagggaanccctggatggtgattcncagggcagctcccctctcacctgccgcgatgactaccccgccccatctcanacacacaagctcacgcatgcgggactggagcccttgaggacatgtggcccaaagacaggaggtacaggggctcagtgcgtgcagtggaatgaactgggcttcatctctggaagggtaaggggccatcttccgggttcaccgccgcatccccacccccggcacagcgcctcctggcgactaacatcggtgacttagtgaaaggactaagaaagacccgaggcgaggccggaacaggccgatttctagccgccaagtggagaacaggttggagcggtgcgccgggcttagcggcggttgctggaggaacgggcggagtcgcccagggtcctgccctgcgggggtcgagccgaggcaggcggtgacttccccactcggggcggagccgcagcctcgcgggggcggggcctggcgccggcggtggcgtcacaaaaggcgggaccacagtggtgtccgagaagtcaggcacgtagctcagcggcggccgcggcgcgtgcgtctgtgcctctgcgcgggtctcctggtccttctgccatcatgccgatgttcatcgtaaacaccaacgtgccccgcgcctccgtgccggacgggttcctctccgagctcacccagcagctggcgcaggccaccggcaagcccccccagtacatcgcggtgcacgtggtcccggaccagctcatggccttcggcggctccagcgagccgtgcgcgctctgcagcctgcacagcatcggcaagatcggcggcgcgcagaaccgctcctacagcaagctgctgtgcggcctgctggccgagcgcctgcgcatcagcccggacagggtctacatcaactattacgacatgaacgcggccaatgtgggctggaacaactccaccttcgcctaagagccgcagggacccacgctgtctgcgctggctccacccgggaacccgccgcacgctgtgttctaggccgcccacaacaccttntgtggaaatacatccgttggggtgt

SEQ ID NO: 383790 - DNA, 1567 bp, Homo sapiens
  misc_feature (10)..(10): n is a, c, g, or t
  misc_feature (198)..(198): n is a, c, g, or t
  misc_feature (202)..(202): n is a, c, g, or t
  misc_feature (206)..(206): n is a, c, g, or t
  misc_feature (228)..(228): n is a, c, g, or t
  misc_feature (378)..(378): n is a, c, g, or t
  misc_feature (500)..(500): n is a, c, g, or t
  misc_feature (517)..(517): n is a, c, g, or t
  misc_feature (568)..(568): n is a, c, g, or t
ctggtgcacngagggtcccacaggcatgggtgtccttcctatatcacatggccttcactgagactggtatatggattgcacctatcagagaccaaggacaggacctccctggaaatctctgaggacctggcctgtgatccagttgctgccttgtcctcttcctgctatgtcatggcttatcttctttcacccattcantcantcantcaattcattcagcagtattantcaatgtctcttgtaatgcctgcacctgctagatggtccccgagtttaccattactggaaaagacatttaagaaattcaccaagggctctatgagaggccatacacggtggacctgactagggtgtggcttccctgaggagctgaagttncccagaggcccagagaaggggagctgagcacgtttgaaccactgaacctgctctggacctcgcctccttccttcggtgcctcccagcatcctatcctctttaaagagcagggttcagggaanccctggatggtgattcncagggcagctcccctctcacctgccgcgatgactaccccgccccatctcanacacacaagctcacgcatgcgggactggagcccttgaggacatgtggcccaaagacaggaggtacaggggctcagtgcgtgcagtggaatgaactgggcttcatctctggaagggtaaggggccatcttccgggttcaccgccgcatccccacccccggcacagcgcctcctggcgactaacatcggtgacttagtgaaaggactaagaaagacccgaggcgaggccggaacaggccgatttctagccgccaagtggagaacaggttggagcggtgcgccgggcttagcggcggttgctggaggaacgggcggagtcgcccagggtcctgccctgcgggggtcgagccgaggcaggcggtgacttccccactcggggcggagccgcagcctcgcgggggcggggcctggcgccggcggtggcgtcacaaaaggcgggaccacagtggtgtccgagaagtcaggcacgtagctcagcggcggccgcggcgcgtgcgtctgtgcctctgcgcgggtctcctggtccttctgccatcatgccgatgttcatcgtaaacaccaacgtgccccgcgcctccgtgccggacgggttcctctccgagctcacccagcagctggcgcaggccaccggcaagcccccccagtacatcgcggtgcacgtggtcccggaccagctcatggccttcggcggctccagcgagccgtgcgcgctctgcagcctgcacagcatcggcaagatcggcggcgcgcagaaccgctcctacagcaagctgctgtgcggcctgctggccgagcgcctgcgcatcagcccggacagggtctacatcaactattacgacatgaacgcggccaatgtgggctggaacaactccaccttcgcctaagagccgcagggacccacgctgtctgcgctggctccacccgggaacccgccgcacgctgtgttctaggcccgcccaccccaaccttctggtggggagaaataaacggtttagagacta

SEQ ID NO: 383791 - DNA, 1563 bp, Homo sapiens
gaatggtttaccattagaaagtttattgatgtaactgatctcattaacagattaaaggagaatacccatatgatcatcttaatagatgcacgaaaagcatgcaataaaatacctatttattataactgctaatattttgtgtttttccttaaaaatgcagtgtttttaggaattaaagttcagagcagcaaaagtcaaacaaaaaccaagtctgagcaatagagctactacagtgcccatcacagtgtctgctcaggtgacttcttaaggtcatgtccagctctatgtttctgtgaccacaaatagcatctttggcaagtctagtttcagttggtctttgtccagctcctggattcctccatgcagggcctgagaagccctgagggataaaagattaatccggttcagtggactctgtggttcctcaactccaagtgcccccagcataagtcggacctgcctctcacgcaatggatcccctggcggcaacccgagaccggttctcctacccgcattccgccaagtctctcgctctgcccaggacgcacagatgagagcgctccgaagactgagatgagcttggggcttagccgagtaaggagtgagcggcttttcagcctcagtgctgcggcagaggcggatggaggatgaactggagccgtccttacggcctcggacgcagattcagggcaggatcctgctcctgaccatctgcgctgccggcattggtgggacttttcagtttggctataacctctctatcatcaatgccccgaccttgcacattcaggaattcaccaatgagacatggcaggcgcgtactggagagccactgcccgatcacctagtcctgcttatgtggtccctcatcgtgtctctgtatcccctgggaggcctctttggagcactgcttgcaggtcccttggccatcacgctgggaaggaagaagtccctcctggtgaataacatctttgtggtgtcagcagcaatcctgtttggattcagccgcaaagcaggctcctttgagatgatcatgctgggaagactgctcgtgggagtcaatgcaggtgtgagcatgaacatccagcccatgtacctgggggagagcgcccctaaggagctccgaggagctgtggccatgagctcagccatctttacggctctggggatcgtgatgggacaggtggtcggactcagtacatcgcggtgcacgtggtcccggaccagctcatggcttcggcggctccagcgagccgtgcgcgctctgcagcctgcacagcatcggcaagatcggcggcgcgcagaaccgctcctacagcaagctgctgtgcggcctgctggccgagcgcctgcgcatcagcccggacagggtctacatcaactattacgacatgaacgcggccaatgtgggctggaacaactccaccttcgcctaagagccgcagggacccacgctgtctgcgctggctccacccgggaacccgccgcacgctgtgttctaggcccgcccaccccaaccttctggtggggagaaataaacggtttagagactaaaaaaaaaaa

SEQ ID NO: 383792 - DNA, 1765 bp, Homo sapiens
  misc_feature (10)..(10): n is a, c, g, or t
  misc_feature (198)..(198): n is a, c, g, or t
  misc_feature (202)..(202): n is a, c, g, or t
  misc_feature (206)..(206): n is a, c, g, or t
  misc_feature (228)..(228): n is a, c, g, or t
  misc_feature (378)..(378): n is a, c, g, or t
  misc_feature (500)..(500): n is a, c, g, or t
  misc_feature (517)..(517): n is a, c, g, or t
  misc_feature (568)..(568): n is a, c, g, or t
ctggtgcacngagggtcccacaggcatgggtgtccttcctatatcacatggccttcactgagactggtatatggattgcacctatcagagaccaaggacaggacctccctggaaatctctgaggacctggcctgtgatccagttgctgccttgtcctcttcctgctatgtcatggcttatcttctttcacccattcantcantcantcaattcattcagcagtattantcaatgtctcttgtaatgcctgcacctgctagatggtccccgagtttaccattactggaaaagacatttaagaaattcaccaagggctctatgagaggccatacacggtggacctgactagggtgtggcttccctgaggagctgaagttncccagaggcccagagaaggggagctgagcacgtttgaaccactgaacctgctctggacctcgcctccttccttcggtgcctcccagcatcctatcctctttaaagagcagggttcagggaanccctggatggtgattcncagggcagctcccctctcacctgccgcgatgactaccccgccccatctcanacacacaagctcacgcatgcgggactggagcccttgaggacatgtggcccaaagacaggaggtacaggggctcagtgcgtgcagtggaatgaactgggcttcatctctggaagggtaaggggccatcttccgggttcaccgccgcatccccacccccggcacagcgcctcctggcgactaacatcggtgacttagtgaaaggactaagaaagacccgaggcgaggccggaacaggccgatttctagccgccaagtggagaacaggttggagcggtgcgccgggcttagcggcggttgctggaggaacgggcggagtcgcccagggtcctgccctgcgggggtcgagccgaggcaggcggtgacttccccactcggggcggagccgcagcctcgcgggggcggggcctggcgccggcggtggcgtcacaaaaggcgggaccacagtggtgtccgagaagtcaggcacgtagctcagcggcggccgcggcgcgtgcgtctgtgcctctgcgcgggtctcctggtccttctgccatcatgccgatgttcatcgtaaacaccaacgtgccccgcgcctccgtgccggacgggttcctctccgagctcacccagcagctggcgcaggccaccggcaagcccccccaggtttgccgggaggggacaggaagaggggggtgcccaccggacgaggggttccgcgctgggagctggggaggcgactcctgaacggagctggggggcggggcggggggaggacggtggctcgggcccgaagtggacgttcggggcccgacgaggtcgctggggcgggctgaccgcgccctttcctcgcagtacatcgcggtgcacgtggtcccggaccagctcatggcttcggcggctccagcgagccgtgcgcgctctgcagcctgcacagcatcggcaagatcggcggcgcgcagaaccgctcctacagcaagctgctgtgcggcctgctggccgagcgcctgcgcatcagcccggacagggtctacatcaactattacgacatgaacgcggccaatgtgggctggaacaactccaccttcgcctaagagccgcagggacccacgctgtctgcgctggctccacccgggaacccgccgcacgctgtgttctaggcccgcccaccccaaccttctggtggggagaaataaacggtttagagactaaaaaaaaaaa

SEQ ID NO: 383793 - DNA, 3975 bp, Homo sapiens
gaatggtttaccattagaaagtttattgatgtaactgatctcattaacagattaaaggagaatacccatatgatcatcttaatagatgcacgaaaagcatgcaataaaatacctatttattataactgctaatattttgtgtttttccttaaaaatgcagtgtttttaggaattaaagttcagagcagcaaaagtcaaacaaaaaccaagtctgagcaatagagctactacagtgcccatcacagtgtctgctcaggtgacttcttaaggtcatgtccagctctatgtttctgtgaccacaaatagcatctttggcaagtctagtttcagttggtctttgtccagctcctggattcctccatgcagggcctgagaagccctgagggataaaagattaatccggttcagtggactctgtggttcctcaactccaagtgcccccagcataagtcggacctgcctctcacgcaatggatcccctggcggcaacccgagaccggttctcctacccgcattccgccaagtctctcgctctgcccaggacgcacagatgagagcgctccgaagactgattcagggcaggatcctgctcctgaccatctgcgctgccggcattggtgggacttttcagtttggctataacctctctatcatcaatgccccgaccttgcacattcaggaattcaccaatgagacatggcaggcgcgtactggagagccactgcccgatcacctagtcctgcttatgtggtccctcatcgtgtctctgtatcccctgggaggcctctttggagcactgcttgcaggtcccttggccatcacgctgggaaggaagaagtccctcctggtgaataacatctttgtggtgtcagcagcaatcctgtttggattcagccgcaaagcaggctcctttgagatgatcatgctgggaagactgctcgtgggagtcaatgcaggtgtgagcatgaacatccagcccatgtacctgggggagagcgcccctaaggagctccgaggagctgtggccatgagctcagccatctttacggctctggggatcgtgatgggacaggtggtcggactcagggagctcctaggtggccctcaggcctggcccctgctgctggccagctgcctggtgcccggggcgctccagctcgcctccctgcctctgctccctgaaagcccgcgctacctcctcattgactgtggagacaccgaggcctgcctggcagcactacggcggctccggggctccggggacttggcaggggagctggaggagctggaggaggagcgcgctgcctgccagggctgccgtgcccggcgcccatgggagctgttccagcatcgggccctgaggagacaggtgacaagcctcgtggttctgggcagtgccatggagctctgcgggaatgactcggtgtacgcctacgcctcctccgtgttccggaaggcaggagtgccggaagcgaagatccagtacgcgatcatcgggactgggagctgcgagctgctcacggcggttgttagttgtgtggtaatcgagagggtgggtcggcgcgtgctgctcatcggtgggtacagcctgatgacctgctgggggagcatcttcactgtggccctgtgcctgcagagctccttcccctggacactctacctggccatggcctgcatctttgccttcatcctcagctttggcattggccctgccggagtgacggggatcctggccacagagctgtttgaccagatggccaggcctgctgcctgcatggtctgcggggcgctcatgtggatcatgctcatcctggtcggcctgggatttccctttatcatggaggccttgtcccacttcctctatgtccctttccttggtgtctgtgtctgtggggccatctacactggcctgttccttcctgagaccaaaggcaagaccttccaagagatctccaaggaattacacagactcaacttccccaggcgggcccagggccccacgtggaggagcctggaggttatccagtcaacagaactctagtcccaaaggggtggccagagccaaagccagctactgtcctgtcctctgcttcctgccagggccctggtcctcactccctcctgcattcctcatttaaggagtgtttattgagcaccctttgtgtgcagacatggctccaggtgcttagcaatcaatggtgagcgtggtattccaggctaaaggtaattaactgacagaaaatcagtaacaacataattacaggctggttgtggcagctcatgactgtaatcccagcactttgggaggccaaggtgggaggatcaattgaggccagagtttgaaaccagcctaggtaacatagtgagaccccctatctctacaaaaaattttaaacattagctgggcatggtggtatgtgctaacagctctagctactcaggaggctgaggcagcaggatcacttgagtccaagagttcaaggtagcagtaagctacaatcacaccactgcatgccagactgggtgacagagggagacttcatctctttaaaacataataataataattacagactcaggaaatgcagtgaaagaaaaatacaggttggccaggtgaggtggctgatgcctgtaatcccagcactttgggaggccaagatgggaagattgctttgagaccagaagtttgagaccagcctgggccacatagtaagatcctgtttctaccaaaaaaaaaaaaaaaaaaaaattagctgggtgtggtggtacatgcctgtggtcccagctactcaggaggctgaaatgggaggatcacttgagcctgggaggtcgaggctgcagtgagtcctaattgagccactgcactccagcctggacaacagaaagagaccatgtttcaaaaaaaataaatacaggttgtagtgggtatgggtatgcataccaggaggcccgacctcgtctgagaggggagtggtcagaaaagaattttctgaggaattgatgtttttaatcaactttattgaggtataatttatacataaccaactgcatccattttaagtatatatttggcgagttttgagttctaagtatagttttggtgagtgtatacacttgggaaacaccaccgcgatcaagatggaacctttaccctaccccaaggcacccacatgcccatttgctatcagtaacccaccccagtcccagacctggggaaccactgacctgctttctgcctcaattggtcagatttgccttttttcagaatctgaagtcattccgtactgtatgtacacatttgtgtctggcttggctccagataaagtttttgggattcatgaatgttgttgcacgtattaggagagactcctttgtattgctgagtagtattcccctctgtggttagaccatgatttatttatccatctacctgttggtgaacattttggctgtttctaattcttggccatcatgaataaaactgctgtgaatgttcctacaataataattgtctaaacatatgtttttatttcttttgtgtcttagtccgtcgggctgctataactaagaaccacagcctgggtggcttataaacaacagaaatttatttttcatggttctggaggctgggaagtccaagatcaaggtgccagtggattcagtgtctgttgagggcccatgtcttgattcatagatggcggtcttcttgctgtgttctcctagacatggcagaaggggcaagggagctctctggggtctcttttataagggcaccaatcccattcatgcaggctctgccctcatgacctaatcacctcccaagaggcccaaaggccctacctccaagtaccatcatatgagggattaggtttcaaggtatgaacctggggaggacataaacagtcagtctagctttttgggtaaatgaattgctgggcttaataataaatgtatatttaactgtaaaaaaaaaaa

SEQ ID NO: 383794 - DNA, 1580 bp, Homo sapiens
  misc_feature (10)..(10): n is a, c, g, or t
  misc_feature (198)..(198): n is a, c, g, or t
  misc_feature (202)..(202): n is a, c, g, or t
  misc_feature (206)..(206): n is a, c, g, or t
  misc_feature (228)..(228): n is a, c, g, or t
  misc_feature (378)..(378): n is a, c, g, or t
  misc_feature (500)..(500): n is a, c, g, or t
  misc_feature (517)..(517): n is a, c, g, or t
  misc_feature (568)..(568): n is a, c, g, or t
ctggtgcacngagggtcccacaggcatgggtgtccttcctatatcacatggccttcactgagactggtatatggattgcacctatcagagaccaaggacaggacctccctggaaatctctgaggacctggcctgtgatccagttgctgccttgtcctcttcctgctatgtcatggcttatcttctttcacccattcantcantcantcaattcattcagcagtattantcaatgtctcttgtaatgcctgcacctgctagatggtccccgagtttaccattactggaaaagacatttaagaaattcaccaagggctctatgagaggccatacacggtggacctgactagggtgtggcttccctgaggagctgaagttncccagaggcccagagaaggggagctgagcacgtttgaaccactgaacctgctctggacctcgcctccttccttcggtgcctcccagcatcctatcctctttaaagagcagggttcagggaanccctggatggtgattcncagggcagctcccctctcacctgccgcgatgactaccccgccccatctcanacacacaagctcacgcatgcgggactggagcccttgaggacatgtggcccaaagacaggaggtacaggggctcagtgcgtgcagtggaatgaactgggcttcatctctggaagggtaaggggccatcttccgggttcaccgccgcatccccacccccggcacagcgcctcctggcgactaacatcggtgacttagtgaaaggactaagaaagacccgaggcgaggccggaacaggccgatttctagccgccaagtggagaacaggttggagcggtgcgccgggcttagcggcggttgctggaggaacgggcggagtcgcccagggtcctgccctgcgggggtcgagccgaggcaggcggtgacttccccactcggggcggagccgcagcctcgcgggggcggggcctggcgccggcggtggcgtcacaaaaggcgggaccacagtggtgtccgagaagtcaggcacgtagctcagcggcggccgcggcgcgtgcgtctgtgcctctgcgcgggtctcctggtccttctgccatcatgccgatgttcatcgtaaacaccaacgtgccccgcgcctccgtgccggacgggttcctctccgagctcacccagcagctggcgcaggccaccggcaagcccccccagcagtacatcgcggtgcacgtggtcccggaccagctcatggccttcggcggctccagcgagccgtgcgcgctctgcagcctgcacagcatcggcaagatcggcggcgcgcagaaccgctcctacagcaagctgctgtgcggcctgctggccgagcgcctgcgcatcagcccggacagggtctacatcaactattacgacatgaacgcggccaatgtgggctggaacaactccaccttcgcctaagagccgcagggacccacgctgtctgcgctggctccacccgggaacccgccgcacgctgtgttctaggcccgcccaccccaaccttctggtggggagaaataaacggtttagagactaaaaaaaaaaa

SEQ ID NO: 383795 - DNA, 573 bp, Homo sapiens
  misc_feature (56)..(56): n is a, c, g, or t
cggaacgccgctagaggccgtcatgagtgccggtggaaggctcttaagggcgtgcntctgtgcctctgcgcgggtctcctggtccttctgccatcatgccgatgttcatcgtaaacaccaacgtgccccgcgcctccgtgccggacgggttcctctccgagctcacccagcagctggcgcaggccaccggcaagcccccccagcagtacatcgcggtgcacgtggtcccggaccagctcatggccttcggcggctccagcgagccgtgcgcgctctgcagcctgcacagcatcggcaagatcggcggcgcgcagaaccgctcctacagcaagctgctgtgcggcctgctggccgagcgcctgcgcatcagcccggacagggtctacatcaactattacgacatgaacgcggccaatgtgggctggaacaactccaccttcgcctaagagccgcagggacccacgctgtctgcgctggctccacccgggaacccgccgcacgctgtgttctaggcccgcccaccccaaccttctggtggggagaaataaacggtttagagactaaaaaaaaaaa

SEQ ID NO: 383796 - DNA, 1672 bp, Homo sapiens
  misc_feature (10)..(10): n is a, c, g, or t
  misc_feature (198)..(198): n is a, c, g, or t
  misc_feature (202)..(202): n is a, c, g, or t
  misc_feature (206)..(206): n is a, c, g, or t
  misc_feature (228)..(228): n is a, c, g, or t
  misc_feature (378)..(378): n is a, c, g, or t
  misc_feature (500)..(500): n is a, c, g, or t
  misc_feature (517)..(517): n is a, c, g, or t
  misc_feature (568)..(568): n is a, c, g, or t
  misc_feature (1473)..(1473): n is a, c, g, or t
ctggtgcacngagggtcccacaggcatgggtgtccttcctatatcacatggccttcactgagactggtatatggattgcacctatcagagaccaaggacaggacctccctggaaatctctgaggacctggcctgtgatccagttgctgccttgtcctcttcctgctatgtcatggcttatcttctttcacccattcantcantcantcaattcattcagcagtattantcaatgtctcttgtaatgcctgcacctgctagatggtccccgagtttaccattactggaaaagacatttaagaaattcaccaagggctctatgagaggccatacacggtggacctgactagggtgtggcttccctgaggagctgaagttncccagaggcccagagaaggggagctgagcacgtttgaaccactgaacctgctctggacctcgcctccttccttcggtgcctcccagcatcctatcctctttaaagagcagggttcagggaanccctggatggtgattcncagggcagctcccctctcacctgccgcgatgactaccccgccccatctcanacacacaagctcacgcatgcgggactggagcccttgaggacatgtggcccaaagacaggaggtacaggggctcagtgcgtgcagtggaatgaactgggcttcatctctggaagggtaaggggccatcttccgggttcaccgccgcatccccacccccggcacagcgcctcctggcgactaacatcggtgacttagtgaaaggactaagaaagacccgaggcgaggccggaacaggccgatttctagccgccaagtggagaacaggttggagcggtgcgccgggcttagcggcggttgctggaggaacgggcggagtcgcccagggtcctgccctgcgggggtcgagccgaggcaggcggtgacttccccactcggggcggagccgcagcctcgcgggggcggggcctggcgccggcggtggcgtcacaaaaggcgggaccacagtggtgtccgagaagtcaggcacgtagctcagcggcggccgcggcgcgtgcgtctgtgcctctgcgcgggtctcctggtccttctgccatcatgccgatgttcatcgtaaacaccaacgtgccccgcgcctccgtgccggacgggttcctctccgagctcacccagcagctggcgcaggccaccggcaagcccccccagtacatcgcggtgcacgtggtcccggaccagctcatggccttcggcggctccagcgagccgtgcgcgctctgcagcctgcacagcatcggcaagatcggcggcgcgcagaaccgctcctacagcaagctgctgtgcggcctgctggccgagcgcctgcgcatcagcccggacaggtacgcggagtcgcggaggggcgggggaggggcggcggcgcgcggccaggcccgggactgagccacccgctgagtccggcctcctccccncgcagggtctacatcaactattacgacatgaacgcggccaatgtgggctggaacaactccaccttcgcctaagagccgcagggacccacgctgtctgcgctggctccacccgggaacccgccgcacgctgtgttctaggcccgcccaccccaaccttctggtggggagaaataaacggtttagagactaaaaaaaaaaa

SEQ ID NO: 383797 - DNA, 3581 bp, Homo sapiens
agcgcctctttcaccactgggcgctgcgcgctgcccttccctccgcgcacaggctgccggctcaccgcttgctaatggcagccggggtctccctgggacagcaagacctccgctcaggcccctctttcgaatgctccacgccctcctgcgatctagaatgattcagggcaggatcctgctcctgaccatctgcgctgccggcattggtgggacttttcagtttggctataacctctctatcatcaatgccccgaccttgcacattcaggaattcaccaatgagacatggcaggcgcgtactggagagccactgcccgatcacctagtcctgcttatgtggtccctcatcgtgtctctgtatcccctgggaggcctctttggagcactgcttgcaggtcccttggccatcacgctgggaaggaagaagtccctcctggtgaataacatctttgtggtgtcagcagcaatcctgtttggattcagccgcaaagcaggctcctttgagatgatcatgctgggaagactgctcgtgggagtcaatgcaggtgtgagcatgaacatccagcccatgtacctgggggagagcgcccctaaggagctccgaggagctgtggccatgagctcagccatctttacggctctggggatcgtgatgggacaggtggtcggactcagggagctcctaggtggccctcaggcctggcccctgctgctggccagctgcctggtgcccggggcgctccagctcgcctccctgcctctgctccctgaaagcccgcgctacctcctcattgactgtggagacaccgaggcctgcctggcagcactacggcggctccggggctccggggacttggcaggggagctggaggagctggaggaggagcgcgctgcctgccagggctgccgtgcccggcgcccatgggagctgttccagcatcgggccctgaggagacaggtgacaagcctcgtggttctgggcagtgccatggagctctgcgggaatgactcggtgtacgcctacgcctcctccgtgttccggaaggcaggagtgccggaagcgaagatccagtacgcgatcatcgggactgggagctgcgagctgctcacggcggttgttagttgtgtggtaatcgagagggtgggtcggcgcgtgctgctcatcggtgggtacagcctgatgacctgctgggggagcatcttcactgtggccctgtgccttgccttcaggagctcccttccccttggacactctaaccttgcccatggccttgcatcttttgcgcttcatcgctcaggctttgggcatttgcgcctgccggagtgacggggatcctggccacagagctgtttgaccagatggccaggcctgctgcctgcatggtctgcggggcgctcatgtggatcatgctcatcctggtcggcctgggatttccctttatcatggaggccttgtcccacttcctctatgtccctttccttggtgtctgtgtctgtggggccatctacactggcctgttccttcctgagaccaaaggcaagaccttccaagagatctccaaggaattacacagactcaacttccccaggcgggcccagggccccacgtggaggagcctggaggttatccagtcaacagaactctagtcccaaaggggtggccagagccaaagccagctactgtcctgtcctctgcttcctgccagggccctggtcctcactccctcctgcattcctcatttaaggagtgtttattgagcaccctttgtgtgcagacatggctccaggtgcttagcaatcaatggtgagcgtggtattccaggctaaaggtaattaactgacagaaaatcagtaacaacataattacaggctggttgtggcagctcatgactgtaatcccagcactttgggaggccaaggtgggaggatcaattgaggccagagtttgaaaccagcctaggtaacatagtgagaccccctatctctacaaaaaattttaaacattagctgggcatggtggtatgtgctaacagctctagctactcaggaggctgaggcagcaggatcacttgagtccaagagttcaaggtagcagtaagctacaatcacaccactgcatgccagactgggtgacagagggagacttcatctctttaaaacataataataataattacagactcaggaaatgcagtgaaagaaaaatacaggttggccaggtgaggtggctgatgcctgtaatcccagcactttgggaggccaagatgggaagattgctttgagaccagaagtttgagaccagcctgggccacatagtaagatcctgtttctaccaaaaaaaaaaaaaaaaaaaaattagctgggtgtggtggtacatgcctgtggtcccagctactcaggaggctgaaatgggaggatcacttgagcctgggaggtcgaggctgcagtgagtcctaattgagccactgcactccagcctggacaacagaaagagaccatgtttcaaaaaaaataaatacaggttgtagtgggtatgggtatgcataccaggaggcccgacctcgtctgagaggggagtggtcagaaaagaattttctgaggaattgatgtttttaatcaactttattgaggtataatttatacataaccaactgcatccattttaagtatatatttggcgagttttgagttctaagtatagttttggtgagtgtatacacttgggaaacaccaccgcgatcaagatggaacctttaccctaccccaaggcacccacatgcccatttgctatcagtaacccaccccagtcccagacctggggaaccactgacctgctttctgcctcaattggtcagatttgccttttttcagaatctgaagtcattccgtactgtatgtacacatttgtgtctggcttggctccagataaagtttttgggattcatgaatgttgttgcacgtattaggagagactcctttgtattgctgagtagtattcccctctgtggttagaccatgatttatttatccatctacctgttggtgaacattttggctgtttctaattcttggccatcatgaataaaactgctgtgaatgttcctacaataataattgtctaaacatatgtttttatttcttttgtgtcttagtccgtcgggctgctataactaagaaccacagcctgggtggcttataaacaacagaaatttatttttcatggttctggaggctgggaagtccaagatcaaggtgccagtggattcagtgtctgttgagggcccatgtcttgattcatagatggcggtcttcttgctgtgttctcctagacatggcagaaggggcaagggagctctctggggtctcttttataagggcaccaatcccattcatgcaggctctgccctcatgacctaatcacctcccaagaggcccaaaggccctacctccaagtaccatcatatgagggattaggtttcaaggtatgaacctggggaggacataaacagtcagtctagctttttgggtaaatgaattgctgggcttaataataaatgtatatttaactgtaaaaaaaaaaa

SEQ ID NO: 383798 - DNA, 3245 bp, Homo sapiens
agcgcctctttcaccactgggcgctgcgcgctgcccttccctccgcgcacaggctgccggctcaccgcttgctaatggcagccggggtctccctgggacagcaagacctccgctcaggcccctctttcgaatgctccacgccctcctgcgatctagaatgattcagggcaggatcctgctcctgaccatctgcgctgccggcattggtgggacttttcagtttggctataacctctctatcatcaatgccccgaccttgcacattcaggaattcaccaatgagacatggcaggcgcgtactggagagccactgcccgatcacctagtcctgcttatgtggtccctcatcgtgtctctgtatcccctgggaggcctctttggagcactgcttgcaggtcccttggccatcacgctgggaaggaagaagtccctcctggtgaataacatctttgtggtgtcagcagcaatcctgtttggattcagccgcaaagcaggctcctttgagatgatcatgctgggaagactgctcgtgggagtcaatgcaggtgtgagcatgaacatccagcccatgtacctgggggagagcgcccctaaggagctccgaggagctgtggccatgagctcagccatctttacggctctggggatcgtgatgggacaggtggtcggactcagggtgtacgcctacgcctcctccgtgttccggaaggcaggagtgccggaagcgaagatccagtacgcgatcatcgggactgggagctgcgagctgctcacggcggttgttagttgtgtggtaatcgagagggtgggtcggcgcgtgctgctcatcggtgggtacagcctgatgacctgctgggggagcatcttcactgtggccctgtgccttgccttcaggagctcccttccccttggacactctaaccttgcccatggccttgcatcttttgcgcttcatcgctcaggctttgggcatttgcgcctgccggagtgacggggatcctggccacagagctgtttgaccagatggccaggcctgctgcctgcatggtctgcggggcgctcatgtggatcatgctcatcctggtcggcctgggatttccctttatcatggaggccttgtcccacttcctctatgtccctttccttggtgtctgtgtctgtggggccatctacactggcctgttccttcctgagaccaaaggcaagaccttccaagagatctccaaggaattacacagactcaacttccccaggcgggcccagggccccacgtggaggagcctggaggttatccagtcaacagaactctagtcccaaaggggtggccagagccaaagccagctactgtcctgtcctctgcttcctgccagggccctggtcctcactccctcctgcattcctcatttaaggagtgtttattgagcaccctttgtgtgcagacatggctccaggtgcttagcaatcaatggtgagcgtggtattccaggctaaaggtaattaactgacagaaaatcagtaacaacataattacaggctggttgtggcagctcatgactgtaatcccagcactttgggaggccaaggtgggaggatcaattgaggccagagtttgaaaccagcctaggtaacatagtgagaccccctatctctacaaaaaattttaaacattagctgggcatggtggtatgtgctaacagctctagctactcaggaggctgaggcagcaggatcacttgagtccaagagttcaaggtagcagtaagctacaatcacaccactgcatgccagactgggtgacagagggagacttcatctctttaaaacataataataataattacagactcaggaaatgcagtgaaagaaaaatacaggttggccaggtgaggtggctgatgcctgtaatcccagcactttgggaggccaagatgggaagattgctttgagaccagaagtttgagaccagcctgggccacatagtaagatcctgtttctaccaaaaaaaaaaaaaaaaaaaaattagctgggtgtggtggtacatgcctgtggtcccagctactcaggaggctgaaatgggaggatcacttgagcctgggaggtcgaggctgcagtgagtcctaattgagccactgcactccagcctggacaacagaaagagaccatgtttcaaaaaaaataaatacaggttgtagtgggtatgggtatgcataccaggaggcccgacctcgtctgagaggggagtggtcagaaaagaattttctgaggaattgatgtttttaatcaactttattgaggtataatttatacataaccaactgcatccattttaagtatatatttggcgagttttgagttctaagtatagttttggtgagtgtatacacttgggaaacaccaccgcgatcaagatggaacctttaccctaccccaaggcacccacatgcccatttgctatcagtaacccaccccagtcccagacctggggaaccactgacctgctttctgcctcaattggtcagatttgccttttttcagaatctgaagtcattccgtactgtatgtacacatttgtgtctggcttggctccagataaagtttttgggattcatgaatgttgttgcacgtattaggagagactcctttgtattgctgagtagtattcccctctgtggttagaccatgatttatttatccatctacctgttggtgaacattttggctgtttctaattcttggccatcatgaataaaactgctgtgaatgttcctacaataataattgtctaaacatatgtttttatttcttttgtgtcttagtccgtcgggctgctataactaagaaccacagcctgggtggcttataaacaacagaaatttatttttcatggttctggaggctgggaagtccaagatcaaggtgccagtggattcagtgtctgttgagggcccatgtcttgattcatagatggcggtcttcttgctgtgttctcctagacatggcagaaggggcaagggagctctctggggtctcttttataagggcaccaatcccattcatgcaggctctgccctcatgacctaatcacctcccaagaggcccaaaggccctacctccaagtaccatcatatgagggattaggtttcaaggtatgaacctggggaggacataaacagtcagtctagctttttgggtaaatgaattgctgggcttaataataaatgtatatttaactgtaaaaaaaaaaa

SEQ ID NO: 383799 - DNA, 1736 bp, Homo sapiens
  misc_feature (10)..(10): n is a, c, g, or t
  misc_feature (198)..(198): n is a, c, g, or t
  misc_feature (202)..(202): n is a, c, g, or t
  misc_feature (206)..(206): n is a, c, g, or t
  misc_feature (228)..(228): n is a, c, g, or t
  misc_feature (378)..(378): n is a, c, g, or t
  misc_feature (500)..(500): n is a, c, g, or t
  misc_feature (517)..(517): n is a, c, g, or t
  misc_feature (568)..(568): n is a, c, g, or t
  misc_feature (1501)..(1501): n is a, c, g, or t
  misc_feature (1505)..(1505): n is a, c, g, or t
  misc_feature (1508)..(1508): n is a, c, g, or t
  misc_feature (1512)..(1512): n is a, c, g, or t
  misc_feature (1523)..(1523): n is a, c, g, or t
  misc_feature (1532)..(1532): n is a, c, g, or t
  misc_feature (1534)..(1534): n is a, c, g, or t
  misc_feature (1540)..(1540): n is a, c, g, or t
ctggtgcacngagggtcccacaggcatgggtgtccttcctatatcacatggccttcactgagactggtatatggattgcacctatcagagaccaaggacaggacctccctggaaatctctgaggacctggcctgtgatccagttgctgccttgtcctcttcctgctatgtcatggcttatcttctttcacccattcantcantcantcaattcattcagcagtattantcaatgtctcttgtaatgcctgcacctgctagatggtccccgagtttaccattactggaaaagacatttaagaaattcaccaagggctctatgagaggccatacacggtggacctgactagggtgtggcttccctgaggagctgaagttncccagaggcccagagaaggggagctgagcacgtttgaaccactgaacctgctctggacctcgcctccttccttcggtgcctcccagcatcctatcctctttaaagagcagggttcagggaanccctggatggtgattcncagggcagctcccctctcacctgccgcgatgactaccccgccccatctcanacacacaagctcacgcatgcgggactggagcccttgaggacatgtggcccaaagacaggaggtacaggggctcagtgcgtgcagtggaatgaactgggcttcatctctggaagggtaaggggccatcttccgggttcaccgccgcatccccacccccggcacagcgcctcctggcgactaacatcggtgacttagtgaaaggactaagaaagacccgaggcgaggccggaacaggccgatttctagccgccaagtggagaacaggttggagcggtgcgccgggcttagcggcggttgctggaggaacgggcggagtcgcccagggtcctgccctgcgggggtcgagccgaggcaggcggtgacttccccactcggggcggagccgcagcctcgcgggggcggggcctggcgccggcggtggcgtcacaaaaggcgggaccacagtggtgtccgagaagtcaggcacgtagctcagcggcggccgcggcgcgtgcgtctgtgcctctgcgcgggtctcctggtccttctgccatcatgccgatgttcatcgtaaacaccaacgtgccccgcgcctccgtgccggacgggttcctctccgagctcacccagcagctggcgcaggccaccggcaagcccccccagtacatcgcggtgcacgtggtcccggaccagctcatggccttcggcggctccagcgagccgtgcgcgctctgcagcctgcacagcatcggcaagatcggcggcgcgcagaaccgctcctacagcaagctgctgtgcggcctgctggccgagcgcctgcgcatcagcccggaccagggtctacatcaactattacgacatgaacgcggccaatgtgggctggaacaactccaccttcgcctaagagccgcagggacccacgctgtctgcgctggctccacccgggggaacccngccngcnacgnctgtggttctnaagggcccngncccaancccccaaagccttcctgggtggggggaagaaaataaaacggggttaaagaagaactaaaaaaaccaacgaaacaacaccaaaaggcacgggaagaaaggacaagcagcacaggcgggaacgctaaaacacacaggcggccgacgaaaagacagggacacacaagccgcgacgagacaccaaacaggcggccggcaa

SEQ ID NO: 383800 - DNA, 1568 bp, Homo sapiens
  misc_feature (10)..(10): n is a, c, g, or t
  misc_feature (198)..(198): n is a, c, g, or t
  misc_feature (202)..(202): n is a, c, g, or t
  misc_feature (206)..(206): n is a, c, g, or t
  misc_feature (228)..(228): n is a, c, g, or t
  misc_feature (378)..(378): n is a, c, g, or t
  misc_feature (500)..(500): n is a, c, g, or t
  misc_feature (517)..(517): n is a, c, g, or t
  misc_feature (568)..(568): n is a, c, g, or t
ctggtgcacngagggtcccacaggcatgggtgtccttcctatatcacatggccttcactgagactggtatatggattgcacctatcagagaccaaggacaggacctccctggaaatctctgaggacctggcctgtgatccagttgctgccttgtcctcttcctgctatgtcatggcttatcttctttcacccattcantcantcantcaattcattcagcagtattantcaatgtctcttgtaatgcctgcacctgctagatggtccccgagtttaccattactggaaaagacatttaagaaattcaccaagggctctatgagaggccatacacggtggacctgactagggtgtggcttccctgaggagctgaagttncccagaggcccagagaaggggagctgagcacgtttgaaccactgaacctgctctggacctcgcctccttccttcggtgcctcccagcatcctatcctctttaaagagcagggttcagggaanccctggatggtgattcncagggcagctcccctctcacctgccgcgatgactaccccgccccatctcanacacacaagctcacgcatgcgggactggagcccttgaggacatgtggcccaaagacaggaggtacaggggctcagtgcgtgcagtggaatgaactgggcttcatctctggaagggtaaggggccatcttccgggttcaccgccgcatccccacccccggcacagcgcctcctggcgactaacatcggtgacttagtgaaaggactaagaaagacccgaggcgaggccggaacaggccgatttctagccgccaagtggagaacaggttggagcggtgcgccgggcttagcggcggttgctggaggaacgggcggagtcgcccagggtcctgccctgcgggggtcgagccgaggcaggcggtgacttccccactcggggcggagccgcagcctcgcgggggcggggcctggcgccggcggtggcgtcacaaaaggcgggaccacagtggtgtccgagaagtcaggcacgtagctcagcggcggccgcggcgcgtgcgtctgtgcctctgcgcgggtctcctggtccttctgccatcatgccgatgttcatcgtaaacaccaacgtgccccgcgcctccgtgccggacgggttcctctccgagctcacccagcagctggcgcaggccaccggcaagcccccccagtacatcgcggtgcacgtggtcccggaccagctcatggccttcggcggctccagcgagccgtgcgcgctctgcagcctgcacagcatcggcaagatcggcggcgcgcagaaccgctcctacagcaagctgctgtgcggcctgctggccgagcgcctgcgcatcagcccggaccagggtctacatcaactattacgacatgaacgcggccaatgtgggctggaacaactccaccttcgcctaagagccgcagggacccacgctgtctgcgctggctccacccgggaacccgccgcacgctgtgttctaggcccgcccaccccaaccttctggtggggagaaataaacggtttagagacta

SEQ ID NO: 383801 - DNA, 1577 bp, Homo sapiens
  misc_feature (10)..(10): n is a, c, g, or t
  misc_feature (198)..(198): n is a, c, g, or t
  misc_feature (202)..(202): n is a, c, g, or t
  misc_feature (206)..(206): n is a, c, g, or t
  misc_feature (228)..(228): n is a, c, g, or t
  misc_feature (378)..(378): n is a, c, g, or t
  misc_feature (500)..(500): n is a, c, g, or t
  misc_feature (517)..(517): n is a, c, g, or t
  misc_feature (568)..(568): n is a, c, g, or t
ctggtgcacngagggtcccacaggcatgggtgtccttcctatatcacatggccttcactgagactggtatatggattgcacctatcagagaccaaggacaggacctccctggaaatctctgaggacctggcctgtgatccagttgctgccttgtcctcttcctgctatgtcatggcttatcttctttcacccattcantcantcantcaattcattcagcagtattantcaatgtctcttgtaatgcctgcacctgctagatggtccccgagtttaccattactggaaaagacatttaagaaattcaccaagggctctatgagaggccatacacggtggacctgactagggtgtggcttccctgaggagctgaagttncccagaggcccagagaaggggagctgagcacgtttgaaccactgaacctgctctggacctcgcctccttccttcggtgcctcccagcatcctatcctctttaaagagcagggttcagggaanccctggatggtgattcncagggcagctcccctctcacctgccgcgatgactaccccgccccatctcanacacacaagctcacgcatgcgggactggagcccttgaggacatgtggcccaaagacaggaggtacaggggctcagtgcgtgcagtggaatgaactgggcttcatctctggaagggtaaggggccatcttccgggttcaccgccgcatccccacccccggcacagcgcctcctggcgactaacatcggtgacttagtgaaaggactaagaaagacccgaggcgaggccggaacaggccgatttctagccgccaagtggagaacaggttggagcggtgcgccgggcttagcggcggttgctggaggaacgggcggagtcgcccagggtcctgccctgcgggggtcgagccgaggcaggcggtgacttccccactcggggcggagccgcagcctcgcgggggcggggcctggcgccggcggtggcgtcacaaaaggcgggaccacagtggtgtccgagaagtcaggcacgtagctcagcggcggccgcggcgcgtgcgtctgtgcctctgcgcgggtctcctggtccttctgccatcatgccgatgttcatcgtaaacaccaacgtgccccgcgcctccgtgccggacgggttcctctccgagctcacccagcagctggcgcaggccaccggcaagcccccccagtacatcgcggtgcacgtggtcccggaccagctcatggccttcggcggctccagcgagccgtgcgcgctctgcagcctgcacagcatcggcaagatcggcggcgcgcagaaccgctcctacagcaagctgctgtgcggcctgctggccgagcgcctgcgcatcagcccggaccagggtctacatcaactattacgacatgaacgcggccaatgtgggctggaacaactccaccttcgcctaagagccgcgggacccacgctgtctgcgctggctccacccgggaacccgccgcacgctgtgttctaggcccgcccaccccaaccttctggtggggagaaataaacggtttagagactaaaaaaaaaaa

SEQ ID NO: 383802 - DNA, 1638 bp, Homo sapiens
  misc_feature (10)..(10): n is a, c, g, or t
  misc_feature (198)..(198): n is a, c, g, or t
  misc_feature (202)..(202): n is a, c, g, or t
  misc_feature (206)..(206): n is a, c, g, or t
  misc_feature (228)..(228): n is a, c, g, or t
  misc_feature (378)..(378): n is a, c, g, or t
  misc_feature (500)..(500): n is a, c, g, or t
  misc_feature (517)..(517): n is a, c, g, or t
  misc_feature (568)..(568): n is a, c, g, or t
ctggtgcacngagggtcccacaggcatgggtgtccttcctatatcacatggccttcactgagactggtatatggattgcacctatcagagaccaaggacaggacctccctggaaatctctgaggacctggcctgtgatccagttgctgccttgtcctcttcctgctatgtcatggcttatcttctttcacccattcantcantcantcaattcattcagcagtattantcaatgtctcttgtaatgcctgcacctgctagatggtccccgagtttaccattactggaaaagacatttaagaaattcaccaagggctctatgagaggccatacacggtggacctgactagggtgtggcttccctgaggagctgaagttncccagaggcccagagaaggggagctgagcacgtttgaaccactgaacctgctctggacctcgcctccttccttcggtgcctcccagcatcctatcctctttaaagagcagggttcagggaanccctggatggtgattcncagggcagctcccctctcacctgccgcgatgactaccccgccccatctcanacacacaagctcacgcatgcgggactggagcccttgaggacatgtggcccaaagacaggaggtacaggggctcagtgcgtgcagtggaatgaactgggcttcatctctggaagggtaaggggccatcttccgggttcaccgccgcatccccacccccggcacagcgcctcctggcgactaacatcggtgacttagtgaaaggactaagaaagacccgaggcgaggccggaacaggccgatttctagccgccaagtggagaacaggttggagcggtgcgccgggcttagcggcggttgctggaggaacgggcggagtcgcccagggtcctgccctgcgggggtcgagccgaggcaggcggtgacttccccactcggggcggagccgcagcctcgcgggggcggggcctggcgccggcggtggcgtcacaaaaggcgggaccacagtggtgtccgagaagtcaggcacgtagctcagcggcggccgcggcgcgtgcgtctgtgcctctgcgcgggtctcctggtccttctgccatcatgccgatgttcatcgtaaacaccaacgtgccccgcgcctccgtgccggacgggttcctctccgagctcacccagcagctggcgcaggccaccggcaagcccccccagtacatcgcggtgcacgtggtcccggaccagctcatggccttcggcggctccagcgagccgtgcgcgctctgcagcctgcacagcatcggcaagatcggcggcgcgcagaaccgctcctacagcaagctgctgtgcggcctgctggccgagcgcctgcgcatcagcccggaccagggtctacatcaactattacgacatgaacgcggccaatgtgggctggaacaactccaccttcgcctaagagccgcagggacccacgctgtctgcgctggctccacccgggaacccgccgcacgctgtgttctaggcccgcccaccccaaccttctggtggggagaaataaacggtttagagactacagcgtgcgcgggattcccggcccgcccaccccaaccttctggtggggacgaataaacggtttagagact

SEQ ID NO: 383803 - DNA, 1943 bp, Homo sapiens
  misc_feature (10)..(10): n is a, c, g, or t
  misc_feature (198)..(198): n is a, c, g, or t
  misc_feature (202)..(202): n is a, c, g, or t
  misc_feature (206)..(206): n is a, c, g, or t
  misc_feature (228)..(228): n is a, c, g, or t
  misc_feature (378)..(378): n is a, c, g, or t
  misc_feature (500)..(500): n is a, c, g, or t
  misc_feature (517)..(517): n is a, c, g, or t
  misc_feature (568)..(568): n is a, c, g, or t
  misc_feature (1819)..(1819): n is a, c, g, or t
ctggtgcacngagggtcccacaggcatgggtgtccttcctatatcacatggccttcactgagactggtatatggattgcacctatcagagaccaaggacaggacctccctggaaatctctgaggacctggcctgtgatccagttgctgccttgtcctcttcctgctatgtcatggcttatcttctttcacccattcantcantcantcaattcattcagcagtattantcaatgtctcttgtaatgcctgcacctgctagatggtccccgagtttaccattactggaaaagacatttaagaaattcaccaagggctctatgagaggccatacacggtggacctgactagggtgtggcttccctgaggagctgaagttncccagaggcccagagaaggggagctgagcacgtttgaaccactgaacctgctctggacctcgcctccttccttcggtgcctcccagcatcctatcctctttaaagagcagggttcagggaanccctggatggtgattcncagggcagctcccctctcacctgccgcgatgactaccccgccccatctcanacacacaagctcacgcatgcgggactggagcccttgaggacatgtggcccaaagacaggaggtacaggggctcagtgcgtgcagtggaatgaactgggcttcatctctggaagggtaaggggccatcttccgggttcaccgccgcatccccacccccggcacagcgcctcctggcgactaacatcggtgacttagtgaaaggactaagaaagacccgaggcgaggccggaacaggccgatttctagccgccaagtggagaacaggttggagcggtgcgccgggcttagcggcggttgctggaggaacgggcggagtcgcccagggtcctgccctgcgggggtcgagccgaggcaggcggtgacttccccactcggggcggagccgcagcctcgcgggggcggggcctggcgccggcggtggcgtcacaaaaggcgggaccacagtggtgtccgagaagtcaggcacgtagctcagcggcggccgcggcgcgtgcgtctgtgcctctgcgcgggtctcctggtccttctgccatcatgccgatgttcatcgtaaacaccaacgtgccccgcgcctccgtgccggacgggttcctctccgagctcacccagcagctggcgcaggccaccggcaagcccccccaggtttgccgggaggggacaggaagaggggggtgcccaccggacgaggggttccgcgctgggagctggggaggcgactcctgaacggagctggggggcggggcggggggaggacggtggctcgggcccgaagtggacgttcggggcccgacgaggtcgctggggcgggctgaccgcgccctttcctcgcagtacatcgcggtgcacgtggtcccggaccagctcatggcttcggcggctccagcgagccgtgcgcgctctgcagcctgcacagcatcggcaagatcggcggcgcgcagaaccgctcctacagcaagctgctgtgcggcctgctggccgagcgcctgcgcatcagcccggacagggtctacatcaactattacgacatgaacgcggccaatgtgggctggaacaactccaccttcgcctaagagccgcagggacccacgctgtctgcgctggctccacccgggaacccgccgcacgctgtgttctaggcccgcccaccccaaccttctggtggggagaaataaacggtttagagactaaaaaaaaaaaaacaaaaaaaaaacaaaaaaaaacaaaaaaacaaacaaaaacacaaaaaaaacnacaaacaaaacaaacacaccgcggccaggcaaacataagaggcgcggcgcggggagacaaagaagcggcgacagcacaccgccgcgaccggcggtcccacaactcggcgtctcccgcacgcccc

SEQ ID NO: 383804 - DNA, 1981 bp, Homo sapiens
  misc_feature (10)..(10): n is a, c, g, or t
  misc_feature (198)..(198): n is a, c, g, or t
  misc_feature (202)..(202): n is a, c, g, or t
  misc_feature (206)..(206): n is a, c, g, or t
  misc_feature (228)..(228): n is a, c, g, or t
  misc_feature (378)..(378): n is a, c, g, or t
  misc_feature (500)..(500): n is a, c, g, or t
  misc_feature (517)..(517): n is a, c, g, or t
  misc_feature (568)..(568): n is a, c, g, or t
ctggtgcacngagggtcccacaggcatgggtgtccttcctatatcacatggccttcactgagactggtatatggattgcacctatcagagaccaaggacaggacctccctggaaatctctgaggacctggcctgtgatccagttgctgccttgtcctcttcctgctatgtcatggcttatcttctttcacccattcantcantcantcaattcattcagcagtattantcaatgtctcttgtaatgcctgcacctgctagatggtccccgagtttaccattactggaaaagacatttaagaaattcaccaagggctctatgagaggccatacacggtggacctgactagggtgtggcttccctgaggagctgaagttncccagaggcccagagaaggggagctgagcacgtttgaaccactgaacctgctctggacctcgcctccttccttcggtgcctcccagcatcctatcctctttaaagagcagggttcagggaanccctggatggtgattcncagggcagctcccctctcacctgccgcgatgactaccccgccccatctcanacacacaagctcacgcatgcgggactggagcccttgaggacatgtggcccaaagacaggaggtacaggggctcagtgcgtgcagtggaatgaactgggcttcatctctggaagggtaaggggccatcttccgggttcaccgccgcatccccacccccggcacagcgcctcctggcgactaacatcggtgacttagtgaaaggactaagaaagacccgaggcgaggccggaacaggccgatttctagccgccaagtggagaacaggttggagcggtgcgccgggcttagcggcggttgctggaggaacgggcggagtcgcccagggtcctgccctgcgggggtcgagccgaggcaggcggtgacttccccactcggggcggagccgcagcctcgcgggggcggggcctggcgccggcggtggcgtcacaaaaggcgggaccacagtggtgtccgagaagtcaggcacgtagctcagcggcggccgcggcgcgtgcgtctgtgcctctgcgcgggtctcctggtccttctgccatcatgccgatgttcatcgtaaacaccaacgtgccccgcgcctccgtgccggacgggttcctctccgagctcacccagcagctggcgcaggccaccggcaagcccccccagcagtacatcgcggtgcacgtggtcccggaccagctcatggccttcggcggctccagcgagccgtgcgcgctctgcagcctgcacagcatcggcaagatcggcggcgcgcagaaccgctcctacagcaagctgctgtgcggcctgctggccgagcgcctgcgcatcagcccggacagggtctacatcaactattacgacatgaacgcggccaatgtgggctggaacaactccaccttcgcctaagagccgcagggacccacgctgtctgcgctggctccacccgggaacccgccgcacgctgtgttctaggcccgcccaccccaaccttctggtggggagaaataaacggtttagagactaaaaaaaaaaaaaaaaaaaaaaaagaaaaaaaaaaaacaacgcggggggggaaaggtgatagcaaagcacacgagagtcgtgttggtcagcaccagcggagtggtaaccacccccacccacgaggcagaaaaatcggtgagaaacgaacaccaccacggagagagcatccctacaaaagatcgacgcccgacgcaaagagtgcttggtggtcaacccatgaatgagaaccaacgtgtcgccactcccacgagagggaacacgtgccaagggaccctcgggacactgcttctcaacacaaacgcgcgggacctgtcgctcaccggtgtcctccctgctagagaggaggcctcagacttgagagcaccgccccggggataaatattgccggacagaggggcacggagtcaccgc

SEQ ID NO: 383805 - DNA, 1750 bp, Homo sapiens
  misc_feature (10)..(10): n is a, c, g, or t
  misc_feature (198)..(198): n is a, c, g, or t
  misc_feature (202)..(202): n is a, c, g, or t
  misc_feature (206)..(206): n is a, c, g, or t
  misc_feature (228)..(228): n is a, c, g, or t
  misc_feature (378)..(378): n is a, c, g, or t
  misc_feature (500)..(500): n is a, c, g, or t
  misc_feature (517)..(517): n is a, c, g, or t
  misc_feature (568)..(568): n is a, c, g, or t
ctggtgcacngagggtcccacaggcatgggtgtccttcctatatcacatggccttcactgagactggtatatggattgcacctatcagagaccaaggacaggacctccctggaaatctctgaggacctggcctgtgatccagttgctgccttgtcctcttcctgctatgtcatggcttatcttctttcacccattcantcantcantcaattcattcagcagtattantcaatgtctcttgtaatgcctgcacctgctagatggtccccgagtttaccattactggaaaagacatttaagaaattcaccaagggctctatgagaggccatacacggtggacctgactagggtgtggcttccctgaggagctgaagttncccagaggcccagagaaggggagctgagcacgtttgaaccactgaacctgctctggacctcgcctccttccttcggtgcctcccagcatcctatcctctttaaagagcagggttcagggaanccctggatggtgattcncagggcagctcccctctcacctgccgcgatgactaccccgccccatctcanacacacaagctcacgcatgcgggactggagcccttgaggacatgtggcccaaagacaggaggtacaggggctcagtgcgtgcagtggaatgaactgggcttcatctctggaagggtaaggggccatcttccgggttcaccgccgcatccccacccccggcacagcgcctcctggcgactaacatcggtgacttagtgaaaggactaagaaagacccgaggcgaggccggaacaggccgatttctagccgccaagtggagaacaggttggagcggtgcgccgggcttagcggcggttgctggaggaacgggcggagtcgcccagggtcctgccctgcgggggtcgagccgaggcaggcggtgacttccccactcggggcggagccgcagcctcgcgggggcggggcctggcgccggcggtggcgtcacaaaaggcgggaccacagtggtgtccgagaagtcaggcacgtagctcagcggcggccgcggcgcgtgcgtctgtgcctctgcgcgggtctcctggtccttctgccatcatgccgatgttcatcgtaaacaccaacgtgccccgcgcctccgtgccggacgggttcctctccgagctcacccagcagctggcgcaggccaccggcaagcccccccagcagtacatcgcggtgcacgtggtcccggaccagctcatggccttcggcggctccagcgagccgtgcgcgctctgcagcctgcacagcatcggcaagatcggcggcgcgcagaaccgctcctacagcaagctgctgtgcggcctgctggccgagcgcctgcgcatcagcccggaccagggtctacatcaactattacgacatgaacgcggccaatgtgggctggaacaactccaccttcgcctaagagccgcagggacccacgctgtctgcgctggctccacccgggaacccgccgcacgctgtgttctaggcccgcccaccccaaccttctggtggggagaaataaacggtttagagactaaaaaaaaacaaaaaaaaaaaaaaaaaaaaaacaaaaaacccgcggggcgtctttttgggggggcgcgaaaaaaaggttttaaagtgggcagtggtctatgttttttctgacccgttttttttccacagtggaaaatgggggcccctaaagggcgattattcgaaaccgttacttactcg

SEQ ID NO: 383806 - DNA, 1571 bp, Homo sapiens
  misc_feature (10)..(10): n is a, c, g, or t
  misc_feature (198)..(198): n is a, c, g, or t
  misc_feature (202)..(202): n is a, c, g, or t
  misc_feature (206)..(206): n is a, c, g, or t
  misc_feature (228)..(228): n is a, c, g, or t
  misc_feature (378)..(378): n is a, c, g, or t
  misc_feature (500)..(500): n is a, c, g, or t
  misc_feature (517)..(517): n is a, c, g, or t
  misc_feature (568)..(568): n is a, c, g, or t
ctggtgcacngagggtcccacaggcatgggtgtccttcctatatcacatggccttcactgagactggtatatggattgcacctatcagagaccaaggacaggacctccctggaaatctctgaggacctggcctgtgatccagttgctgccttgtcctcttcctgctatgtcatggcttatcttctttcacccattcantcantcantcaattcattcagcagtattantcaatgtctcttgtaatgcctgcacctgctagatggtccccgagtttaccattactggaaaagacatttaagaaattcaccaagggctctatgagaggccatacacggtggacctgactagggtgtggcttccctgaggagctgaagttncccagaggcccagagaaggggagctgagcacgtttgaaccactgaacctgctctggacctcgcctccttccttcggtgcctcccagcatcctatcctctttaaagagcagggttcagggaanccctggatggtgattcncagggcagctcccctctcacctgccgcgatgactaccccgccccatctcanacacacaagctcacgcatgcgggactggagcccttgaggacatgtggcccaaagacaggaggtacaggggctcagtgcgtgcagtggaatgaactgggcttcatctctggaagggtaaggggccatcttccgggttcaccgccgcatccccacccccggcacagcgcctcctggcgactaacatcggtgacttagtgaaaggactaagaaagacccgaggcgaggccggaacaggccgatttctagccgccaagtggagaacaggttggagcggtgcgccgggcttagcggcggttgctggaggaacgggcggagtcgcccagggtcctgccctgcgggggtcgagccgaggcaggcggtgacttccccactcggggcggagccgcagcctcgcgggggcggggcctggcgccggcggtggcgtcacaaaaggcgggaccacagtggtgtccgagaagtcaggcacgtagctcagcggcggccgcggcgcgtgcgtctgtgcctctgcgcgggtctcctggtccttctgccatcatgccgatgttcatcgtaaacaccaacgtgccccgcgcctccgtgccggacgggttcctctccgagctcacccagcagctggcgcaggccaccggcaagcccccccagtacatcgcggtgcacgtggtcccggaccagctcatggccttcggcggctccagcgagccgtgcgcgctctgcagcctgcacagcatcggcaagatcggcggcgcgcagaaccgctcctacagcaagctgctgtgcggcctgctggccgagcgcctgcgcatcagcccggacaggcagggtctacatcaactattacgacatgaacgcggccaatgtgggctggaacaactccaccttcgcctaagagccgcagggacccacgctgtctgcgctggctccacccgggaacccgccgcacgctgtgttctaggcccgcccaccccaaccttctggtggggagaaataaacggtttagagacta

SEQ ID NO: 383807 - DNA, 2128 bp, Homo sapiens
  misc_feature (10)..(10): n is a, c, g, or t
  misc_feature (198)..(198): n is a, c, g, or t
  misc_feature (202)..(202): n is a, c, g, or t
  misc_feature (206)..(206): n is a, c, g, or t
  misc_feature (228)..(228): n is a, c, g, or t
  misc_feature (378)..(378): n is a, c, g, or t
  misc_feature (500)..(500): n is a, c, g, or t
  misc_feature (517)..(517): n is a, c, g, or t
  misc_feature (568)..(568): n is a, c, g, or t
ctggtgcacngagggtcccacaggcatgggtgtccttcctatatcacatggccttcactgagactggtatatggattgcacctatcagagaccaaggacaggacctccctggaaatctctgaggacctggcctgtgatccagttgctgccttgtcctcttcctgctatgtcatggcttatcttctttcacccattcantcantcantcaattcattcagcagtattantcaatgtctcttgtaatgcctgcacctgctagatggtccccgagtttaccattactggaaaagacatttaagaaattcaccaagggctctatgagaggccatacacggtggacctgactagggtgtggcttccctgaggagctgaagttncccagaggcccagagaaggggagctgagcacgtttgaaccactgaacctgctctggacctcgcctccttccttcggtgcctcccagcatcctatcctctttaaagagcagggttcagggaanccctggatggtgattcncagggcagctcccctctcacctgccgcgatgactaccccgccccatctcanacacacaagctcacgcatgcgggactggagcccttgaggacatgtggcccaaagacaggaggtacaggggctcagtgcgtgcagtggaatgaactgggcttcatctctggaagggtaaggggccatcttccgggttcaccgccgcatccccacccccggcacagcgcctcctggcgactaacatcggtgacttagtgaaaggactaagaaagacccgaggcgaggccggaacaggccgatttctagccgccaagtggagaacaggttggagcggtgcgccgggcttagcggcggttgctggaggaacgggcggagtcgcccagggtcctgccctgcgggggtcgagccgaggcaggcggtgacttccccactcggggcggagccgcagcctcgcgggggcggggcctggcgccggcggtggcgtcacaaaaggcgggaccacagtggtgtccgagaagtcaggcacgtagctcagcggcggccgcggcgcgtgcgtctgtgcctctgcgcgggtctcctggtccttctgccatcatgccgatgttcatcgtaaacaccaacgtgccccgcgcctccgtgccggacgggttcctctccgagctcacccagcagctggcgcaggccaccggcaagcccccccaggtttgccgggaggggacaggaagaggggggtgcccaccggacgaggggttccgcgctgggagctggggaggcgactcctgaacggagctggggggcggggcggggggaggacggtggctcgggcccgaagtggacgttcggggcccgacgaggtcgctggggcgggctgaccgcgccctttcctcgcagcagtacatcgcggtgcacgtggtcccggaccagctcatggccttcggcggctccagcgagccgtgcgcgctctgcagcctgcacagcatcggcaagatcggcggcgcgcagaaccgctcctacagcaagctgctgtgcggcctgctggccgagcgcctgcgcatcagcccggaccagggtctacatcaactattacgacatgaacgcggccaatgtgggctggaacaactccaccttcgcctaagagccgcagggacccacgctgtctgcgctggctccacccgggaacccgccgcacgctgtgttctaggcccgcccaccccaaccttctggtggggagaaataaacggtttagagactaaaaaaaaaaaaaaaaaaaaaaaaaaaaaaaaaagggggggccggccctaaaaatttccccgggggggccccacatttttagagcggttacccaacgtttttttgtgtgcaaagaggggggccgccaataagaggagcgtccgctattatatatgcctaagagaacgcgtggccggcaggtttttaaccaacagtgtcgggaacggtgggaacaaagtgtgtcaccggttggagaaacctttgggagaagagggaacccataaacatcgggaggggggagaacaaaatatgtgggacacacatttactctacgaggaagaattataaggcctctaagggcacaattttaacacttttaaacggttataa

SEQ ID NO: 383808 - DNA, 1760 bp, Homo sapiens
  misc_feature (10)..(10): n is a, c, g, or t
  misc_feature (198)..(198): n is a, c, g, or t
  misc_feature (202)..(202): n is a, c, g, or t
  misc_feature (206)..(206): n is a, c, g, or t
  misc_feature (228)..(228): n is a, c, g, or t
  misc_feature (378)..(378): n is a, c, g, or t
  misc_feature (500)..(500): n is a, c, g, or t
  misc_feature (517)..(517): n is a, c, g, or t
  misc_feature (568)..(568): n is a, c, g, or t
ctggtgcacngagggtcccacaggcatgggtgtccttcctatatcacatggccttcactgagactggtatatggattgcacctatcagagaccaaggacaggacctccctggaaatctctgaggacctggcctgtgatccagttgctgccttgtcctcttcctgctatgtcatggcttatcttctttcacccattcantcantcantcaattcattcagcagtattantcaatgtctcttgtaatgcctgcacctgctagatggtccccgagtttaccattactggaaaagacatttaagaaattcaccaagggctctatgagaggccatacacggtggacctgactagggtgtggcttccctgaggagctgaagttncccagaggcccagagaaggggagctgagcacgtttgaaccactgaacctgctctggacctcgcctccttccttcggtgcctcccagcatcctatcctctttaaagagcagggttcagggaanccctggatggtgattcncagggcagctcccctctcacctgccgcgatgactaccccgccccatctcanacacacaagctcacgcatgcgggactggagcccttgaggacatgtggcccaaagacaggaggtacaggggctcagtgcgtgcagtggaatgaactgggcttcatctctggaagggtaaggggccatcttccgggttcaccgccgcatccccacccccggcacagcgcctcctggcgactaacatcggtgacttagtgaaaggactaagaaagacccgaggcgaggccggaacaggccgatttctagccgccaagtggagaacaggttggagcggtgcgccgggcttagcggcggttgctggaggaacgggcggagtcgcccagggtcctgccctgcgggggtcgagccgaggcaggcggtgacttccccactcggggcggagccgcagcctcgcgggggcggggcctggcgccggcggtggcgtcacaaaaggcgggaccacagtggtgtccgagaagtcaggcacgtagctcagcggcggccgcggcgcgtgcgtctgtgcctctgcgcgggtctcctggtccttctgccatcatgccgatgttcatcgtaaacaccaacgtgccccgcgcctccgtgccggacgggttcctctccgagctcacccagcagctggcgcaggccaccggcaagcccccccaggtttgccgggaggggacaggaagaggggggtgcccaccggacgaggggttccgcgctgggagctggggaggcgactcctgaacggagctggggggcggggcggggggaggacggtggctcgggcccgaagtggacgttcggggcccgacgaggtcgctggggcgggctgaccgcgccctttcctcgcagcagtacatcgcggtgcacgtggtcccggaccagctcatggccttcggcggctccagcgagccgtgcgcgctctgcagcctgcacagcatcggcaagatcggcggcgcgcagaaccgctcctacagcaagctgctgtgcggcctgctggccgagcgcctgcgcatcagcccggaccagggtctacatcaactattacgacatgaacgcggccaatgtgggctggaacaactccaccttcgcctaagagccgcagggacccacgctgtctgcgctggctccacccgggaacccgccgcacgctgtgttctaggcccgcccaccccaaccttctggtggggagaaataaacggtttagagacta

SEQ ID NO: 383809 - DNA, 1450 bp, Homo sapiens
  misc_feature (10)..(10): n is a, c, g, or t
  misc_feature (198)..(198): n is a, c, g, or t
  misc_feature (202)..(202): n is a, c, g, or t
  misc_feature (206)..(206): n is a, c, g, or t
  misc_feature (228)..(228): n is a, c, g, or t
  misc_feature (378)..(378): n is a, c, g, or t
  misc_feature (500)..(500): n is a, c, g, or t
  misc_feature (517)..(517): n is a, c, g, or t
  misc_feature (568)..(568): n is a, c, g, or t
ctggtgcacngagggtcccacaggcatgggtgtccttcctatatcacatggccttcactgagactggtatatggattgcacctatcagagaccaaggacaggacctccctggaaatctctgaggacctggcctgtgatccagttgctgccttgtcctcttcctgctatgtcatggcttatcttctttcacccattcantcantcantcaattcattcagcagtattantcaatgtctcttgtaatgcctgcacctgctagatggtccccgagtttaccattactggaaaagacatttaagaaattcaccaagggctctatgagaggccatacacggtggacctgactagggtgtggcttccctgaggagctgaagttncccagaggcccagagaaggggagctgagcacgtttgaaccactgaacctgctctggacctcgcctccttccttcggtgcctcccagcatcctatcctctttaaagagcagggttcagggaanccctggatggtgattcncagggcagctcccctctcacctgccgcgatgactaccccgccccatctcanacacacaagctcacgcatgcgggactggagcccttgaggacatgtggcccaaagacaggaggtacaggggctcagtgcgtgcagtggaatgaactgggcttcatctctggaagggtaaggggccatcttccgggttcaccgccgcatccccacccccggcacagcgcctcctggcgactaacatcggtgacttagtgaaaggactaagaaagacccgaggcgaggccggaacaggccgatttctagccgccaagtggagaacaggttggagcggtgcgccgggcttagcggcggttgctggaggaacgggcggagtcgcccagggtcctgccctgcgggggtcgagccgaggcaggcggtgacttccccactcggggcggagccgcagcctcgcgggggcggggcctggcgccggcggtggcgtcacaaaaggcgggaccacagtggtgtccgagaagtcaggcacgtagctcagcggcggccgcggcgcgtgcgtctgtgcctctgcgcgggtctcctggtccttctgccatcatgccgatgttcatcgtaaacaccaacgtcttcggcggctccagcgagccgtgcgcgctctgcagcctgcacagcatcggcaagatcggcggcgcgcagaaccgctcctacagcaagctgctgtgcggcctgctggccgagcgcctgcgcatcagcccggaccagggtctacatcaactattacgacatgaacgcggccaatgtgggctggaacaactccaccttcgcctaagagccgcgggacccacgctgtctgcgctggctccacccgggaacccgccgcacgctgtgttctaggcccgcccaccccaaccttctggtggggagaaataaacggtttagagacta

SEQ ID NO: 383810 - DNA, 537 bp, Homo sapiens
gcacgtagctcagcggcggccgcggcgcgtgcgtctgtgcctctgcgcgggtctcctggtccttctgccatcatgccgatgttcatcgtaaacaccaacgtgccccgcgcctccgtgccggacgggttcctctccgagctcacccagcagctggcgcaggccaccggaagcccccccagtacatcgcggtgcacgtggtcccggaccagctcatggccttcggcggctccagcgagccgtgcgcgctctgcagcctgcacagcatcggcaagatcggcggcgcgcagaaccgctcctacagcaagctgctgtgcggcctgctggccgagcgcctgcgcatcagcccggaccagggtctacatcaactattacgacatgaacgcggccaatgtgggctggaacaactccaccttcgcctaagagccgcagggacccacgctgtctgcgctggctccacccgggaacccgccgcacgctgtgttctaggcccgcccaccccaaccttctggtggggagaaataaacggtttagagacta

SEQ ID NO: 383811 - DNA, 266 bp, Homo sapiens
aataaagtcacactgaagcaataaactaccctcacctccaccaccagctttctcaggagaccccttcccattgcctgccccagacctcagggaccatggctgggtgtgtgggtctgtgctttctgcctttgcagtgtgtggtaatcgagagggtgggtcggcgcgtgctgctcatcggtgggtacagcctgatgacctgctgggggagcatcttcactgtggccctgtgcctgcaggtagctggggtggatgagggctggggggtc

SEQ ID NO: 383812 - DNA, 810 bp, Homo sapiens
gactctggcaaagaggcatctggcctggcctctcctctgcctccttagggagctcctaggtggccctcaggcctggcccctgctgctggccagctgcctggtgcccggggcgctccagctcgcctccctgcctctgctccctgaaagcccgcgctacctcctcattgactgtggagacaccgaggcctgcctggcaggtgagtctctgtccttgggctcccagactgcccttgaccaagggatgcatctccccagagtatacgggtccccatttcataggtttcatttatcaaggaaaagctatccctctctttgtgcctcaatttcatgatctgcctatacctgccttcaatcagaactctatcaagtggttgtcctaactgccaggcagcagaatggatcagacctagccactgttactcaagaactccagagcggtgcggagaaacacacgcgcacacacacggtgaaacacctgtgcaagacctcacctacccagtgccaactgggtgatggtcatcttatatcagttaactttggctacagtaagaatgcctaaggaacaatcgcaacatttctgctttaaagcaacaattatttactgcttcttttattcatgtacttgcctggctggctgcacagctctgctgatctcagctgggctagttcacagtgtggggcgggggaggggggcagtggtgaggttcagctgctggttggccggtctaggctggtctggactggagccattcagctttgctgcactttctgtcctctcacttttggtaccaacgagttagcctaggaata

SEQ ID NO: 383813 - DNA, 866 bp, Homo sapiens
gaggggggcaaatgcctcctcacgacctgtcatgggccttctgtttaggggttgatggagacacaccaggtcttggggtcttttttaatccgcaggaggccttgtcccacttcctctatgtccctttccttggtgtctgtgtctgtggggccatctacactggcctgttccttcctgagaccaaaggcaagaccttccaagagatctccaaggaattacacagactcaacttccccaggcgggcccagggccccacgtggaggagcctggaggttatccagtcaacagaactctagtcccaaaggggtggccagagccaaagccagctactgtcctgtcctctgcttcctgccagggccctggtcctcactccctcctgcattcctcatttaaggagtgtttattgagcaccctttgtgtgcagacatggctccaggtgcttagcaatcaatggtgagcgtggtattccaggctaaaggtaattaactgacagaaaatcagtaacaacataattacaggctggttgtggcagctcatgactgtaatcccagcactttgggaggccaaggtgggaggatcaattgaggccagagtttgaaaccagcctaggtaacatagtgagaccccctatctctacaaaaaattttaaacattagctgggcatggtggtatgtgctaacagctctagctactcaggaggctgaggcagcaggatcacttgagtccaagagttcaaggtagcagtaagctacaatcacaccactgcatgccagactgggtgacagagggagacttcatctctttaaaacataataataataattacagactcaggaaatgcagtgaaagaaaaatacaggttggcc

SEQ ID NO: 383814 - DNA, 587 bp, Homo sapiens
gagacctagctagtgggctggggtgtaatcggccgagcaggcacgtagctcagcggcggccgcggcgcgtgcgtctgtgcctctgcgcgggtctcctggtccttctgccatcatgccgatgttcatcgtaaacaccaacgtgccccgcgcctccgtgccggacgggttcctctccgagctcacccagcagctggcgcaggccaccggcaagcccccccagtacatcgcggtgcacgtggtcccggaccagctcatggccttcggcggctccagcgagccgtgcgcgctctgcagcctgcacagcatcggcaagatcggcggcgcgcagaaccgctcctacagcaagctgctgtgcggcctgctggccgagcgcctgcgcatcagcccggacagggtctacatcaactattacgacatgaacgcggccaatgtgggctggaacaactccaccttcgcctaagagccgcagggacccacgctgtctgcgctggctccacccgggaacccgccgcacgctgtgttctaggcccgcccaccccaaccttctggtggggagaaataaacggtttagagactaaaaaaaaaaa

SEQ ID NO: 383815 - DNA, 756 bp, Homo sapiens
  misc_feature (632)..(632): n is a, c, g, or t
ccgggcgacaacttaggctaggtcgaggctgggtgttagctcagcggcggccgcggcgcgtgcgtctgtgcctctgcgcgggtctcctggtccttctgccatcatgccgatgttcatcgtaaacaccaacgtgccccgcgcctccgtgccggacgggttcctctccgagctcacccagcagctggcgcaggccaccggcaagcccccccagtacatcgcggtgcacgtggtcccggaccagctcatggccttcggcggctccagcgagccgtgcgcgctctgcagcctgcacagcatcggcaagatcggcggcgcgcagaaccgctcctacagcaagctgctgtgcggcctgctggccgagcgcctgcgcatcagcccggacagggtctacatcaactattacgacatgaacgcggccaatgtgggctggaacaactccaccttcgcctaagagccgcagggacccacgctgtctgcgctggctccacccgggaacccgccgcacgctgtgttctaggcccgcccaccccaaccttctggtggggagaaataaacggtttagagactaaaaaaaaaaaaacaaaaaaaaaacaaaaaaaaacaaaaaaacaaacaaaaacacaaaaaaaacnacaaacaaaacaaacacaccgcggccaggcaaacataagaggcgcggcgcggggagacaaagaagcggcgacagcacaccgccgcgaccggcggtcccacaactcggcgtctcccgcacgcccc

SEQ ID NO: 383816 - DNA, 999 bp, Homo sapiens
  misc_feature (821)..(821): n is a, c, g, or t
gagacctagctagtgggctggggtgtaatcggccgagcaggcacgtagctcagcggcggccgcggcgcgtgcgtctgtgcctctgcgcgggtctcctggtccttctgccatcatgccgatgttcatcgtaaacaccaacgtgccccgcgcctccgtgccggacgggttcctctccgagctcacccagcagctggcgcaggccaccggcaagcccccccagtacatcgcggtgcacgtggtcccggaccagctcatggccttcggcggctccagcgagccgtgcgcgctctgcagcctgcacagcatcggcaagatcggcggcgcgcagaaccgctcctacagcaagctgctgtgcggcctgctggccgagcgcctgcgcatcagcccggacagggtctacatcaactattacgacatgaacgcggccaatgtgggctggaacaactccaccttcgcctaagagccgcagggacccacgctgtctgcgctggctccacccgggaacccgccgcacgctgtgttctaggcccgcccaccccaaccttctggtggggagaaataaacggtttagagactaaaaaaaaaaaaaaaacaaaaataaaaaaaaaaaaaaaactccgggggttatttttggggggggaaaaaaaaagtgatttaaaaagggcatgggcacaaagtgtttctcggcgccccatttttttggacacaagggggaaaaacacggcggggccccccaaaaagggaagcgcgataaaaattcaagaaaaccccggggttacccggtaagagtagcgcggcaaaaagcacaagacgagcgacanagaagacgcacgaacgaagcaaagagcgacaacaagggaaagaagcagcaacaaggacaacacaagacaacaggatacaaaacacaacaacaaacaacaacagagagagcaagaaagcaaacagcgaagcagacaacgagacgacagcaaacgaagagagacacagaacaccacgacc

SEQ ID NO: 383817 - DNA, 647 bp, Homo sapiens
gcacaatagctagtagaggcctggttaatcggcgagggagaagtcaggcacgtagctcagcggcggccgcggcgcgtgcgtctgtgcctctgcgcgggtctcctggtccttctgccatcatgccgatgttcatcgtaaacaccaacgtgccccgcgcctccgtgccggacgggttcctctccgagctcacccagcagctggcgcaggccaccggcaagcccccccagtacatcgcggtgcacgtggtcccggaccagctcatggccttcggcggctccagcgagccgtgcgcgctctgcagcctgcacagcatcggcaagatcggcggcgcgcagaaccgctcctacagcaagctgctgtgcggcctgctggccgagcgcctgcgcatcagcccggacagggtctacatcaactattacgacatgaacgcggccaatgtgggctggaacaactccaccttcgcctaagagccgcagggacccacgctgtctgcgctggctccacccgggaacccgccgcacgctgtgttctaggcccgcccaccccaaccttctggtggggagaaataaacggtttagagactaaaaaaaaaaaaacacaaaacacattccactggcgtcgtttaccgtcgtgctgggcccgggcgg

SEQ ID NO: 383818 - DNA, 474 bp, Homo sapiens
gcacgtagctcagcggcggccgcggcgcgtgcgtctgtgcctctgcgcgggtctcctggtccttctgccatcatgccgatgttcatcgtaaacaccaacgtgccccgcgcctccgtgccggacgggttcctctccgagctcaccccttcggcggctccagcgagccgtgcgcgctctgcagcctgcacagcatcggcaagatcggcggcgcgcagaaccgctcctacagcaagctgctgtgcggcctgctggccgagcgcctgcgcatcagcccggacagggtctacatcaactattacgacatgaacgcggccaatgtgggctggaacaactccaccttcgcctaagagccgcagggacccacgctgtctgcgctggctccacccgggaacccgccgcacgctgtgttctaggcccgcccaccccaaccttctggtggggagaaataaacggtttagagactaaaaaaaaaaa

SEQ ID NO: 383819 - DNA, 750 bp, Homo sapiens
  misc_feature (634)..(634): n is a, c, g, or t
  misc_feature (640)..(640): n is a, c, g, or t
  misc_feature (647)..(647): n is a, c, g, or t
  misc_feature (750)..(750): n is a, c, g, or t
aagcagtggtatcaacgcagagtgcccattacggccgggggcggcgcgtgcgtctgtgcctctgcgcgggtctcctggtccttctgccatcatgccgatgttcatcgtaaacaccaacgtgccccgcgcctccgtgccggacgggttcctctccgagctcacccagcagctggcgcaggccaccggcaagcccccccagtacatcgcggtgcacgtggtcccggaccagctcatggccttcggcggctccagcgagccgtgcgcgctctgcagcctgcacagcatcggcaagatcggcggcgcgcagaaccgctcctacagcaagctgctgtgcggcctgctggccgagcgcctgcgcatcagcccggaccagggtctacatcaactattacgacatgaacgcggccaatgtgggctggaacaactccaccttcgcctaagagccgcagggacccacgctgtctgcgctggctccacccgggaacccgccgcacgctgtgttctaggcccgcccaccccaaccttctggtggggagaaataaacggtttagagactagtgccgaattcggcacgagctagccgtcgcgtacctaggatgccgcgtggaagccgaaagccgacctcccgcatggncccttncggcagncgggcccctcagatgagagcttgacccaggccagcaccaatcgctcaggcaccagcaggggcacccccatctgcaggtggctcctctggtgctgcgccccggn

SEQ ID NO: 383820 - DNA, 974 bp, Homo sapiens
  misc_feature (675)..(675): n is a, c, g, or t
cgcaaagataatgatagacgaatactagtgtatgcagtagaggctgtgcttacttcgatttactgcttcgtgccatcatgccgatgttcatcgtaaacaccaacgtgccccgcgcctccgtgccggacgggttcctctccgagctcacccagcagctggcgcaggccaccggaagcccccccagtacatcgcggtgcacgtggtcccggaccagctcatggccttcggcggctccagcgagccgtgcgcgctctgcagcctgcacagcatcggcaagatcggcggcgcgcagaaccgctcctacagcaagctgctgtgcggcctgctggccgagcgcctgcgcatcagcccggaccagggtctacatcaactattacgacatgaacgcggccaatgtgggctggaacaactccaccttcgcctaagagccgcagggacccacgctgtctgcgctggctccacccgggaacccgccgcacgctgtgttctaggcccgcccaccccaaccttctggtggggagaaataaacggtttagagactaaaaaaaaaaaaaaaaaaaactggggggtttaattgggggggggaaaaggggttatggaatgggcctgggcaaaaggtgttctgggaccagtttttttgtacaaggggggaagatcggggggccccaaaagggnggggcgaaattaaatttgcgaaaaagcccggggttacctggttagtatttgttgtggcagcaaacaagggggagtacaaaacaggcacaagagcgggggcagtgaggtctggccagcagagacaacgcagggccagcatagggggacgaacagccgcgggcaagacaaaaaccacgacaagcgggtggtgtggtgccaaaaaaagccaaatacagaaggaatgtgtgcagcaggccaccactgtggatcggggacaggggcgcggacggtgcagaacgggataagagatgtgcaacggc

SEQ ID NO: 383821 - DNA, 354 bp, Homo sapiens
gcacgtagctcagcggcggccgcggcgcgtgcgtctgtgcctctgcgcgggtctcctggtccttcagcctgcacagcatcggcaagatcggcggcgcgcagaaccgctcctacagcaagctgctgtgcggcctgctggccgagcgcctgcgcatcagcccggacaggcagggtctacatcaactattacgacatgaacgcggccaatgtgggctggaacaactccaccttcgcctaagagccgcagggacccacgctgtctgcgctggctccacccgggaacccgccgcacgctgtgttctaggcccgcccaccccaaccttctggtggggagaaataaacggtttagagacta

SEQ ID NO: 383822 - DNA, 1577 bp, Homo sapiens
  misc_feature (10)..(10): n is a, c, g, or t
  misc_feature (198)..(198): n is a, c, g, or t
  misc_feature (202)..(202): n is a, c, g, or t
  misc_feature (206)..(206): n is a, c, g, or t
  misc_feature (228)..(228): n is a, c, g, or t
  misc_feature (378)..(378): n is a, c, g, or t
  misc_feature (500)..(500): n is a, c, g, or t
  misc_feature (517)..(517): n is a, c, g, or t
  misc_feature (568)..(568): n is a, c, g, or t
ctggtgcacngagggtcccacaggcatgggtgtccttcctatatcacatggccttcactgagactggtatatggattgcacctatcagagaccaaggacaggacctccctggaaatctctgaggacctggcctgtgatccagttgctgccttgtcctcttcctgctatgtcatggcttatcttctttcacccattcantcantcantcaattcattcagcagtattantcaatgtctcttgtaatgcctgcacctgctagatggtccccgagtttaccattactggaaaagacatttaagaaattcaccaagggctctatgagaggccatacacggtggacctgactagggtgtggcttccctgaggagctgaagttncccagaggcccagagaaggggagctgagcacgtttgaaccactgaacctgctctggacctcgcctccttccttcggtgcctcccagcatcctatcctctttaaagagcagggttcagggaanccctggatggtgattcncagggcagctcccctctcacctgccgcgatgactaccccgccccatctcanacacacaagctcacgcatgcgggactggagcccttgaggacatgtggcccaaagacaggaggtacaggggctcagtgcgtgcagtggaatgaactgggcttcatctctggaagggtaaggggccatcttccgggttcaccgccgcatccccacccccggcacagcgcctcctggcgactaacatcggtgacttagtgaaaggactaagaaagacccgaggcgaggccggaacaggccgatttctagccgccaagtggagaacaggttggagcggtgcgccgggcttagcggcggttgctggaggaacgggcggagtcgcccagggtcctgccctgcgggggtcgagccgaggcaggcggtgacttccccactcggggcggagccgcagcctcgcgggggcggggcctggcgccggcggtggcgtcacaaaaggcgggaccacagtggtgtccgagaagtcaggcacgtagctcagcggcggccgcggcgcgtgcgtctgtgcctctgcgcgggtctcctggtccttctgccatcatgccgatgttcatcgtaaacaccaacgtgccccgcgcctccgtgccggacgggttcctctccgagctcacccagcagctggcgcaggccaccggcaagcccccccagtacatcgcggtgcacgtggtcccggaccagctcatggccttcggcggctccagcgagccgtgcgcgctctgcagcctgcacagcatcggcaagatcggcggcgcgcagaaccgctcctacagcaagctgctgtgcggcctgctggccgagcgcctgcgcatcagcccggacagggtctacatcaactattacgacatgaacgcggccaatgtgggctggaacaactccaccttcgcctaagagccgcagggacccacgctgtctgcgctggctccacccgggaacccgccgcacgctgtgttctaggcccgcccaccccaaccttctggtggggagaaataaacggtttagagactaaaaaaaaaaa

SEQ ID NO: 383823 - DNA, 1989 bp, Homo sapiens
  misc_feature (10)..(10): n is a, c, g, or t
  misc_feature (198)..(198): n is a, c, g, or t
  misc_feature (202)..(202): n is a, c, g, or t
  misc_feature (206)..(206): n is a, c, g, or t
  misc_feature (228)..(228): n is a, c, g, or t
  misc_feature (378)..(378): n is a, c, g, or t
  misc_feature (500)..(500): n is a, c, g, or t
  misc_feature (517)..(517): n is a, c, g, or t
  misc_feature (568)..(568): n is a, c, g, or t
  misc_feature (1811)..(1811): n is a, c, g, or t
ctggtgcacngagggtcccacaggcatgggtgtccttcctatatcacatggccttcactgagactggtatatggattgcacctatcagagaccaaggacaggacctccctggaaatctctgaggacctggcctgtgatccagttgctgccttgtcctcttcctgctatgtcatggcttatcttctttcacccattcantcantcantcaattcattcagcagtattantcaatgtctcttgtaatgcctgcacctgctagatggtccccgagtttaccattactggaaaagacatttaagaaattcaccaagggctctatgagaggccatacacggtggacctgactagggtgtggcttccctgaggagctgaagttncccagaggcccagagaaggggagctgagcacgtttgaaccactgaacctgctctggacctcgcctccttccttcggtgcctcccagcatcctatcctctttaaagagcagggttcagggaanccctggatggtgattcncagggcagctcccctctcacctgccgcgatgactaccccgccccatctcanacacacaagctcacgcatgcgggactggagcccttgaggacatgtggcccaaagacaggaggtacaggggctcagtgcgtgcagtggaatgaactgggcttcatctctggaagggtaaggggccatcttccgggttcaccgccgcatccccacccccggcacagcgcctcctggcgactaacatcggtgacttagtgaaaggactaagaaagacccgaggcgaggccggaacaggccgatttctagccgccaagtggagaacaggttggagcggtgcgccgggcttagcggcggttgctggaggaacgggcggagtcgcccagggtcctgccctgcgggggtcgagccgaggcaggcggtgacttccccactcggggcggagccgcagcctcgcgggggcggggcctggcgccggcggtggcgtcacaaaaggcgggaccacagtggtgtccgagaagtcaggcacgtagctcagcggcggccgcggcgcgtgcgtctgtgcctctgcgcgggtctcctggtccttctgccatcatgccgatgttcatcgtaaacaccaacgtgccccgcgcctccgtgccggacgggttcctctccgagctcacccagcagctggcgcaggccaccggcaagcccccccagtacatcgcggtgcacgtggtcccggaccagctcatggccttcggcggctccagcgagccgtgcgcgctctgcagcctgcacagcatcggcaagatcggcggcgcgcagaaccgctcctacagcaagctgctgtgcggcctgctggccgagcgcctgcgcatcagcccggacagggtctacatcaactattacgacatgaacgcggccaatgtgggctggaacaactccaccttcgcctaagagccgcagggacccacgctgtctgcgctggctccacccgggaacccgccgcacgctgtgttctaggcccgcccaccccaaccttctggtggggagaaataaacggtttagagactaaaaaaaaaaaaaaaacaaaaataaaaaaaaaaaaaaaactccgggggttatttttggggggggaaaaaaaaagtgatttaaaaagggcatgggcacaaagtgtttctcggcgccccatttttttggacacaagggggaaaaacacggcggggccccccaaaaagggaagcgcgataaaaattcaagaaaaccccggggttacccggtaagagtagcgcggcaaaaagcacaagacgagcgacanagaagacgcacgaacgaagcaaagagcgacaacaagggaaagaagcagcaacaaggacaacacaagacaacaggatacaaaacacaacaacaaacaacaacagagagagcaagaaagcaaacagcgaagcagacaacgagacgacagcaaacgaagagagacacagaacaccacgacc

SEQ ID NO: 383824 - DNA, 1954 bp, Homo sapiens
  misc_feature (10)..(10): n is a, c, g, or t
  misc_feature (198)..(198): n is a, c, g, or t
  misc_feature (202)..(202): n is a, c, g, or t
  misc_feature (206)..(206): n is a, c, g, or t
  misc_feature (228)..(228): n is a, c, g, or t
  misc_feature (378)..(378): n is a, c, g, or t
  misc_feature (500)..(500): n is a, c, g, or t
  misc_feature (517)..(517): n is a, c, g, or t
  misc_feature (568)..(568): n is a, c, g, or t
ctggtgcacngagggtcccacaggcatgggtgtccttcctatatcacatggccttcactgagactggtatatggattgcacctatcagagaccaaggacaggacctccctggaaatctctgaggacctggcctgtgatccagttgctgccttgtcctcttcctgctatgtcatggcttatcttctttcacccattcantcantcantcaattcattcagcagtattantcaatgtctcttgtaatgcctgcacctgctagatggtccccgagtttaccattactggaaaagacatttaagaaattcaccaagggctctatgagaggccatacacggtggacctgactagggtgtggcttccctgaggagctgaagttncccagaggcccagagaaggggagctgagcacgtttgaaccactgaacctgctctggacctcgcctccttccttcggtgcctcccagcatcctatcctctttaaagagcagggttcagggaanccctggatggtgattcncagggcagctcccctctcacctgccgcgatgactaccccgccccatctcanacacacaagctcacgcatgcgggactggagcccttgaggacatgtggcccaaagacaggaggtacaggggctcagtgcgtgcagtggaatgaactgggcttcatctctggaagggtaaggggccatcttccgggttcaccgccgcatccccacccccggcacagcgcctcctggcgactaacatcggtgacttagtgaaaggactaagaaagacccgaggcgaggccggaacaggccgatttctagccgccaagtggagaacaggttggagcggtgcgccgggcttagcggcggttgctggaggaacgggcggagtcgcccagggtcctgccctgcgggggtcgagccgaggcaggcggtgacttccccactcggggcggagccgcagcctcgcgggggcggggcctggcgccggcggtggcgtcacaaaaggcgggaccacagtggtgtccgagaagtcaggcacgtagctcagcggcggccgcggcgcgtgcgtctgtgcctctgcgcgggtctcctggtccttctgccatcatgccgatgttcatcgtaaacaccaacgtgccccgcgcctccgtgccggacgggttcctctccgagctcacccagcagctggcgcaggccaccggcaagcccccccagtacatcgcggtgcacgtggtcccggaccagctcatggccttcggcggctccagcgagccgtgcgcgctctgcagcctgcacagcatcggcaagatcggcggcgcgcagaaccgctcctacagcaagctgctgtgcggcctgctggccgagcgcctgcgcatcagcccggacagggtctacatcaactattacgacatgaacgcggccaatgtgggctggaacaactccaccttcgcctaagagccgcagggacccacgctgtctgcgctggctccacccgggaacccgccgcacgctgtgttctaggcccgcccaccccaaccttctggtggggagaaataaacggtttagagactaaaaaaaaaaataaccaaacaaaaaaacaaaaaaacaacacacacacaaaccggggggcacaaggggggggggggaaaaagggcaacaaaatgtggccagcggcacacaagggtccggacccagtctcgggaaccacgcggaaaactggggcaccccaagaggagcgcataaggcgaacacgcgggtaccggttagacgggcacacttccacaggccgagcaccgcgagaacgaggggcacacacagggaggagcacaacaggagacacacgacacaacacggaagaacccaacgacacacacaagacaagaacacagacaaaaagagaagaaaagagaagagacgacgacggacccccgagacggcacgcacggctagacgagcccg

SEQ ID NO: 383825 - DNA, 1041 bp, Homo sapiens
agcgcctctttcaccactgggcgctgcgcgctgcccttccctccgcgcacaggctgccggctcaccgcttgctaatggcagccggggtctccctgggacagcaagacctccgctcaggcccctctttcgaatgctccacgccctcctgcgatctagaatgattcagggcaggatcctgctcctgaccatctgcgctgccggcattggtgggacttttcagtttggctataacctctctatcatcaatgccccgaccttgcacattcaggaattcaccaatgagacatggcaggcgcgtactggagagccactgcccgatcacctagtcctgcttatgtggtccctcatcgtgtctctgtatcccctgggaggcctctttggagcactgcttgcaggtcccttggccatcacgctgggaaggaagaagtccctcctggtgaataacatctttgtggtgtcagcagcaatcctgtttggattcagccgcaaagcaggctcctttgagatgatcatgctgggaagactgctcgtgggagtcaatgcaggtgtgagcatgaacatccagcccatgtacctgggggagagcgcccctaaggagctccgaggagctgtggccatgagctcagccatctttacggctctggggatcgtgatgggacaggtggtcggactcagtacatcgcggtgcacgtggtcccggaccagctcatggcttcggcggctccagcgagccgtgcgcgctctgcagcctgcacagcatcggcaagatcggcggcgcgcagaaccgctcctacagcaagctgctgtgcggcctgctggccgagcgcctgcgcatcagcccggacagggtctacatcaactattacgacatgaacgcggccaatgtgggctggaacaactccaccttcgcctaagagccgcagggacccacgctgtctgcgctggctccacccgggaacccgccgcacgctgtgttctaggcccgcccaccccaaccttctggtggggagaaataaacggtttagagactaaaaaaaaaaa

SEQ ID NO: 383826 - DNA, 1238 bp, Homo sapiens
ccggcagtggcgaccggcgcagggaatcgcgcagggttgcggctgaggtcagaccagcgagagacagagacccgcagacatttagtccagagactgtagcaaaggagggggacgaggggccagagccggaatttcgggggaggacttgggagcgcggcgaccagagtcgcttgctggcacttgcgagggcgaatgcaggggcttggccgagatgaccttggaccagagctcccttccggcctgcagagatgagcttggggcttagccgagtaaggagtgagcggcttttcagcctcagtgctgcggcagaggcggatggaggatgaactggagccgtccttacggcctcggacgcagattcagggcaggatcctgctcctgaccatctgcgctgccggcattggtgggacttttcagtttggctataacctctctatcatcaatgccccgaccttgcacattcaggaattcaccaatgagacatggcaggcgcgtactggagagccactgcccgatcacctagtcctgcttatgtggtccctcatcgtgtctctgtatcccctgggaggcctctttggagcactgcttgcaggtcccttggccatcacgctgggaaggaagaagtccctcctggtgaataacatctttgtggtgtcagcagcaatcctgtttggattcagccgcaaagcaggctcctttgagatgatcatgctgggaagactgctcgtgggagtcaatgcaggtgtgagcatgaacatccagcccatgtacctgggggagagcgcccctaaggagctccgaggagctgtggccatgagctcagccatctttacggctctggggatcgtgatgggacaggtggtcggactcagtacatcgcggtgcacgtggtcccggaccagctcatggcttcggcggctccagcgagccgtgcgcgctctgcagcctgcacagcatcggcaagatcggcggcgcgcagaaccgctcctacagcaagctgctgtgcggcctgctggccgagcgcctgcgcatcagcccggacagggtctacatcaactattacgacatgaacgcggccaatgtgggctggaacaactccaccttcgcctaagagccgcagggacccacgctgtctgcgctggctccacccgggaacccgccgcacgctgtgttctaggcccgcccaccccaaccttctggtggggagaaataaacggtttagagactaaaaaaaaaaa

SEQ ID NO: 383827 - DNA, 1072 bp, Homo sapiens
agcgcctctttcaccactgggcgctgcgcgctgcccttccctccgcgcacaggctgccggctcaccgcttgctaatggcagccggggtctccctgggacagcaagacctccgctcaggcccctctttcgaatgctccacgccctcctgcgatctagaatgattcagggcaggatcctgctcctgaccatctgcgctgccggcattggtgggacttttcagtttggctataacctctctatcatcaatgccccgaccttgcacattcaggaattcaccaatgagacatggcaggcgcgtactggagagccactgcccgatcacctagtcctgcttatgtggtccctcatcgtgtctctgtatcccctgggaggcctctttggagcactgcttgcaggtcccttggccatcacgctgggagcctctctttctgtgtgtttcacttcccccaaggaagaagtccctcctggtgaataacatctttgtggtgtcagcagcaatcctgtttggattcagccgcaaagcaggctcctttgagatgatcatgctgggaagactgctcgtgggagtcaatgcaggtgtgagcatgaacatccagcccatgtacctgggggagagcgcccctaaggagctccgaggagctgtggccatgagctcagccatctttacggctctggggatcgtgatgggacaggtggtcggactcagtacatcgcggtgcacgtggtcccggaccagctcatggcttcggcggctccagcgagccgtgcgcgctctgcagcctgcacagcatcggcaagatcggcggcgcgcagaaccgctcctacagcaagctgctgtgcggcctgctggccgagcgcctgcgcatcagcccggacagggtctacatcaactattacgacatgaacgcggccaatgtgggctggaacaactccaccttcgcctaagagccgcagggacccacgctgtctgcgctggctccacccgggaacccgccgcacgctgtgttctaggcccgcccaccccaaccttctggtggggagaaataaacggtttagagactaaaaaaaaaaa

SEQ ID NO: 383828 - DNA, 3564 bp, Homo sapiens
agcgcctctttcaccactgggcgctgcgcgctgcccttccctccgcgcacaggctgccggctcaccgcttgctaatggcagccggggtctccctgggacagcaagacctccgctcaggcccctctttcgaatgctccacgccctcctgcgatctagaatgattcagggcaggatcctgctcctgaccatctgcgctgccggcattggtgggacttttcagtttggctataacctctctatcatcaatgccccgaccttgcacattcaggaattcaccaatgagacatggcaggcgcgtactggagagccactgcccgatcacctagtcctgcttatgtggtccctcatcgtgtctctgtatcccctgggaggcctctttggagcactgcttgcaggtcccttggccatcacgctgggaaggaagaagtccctcctggtgaataacatctttgtggtgtcagcagcaatcctgtttggattcagccgcaaagcaggctcctttgagatgatcatgctgggaagactgctcgtgggagtcaatgcaggtgtgagcatgaacatccagcccatgtacctgggggagagcgcccctaaggagctccgaggagctgtggccatgagctcagccatctttacggctctggggatcgtgatgggacaggtggtcggactcagggagctcctaggtggccctcaggcctggcccctgctgctggccagctgcctggtgcccggggcgctccagctcgcctccctgcctctgctccctgaaagcccgcgctacctcctcattgactgtggagacaccgaggcctgcctggcagcactacggcggctccggggctccggggacttggcaggggagctggaggagctggaggaggagcgcgctgcctgccagggctgccgtgcccggcgcccatgggagctgttccagcatcgggccctgaggagacaggtgacaagcctcgtggttctgggcagtgccatggagctctgcgggaatgactcggtgtacgcctacgcctcctccgtgttccggaaggcaggagtgccggaagcgaagatccagtacgcgatcatcgggactgggagctgcgagctgctcacggcggttgttagttgtgtggtaatcgagagggtgggtcggcgcgtgctgctcatcggtgggtacagcctgatgacctgctgggggagcatcttcactgtggccctgtgcctgcagagctccttcccctggacactctacctggccatggcctgcatctttgccttcatcctcagctttggcattggccctgccggagtgacggggatcctggccacagagctgtttgaccagatggccaggcctgctgcctgcatggtctgcggggcgctcatgtggatcatgctcatcctggtcggcctgggatttccctttatcatggaggccttgtcccacttcctctatgtccctttccttggtgtctgtgtctgtggggccatctacactggcctgttccttcctgagaccaaaggcaagaccttccaagagatctccaaggaattacacagactcaacttccccaggcgggcccagggccccacgtggaggagcctggaggttatccagtcaacagaactctagtcccaaaggggtggccagagccaaagccagctactgtcctgtcctctgcttcctgccagggccctggtcctcactccctcctgcattcctcatttaaggagtgtttattgagcaccctttgtgtgcagacatggctccaggtgcttagcaatcaatggtgagcgtggtattccaggctaaaggtaattaactgacagaaaatcagtaacaacataattacaggctggttgtggcagctcatgactgtaatcccagcactttgggaggccaaggtgggaggatcaattgaggccagagtttgaaaccagcctaggtaacatagtgagaccccctatctctacaaaaaattttaaacattagctgggcatggtggtatgtgctaacagctctagctactcaggaggctgaggcagcaggatcacttgagtccaagagttcaaggtagcagtaagctacaatcacaccactgcatgccagactgggtgacagagggagacttcatctctttaaaacataataataataattacagactcaggaaatgcagtgaaagaaaaatacaggttggccaggtgaggtggctgatgcctgtaatcccagcactttgggaggccaagatgggaagattgctttgagaccagaagtttgagaccagcctgggccacatagtaagatcctgtttctaccaaaaaaaaaaaaaaaaaaaaattagctgggtgtggtggtacatgcctgtggtcccagctactcaggaggctgaaatgggaggatcacttgagcctgggaggtcgaggctgcagtgagtcctaattgagccactgcactccagcctggacaacagaaagagaccatgtttcaaaaaaaataaatacaggttgtagtgggtatgggtatgcataccaggaggcccgacctcgtctgagaggggagtggtcagaaaagaattttctgaggaattgatgtttttaatcaactttattgaggtataatttatacataaccaactgcatccattttaagtatatatttggcgagttttgagttctaagtatagttttggtgagtgtatacacttgggaaacaccaccgcgatcaagatggaacctttaccctaccccaaggcacccacatgcccatttgctatcagtaacccaccccagtcccagacctggggaaccactgacctgctttctgcctcaattggtcagatttgccttttttcagaatctgaagtcattccgtactgtatgtacacatttgtgtctggcttggctccagataaagtttttgggattcatgaatgttgttgcacgtattaggagagactcctttgtattgctgagtagtattcccctctgtggttagaccatgatttatttatccatctacctgttggtgaacattttggctgtttctaattcttggccatcatgaataaaactgctgtgaatgttcctacaataataattgtctaaacatatgtttttatttcttttgtgtcttagtccgtcgggctgctataactaagaaccacagcctgggtggcttataaacaacagaaatttatttttcatggttctggaggctgggaagtccaagatcaaggtgccagtggattcagtgtctgttgagggcccatgtcttgattcatagatggcggtcttcttgctgtgttctcctagacatggcagaaggggcaagggagctctctggggtctcttttataagggcaccaatcccattcatgcaggctctgccctcatgacctaatcacctcccaagaggcccaaaggccctacctccaagtaccatcatatgagggattaggtttcaaggtatgaacctggggaggacataaacagtcagtctagctttttgggtaaatgaattgctgggcttaataataaatgtatatttaactgtaaaaaaaaaaa

SEQ ID NO: 383829 - DNA, 4086 bp, Homo sapiens
gaatggtttaccattagaaagtttattgatgtaactgatctcattaacagattaaaggagaatacccatatgatcatcttaatagatgcacgaaaagcatgcaataaaatacctatttattataactgctaatattttgtgtttttccttaaaaatgcagtgtttttaggaattaaagttcagagcagcaaaagtcaaacaaaaaccaagtctgagcaatagagctactacagtgcccatcacagtgtctgctcaggtgacttcttaaggtcatgtccagctctatgtttctgtgaccacaaatagcatctttggcaagtctagtttcagttggtctttgtccagctcctggattcctccatgcagggcctgagaagccctgagggataaaagattaatccggttcagtggactctgtggttcctcaactccaagtgcccccagcataagtcggacctgcctctcacgcaatggatcccctggcggcaacccgagaccggttctcctacccgcattccgccaagtctctcgctctgcccaggacgcacagatgagagcgctccgaagactgagatgagcttggggcttagccgagtaaggagtgagcggcttttcagcctcagtgctgcggcagaggcggatggaggatgaactggagccgtccttacggcctcggacgcagattcagggcaggatcctgctcctgaccatctgcgctgccggcattggtgggacttttcagtttggctataacctctctatcatcaatgccccgaccttgcacattcaggaattcaccaatgagacatggcaggcgcgtactggagagccactgcccgatcacctagtcctgcttatgtggtccctcatcgtgtctctgtatcccctgggaggcctctttggagcactgcttgcaggtcccttggccatcacgctgggaaggaagaagtccctcctggtgaataacatctttgtggtgtcagcagcaatcctgtttggattcagccgcaaagcaggctcctttgagatgatcatgctgggaagactgctcgtgggagtcaatgcaggtgtgagcatgaacatccagcccatgtacctgggggagagcgcccctaaggagctccgaggagctgtggccatgagctcagccatctttacggctctggggatcgtgatgggacaggtggtcggactcagggagctcctaggtggccctcaggcctggcccctgctgctggccagctgcctggtgcccggggcgctccagctcgcctccctgcctctgctccctgaaagcccgcgctacctcctcattgactgtggagacaccgaggcctgcctggcagcactacggcggctccggggctccggggacttggcaggggagctggaggagctggaggaggagcgcgctgcctgccagggctgccgtgcccggcgcccatgggagctgttccagcatcgggccctgaggagacaggtgacaagcctcgtggttctgggcagtgccatggagctctgcgggaatgactcggtgtacgcctacgcctcctccgtgttccggaaggcaggagtgccggaagcgaagatccagtacgcgatcatcgggactgggagctgcgagctgctcacggcggttgttagttgtgtggtaatcgagagggtgggtcggcgcgtgctgctcatcggtgggtacagcctgatgacctgctgggggagcatcttcactgtggccctgtgcctgcagagctccttcccctggacactctacctggccatggcctgcatctttgccttcatcctcagctttggcattggccctgccggagtgacggggatcctggccacagagctgtttgaccagatggccaggcctgctgcctgcatggtctgcggggcgctcatgtggatcatgctcatcctggtcggcctgggatttccctttatcatggaggccttgtcccacttcctctatgtccctttccttggtgtctgtgtctgtggggccatctacactggcctgttccttcctgagaccaaaggcaagaccttccaagagatctccaaggaattacacagactcaacttccccaggcgggcccagggccccacgtggaggagcctggaggttatccagtcaacagaactctagtcccaaaggggtggccagagccaaagccagctactgtcctgtcctctgcttcctgccagggccctggtcctcactccctcctgcattcctcatttaaggagtgtttattgagcaccctttgtgtgcagacatggctccaggtgcttagcaatcaatggtgagcgtggtattccaggctaaaggtaattaactgacagaaaatcagtaacaacataattacaggctggttgtggcagctcatgactgtaatcccagcactttgggaggccaaggtgggaggatcaattgaggccagagtttgaaaccagcctaggtaacatagtgagaccccctatctctacaaaaaattttaaacattagctgggcatggtggtatgtgctaacagctctagctactcaggaggctgaggcagcaggatcacttgagtccaagagttcaaggtagcagtaagctacaatcacaccactgcatgccagactgggtgacagagggagacttcatctctttaaaacataataataataattacagactcaggaaatgcagtgaaagaaaaatacaggttggccaggtgaggtggctgatgcctgtaatcccagcactttgggaggccaagatgggaagattgctttgagaccagaagtttgagaccagcctgggccacatagtaagatcctgtttctaccaaaaaaaaaaaaaaaaaaaaattagctgggtgtggtggtacatgcctgtggtcccagctactcaggaggctgaaatgggaggatcacttgagcctgggaggtcgaggctgcagtgagtcctaattgagccactgcactccagcctggacaacagaaagagaccatgtttcaaaaaaaataaatacaggttgtagtgggtatgggtatgcataccaggaggcccgacctcgtctgagaggggagtggtcagaaaagaattttctgaggaattgatgtttttaatcaactttattgaggtataatttatacataaccaactgcatccattttaagtatatatttggcgagttttgagttctaagtatagttttggtgagtgtatacacttgggaaacaccaccgcgatcaagatggaacctttaccctaccccaaggcacccacatgcccatttgctatcagtaacccaccccagtcccagacctggggaaccactgacctgctttctgcctcaattggtcagatttgccttttttcagaatctgaagtcattccgtactgtatgtacacatttgtgtctggcttggctccagataaagtttttgggattcatgaatgttgttgcacgtattaggagagactcctttgtattgctgagtagtattcccctctgtggttagaccatgatttatttatccatctacctgttggtgaacattttggctgtttctaattcttggccatcatgaataaaactgctgtgaatgttcctacaataataattgtctaaacatatgtttttatttcttttgtgtcttagtccgtcgggctgctataactaagaaccacagcctgggtggcttataaacaacagaaatttatttttcatggttctggaggctgggaagtccaagatcaaggtgccagtggattcagtgtctgttgagggcccatgtcttgattcatagatggcggtcttcttgctgtgttctcctagacatggcagaaggggcaagggagctctctggggtctcttttataagggcaccaatcccattcatgcaggctctgccctcatgacctaatcacctcccaagaggcccaaaggccctacctccaagtaccatcatatgagggattaggtttcaaggtatgaacctggggaggacataaacagtcagtctagctttttgggtaaatgaattgctgggcttaataataaatgtatatttaactgtaaaaaaaaaaa

SEQ ID NO: 383830 - DNA, 3415 bp, Homo sapiens
agcgcctctttcaccactgggcgctgcgcgctgcccttccctccgcgcacaggctgccggctcaccgcttgctaatggcagccggggtctccctgggacagcaagacctccgctcaggcccctctttcgaatgctccacgccctcctgcgatctagaatgattcagggcaggatcctgctcctgaccatctgcgctgccggcattggtgggacttttcagtttggctataacctctctatcatcaatgccccgaccttgcacattcaggaattcaccaatgagacatggcaggcgcgtactggagagccactgcccgatcacctagtcctgcttatgtggtccctcatcgtgtctctgtatcccctgggaggcctctttggagcactgcttgcaggtcccttggccatcacgctgggaaggaagaagtccctcctggtgaataacatctttgtggtgtcagcagcaatcctgtttggattcagccgcaaagcaggctcctttgagatgatcatgctgggaagactgctcgtgggagtcaatgcaggtgtgagcatgaacatccagcccatgtacctgggggagagcgcccctaaggagctccgaggagctgtggccatgagctcagccatctttacggctctggggatcgtgatgggacaggtggtcggactcagcactacggcggctccggggctccggggacttggcaggggagctggaggagctggaggaggagcgcgctgcctgccagggctgccgtgcccggcgcccatgggagctgttccagcatcgggccctgaggagacaggtgacaagcctcgtggttctgggcagtgccatggagctctgcgggaatgactcggtgtacgcctacgcctcctccgtgttccggaaggcaggagtgccggaagcgaagatccagtacgcgatcatcgggactgggagctgcgagctgctcacggcggttgttagttgtgtggtaatcgagagggtgggtcggcgcgtgctgctcatcggtgggtacagcctgatgacctgctgggggagcatcttcactgtggccctgtgcctgcagagctccttcccctggacactctacctggccatggcctgcatctttgccttcatcctcagctttggcattggccctgccggagtgacggggatcctggccacagagctgtttgaccagatggccaggcctgctgcctgcatggtctgcggggcgctcatgtggatcatgctcatcctggtcggcctgggatttccctttatcatggaggccttgtcccacttcctctatgtccctttccttggtgtctgtgtctgtggggccatctacactggcctgttccttcctgagaccaaaggcaagaccttccaagagatctccaaggaattacacagactcaacttccccaggcgggcccagggccccacgtggaggagcctggaggttatccagtcaacagaactctagtcccaaaggggtggccagagccaaagccagctactgtcctgtcctctgcttcctgccagggccctggtcctcactccctcctgcattcctcatttaaggagtgtttattgagcaccctttgtgtgcagacatggctccaggtgcttagcaatcaatggtgagcgtggtattccaggctaaaggtaattaactgacagaaaatcagtaacaacataattacaggctggttgtggcagctcatgactgtaatcccagcactttgggaggccaaggtgggaggatcaattgaggccagagtttgaaaccagcctaggtaacatagtgagaccccctatctctacaaaaaattttaaacattagctgggcatggtggtatgtgctaacagctctagctactcaggaggctgaggcagcaggatcacttgagtccaagagttcaaggtagcagtaagctacaatcacaccactgcatgccagactgggtgacagagggagacttcatctctttaaaacataataataataattacagactcaggaaatgcagtgaaagaaaaatacaggttggccaggtgaggtggctgatgcctgtaatcccagcactttgggaggccaagatgggaagattgctttgagaccagaagtttgagaccagcctgggccacatagtaagatcctgtttctaccaaaaaaaaaaaaaaaaaaaaattagctgggtgtggtggtacatgcctgtggtcccagctactcaggaggctgaaatgggaggatcacttgagcctgggaggtcgaggctgcagtgagtcctaattgagccactgcactccagcctggacaacagaaagagaccatgtttcaaaaaaaataaatacaggttgtagtgggtatgggtatgcataccaggaggcccgacctcgtctgagaggggagtggtcagaaaagaattttctgaggaattgatgtttttaatcaactttattgaggtataatttatacataaccaactgcatccattttaagtatatatttggcgagttttgagttctaagtatagttttggtgagtgtatacacttgggaaacaccaccgcgatcaagatggaacctttaccctaccccaaggcacccacatgcccatttgctatcagtaacccaccccagtcccagacctggggaaccactgacctgctttctgcctcaattggtcagatttgccttttttcagaatctgaagtcattccgtactgtatgtacacatttgtgtctggcttggctccagataaagtttttgggattcatgaatgttgttgcacgtattaggagagactcctttgtattgctgagtagtattcccctctgtggttagaccatgatttatttatccatctacctgttggtgaacattttggctgtttctaattcttggccatcatgaataaaactgctgtgaatgttcctacaataataattgtctaaacatatgtttttatttcttttgtgtcttagtccgtcgggctgctataactaagaaccacagcctgggtggcttataaacaacagaaatttatttttcatggttctggaggctgggaagtccaagatcaaggtgccagtggattcagtgtctgttgagggcccatgtcttgattcatagatggcggtcttcttgctgtgttctcctagacatggcagaaggggcaagggagctctctggggtctcttttataagggcaccaatcccattcatgcaggctctgccctcatgacctaatcacctcccaagaggcccaaaggccctacctccaagtaccatcatatgagggattaggtttcaaggtatgaacctggggaggacataaacagtcagtctagctttttgggtaaatgaattgctgggcttaataataaatgtatatttaactgtaaaaaaaaaaa

SEQ ID NO: 383831 - DNA, 2470 bp, Homo sapiens
gaatggtttaccattagaaagtttattgatgtaactgatctcattaacagattaaaggagaatacccatatgatcatcttaatagatgcacgaaaagcatgcaataaaatacctatttattataactgctaatattttgtgtttttccttaaaaatgcagtgtttttaggaattaaagttcagagcagcaaaagtcaaacaaaaaccaagtctgagcaatagagctactacagtgcccatcacagtgtctgctcaggtgacttcttaaggtcatgtccagctctatgtttctgtgaccacaaatagcatctttggcaagtctagtttcagttggtctttgtccagctcctggattcctccatgcagggcctgagaagccctgagggataaaagattaatccggttcagtggactctgtggttcctcaactccaagtgcccccagcataagtcggacctgcctctcacgcaatggatcccctggcggcaacccgagaccggttctcctacccgcattccgccaagtctctcgctctgcccaggacgcacagatgagagcgctccgaagactgattcagggcaggatcctgctcctgaccatctgcgctgccggcattggtgggacttttcagtttggctataacctctctatcatcaatgccccgaccttgcacattcaggaattcaccaatgagacatggcaggcgcgtactggagagccactgcccgatcacctagtcctgcttatgtggtccctcatcgtgtctctgtatcccctgggaggcctctttggagcactgcttgcaggtcccttggccatcacgctgggaaggaagaagtccctcctggtgaataacatctttgtggtgtcagcagcaatcctgtttggattcagccgcaaagcaggctcctttgagatgatcatgctgggaagactgctcgtgggagtcaatgcaggtgtgagcatgaacatccagcccatgtacctgggggagagcgcccctaaggagctccgaggagctgtggccatgagctcagccatctttacggctctggggatcgtgatgggacaggtggtcggactcagggagctcctaggtggccctcaggcctggcccctgctgctggccagctgcctggtgcccggggcgctccagctcgcctccctgcctctgctccctgaaagcccgcgctacctcctcattgactgtggagacaccgaggcctgcctggcagcactacggcggctccggggctccggggacttggcaggggagctggaggagctggaggaggagcgcgctgcctgccagggctgccgtgcccggcgcccatgggagctgttccagcatcgggccctgaggagacaggtgacaagcctcgtggttctgggcagtgccatggagctctgcgggaatgactcggtgtacgcctacgcctcctccgtgttccggaaggcaggagtgccggaagcgaagatccagtacgcgatcatcgggactgggagctgcgagctgctcacggcggttgttagttgtgtggtaatcgagagggtgggtcggcgcgtgctgctcatcggtgggtacagcctgatgacctgctgggggagcatcttcactgtggccctgtgcctgcagagctccttcccctggacactctacctggccatggcctgcatctttgccttcatcctcagctttggcattggccctgccggagtgacggggatcctggccacagagctgtttgaccagatggccaggcctgctgcctgcatggtctgcggggcgctcatgtggatcatgctcatcctggtcggcctgggatttccctttatcatggaggccttgtcccacttcctctatgtccctttccttggtgtctgtgtctgtggggccatctacactggcctgttccttcctgagaccaaaggcaagaccttccaagagatctccaaggaattacacagactcaacttccccaggcgggcccagggccccacgtggaggagcctggaggttatccagtcaacagaactctagtcccaaaggggtggccagagccaaagccagctactgtcctgtcctctgcttcctgccagggccctggtcctcactccctcctgcattcctcatttaaggagtgtttattgagcaccctttgtgtgcagacatggctccaggtgcttagcaatcaatggtgagcgtggtattccaggctaaaggtaattaactgacagaaaatcagtaacaacatgttctcacttaaaagtgaaagctaaatgatgagaactcatggacacatgagaggggaacaacacacactgggacctagttgagagtggaggttaggaggagggagaggattgggaaaaataactaatgggtactaggcttaatacctgggtgatgaaacaatcggtgcaacaaacccacatgacacaagtttacctatgcacaagcactaccaac

SEQ ID NO: 383832 - DNA, 1860 bp, Homo sapiens
  misc_feature (10)..(10): n is a, c, g, or t
  misc_feature (198)..(198): n is a, c, g, or t
  misc_feature (202)..(202): n is a, c, g, or t
  misc_feature (206)..(206): n is a, c, g, or t
  misc_feature (228)..(228): n is a, c, g, or t
  misc_feature (378)..(378): n is a, c, g, or t
  misc_feature (500)..(500): n is a, c, g, or t
  misc_feature (517)..(517): n is a, c, g, or t
  misc_feature (568)..(568): n is a, c, g, or t
  misc_feature (1661)..(1661): n is a, c, g, or t
ctggtgcacngagggtcccacaggcatgggtgtccttcctatatcacatggccttcactgagactggtatatggattgcacctatcagagaccaaggacaggacctccctggaaatctctgaggacctggcctgtgatccagttgctgccttgtcctcttcctgctatgtcatggcttatcttctttcacccattcantcantcantcaattcattcagcagtattantcaatgtctcttgtaatgcctgcacctgctagatggtccccgagtttaccattactggaaaagacatttaagaaattcaccaagggctctatgagaggccatacacggtggacctgactagggtgtggcttccctgaggagctgaagttncccagaggcccagagaaggggagctgagcacgtttgaaccactgaacctgctctggacctcgcctccttccttcggtgcctcccagcatcctatcctctttaaagagcagggttcagggaanccctggatggtgattcncagggcagctcccctctcacctgccgcgatgactaccccgccccatctcanacacacaagctcacgcatgcgggactggagcccttgaggacatgtggcccaaagacaggaggtacaggggctcagtgcgtgcagtggaatgaactgggcttcatctctggaagggtaaggggccatcttccgggttcaccgccgcatccccacccccggcacagcgcctcctggcgactaacatcggtgacttagtgaaaggactaagaaagacccgaggcgaggccggaacaggccgatttctagccgccaagtggagaacaggttggagcggtgcgccgggcttagcggcggttgctggaggaacgggcggagtcgcccagggtcctgccctgcgggggtcgagccgaggcaggcggtgacttccccactcggggcggagccgcagcctcgcgggggcggggcctggcgccggcggtggcgtcacaaaaggcgggaccacagtggtgtccgagaagtcaggcacgtagctcagcggcggccgcggcgcgtgcgtctgtgcctctgcgcgggtctcctggtccttctgccatcatgccgatgttcatcgtaaacaccaacgtgccccgcgcctccgtgccggacgggttcctctccgagctcacccagcagctggcgcaggccaccggcaagcccccccaggtttgccgggaggggacaggaagaggggggtgcccaccggacgaggggttccgcgctgggagctggggaggcgactcctgaacggagctggggggcggggcggggggaggacggtggctcgggcccgaagtggacgttcggggcccgacgaggtcgctggggcgggctgaccgcgccctttcctcgcagtacatcgcggtgcacgtggtcccggaccagctcatggcttcggcggctccagcgagccgtgcgcgctctgcagcctgcacagcatcggcaagatcggcggcgcgcagaaccgctcctacagcaagctgctgtgcggcctgctggccgagcgcctgcgcatcagcccggacaggtacgcggagtcgcggaggggcgggggaggggcggcggcgcgcggccaggcccgggactgagccacccgctgagtccggcctcctccccncgcagggtctacatcaactattacgacatgaacgcggccaatgtgggctggaacaactccaccttcgcctaagagccgcagggacccacgctgtctgcgctggctccacccgggaacccgccgcacgctgtgttctaggcccgcccaccccaaccttctggtggggagaaataaacggtttagagactaaaaaaaaaaa

SEQ ID NO: 383833 - DNA, 1219 bp, Homo sapiens
  misc_feature (1095)..(1095): n is a, c, g, or t
agcgcctctttcaccactgggcgctgcgcgctgcccttccctccgcgcacaggctgccggctcaccgcttgctaatggcagccggggtctccctgggacagcaagacctccgctcaggcccctctttcgaatgctccacgccctcctgcgatctagaatgattcagggcaggatcctgctcctgaccatctgcgctgccggcattggtgggacttttcagtttggctataacctctctatcatcaatgccccgaccttgcacattcaggaattcaccaatgagacatggcaggcgcgtactggagagccactgcccgatcacctagtcctgcttatgtggtccctcatcgtgtctctgtatcccctgggaggcctctttggagcactgcttgcaggtcccttggccatcacgctgggaaggaagaagtccctcctggtgaataacatctttgtggtgtcagcagcaatcctgtttggattcagccgcaaagcaggctcctttgagatgatcatgctgggaagactgctcgtgggagtcaatgcaggtgtgagcatgaacatccagcccatgtacctgggggagagcgcccctaaggagctccgaggagctgtggccatgagctcagccatctttacggctctggggatcgtgatgggacaggtggtcggactcagtacatcgcggtgcacgtggtcccggaccagctcatggcttcggcggctccagcgagccgtgcgcgctctgcagcctgcacagcatcggcaagatcggcggcgcgcagaaccgctcctacagcaagctgctgtgcggcctgctggccgagcgcctgcgcatcagcccggacagggtctacatcaactattacgacatgaacgcggccaatgtgggctggaacaactccaccttcgcctaagagccgcagggacccacgctgtctgcgctggctccacccgggaacccgccgcacgctgtgttctaggcccgcccaccccaaccttctggtggggagaaataaacggtttagagactaaaaaaaaaaaaacaaaaaaaaaacaaaaaaaaacaaaaaaacaaacaaaaacacaaaaaaaacnacaaacaaaacaaacacaccgcggccaggcaaacataagaggcgcggcgcggggagacaaagaagcggcgacagcacaccgccgcgaccggcggtcccacaactcggcgtctcccgcacgcccc

SEQ ID NO: 383834 - DNA, 1710 bp, Homo sapiens
  misc_feature (10)..(10): n is a, c, g, or t
  misc_feature (198)..(198): n is a, c, g, or t
  misc_feature (202)..(202): n is a, c, g, or t
  misc_feature (206)..(206): n is a, c, g, or t
  misc_feature (228)..(228): n is a, c, g, or t
  misc_feature (378)..(378): n is a, c, g, or t
  misc_feature (500)..(500): n is a, c, g, or t
  misc_feature (517)..(517): n is a, c, g, or t
  misc_feature (568)..(568): n is a, c, g, or t
ctggtgcacngagggtcccacaggcatgggtgtccttcctatatcacatggccttcactgagactggtatatggattgcacctatcagagaccaaggacaggacctccctggaaatctctgaggacctggcctgtgatccagttgctgccttgtcctcttcctgctatgtcatggcttatcttctttcacccattcantcantcantcaattcattcagcagtattantcaatgtctcttgtaatgcctgcacctgctagatggtccccgagtttaccattactggaaaagacatttaagaaattcaccaagggctctatgagaggccatacacggtggacctgactagggtgtggcttccctgaggagctgaagttncccagaggcccagagaaggggagctgagcacgtttgaaccactgaacctgctctggacctcgcctccttccttcggtgcctcccagcatcctatcctctttaaagagcagggttcagggaanccctggatggtgattcncagggcagctcccctctcacctgccgcgatgactaccccgccccatctcanacacacaagctcacgcatgcgggactggagcccttgaggacatgtggcccaaagacaggaggtacaggggctcagtgcgtgcagtggaatgaactgggcttcatctctggaagggtaaggggccatcttccgggttcaccgccgcatccccacccccggcacagcgcctcctggcgactaacatcggtgacttagtgaaaggactaagaaagacccgaggcgaggccggaacaggccgatttctagccgccaagtggagaacaggttggagcggtgcgccgggcttagcggcggttgctggaggaacgggcggagtcgcccagggtcctgccctgcgggggtcgagccgaggcaggcggtgacttccccactcggggcggagccgcagcctcgcgggggcggggcctggcgccggcggtggcgtcacaaaaggcgggaccacagtggtgtccgagaagtcaggcacgtagctcagcggcggccgcggcgcgtgcgtctgtgcctctgcgcgggtctcctggtccttctgccatcatgccgatgttcatcgtaaacaccaacgtgccccgcgcctccgtgccggacgggttcctctccgagctcacccagcagctggcgcaggccaccggcaagcccccccagtacatcgcggtgcacgtggtcccggaccagctcatggccttcggcggctccagcgagccgtgcgcgctctgcagcctgcacagcatcggcaagatcggcggcgcgcagaaccgctcctacagcaagctgctgtgcggcctgctggccgagcgcctgcgcatcagcccggacaggcagggtctacatcaactattacgacatgaacgcggccaatgtgggctggaacaactccaccttcgcctaagagccgcagggacccacgctgtctgcgctggctccacccgggaacccgccgcacgctgtgttctaggcccgcccaccccaaccttctggtggggagaaataaacggtttagagactacagacacctcggggggggcgcggtaccaattcgcctatagtgagtcgtttacaatccctggccgcgtttacacgtcgtgctggagaacctgggttaccacttatcgctggagtcccttggcagggggtatgcgaggccg

SEQ ID NO: 383835 - DNA, 1057 bp, Homo sapiens
agcgcctctttcaccactgggcgctgcgcgctgcccttccctccgcgcacaggctgccggctcaccgcttgctaatggcagccggggtctccctgggacagcaagacctccgctcaggcccctctttcgaatgctccacgccctcctgcgatctagaatgattcagggcaggatcctgctcctgaccatctgcgctgccggcattggtgggacttttcagtttggctataacctctctatcatcaatgccccgaccttgcacattcaggaattcaccaatgagacatggcaggcgcgtactggagagccactgcccgatcacctagtcctgcttatgtggtccctcatcgtgtctctgtatcccctgggaggcctctttggagcactgcttgcaggtcccttggccatcacgctgggaaggaagaagtccctcctggtgaataacatctttgtggtgtcagcagcaatcctgtttggattcagccgcaaagcaggctcctttgagatgatcatgctgggaagactgctcgtgggagtcaatgcaggtgtgagcatgaacatccagcccatgtacctgggggagagcgcccctaaggagctccgaggagctgtggccatgagctcagccatctttacggctctggggatcgtgatgggacaggtggtcggactcagcactacggcggctccggggctccggggacttggcaggggagctggaggagctggaggaggagcgcgctgcctgccagggctgccgtgcccggcgcccatgggagctgttccagcatcgggccctgaggagacaggtgacaagcctcgtggttctgggcagtgccatggagctctgcgggaatgactcggtgtacgcctacgcctcctccgtgttccggaaggcaggagtgccggaagcgaagatccagtacgcgatcatcgggactgggagctgcgagctgctcacggcggttgttagtgtgagtctggagggtgcccttcctccaccagccctgtggggagggacccccaggtcctctgcattaaaccagtttacactcca

SEQ ID NO: 383836 - DNA, 743 bp, Homo sapiens
  misc_feature (56)..(56): n is a, c, g, or t
cggaacgccgctagaggccgtcatgagtgccggtggaaggctcttaagggcgtgcntctgtgcctctgcgcgggtctcctggtccttctgccatcatgccgatgttcatcgtaaacaccaacgtgccccgcgcctccgtgccggacgggttcctctccgagctcacccagcagctggcgcaggccaccggcaagcccccccagcagtacatcgcggtgcacgtggtcccggaccagctcatggccttcggcggctccagcgagccgtgcgcgctctgcagcctgcacagcatcggcaagatcggcggcgcgcagaaccgctcctacagcaagctgctgtgcggcctgctggccgagcgcctgcgcatcagcccggaccagggtctacatcaactattacgacatgaacgcggccaatgtgggctggaacaactccaccttcgcctaagagccgcagggacccacgctgtctgcgctggctccacccgggaacccgccgcacgctgtgttctaggcccgcccaccccaaccttctggtggggagaaataaacggtttagagactaaaaaaaaacaaaaaaaaaaaaaaaaaaaaaacaaaaaacccgcggggcgtctttttgggggggcgcgaaaaaaaggttttaaagtgggcagtggtctatgttttttctgacccgttttttttccacagtggaaaatgggggcccctaaagggcgattattcgaaaccgttacttactcg

SEQ ID NO: 383837 - DNA, 565 bp, Homo sapiens
atctggtgatgggaatgggatgggagctggggccttcctaggagctggagcccagccaggtgagggcagctggaccacactgggattctagaagacacagggaagaaccaggggatatcagaggtccagaaggcagaaagtttatttctgggggaggacaggggatgggtggggtccgtgagcccctgctctcctctcccctatcttgactgtctcctccatgctagaaccacaaacgtgcttccctgcttgcctccgcgtgccatgcaaggggcttgctgaccagggtgggagtggcatgggcctgcagccaccacccagcacctcattcattcatttggcaaacatcaatgaggccatgtgccagggaccatgttcccaacaggagaaatcatgagaagaaaacagactcgatcaacgcctgccctcagggagggcatcacttggtgaccgcctagcgggggaaccacatccaagttaggggccttgtgcatggaaaagaacacttcattctttgtgttttcatttataatcgatttattaaagttgttagataaaaatctca

SEQ ID NO: 383838 - DNA, 491 bp, Homo sapiens
aggcagcaatggccagctggggaatggctacggaggccgctgccctctggggaaatgctgagcactgcaatgcccctcgcctgcccagcaaggaagacagacccttgggcttggcctctggtgctgcctggccgggggtctcctccatgctagaaccacaaacgtgcttccctgcttgcctccgcgtgccatgcaaggggcttgctgaccagggtgggagtggcatgggcctgcagccaccacccagcacctcattcattcatttggcaaacatcaatgaggccatgtgccagggaccatgttcccaacaggagaaatcatgagaagaaaacagactcgatcaacgcctgccctcagggagggcatcacttggtgaccgcctagcgggggaaccacatccaagttaggggccttgtgcatggaaaagaacacttcattctttgtgttttcatttataatcgatttattaaagttgttagataaaaatctca

SEQ ID NO: 383839 - DNA, 335 bp, Homo sapiens
cctcagagactgctggtaaagtccagaaatatgaggacctcattgcccacagaaaggctcagttaagaaagtcaagaggacaagtgaaaacaagagtgagggtgaggatcaacctgagcctgagccgggaagaccagaggcatccaaccagccttaggtcccacactgtggactcacaccaccactaagaaacatttgggatttccgacactcaaaaagtgacttcgtattggcatgctctatatgctgtcacatcatgcccttgtcacaaagacaaaagctctggtgggaaacacaaagcctcttcagaagccctattcagcctgcacttgcca

SEQ ID NO: 383840 - DNA, 317 bp, Homo sapiens
gcacgaggcacagggggcttttgtggcagcagaactattctatatgatatagtaatggtggatacatgacattatacgtttgtcaaaatctgtagactcatgccatggagtgaaccctaatgtaaaaatctatggattttaggtaataataatatcagttcatcagttataacaaatataacactctgagatatattgttaataggggaaattgtgcaagagtggggtggaggaaaggtcctgtgagaactctctgtactttctgtgtagtttttctataaagctaaaactgctctaaaaatactaagtctatttaa

SEQ ID NO: 383841 - DNA, 633 bp, Homo sapiens
aaacatgactgaattatatatccaagcttttaattctgttattgccctttgaaggatgatcacttttaaagtgttttttcctccattgggaaatttgtctgcttttggtaaattttcatagttcaatttgagtatgtatattatttttccatggaatactgagggttttatgcttttgaagaaatgatttaaagtttaaaatttctttctctacattgatctgctggttttaattctttgaatagcacttatgatcatttgatgctgttcttttttgttacttgattattcatctttctctccttagaatgtaagttctaaaagggcagcacatgttcttgatctttgccaaatctgtagtgtctcctgtagtagaacagatgctcgataaatatttgttgagttaatgaatgaacaatttaaaagattgtgagctgggcgcggtggcttacgcctgtaatcccagcactttgggaggccgaggcgggcagatcatgaggtcaggagatcgagaccatcctgtctaacacagtgaaaccccatctctactaaaaatactaaaaaattagcggggcatggtggcatgcgctgtagttccagctacttgggagcctgaggcaggagaatggcatg

SEQ ID NO: 383842 - DNA, 437 bp, Homo sapiens
aaagaaattctcccagattttggtcaccatgaaagagcgcaggcttcactgattcactttcaaaggctatattatcttgattctttgctgtcaaaaatagttgaaaccggttgagaaggagggtggccacaaacaggtccataattagcatgtttggtagcaaaaggtgggaaaggtcatcatcatcgttgtgcagggactgcctttgggatgacaagtcataatatgtgacaagtgttaagtatttacaacatcggacacatccctaagcaggctcatacattccctccctattctgcaaaccaacctagaaaggtaagtattgccatcaacattttgctaatgtgtaaacagggcattaaaagttatttaaggccacgtgcggtggctcacgcctgtaatcccagcactttgggaggctgaggcaggcggattac

SEQ ID NO: 383843 - DNA, 633 bp, Homo sapiens
ctgggcaattttataggtagaataaagtcaaataattatatgttcagaaaaaaaagatattctagaactgtcagtttgtacagaatgtatgtgtttagatacagactgagataatttgcatactaaaagagctcatgaccctgctcttgctagggcacgtgtttattataattaagaatgttttcctttatggagcacatgcacacaggcacccgttgaaagtgccaggctcgccactgccttaggtcccctattactctgcctggagtgctcttcctcactccctcccaccttcccccatcttgacctgactgatacttttatattcctcagttcagctcattggtcacctcttcagagaggtcatcccagacaacccttcctaaaatagttctccaagctctgtcatcattctccatcccattagcctgttttacatttgccattatctgaaataatcttacttatatgttttttacttgtttctcctcactagaatgtaatttctgtgaggttagagaccttgtctgtcttgttcaacactgtatccctaattgtagaatggcggatctttaatgaatattggtttaatgaattaatttaacttttttacattaaatgttaatcttagtt

SEQ ID NO: 383844 - DNA, 333 bp, Homo sapiens
agtgactttcagatacagcaacctagtctatgttatagaacattctaaaaagagcagattttaatatctttcctcccacacttgctttgactccctcctttagtaattagataattatgtataataagcacattaattatgtgcaacagctgccattgagtgtgtgcatgtacaactgcttgaaaacagcttgtgagttcactattaggtccatgaaatttttctccttggcaggttttcactattagtttgcttgacaaaggatagatacattttccatgtgtggaggtaaaagcagtgcagtgagctaaaaagttagcaaaggtgaagtgg

SEQ ID NO: 383845 - DNA, 310 bp, Homo sapiens
gacacgccttacatggcaccaggcaagagagtgtgtgttagggaactgccctttataagaccatcagatctcatgagacttattcactgtcatgagaatagcatgggaaaatcctgccccagtgatttggttacctcccactgggtccctcccacaacacgtggggattataggagctacaattgaagatgaaatttgggtagggacacagccaaagcatatcagtggttaaatgcatttgttggaagccttctggttccaaccaatatgaagtaacaggaactgaatttacattttcatctgaaacaga

SEQ ID NO: 383846 - DNA, 426 bp, Homo sapiens
aggtcagtatgtgattcgggcgagtgagaggaggaatgttactttgcttttctgtttcaaatatccaagggactgagtgaaaagatatttgcaaaacctgaagaacaaagaaaaacactggaagaagatgtagatgacagagcaccttccaaaaagggaaagaagcggaaggcacaaagggaagaggaacaggaacattcaaataaagctcccagggcgcttacatcaaaagaacggaggcgagcagtacgacagcaacggccgaaaaaagttggtgtgcgctactatgaaacacacaacgtgaaaaataggaacaggaacaaaaagaagaccaatgactcagagggacagaaacacaaacgcaaaaaattcagacaaaagcagtaatgtttaaaaggtttttattaaattatacaaaaacaggca

SEQ ID NO: 383847 - DNA, 918 bp, Homo sapiens
atgctctcttttctactttcttgaaagggtggtatttcgtttttattggtaatgaatgatttggaatagaagcatacagaactgcaaatttcaaggacgttagtgtacatggcctggcctttgaaatacaaggagaaagttgggtgcagaagaaataggagaaaactacaataatttctgcctcattgagtctgtgaagtagacccacttatggcacatacgttcctgtcttagaggcctggaactagcagatctcgtggaaagagttctttcccatggaaatgacaacacaggcaggtcatttgagtggaggcttaaaattcctcaggatactggatcagggtaaaagctgctccttagattccagatgagaatgtgtatggtgtgttcagcatagggaacacagcttttctggggaaatgacagtgcttccattgtgagccttgaagctcactgaacccaagacggatggcaggtggaagctctgctaaggagaggcccttcttacgcctctttctggggaacctgagcatgttagtgccttttaggtaatgttacttgtgcagcctaactgaaggatgaagtcctccagcttaccaccctagcccaccctggcttgccccgaactaaagatttatgtcactcattcaatcttctgggtctacaaaaccaggagaatggaagagaaatactaaaatgcagttgtctagcagccgtactccaattattagtcattagacctgcatgtgagatttagttacctcttcagttgttaattaacatcactacttcggggagtgcagagtcagggcttgattttctgcaggataaggggaacagatctgtgctgggggaagagctgagttgcagacaactcacaaaggccactgtgactagtattcctttctggcaaacatt

SEQ ID NO: 383848 - DNA, 2362 bp, Homo sapiens
gacgtacgtcgtgcacacgtggtccggcgtggttcaggcgggtgtcttcggccgggcttgggaacataaaagtttgtttcaccacgtaagccggacctcgcactccggtcccggtctcgtcgccaagatggtgaagcccaagtacaaaggacggagcaccatcaacccgtccaaggccagcacaaacccagatcgagtgcagggagcaggaggccaaaacatgagggaccgggccaccatccggcgcctgaatatgtataggcaaaaggagcgcaggaacagtcgtggtaaaataattaaacccctgcaatatcaatcaacggtggcttctggcacagtggcaagagtagagccaaatattaaatggtttggaaacacacgtgtgattaagcagtcatcattacaaaaatttcaagaggaaatggatacagttatgaaggatccatacaaagttgtcatgaagcaaagcaagttaccaatgtctcttctccatgatcgaatccggcctcataacttgaaggtgcacattcttgatactgaaagttttgaaactacatttggccctaagtcacagaggaaacgaccaaacttatttgcaagtgatatgcagtctcttatcgaaaatgctgaaatgtccactgagagctatgaccagggcaaggatcgtgatttggtaactgaagacactggtgtgagaaatgaagctcaagaagagatctataaaaagggacagtccaaaagaatatggggtgagctctacaaggtgatagattcatcagatgttgtagttcaagttcttgatgctagagatccaatgggtactcgttcccctcacattgaaacttacctgaagaaggaaaaaccttggaaacacctcatttttgtacttaacaaatgtgaccttgttccaacctgggcaacaaaacggtgggttgctgtcctctcccaggattatccaacacttgctttccatgcaagccttactaacccgtttggcaagggagcattcattcagcttctgcggcagtttggaaagttgcacactgacaagaaacagatcagtgttgggttcattggctatccaaatgttggcaagagctctgtgataaatacattgcgttctaagaaagtttgcaacgtggctcccattgcaggtgaaacaaaggtctggcagtatattactttgatgcgtcggatattcctgattgactgtccaggtgtggtttacccctctgaggactccgagacagacattgtgctaaaaggagttgttcaagtagaaaaaattaagagtcctgaagaccacattggtgctgtacttgaacgagcaaagccagaatatatcagcaaaacatacaagattgattcttgggagaatgctgaggactttcttgagaagctcgctttccggactgggaagttactaaagggtggagagcccgacttgcagactgtgggtaagatggtcctcaatgactggcagaggggccggattcctttctttgtcaagccacccaatgcagagccacttgtggccccccagcttctaccctcctcatctttggaagttgtcccagaagcagcccagaacaatccaggggaggaagtcacagaaactgcaggtgaagggtcagaatccatcattaaggaagaaacagaagagaacagtcactgtgatgctaacacagagatgcagcagattctcacacgagttcggcagaactttggtaaaatcaacgtggtgcctcagttttctggggatgacctggttcctgtggaggtgtcagatcttgaggaagagcttgagagcttttctgatgaagaggaggaggaacaggagcaacaaagagatgatgcggaagagtcttcctcggagcctgaggaggaaaatgtgggaaacgacaccaaagccgttattaaagcactggatgagaagattgccaaatatcagaagtttctagacaaagccaaagccaaaaagttttcagcagtcagaatatccaagggactgagtgaaaagatatttgcaaaacctgaagaacaaagaaaaacactggaagaagatgtagatgacagagcaccttccaaaaagggaaagaagcggaaggcacaaagggaagaggaacaggaacattcaaataaagctcccagggcgcttacatcaaaagaacggaggcgagcagtacgacagcaacggccgaaaaaagttggtgtgcgctactatgaaacacacaacgtgaaaaataggaacaggaacaaaaagaagaccaatgactcagagggacagaaacacaaacgcaaaaaattcagacaaaagcagtaatgtttaaaaggtttttattaaattatacaaaaacaggca

SEQ ID NO: 383849 - DNA, 2406 bp, Homo sapiens
aaagaggacaagaaaacttatttggactaagtagcgaggcccgtggggtgtgttatatcttcaggcacgagggtggttcaggcgggtgtcttcggccgggcttgggaacataaaagtttgtttcaccacgtaagccggacctcgcactccggtcccggtctcgtcgccaagatggtgaagcccaagtacaaaggacggagcaccatcaacccgtccaaggccagcacaaacccagatcgagtgcagggagcaggaggccaaaacatgagggaccgggccaccatccggcgcctgaatatgtataggcaaaaggagcgcaggaacagtcgtggtaaaataattaaacccctgcaatatcaatcaacggtggcttctggcacagtggcaagagtagagccaaatattaaatggtttggaaacacacgtgtgattaagcagtcatcattacaaaaatttcaagaggaaatggatacagttatgaaggatccatacaaagttgtcatgaagcaaagcaagttaccaatgtctcttctccatgatcgaatccggcctcataacttgaaggtgcacattcttgatactgaaagttttgaaactacatttggccctaagtcacagaggaaacgaccaaacttatttgcaagtgatatgcagtctcttatcgaaaatgctgaaatgtccactgagagctatgaccagggcaaggatcgtgatttggtaactgaagacactggtgtgagaaatgaagctcaagaagagatctataaaaagggacagtccaaaagaatatggggtgagctctacaaggtgatagattcatcagatgttgtagttcaagttcttgatgctagagatccaatgggtactcgttcccctcacattgaaacttacctgaagaaggaaaaaccttggaaacacctcatttttgtacttaacaaatgtgaccttgttccaacctgggcaacaaaacggtgggttgctgtcctctcccaggattatccaacacttgctttccatgcaagccttactaacccgtttggcaagggagcattcattcagcttctgcggcagtttggaaagttgcacactgacaagaaacagatcagtgttgggttcattggctatccaaatgttggcaagagctctgtgataaatacattgcgttctaagaaagtttgcaacgtggctcccattgcaggtgaaacaaaggtctggcagtatattactttgatgcgtcggatattcctgattgactgtccaggtgtggtttacccctctgaggactccgagacagacattgtgctaaaaggagttgttcaagtagaaaaaattaagagtcctgaagaccacattggtgctgtacttgaacgagcaaagccagaatatatcagcaaaacatacaagattgattcttgggagaatgctgaggactttcttgagaagctcgctttccggactgggaagttactaaagggtggagagcccgacttgcagactgtgggtaagatggtcctcaatgactggcagaggggccggattcctttctttgtcaagccacccaatgcagagccacttgtggccccccagcttctaccctcctcatctttggaagttgtcccagaagcagcccagaacaatccaggggaggaagtcacagaaactgcaggtgaagggtcagaatccatcattaaggaagaaacagaagagaacagtcactgtgatgctaacacagagatgcagcagattctcacacgagttcggcagaactttggtaaaatcaacgtggtgcctcagttttctggggatgacctggttcctgtggaggtgtcagatcttgaggaagagcttgagagcttttctgatgaagaggaggaggaacaggagcaacaaagagatgatgcggaagagtcttcctcggagcctgaggaggaaaatgtgggaaacgacaccaaagccgttattaaagcactggatgagaagattgccaaatatcagaagtttctagacaaagccaaagccaaaaagttttcagcagtcagaatatccaagggactgagtgaaaagatatttgcaaaacctgaagaacaaagaaaaacactggaagaagatgtagatgacagagcaccttccaaaaagggaaagaagcggaaggcacaaagggaagaggaacaggaacattcaaataaagctcccagggcgcttacatcaaaagaacggaggcgagcagtacgacagcaacggccgaaaaaagttggtgtgcgctactatgaaacacacaacgtgaaaaataggaacaggaacaaaaagaagaccaatgactcagagggacagaaacacaaacgcaaaaaattcagacaaaagcagtaatgtttaaaaggtttttattaaattatacaaaaacaggca

SEQ ID NO: 383850 - DNA, 3504 bp, Homo sapiens
gacgtacgtcgtgcacacgtggtccggcgtggttcaggcgggtgtcttcggccgggcttgggaacataaaagtttgtttcaccacgtaagccggacctcgcactccggtcccggtctcgtcgccaagatggtgaagcccaagtacaaaggacggagcaccatcaacccgtccaaggccagcacaaacccagatcgagtgcagggagcaggaggccaaaacatgagggaccgggccaccatccggcgcctgaatatgtataggcaaaaggagcgcaggaacagtcgtggtaaaataattaaacccctgcaatatcaatcaacggtggcttctggcacagtggcaagagtagagccaaatattaaatggtttggaaacacacgtgtgattaagcagtcatcattacaaaaatttcaagaggaaatggatacagttatgaaggatccatacaaagttgtcatgaagcaaagcaagttaccaatgtctcttctccatgatcgaatccggcctcataacttgaaggtgcacattcttgatactgaaagttttgaaactacatttggccctaagtcacagaggaaacgaccaaacttatttgcaagtgatatgcagtctcttatcgaaaatgctgaaatgtccactgagagctatgaccagggcaaggatcgtgatttggtaactgaagacactggtgtgagaaatgaagctcaagaagagatctataaaaagggacagtccaaaagaatatggggtgagctctacaaggtgatagattcatcagatgttgtagttcaagttcttgatgctagagatccaatgggtactcgttcccctcacattgaaacttacctgaagaaggaaaaaccttggaaacacctcatttttgtacttaacaaatgtgaccttgttccaacctgggcaacaaaacggtgggttgctgtcctctcccaggattatccaacacttgctttccatgcaagccttactaacccgtttggcaagggagcattcattcagcttctgcggcagtttggaaagttgcacactgacaagaaacagatcagtgttgggttcattggctatccaaatgttggcaagagctctgtgataaatacattgcgttctaagaaagtttgcaacgtggctcccattgcaggtgaaacaaaggtctggcagtatattactttgatgcgtcggatattcctgattgactgtccaggtgtggtttacccctctgaggactccgagacagacattgtgctaaaaggagttgttcaagtagaaaaaattaagagtcctgaagaccacattggtgctgtacttgaacgagcaaagccagaatatatcagcaaaacatacaagattgattcttgggagaatgctgaggactttcttgagaagctcgctttccggactgggaagttactaaagggtggagagcccgacttgcagactgtgggtaagatggtcctcaatgactggcagaggggccggattcctttctttgtcaagccacccaatgcagagccacttgtggccccccagcttctaccctcctcatctttggaagttgtcccagaagcagcccagaacaatccaggggaggaagtcacagaaactgcaggtgaagggtcagaatccatcattaaggaagaaacagaagagaacagtcactgtgatgctaacacagagatgcagcagattctcacacgagttcggcagaactttggtaaaatcaacgtggtgcctcagttttctggggatgacctggttcctgtggaggtgtcagatcttgaggaagagcttgagagcttttctgatgaagaggaggaggaacaggagcaacaaagagatgatgcggaagagtcttcctcggagcctgaggaggaaaatgtgggaaacgacaccaaagccgttattaaagcactggatgagaagattgccaaatatcagaagtttctagacaaagccaaagccaaaaagttttcagcagtcagaatatccaagggactgagtgaaaagatatttgcaaaacctgaagaacaaagaaaaacactggaagaagatgtagatgacagagcaccttccaaaaagggaaagaagcggaaggcacaaagggaagaggaacaggaacattcaaataaagctcccagggcgcttacatcaaaagaacggaggcgagcagtacgacagcaacggccgaaaaaagttggtgtgcgctactatgaaacacacaacgtgaaaaataggaacaggaacaaaaagaagaccaatgactcagagggacagaaacacaaacgcaaaaaattcagacaaaagcagtaatgtttaaaaggtttttattaaattatacaaaaacaggcagttagaaattgtgttttcttcctgccccattgacatttctaaggccctaatgcatttgttctgaggtttgacagttgaagcccttcaccagtgctagggaaataaagcctcctcaaccttaaggatttcagtgataagagtctgaaagtctagcacttcaggtagactttggatgaactaagaggttccacagtcaccctgtcatataactgtctgacagaaataggggatgaggtctataaaatggaaagggtggtatttcgtttttattggtaatgaatgatttggaatagaagcatacagaactgcaaatttcaaggacgttagtgtacatggcctggcctttgaaatacaaggagaaagttgggtgcagaagaaataggagaaaactacaataatttctgcctcattgagtctgtgaagtagacccacttatggcacatacgttcctgtcttagaggcctggaactagcagatctcgtggaaagagttctttcccatggaaatgacaacacaggcaggtcatttgagtggaggcttaaaattcctcaggatactggatcagggtaaaagctgctccttagattccagatgagaatgtgtatggtgtgttcagcatagggaacacagcttttctggggaaatgacagtgcttccattgtgagccttgaagctcactgaacccaagacggatggcaggtggaagctctgctaaggagaggcccttcttacgcctctttctggggaacctgagcatgttagtgccttttaggtaatgttacttgtgcagcctaactgaaggatgaagtcctccagcttaccaccctagcccaccctggcttgccccgaactaaagatttatgtcactcattcaatcttctgggtctacaaaaccaggagaatggaagagaaatactaaaatgcagttgtctagcagccgtactccaattattagtcattagacctgcatgtgagatttagttacctcttcagttgttaattaacatcactacttcggggagtgcagagtcagggcttgattttctgcaggataaggggaacagatctgtgctgggggaagagctgagttgcagacaactcacaaaggccactgtgactagtattcctttctggcaaacatt

SEQ ID NO: 383851 - DNA, 2566 bp, Homo sapiens
gacgtacgtcgtgcacacgtggtccggcgtggttcaggcgggtgtcttcggccgggcttgggaacataaaagtttgtttcaccacgtaagccggacctcgcactccggtcccggtctcgtcgccaagatggtgaagcccaagtacaaaggacggagcaccatcaacccgtccaaggccagcacaaacccagatcgagtgcagggagcaggaggccaaaacatgagggaccgggccaccatccggcgcctgaatatgtataggcaaaaggagcgcaggaacagtcgtggtaaaataattaaacccctgcaatatcaatcaacggtggcttctggcacagtggcaagagtagagccaaatattaaatggtttggaaacacacgtgtgattaagcagtcatcattacaaaaatttcaagaggaaatggatacagttatgaaggatccatacaaagttgtcatgaagcaaagcaagttaccaatgtctcttctccatgatcgaatccggcctcataacttgaaggtgcacattcttgatactgaaagttttgaaactacatttggccctaagtcacagaggaaacgaccaaacttatttgcaagtgatatgcagtctcttatcgaaaatgctgaaatgtccactgagagctatgaccagggcaaggatcgtgatttggtaactgaagacactggtgtgagaaatgaagctcaagaagagatctataaaaagggacagtccaaaagaatatggggtgagctctacaaggtgatagattcatcagatgttgtagttcaagttcttgatgctagagatccaatgggtactcgttcccctcacattgaaacttacctgaagaaggaaaaaccttggaaacacctcatttttgtacttaacaaatgtgaccttgttccaacctgggcaacaaaacggtgggttgctgtcctctcccaggattatccaacacttgctttccatgcaagccttactaacccgtttggcaagggagcattcattcagcttctgcggcagtttggaaagccctggcacctgacgttccacgctctgctgggctttccaggcctgctgtgcatcctctgcccatggagcccatgcagcttctatgtcctctggttggagagggccctgccaaaattcaagcttcagatccctggtcagacgtcagctcctgagggaagccgtggaaccagactaccctatcaaattcttaaagcttcatgttctttgcacactgacaagaaacagatcagtgttgggttcattggctatccaaatgttggcaagagctctgtgataaatacattgcgttctaagaaagtttgcaacgtggctcccattgcaggtgaaacaaaggtctggcagtatattactttgatgcgtcggatattcctgattgactgtccaggtgtggtttacccctctgaggactccgagacagacattgtgctaaaaggagttgttcaagtagaaaaaattaagagtcctgaagaccacattggtgctgtacttgaacgagcaaagccagaatatatcagcaaaacatacaagattgattcttgggagaatgctgaggactttcttgagaagctcgctttccggactgggaagttactaaagggtggagagcccgacttgcagactgtgggtaagatggtcctcaatgactggcagaggggccggattcctttctttgtcaagccacccaatgcagagccacttgtggccccccagcttctaccctcctcatctttggaagttgtcccagaagcagcccagaacaatccaggggaggaagtcacagaaactgcaggtgaagggtcagaatccatcattaaggaagaaacagaagagaacagtcactgtgatgctaacacagagatgcagcagattctcacacgagttcggcagaactttggtaaaatcaacgtggtgcctcagttttctggggatgacctggttcctgtggaggtgtcagatcttgaggaagagcttgagagcttttctgatgaagaggaggaggaacaggagcaacaaagagatgatgcggaagagtcttcctcggagcctgaggaggaaaatgtgggaaacgacaccaaagccgttattaaagcactggatgagaagattgccaaatatcagaagtttctagacaaagccaaagccaaaaagttttcagcagtcagaatatccaagggactgagtgaaaagatatttgcaaaacctgaagaacaaagaaaaacactggaagaagatgtagatgacagagcaccttccaaaaagggaaagaagcggaaggcacaaagggaagaggaacaggaacattcaaataaagctcccagggcgcttacatcaaaagaacggaggcgagcagtacgacagcaacggccgaaaaaagttggtgtgcgctactatgaaacacacaacgtgaaaaataggaacaggaacaaaaagaagaccaatgactcagagggacagaaacacaaacgcaaaaaattcagacaaaagcagtaatgtttaaaaggtttttattaaattatacaaaaacaggca

SEQ ID NO: 383852 - DNA, 2100 bp, Homo sapiens
atttttggctctctgaccagcaccatggcggttggcaagaacaagcgccttacgaaaggcggcaaaaagggagccaagaagaaagtggttgatccattttctaagaaagattggtatgatgtgaaagcacctgctatgttcaatataagaaatattggaaagacgctcgtcaccaggacccaaggaaccaaaattgcatctgatggtctcaagggtcgtgtgtttgaagtgagtcttgctgatttgcagaatgatgaagttgcatttagaaaatttgaaagttttgaaactacatttggccctaagtcacagaggaaacgaccaaacttatttgcaagtgatatgcagtctcttatcgaaaatgctgaaatgtccactgagagctatgaccagggcaaggatcgtgatttggtaactgaagacactggtgtgagaaatgaagctcaagaagagatctataaaaagggacagtccaaaagaatatggggtgagctctacaaggtgatagattcatcagatgttgtagttcaagttcttgatgctagagatccaatgggtactcgttcccctcacattgaaacttacctgaagaaggaaaaaccttggaaacacctcatttttgtacttaacaaatgtgaccttgttccaacctgggcaacaaaacggtgggttgctgtcctctcccaggattatccaacacttgctttccatgcaagccttactaacccgtttggcaagggagcattcattcagcttctgcggcagtttggaaagttgcacactgacaagaaacagatcagtgttgggttcattggctatccaaatgttggcaagagctctgtgataaatacattgcgttctaagaaagtttgcaacgtggctcccattgcaggtgaaacaaaggtctggcagtatattactttgatgcgtcggatattcctgattgactgtccaggtgtggtttacccctctgaggactccgagacagacattgtgctaaaaggagttgttcaagtagaaaaaattaagagtcctgaagaccacattggtgctgtacttgaacgagcaaagccagaatatatcagcaaaacatacaagattgattcttgggagaatgctgaggactttcttgagaagctcgctttccggactgggaagttactaaagggtggagagcccgacttgcagactgtgggtaagatggtcctcaatgactggcagaggggccggattcctttctttgtcaagccacccaatgcagagccacttgtggccccccagcttctaccctcctcatctttggaagttgtcccagaagcagcccagaacaatccaggggaggaagtcacagaaactgcaggtgaagggtcagaatccatcattaaggaagaaacagaagagaacagtcactgtgatgctaacacagagatgcagcagattctcacacgagttcggcagaactttggtaaaatcaacgtggtgcctcagttttctggggatgacctggttcctgtggaggtgtcagatcttgaggaagagcttgagagcttttctgatgaagaggaggaggaacaggagcaacaaagagatgatgcggaagagtcttcctcggagcctgaggaggaaaatgtgggaaacgacaccaaagccgttattaaagcactggatgagaagattgccaaatatcagaagtttctagacaaagccaaagccaaaaagttttcagcagtcagaatatccaagggactgagtgaaaagatatttgcaaaacctgaagaacaaagaaaaacactggaagaagatgtagatgacagagcaccttccaaaaagggaaagaagcggaaggcacaaagggaagaggaacaggaacattcaaataaagctcccagggcgcttacatcaaaagaacggaggcgagcagtacgacagcaacggccgaaaaaagttggtgtgcgctactatgaaacacacaacgtgaaaaataggaacaggaacaaaaagaagaccaatgactcagagggacagaaacacaaacgcaaaaaattcagacaaaagcagtaatgtttaaaaggtttttattaaattatacaaaaacaggca

SEQ ID NO: 383853 - DNA, 2009 bp, Homo sapiens
aatagtaacatgataggaaactagtaccgtgaaggcaagctaaactttgtagttttttgtgaaatacacaaaacctataatattacaaacttaaagataatattacaaacttaaagaagtctaagaagtaaatgatttagttcaataatccatagtagttaggaaataagttgagtttcatctaagctagtttttctgttttaaattcagcaggtttcaaaagccacaggatgaaaaaccttttgaattctgatcactgggccttgagattagccacaacgaactctgcccagagactgttttgaagttgtctctaaatattattattttatttttcccagactcccttaaatgtcatccctcttttatttgtactgtagcaaaccatttttgcctttctgaattttcaggtgatagattcatcagatgttgtagttcaagttcttgatgctagagatccaatgggtactcgttcccctcacattgaaacttacctgaagaaggaaaaaccttggaaacacctcatttttgtacttaacaaatgtgaccttgttccaacctgggcaacaaaacggtgggttgctgtcctctcccaggattatccaacacttgctttccatgcaagccttactaacccgtttggcaagggagcattcattcagcttctgcggcagtttggaaagttgcacactgacaagaaacagatcagtgttgggttcattggctatccaaatgttggcaagagctctgtgataaatacattgcgttctaagaaagtttgcaacgtggctcccattgcaggtgaaacaaaggtctggcagtatattactttgatgcgtcggatattcctgattgactgtccaggtgtggtttacccctctgaggactccgagacagacattgtgctaaaaggagttgttcaagtagaaaaaattaagagtcctgaagaccacattggtgctgtacttgaacgagcaaagccagaatatatcagcaaaacatacaagattgattcttgggagaatgctgaggactttcttgagaagctcgctttccggactgggaagttactaaagggtggagagcccgacttgcagactgtgggtaagatggtcctcaatgactggcagaggggccggattcctttctttgtcaagccacccaatgcagagccacttgtggccccccagcttctaccctcctcatctttggaagttgtcccagaagcagcccagaacaatccaggggaggaagtcacagaaactgcaggtgaagggtcagaatccatcattaaggaagaaacagaagagaacagtcactgtgatgctaacacagagatgcagcagattctcacacgagttcggcagaactttggtaaaatcaacgtggtgcctcagttttctggggatgacctggttcctgtggaggtgtcagatcttgaggaagagcttgagagcttttctgatgaagaggaggaggaacaggagcaacaaagagatgatgcggaagagtcttcctcggagcctgaggaggaaaatgtgggaaacgacaccaaagccgttattaaagcactggatgagaagattgccaaatatcagaagtttctagacaaagccaaagccaaaaagttttcagcagtcagaatatccaagggactgagtgaaaagatatttgcaaaacctgaagaacaaagaaaaacactggaagaagatgtagatgacagagcaccttccaaaaagggaaagaagcggaaggcacaaagggaagaggaacaggaacattcaaataaagctcccagggcgcttacatcaaaagaacggaggcgagcagtacgacagcaacggccgaaaaaagttggtgtgcgctactatgaaacacacaacgtgaaaaataggaacaggaacaaaaagaagaccaatgactcagagggacagaaacacaaacgcaaaaaattcagacaaaagcagtaatgtttaaaaggtttttattaaattatacaaaaacaggca

SEQ ID NO: 383854 - DNA, 1856 bp, Homo sapiens
ttaatctgtagatctctctgtatctatgagagtaagggattaggccaggcatggtggcacacgcctgtagtcccagctactggggagactgaggcaggagaatcgcttgaacctgggaggcggagtttgccgtgagccgagattgcgccactgcaccccagcctgggcgacagagcgagacttctcaaaaaaagaagaagaagatgtaaaaacttccagagatgtaaaaactcacagagcatcaggattataagagattctgaagtgttttcttgctcagcctttgcccccatccgtgaccagtgttgcttccatttctgccacagccctggcacctgacgttccacgctctgctgggctttccaggcctgctgtgcatcctctgcccatggagcccatgcagcttctatgtcctctggttggagagggccctgccaaaattcaagcttcagatccctggtcagacgtcagctcctgagggaagccgtggaaccagactaccctatcaaattcttaaagcttcatgttctttgcacactgacaagaaacagatcagtgttgggttcattggctatccaaatgttggcaagagctctgtgataaatacattgcgttctaagaaagtttgcaacgtggctcccattgcaggtgaaacaaaggtctggcagtatattactttgatgcgtcggatattcctgattgactgtccaggtgtggtttacccctctgaggactccgagacagacattgtgctaaaaggagttgttcaagtagaaaaaattaagagtcctgaagaccacattggtgctgtacttgaacgagcaaagccagaatatatcagcaaaacatacaagattgattcttgggagaatgctgaggactttcttgagaagctcgctttccggactgggaagttactaaagggtggagagcccgacttgcagactgtgggtaagatggtcctcaatgactggcagaggggccggattcctttctttgtcaagccacccaatgcagagccacttgtggccccccagcttctaccctcctcatctttggaagttgtcccagaagcagcccagaacaatccaggggaggaagtcacagaaactgcaggtgaagggtcagaatccatcattaaggaagaaacagaagagaacagtcactgtgatgctaacacagagatgcagcagattctcacacgagttcggcagaactttggtaaaatcaacgtggtgcctcagttttctggggatgacctggttcctgtggaggtgtcagatcttgaggaagagcttgagagcttttctgatgaagaggaggaggaacaggagcaacaaagagatgatgcggaagagtcttcctcggagcctgaggaggaaaatgtgggaaacgacaccaaagccgttattaaagcactggatgagaagattgccaaatatcagaagtttctagacaaagccaaagccaaaaagttttcagcagtcagaatatccaagggactgagtgaaaagatatttgcaaaacctgaagaacaaagaaaaacactggaagaagatgtagatgacagagcaccttccaaaaagggaaagaagcggaaggcacaaagggaagaggaacaggaacattcaaataaagctcccagggcgcttacatcaaaagaacggaggcgagcagtacgacagcaacggccgaaaaaagttggtgtgcgctactatgaaacacacaacgtgaaaaataggaacaggaacaaaaagaagaccaatgactcagagggacagaaacacaaacgcaaaaaattcagacaaaagcagtaatgtttaaaaggtttttattaaattatacaaaaacaggca

SEQ ID NO: 383855 - DNA, 1046 bp, Homo sapiens
  misc_feature (20)..(20): n is a, c, g, or t
gattcgaattcgagctcggntcccgaatccagaaaacatacaagattgattcttgggagaatgctgaggactttcttgagaagctcgctttccggactgggaagttactaaagggtggagagcccgacttgcagactgtgggtaagatggtcctcaatgactggcagaggggccggattcctttctttgtcaagccacccaatgcagagccacttgtggccccccagcttctaccctcctcatctttggaagttgtcccagaagcagcccagaacaatccaggggaggaagtcacagaaactgcaggtgaagggtcagaatccatcattaaggaagaaacagaagagaacagtcactgtgatgctaacacagagatgcagcagattctcacacgagttcggcagaactttggtaaaatcaacgtggtgcctcagttttctggggatgacctggttcctgtggaggtgtcagatcttgaggaagagcttgagagcttttctgatgaagaggaggaggaacaggagcaacaaagagatgatgcggaagagtcttcctcggagcctgaggaggaaaatgtgggaaacgacaccaaagccgttattaaagcactggatgagaagattgccaaatatcagaagtttctagacaaagccaaagccaaaaagttttcagcagtcagaatatccaagggactgagtgaaaagatatttgcaaaacctgaagaacaaagaaaaacactggaagaagatgtagatgacagagcaccttccaaaaagggaaagaagcggaaggcacaaagggaagaggaacaggaacattcaaataaagctcccagggcgcttacatcaaaagaacggaggcgagcagtacgacagcaacggccgaaaaaagttggtgtgcgctactatgaaacacacaacgtgaaaaataggaacaggaacaaaaagaagaccaatgactcagagggacagaaacacaaacgcaaaaaattcagacaaaagcagtaatgtttaaaaggtttttattaaattatacaaaaacaggca

SEQ ID NO: 383856 - DNA, 1895 bp, Homo sapiens
gtattcattttatggtgatgcaaatgtttagaaattagatagaggtgatggtcgcataacatcgtgaatgtactaaatatcacagatagttatgtgacatttcatctttgtaaaaatatagtgacaacaccaaatgctggtaagaatgtggagaaactgaatcactcataacattgctggtgggaatgtaaaatggtatagccacattggaaaacagtttggcagtttccttaaaaactaaatatccagcaactatatgacccagtaattgcactcctgggcatttatcccagaggaataaagacttgtgtagacacaaaacttgcacataagtgtatgtggtagcactattcataatagtaaaaaactggaaacaactcagtaatgcttcaatgatggtacatgtatactatggaagactactcagcgatacaaagaaatacactggaagaagatgtagatgacagagcaccttccaaaaagggaaagaagcggaaggcacaaagggaagaggaacaggaacattcaaataaagctcccagggcgcttacatcaaaagaacggaggcgagcagtacgacagcaacggccgaaaaaagttggtgtgcgctactatgaaacacacaacgtgaaaaataggaacaggaacaaaaagaagaccaatgactcagagggacagaaacacaaacgcaaaaaattcagacaaaagcagtaatgtttaaaaggtttttattaaattatacaaaaacaggcagttagaaattgtgttttcttcctgccccattgacatttctaaggccctaatgcatttgttctgaggtttgacagttgaagcccttcaccagtgctagggaaataaagcctcctcaaccttaaggatttcagtgataagagtctgaaagtctagcacttcaggtagactttggatgaactaagaggttccacagtcaccctgtcatataactgtctgacagaaataggggatgaggtctataaaatggaaagggtggtatttcgtttttattggtaatgaatgatttggaatagaagcatacagaactgcaaatttcaaggacgttagtgtacatggcctggcctttgaaatacaaggagaaagttgggtgcagaagaaataggagaaaactacaataatttctgcctcattgagtctgtgaagtagacccacttatggcacatacgttcctgtcttagaggcctggaactagcagatctcgtggaaagagttctttcccatggaaatgacaacacaggcaggtcatttgagtggaggcttaaaattcctcaggatactggatcagggtaaaagctgctccttagattccagatgagaatgtgtatggtgtgttcagcatagggaacacagcttttctggggaaatgacagtgcttccattgtgagccttgaagctcactgaacccaagacggatggcaggtggaagctctgctaaggagaggcccttcttacgcctctttctggggaacctgagcatgttagtgccttttaggtaatgttacttgtgcagcctaactgaaggatgaagtcctccagcttaccaccctagcccaccctggcttgccccgaactaaagatttatgtcactcattcaatcttctgggtctacaaaaccaggagaatggaagagaaatactaaaatgcagttgtctagcagccgtactccaattattagtcattagacctgcatgtgagatttagttacctcttcagttgttaattaacatcactacttcggggagtgcagagtcagggcttgattttctgcaggataaggggaacagatctgtgctgggggaagagctgagttgcagacaactcacaaaggccactgtgactagtattcctttctggcaaacatt

SEQ ID NO: 383857 - DNA, 379 bp, Homo sapiens
aacaaagtaatacaacctacttgtccaaagggatatatatgactgcatgtatgtgctgtgtattctctctttgaacagttgcacactgacaagaaacagatcagtgttgggttcattggctatccaaatgttggcaagagctctgtgataaatacattgcgttctaagaaagtttgcaacgtggctcccattgcaggtgaaacaaaggtacgttgggcgcagggtgaccttacttttgcatattttcttttcatagagagtgattgtttaggacttgttgatttctctctgcttctcttgaatgcagaccaccactaggagtttagctcaccatataatagtttggaacgtatcagagttgtttctgcccactttgata

SEQ ID NO: 383858 - DNA, 2520 bp, Homo sapiens
gacgtacgtcgtgcacacgtggtccggcgtggttcaggcgggtgtcttcggccgggcttgggaacataaaagtttgtttcaccacgtaagccggacctcgcactccggtcccggtctcgtcgccaagatggtgaagcccaagtacaaaggacggagcaccatcaacccgtccaaggccagcacaaacccagatcgagtgcagggagcaggaggccaaaacatgagggaccgggccaccatccggcgcctgaatatgtataggcaaaaggagcgcaggaacagtcgtggtaaaataattaaacccctgcaatatcaatcaacggtggcttctggcacagtggcaagagtagagccaaatattaaatggtttggaaacacacgtgtgattaagcagtcatcattacaaaaatttcaagaggaaatggatacagttatgaaggatccatacaaagttgtcatgaagcaaagcaagttaccaatgtctcttctccatgatcgaatccggcctcataacttgaaggtgcacattcttgatactgaaagttttgaaactacatttggccctaagtcacagaggaaacgaccaaacttatttgcaagtgatatgcagtctcttatcgaaaatgctgaaatgtccactgagagctatgaccagggcaaggatcgtgatttggtaactgaagacactggtgtgagaaatgaagctcaagaagagatctataaaaagggacagtccaaaagaatatggggtgagctctacaaggtgatagattcatcagatgttgtagttcaagttcttgatgctagagatccaatgggtactcgttcccctcacattgaaacttacctgaagaaggaaaaaccttggaaacacctcatttttgtacttaacaaatgtgaccttgttccaacctgggcaacaaaacggtgggttgctgtcctctcccaggattatccaacacttgctttccatgcaagccttactaacccgtttggcaagggagcattcattcagcttctgcggcagtttggaaagttgcacactgacaagaaacagatcagtgttgggttcattggctatccaaatgttggcaagagctctgtgataaatacattgcgttctaagaaagtttgcaacgtggctcccattgcaggtgaaacaaaggtctggcagtatattactttgatgcgtcggatattcctgattgactgtccaggtgtggtttacccctctgaggactccgagacagacattgtgctaaaaggagttgttcaagtagaaaaaattaagagtcctgaagaccacattggtgctgtacttgaacgagcaaagccagaatatatcagcaaaacatacaagattgattcttgggagaatgctgaggactttcttgagaagctcgctttccggactgggaagttactaaagggtggagagcccgacttgcagactgtgggtaagatggtcctcaatgactggcagaggggccggattcctttctttgtcaagccacccaatgcagagccacttgtggccccccagcttctaccctcctcatctttggaagttgtcccagaagcagcccagaacaatccaggggaggaagtcacagaaactgcaggtgaagggtcagaatccatcattaaggaagaaacagaagagaacagtcactgtgatgctaacacagagatgcagcagattctcacacgagttcggcagaactttggtaaaatcaacgtggtgcctcagttttctggggatgacctggttcctgtggaggtgtcagatcttgaggaagagcttgagagcttttctgatgaagaggaggaggaacaggagcaacaaagagatgatgcggaagagtcttcctcggagcctgaggaggaaaatgtgggaaacgacaccaaagccgttattaaagcactggatgagaagattgccaaatatcagaagtttctagacaaagccaaagccaaaaagttttcagcagtcagaatatccaagggactgagtgaaaagatatttgcaaaacctgaagaacaaagaaaaacactggaagaagatgtagatgacagagcaccttccaaaaagggaaagaagcggaaggcacaaagggaagaggaacaggaacattcaaataaagctcccagggcgcttacatcaaaagaacggaggcgagcagtacgacagcaacggccgaaaaaagttggtgtgcgctactatgaaacacacaacgtgaaaaataggaacaggaacaaaaagaagaccaatgactcagagggacagaaacacaaacgcaaaaaattcagacaaaagcagtaatgtttaaaaggtttttattaaattatacaaaaacaggcaaaaaaaaaaaaaaaaaaaaaaaaagaaaaaaaaaaaaaaaaaaaccggggggtttttgtgggggggggagaaaagggtaaaggggggggatggtgtcggacacccttttggggaaagggggaaaggggggcccaaaggggggggaaggagggggagag

SEQ ID NO: 383859 - DNA, 2107 bp, Homo sapiens
tcaaaaatgaagtgccaatgaggccgatcaccgggtgtcaatgcatgcgagtaggctcgatgcacggtgacttacaggtgcagtggcaagagtagagccaaatattaaatggtttggaaacacacgtgtgattaagcagtcatcattacaaaaatttcaagaggaaatggatacagttatgaaggatccatacaaagttgtcatgaagcaaagcaagttaccaatgtctcttctccatgatcgaatccggcctcataacttgaaggtgcacattcttgatactgaaagttttgaaactacatttggccctaagtcacagaggaaacgaccaaacttatttgcaagtgatatgcagtctcttatcgaaaatgctgaaatgtccactgagagctatgaccagggcaaggatcgtgatttggtaactgaagacactggtgtgagaaatgaagctcaagaagagatctataaaaagggacagtccaaaagaatatggggtgagctctacaaggtgatagattcatcagatgttgtagttcaagttcttgatgctagagatccaatgggtactcgttcccctcacattgaaacttacctgaagaaggaaaaaccttggaaacacctcatttttgtacttaacaaatgtgaccttgttccaacctgggcaacaaaacggtgggttgctgtcctctcccaggattatccaacacttgctttccatgcaagccttactaacccgtttggcaagggagcattcattcagcttctgcggcagtttggaaagttgcacactgacaagaaacagatcagtgttgggttcattggctatccaaatgttggcaagagctctgtgataaatacattgcgttctaagaaagtttgcaacgtggctcccattgcaggtgaaacaaaggtctggcagtatattactttgatgcgtcggatattcctgattgactgtccaggtgtggtttacccctctgaggactccgagacagacattgtgctaaaaggagttgttcaagtagaaaaaattaagagtcctgaagaccacattggtgctgtacttgaacgagcaaagccagaatatatcagcaaaacatacaagattgattcttgggagaatgctgaggactttcttgagaagctcgctttccggactgggaagttactaaagggtggagagcccgacttgcagactgtgggtaagatggtcctcaatgactggcagaggggccggattcctttctttgtcaagccacccaatgcagagccacttgtggccccccagcttctaccctcctcatctttggaagttgtcccagaagcagcccagaacaatccaggggaggaagtcacagaaactgcaggtgaagggtcagaatccatcattaaggaagaaacagaagagaacagtcactgtgatgctaacacagagatgcagcagattctcacacgagttcggcagaactttggtaaaatcaacgtggtgcctcagttttctggggatgacctggttcctgtggaggtgtcagatcttgaggaagagcttgagagcttttctgatgaagaggaggaggaacaggagcaacaaagagatgatgcggaagagtcttcctcggagcctgaggaggaaaatgtgggaaacgacaccaaagccgttattaaagcactggatgagaagattgccaaatatcagaagtttctagacaaagccaaagccaaaaagttttcagcagtcagaatatccaagggactgagtgaaaagatatttgcaaaacctgaagaacaaagaaaaacactggaagaagatgtagatgacagagcaccttccaaaaagggaaagaagcggaaggcacaaagggaagaggaacaggaacattcaaataaagctcccagggcgcttacatcaaaagaacggaggcgagcagtacgacagcaacggccgaaaaaagttggtgtgcgctactatgaaacacacaacgtgaaaaataggaacaggaacaaaaagaagaccaatgactcagagggacagaaacacaaacgcaaaaaattcagacaaaagcagtaatgtttaaaaggtttttattaaattatacaaaaacaggca

SEQ ID NO: 383860 - DNA, 1723 bp, Homo sapiens
aacggctaggtagaggacggggtgttatcggattggtactgaccgaactggtgtgagaaatgaagctcaagaagagatctataaaaagggacagtccaaaagaatatggggtgagctctacaaggtgatagattcatcagatgttgtagttcaagttcttgatgctagagatccaatgggtactcgttcccctcacattgaaacttacctgaagaaggaaaaaccttggaaacacctcatttttgtacttaacaaatgtgaccttgttccaacctgggcaacaaaacggtgggttgctgtcctctcccaggattatccaacacttgctttccatgcaagccttactaacccgtttggcaagggagcattcattcagcttctgcggcagtttggaaagttgcacactgacaagaaacagatcagtgttgggttcattggctatccaaatgttggcaagagctctgtgataaatacattgcgttctaagaaagtttgcaacgtggctcccattgcaggtgaaacaaaggtctggcagtatattactttgatgcgtcggatattcctgattgactgtccaggtgtggtttacccctctgaggactccgagacagacattgtgctaaaaggagttgttcaagtagaaaaaattaagagtcctgaagaccacattggtgctgtacttgaacgagcaaagccagaatatatcagcaaaacatacaagattgattcttgggagaatgctgaggactttcttgagaagctcgctttccggactgggaagttactaaagggtggagagcccgacttgcagactgtgggtaagatggtcctcaatgactggcagaggggccggattcctttctttgtcaagccacccaatgcagagccacttgtggccccccagcttctaccctcctcatctttggaagttgtcccagaagcagcccagaacaatccaggggaggaagtcacagaaactgcaggtgaagggtcagaatccatcattaaggaagaaacagaagagaacagtcactgtgatgctaacacagagatgcagcagattctcacacgagttcggcagaactttggtaaaatcaacgtggtgcctcagttttctggggatgacctggttcctgtggaggtgtcagatcttgaggaagagcttgagagcttttctgatgaagaggaggaggaacaggagcaacaaagagatgatgcggaagagtcttcctcggagcctgaggaggaaaatgtgggaaacgacaccaaagccgttattaaagcactggatgagaagattgccaaatatcagaagtttctagacaaagccaaagccaaaaagttttcagcagtcagaatatccaagggactgagtgaaaagatatttgcaaaacctgaagaacaaagaaaaacactggaagaagatgtagatgacagagcaccttccaaaaagggaaagaagcggaaggcacaaagggaagaggaacaggaacattcaaataaagctcccagggcgcttacatcaaaagaacggaggcgagcagtacgacagcaacggccgaaaaaagttggtgtgcgctactatgaaacacacaacgtgaaaaataggaacaggaacaaaaagaagaccaatgactcagagggacagaaacacaaacgcaaaaaattcagacaaaagcagtaatgtttaaaaggtttttattaaattatacaaaaacaggca

SEQ ID NO: 383861 - DNA, 1356 bp, Homo sapiens
tggctagtcagccggggtaatcggacgaggttgcacactgacaagaaacagatcagtgttgggttcattggctatccaaatgttggcaagagctctgtgataaatacattgcgttctaagaaagtttgcaacgtggctcccattgcaggtgaaacaaaggtctggcagtatattactttgatgcgtcggatattcctgattgactgtccaggtgtggtttacccctctgaggactccgagacagacattgtgctaaaaggagttgttcaagtagaaaaaattaagagtcctgaagaccacattggtgctgtacttgaacgagcaaagccagaatatatcagcaaaacatacaagattgattcttgggagaatgctgaggactttcttgagaagctcgctttccggactgggaagttactaaagggtggagagcccgacttgcagactgtgggtaagatggtcctcaatgactggcagaggggccggattcctttctttgtcaagccacccaatgcagagccacttgtggccccccagcttctaccctcctcatctttggaagttgtcccagaagcagcccagaacaatccaggggaggaagtcacagaaactgcaggtgaagggtcagaatccatcattaaggaagaaacagaagagaacagtcactgtgatgctaacacagagatgcagcagattctcacacgagttcggcagaactttggtaaaatcaacgtggtgcctcagttttctggggatgacctggttcctgtggaggtgtcagatcttgaggaagagcttgagagcttttctgatgaagaggaggaggaacaggagcaacaaagagatgatgcggaagagtcttcctcggagcctgaggaggaaaatgtgggaaacgacaccaaagccgttattaaagcactggatgagaagattgccaaatatcagaagtttctagacaaagccaaagccaaaaagttttcagcagtcagaatatccaagggactgagtgaaaagatatttgcaaaacctgaagaacaaagaaaaacactggaagaagatgtagatgacagagcaccttccaaaaagggaaagaagcggaaggcacaaagggaagaggaacaggaacattcaaataaagctcccagggcgcttacatcaaaagaacggaggcgagcagtacgacagcaacggccgaaaaaagttggtgtgcgctactatgaaacacacaacgtgaaaaataggaacaggaacaaaaagaagaccaatgactcagagggacagaaacacaaacgcaaaaaattcagacaaaagcagtaatgtttaaaaggtttttattaaattatacaaaaacaggca

SEQ ID NO: 383862 - DNA, 1715 bp, Homo sapiens
gacgtacgtcgtgcacacgtggtccggcgtggttcaggcgggtgtcttcggccgggcttgggaacataaaagtttgtttcaccacgtaagccggacctcgcactccggtcccggtctcgtcgccaagatggtgaagcccaagtacaaaggacggagcaccatcaacccgtccaaggccagcacaaacccagatcgagtgcagggagcaggaggccaaaacatgagggaccgggccaccatccggcgcctgaatatgtataggcaaaaggagcgcaggaacagtcgtggtaaaataattaaacccctgcaatatcaatcaacggtggcttctggcacagtggcaagagtagagccaaatattaaatggtttggaaacacacgtgtgattaagcagtcatcattacaaaaatttcaagaggaaatggatacagttatgaaggatccatacaaagttgtcatgaagcaaagcaagttaccaatgtctcttctccatgatcgaatccggcctcataacttgaaggtgcacattcttgatactgaaagttttgaaactacatttggccctaagtcacagaggaaacgaccaaacttatttgcaagtgatatgcagtctcttatcgaaaatgctgaaatgtccactgagagctatgaccagggcaaggatcgtgatttggtaactgaagacactggtgtgagaaatgaagctcaagaagagatctataaaaagggacagtccaaaagaatatggggtgagctctacaaggtgatagattcatcagatgttgtagttcaagttcttgatgctagagatccaatgggtactcgttcccctcacattgaaacttacctgaagaaggaaaaaccttggaaacacctcatttttgtacttaacaaatgtgaccttgttccaacctgggcaacaaaacggtgggttgctgtcctctcccaggattatccaacacttgctttccatgcaagccttactaacccgtttggcaagggagcattcattcagcttctgcggcagtttggaaagttgcacactgacaagaaacagatcagtgttgggttcattggctatccaaatgttggcaagagctctgtgataaatacattgcgttctaagaaagtttgcaacgtggctcccattgcaggtgaaacaaaggtctggcagtatattactttgatgcgtcggatattcctgattgactgtccaggtgtggtttacccctctgaggactccgagacagacattgtgctaaaaggagttgttcaagtagaaaaaattaagagtcctgaagaccacattggtgctgtacttgaacgagcaaagccagaatatatcagcaatatccaagggactgagtgaaaagatatttgcaaaacctgaagaacaaagaaaaacactggaagaagatgtagatgacagagcaccttccaaaaagggaaagaagcggaaggcacaaagggaagaggaacaggaacattcaaataaagctcccagggcgcttacatcaaaagaacggaggcgagcagtacgacagcaacggccgaaaaaagttggtgtgcgctactatgaaacacacaacgtgaaaaataggaacaggaacaaaaagaagaccaatgactcagagggacagaaacacaaacgcaaaaaattcagacaaaagcagtaatgtttaaaaggtttttattaaattatacaaaaacaggca

SEQ ID NO: 383863 - DNA, 1974 bp, Homo sapiens
agttcgacggagactctcactgtgtccttggaggctccgcctacccggcggatgttacaagcacaccatctcaaatgcagtcgccattgcaacaggctgcaggtcgcttatcacaaggcaccgaagacaagctctttcaccctcggccacatctctcctgcaagccccctctgtgccatcttctagaagttttacagttatgcaatttacatgtctgtctacgatttatttttatttaatttctgtggaggtgtcagatcttgaggaagagcttgagagcttttctgatgaagaggaggaggaacaggagcaacaaagagatgatgcggaagagtcttcctcggagcctgaggaggaaaatgtgggaaacgacaccaaagccgttattaaagcactggatgagaagattgccaaatatcagaagtttctagacaaagccaaagccaaaaagttttcagcagtcagaatatccaagggactgagtgaaaagatatttgcaaaacctgaagaacaaagaaaaacactggaagaagatgtagatgacagagcaccttccaaaaagggaaagaagcggaaggcacaaagggaagaggaacaggaacattcaaataaagctcccagggcgcttacatcaaaagaacggaggcgagcagtacgacagcaacggccgaaaaaagttggtgtgcgctactatgaaacacacaacgtgaaaaataggaacaggaacaaaaagaagaccaatgactcagagggacagaaacacaaacgcaaaaaattcagacaaaagcagtaatgtttaaaaggtttttattaaattatacaaaaacaggcagttagaaattgtgttttcttcctgccccattgacatttctaaggccctaatgcatttgttctgaggtttgacagttgaagcccttcaccagtgctagggaaataaagcctcctcaaccttaaggatttcagtgataagagtctgaaagtctagcacttcaggtagactttggatgaactaagaggttccacagtcaccctgtcatataactgtctgacagaaataggggatgaggtctataaaatggaaagggtggtatttcgtttttattggtaatgaatgatttggaatagaagcatacagaactgcaaatttcaaggacgttagtgtacatggcctggcctttgaaatacaaggagaaagttgggtgcagaagaaataggagaaaactacaataatttctgcctcattgagtctgtgaagtagacccacttatggcacatacgttcctgtcttagaggcctggaactagcagatctcgtggaaagagttctttcccatggaaatgacaacacaggcaggtcatttgagtggaggcttaaaattcctcaggatactggatcagggtaaaagctgctccttagattccagatgagaatgtgtatggtgtgttcagcatagggaacacagcttttctggggaaatgacagtgcttccattgtgagccttgaagctcactgaacccaagacggatggcaggtggaagctctgctaaggagaggcccttcttacgcctctttctggggaacctgagcatgttagtgccttttaggtaatgttacttgtgcagcctaactgaaggatgaagtcctccagcttaccaccctagcccaccctggcttgccccgaactaaagatttatgtcactcattcaatcttctgggtctacaaaaccaggagaatggaagagaaatactaaaatgcagttgtctagcagccgtactccaattattagtcattagacctgcatgtgagatttagttacctcttcagttgttaattaacatcactacttcggggagtgcagagtcagggcttgattttctgcaggataaggggaacagatctgtgctgggggaagagctgagttgcagacaactcacaaaggccactgtgactagtattcctttctggcaaacatt

SEQ ID NO: 383864 - DNA, 1193 bp, Homo sapiens
gcccattttatcctgggtgtgagagggaaaagaaatttacatccctttgctttagagtccgtggcttatatgccacggtgccttcagttcactttatatattcatgggtataatttagtagggacgagggagggtgcaggagggaggcaaattgtcctttcttcagtgaatacaggggaacagatggttgttatttgctgagtgattctggaaaatcactaccttgaattctcagttttgagtctgacatttgttctgtcaccatttccccagtaaacaggaataaaaaacgagccacattgacaaggaaaacactgcttggccgagagacaaacattgtcaggatgttggccacgctcccgcgcctttgtgtggtggcgtagctgtcacagtggcgtctgccaggaggtggcaggcgacacctccaaaaccaccccagtgctgaagggcggggctgcgattttttcctggatttaaatcgttgaaaagggaggaaaagaggatggagtgaagtctccctccaccagagagcattttgcaagctgtctgtgctccggggtgttaaagccggagacccatccagattgtcccagaccacctcagaagaaagaacccggagtacaggaagacatgggaacaaaaacggaggcgaaagaggacgaacgggaaatagcaggaaagaccgtcacaacttttccctgtgactgcagcctctgagaaaagcaactctgggcaaagcataggtgtccagatgtgcctggagctcacgctgggtgcccaccggctggcccttcggttcctgcttcggggcagagagcgttgaaatcactctcccctcgccccagccgctggctcctggctgggagcctggtcattaaggtccagaggagaaacagacctctggggacctgccgttcacctgggaccttccgctgcttgccccggggttgacagcaaccccagatgtccgcaccagccacgctgggccacacttagccccacttttgccattctaccacgcacagccctcacacacactccccatccaaggttccagggctctgggctgaaaatcaccagctgtactgcagggcctggggctgccctcttgaccaagctacctctccctcaggagcagagctgacaggctcacctgtttttaagaaaacatgttgccaccttaaaaattccat

SEQ ID NO: 383865 - DNA, 298 bp, Homo sapiens
gcactgcctattgcattcctaaaaactccattccaatgttcaatagaaatggtgaaagtggacattcttatgttgctcctgatcttagggggaaagtattcagtcttcccctgttaaagataatgttagttacaggattttcacagattttatcaggttctcttatattactagttttttgagagtttttataatgaatagatgctagattttgtcatgatttttctgaacctattgaaatgatcatgtatttttgttctttagtctgtgaaaacaaggtattacattagttaatttt

SEQ ID NO: 383866 - DNA, 353 bp, Homo sapiens
ctcttctattaaatgagtgctgttcagattgatttttacagaatatttccaaaattcacagtagttaagaaaatataatttgtaatataatgaagtgcttggctaaaatgaaatccttcttactaaaactgctttctcagaaacagttaatgaacccagattcacttaattgaaatggatcagaatggtttaataatcttggttttaaaaagtttttaaaaatcagctttatgtcttttccttgctatcactgttaaagatagcatgagtctattttatttttataagatttaagatagctttattataaagtgtcctaattagactgaacttcctaaatatcttatataggt

SEQ ID NO: 383867 - DNA, 719 bp, Homo sapiens
gtcttatgcccatgtctggaactggagtgggatcggccacattgaaagaacacagcctgagggcagggaagctattgagccccagagagaagttaaagtacttttcatgaaagatcattgtctgttaagaccccatcgcagagaagttaaagagcttcaatcaccatgctttcagggtcaatttgtctccgaaaaggaacagatggggaagaattattccattcacagttgacttgtcagaaattccaagatcttggactggctgaaagcaatgatgttgccattcatcctttcacgtattcattatggtctacagctgagaagggctatttggggtttgctttgcctgatggtagcagaagaaaaccaagaggcctctctacgaagcttgcagtaaggagaaagttctggagactgggaagagcaacacaaagatattcagttgcttggtgagagctgctctctgcttccaaggcggcaccttgttgctgcattctccaatgggaaggaacgctgggtcctcacatgacagaaggtggaaaggcagagatctgggaacctgatgtgggaagaaatctcatctgtgacgacgattttgtcaggagtcacgggattctatagctgcagcaaacctggagcaaactggtccccaccaatctgggtgagacaaaccaatgatgactgaaaatcacaataaaattgtaatactcgagatctca

SEQ ID NO: 383868 - DNA, 373 bp, Homo sapiens
ggtttcatcatgttagccaggatggtctcgatctcctgaccttgtgatctgcccgctttggcctcccaaagtgctgggattacaggcatgagccacagcgctcggcttgttttatgggttaacagtaattagaatatttaatgaattctggattttaacaacagatataaggtaataaaaaggaatatgacccttttaacttaaaaaagcatgaaagtctgcagtctaataagaagcattttttttctgtaaagaccaaatctgcaaatcatgaacaatttagatattatagtttctttcctagagggggaattttactcacatatccttttgtcttttcttgaggagattttgcagttaacttattttagtt

SEQ ID NO: 383869 - DNA, 439 bp, Homo sapiens
gcttcctactgtggttggattaagaccaagacccttgcgtggcttataaggtctgcaggttttggctctgccaacctgtctagcctcctggccctctcaatcagcttgctgtttccctcatttgttacacaagtttcatttttaaaaatgcatcatgggctgtttcctcctcctggaacattcttccctccctttcccctgacctgtcaatttctattatccttcatttccctgcttaaatgtcactgtttttgaggaagccttcaaatccccagattaggtcagaatcccctaacacactcactcttttcgcaccccatacttaatttttgtattatttttctccaagtgaacttaaataaccatataactgattaaaattgttctcccctgccagaacaagacccatgaggacaggagacccttttgtcatggcttc

SEQ ID NO: 383870 - DNA, 584 bp, Homo sapiens
cttgctctgttgcccaggctggagtaaagtggcaccatcccggctcactgcaacatctgcctcccgtgttcaagcgattcttctccctcagcctcccgtgtagctgggataatagacgtgcgtcaccatgcccagctaacttttgtatttttagtagagacggggtttcaccatgttggccgggctggtctcgaactcccgacctcgggtgatccacctgcctcagcctcccaaagtgctaggattacaggtgtgagccaccatgcctggcacatcatcactttgattatagccatcctgctgggtgtgaagtagtagttcattgtgattttgatttgaatttccctgttggctaatgttgagctttatttcatgtggttgaaataccatgctggccatttgtgtatctttgaagaactatctgttcagatcctctgcccttttaaaatgggttgtctttttattattgagttgtaagagttctttatatattctgattacagatcctttttcagacgtatggtttacaaatagtctttttttaagcttggcactcttgtctagatcataccttcgtctctatt

SEQ ID NO: 383871 - DNA, 461 bp, Homo sapiens
gtgtaaactaattacatatcctaaagcttttttttcttttaagagggggtagttttactctgtgctttcttggagcactgaatgattgctctcataatgtagtctctgcaggttaagtatcaattcactctcctaagcaatacctcacaggccattccctattccaaaccatgggctcatggaaggggtttgctgcctgatactacaagagaaacttaagctccttgtcatcatcctctatgaaataaacctgctaactcacctaaacattgtacttcattcacagacaaactagtgaaaactgtttttagggagctactgttaaagctgtcggagcatttgatttaagggtctcagtaaagttatgttttttcagggtggggggttacagatagcttatttaagtagacaaacatctcaaaatccacaaattagggaaattcctttctgggaagaggcag

SEQ ID NO: 383872 - DNA, 361 bp, Homo sapiens
gtttagaaatagataatgccaagttgctttcttgaaagtttaaaccaatttatttttatcggcaatttattagtgccctttccttacatcccctcctgaaattgtgttgattagtttttttacatacctcagtagaaatatgaagatatgtttctgactcctggtgagtttatatgtcttttcattcatatgtttgttggccatttgtatgtgctcctataaagttcttttcccatctgggaggttctcagtttttcttgttagttttaaagctgtttctatagtttagatgttttctactatttgtattgtaaatatctttatccaaatttatattttgctcattgacattgttgatgat

SEQ ID NO: 383873 - DNA, 343 bp, Homo sapiens
gtcttactatggtgcctgggctggtctcaaactcctggcctcaagtgatccgcccatctcagcctcccaaagcgttgggattacacatgtgagccaacatgcccagccttgcccagaagaatggaaagcagggtcttgaagagatattaacacacccatgtttacagcaccactatacacagtaaccaaaggtggaaacaacccacatgtatacccacagatgaatggataaaaacaatgccggccatccacacgatggaatagtattcagccttgaaaaggaaagggatgctgacacgagctatgacaacatgctgaatgaaatgcagcagacacaaaagga

SEQ ID NO: 383874 - DNA, 761 bp, Homo sapiens
ttcggtgtttagccttgtgccgggtctagggaatggaggtgggcttctaagatggcataggttttgggtttctcaacttacctacagactttttgcatcattttttccttttttttttttcttttttagataggatctcactctgttgctaaggctggagtacagtggtgcaatcacggttcactgtagtcttgattgcctgggctcaagtgatcctccctgctcagcctccctagtagctgggaccacagatatgtgccaccatgcctggctagtttttctttctttattttgtaaaacagagatctcactatgttgcccaggctggtctcgcattcctgggctcaagcgatcctcctgccttggcgtcccaaatttctgggattacaggcatgagccactgcacttggctttttttttttccttaatcatgctctttgtggagttgtcccttgcatatcactttgcccctctcactcattacttctgacttgggtcctgttcatactgcatcttgctaaataattttataagccttataaccaagtagacattctctccctaatgcaaatatatagcccctctatgttctagaactcacaacaagaaaacagagttgctaaaagataaataggagatgctttaaaaagttagagacccaccaggagattgagaccattctggctaacacagtgaaaccccgtctctactaaaaaatacaaaaaaaaaaattagcgtggtggtgggcacctgtagtccca

SEQ ID NO: 383875 - DNA, 401 bp, Homo sapiens
actggtggggttcttgtcgctgttgttttgatttttaagagacatggtcttgctttgttatccagccacaatgcctggcttaggtcaactaatttttgacaaaggtgcaaaggcaatttgatgggaagatgatagtctctacaacaaatgatactaaaataattgaattccatccacaaaaaaggggggtttagatctttatctcaagccataagtgaaacaaattaatttggtcagctacagcggctcacacctgtaatcccagcactctggaaggccaaggtgggcagattgcttgagtccaggactttgaggccagcctggacaacacggtgaaaccctgtctctacaaaaaaaatacaaaaactttgctgggcatagtggtacacatacatagctgg

SEQ ID NO: 383876 - DNA, 321 bp, Homo sapiens
aatctttctgagttttttgcagtatgtaccacctttacaatgaggaaggaaaaagtagcacaattttaaataggaagcagtagtttgtcatttataagggacatatcctacatcctttacgttcttaattcctggcagatacctctttggcttattacttaccacataagatatgtattcaaaggtggtaaagaaaatccacgtcgggtgcagtggctcacgcctgtaatcccagtactttgggaggctgacgcaggaggaccgcttgagctcaggagttcaagaccagcctgagcaccatagtgagacctcatctctact

SEQ ID NO: 383877 - DNA, 334 bp, Homo sapiens
tcccacgccccagtaaatgctgattcaagcattgtttttaagagggagaaggaagagaagagctttaaaaataatgttagagaaggtgtgcctgaaggggaaaagtatgatgagaatttcgggaaaatcaaactgggctgcaacttccttcattatttgctgagcttgaagactggtgttgctcaagcccatttaaaaaatgtcctattactggctgggcatggtggctcacgcctgtaatcttagcactttgggaggctgaggtgggtggatcacctgaggtcaggagttcgagaccagcctggccaacatggtgaaactctgtctttactaa

SEQ ID NO: 383878 - DNA, 142 bp, Homo sapiens
ggaagaactggagggtttccccttagaatagagaagggcctgttcttctaacacttctgaaatagctggcttttgacttagattgagccccaaaatttggagctctttttcattttacacacaaaaactagctgcagaaaaa

SEQ ID NO: 383879 - DNA, 529 bp, Homo sapiens
  misc_feature (526)..(526): n is a, c, g, or t
  misc_feature (528)..(528): n is a, c, g, or t
atgcagttacctagtcttgtggttctgccttgacattctctctcaaatgtacccacttttctccatgcctctgccatggtcccagtccaggcatgcaccctcaagctcctgaactatcccaacaccatccttactagccatctgcatccttttgatttctctccatttattatctacactgcaggtagggccatacgtaaaccttaccatatcatcttccttccatgacacatcctgtaggatgaagtcatttaatcctttacatgactggctgtgctcagacctagactgcctcacaagctcatccaacacccatctaccttctagtgccactgtttttttttcagttcctcacacgtgctgcactcttgattctggcttttttgcatgtgctgttcccattgcctgaaatactttccctctaccctgtccatctagctaattcttacttaactttcaaatctcagcttcaactgagctttcctgaccctttttgaaaacttaattttgcatcgcagtaaaaaanana

SEQ ID NO: 383880 - DNA, 436 bp, Homo sapiens
tttccattcacatgtatcaactctacctctggtagattatcagctctggagaggagtcatctatttctttgtctcctaaaagtggctatctacgtgatccaaaatatgcagcagaatttgcatatatgtgcatgttaattgagtgtttgtgaaaattgagacttggatgctgaagagaacaggtaggtttctcacccccttgaaaatattccattaaaagccttcccaaataaactcatgttctgctcttgggacaaaataaaaatacttggttacctatgaatctagtactattgtttcagtctctcttcagatttaaagagtgaggttcatcgtctgagcagtttaattacaaacaacctctcttaattcctgtattgctggagctcagagcacactcagatcaagggagacgacgtgccactttgtacagggc

SEQ ID NO: 383881 - DNA, 487 bp, Homo sapiens
tgaaaataagttgtggtgtttttgtgaacctggggtcctaaacacagcttccaaagtctttttatgttagggggtacataaatgcaattgcagtgtctgtaatgaaatgctaatcccatcgcacacacaaaggatctcctaaatgatgagcaagcataacttctgtcagtttactcaagaaaataggtttttggcaacgattagaaaaaacaattcgtaaatatttggctatgttttgtagccccaagacctgctgagtggacataactggaagtgagttgctgtaagaaatctgccagggatgagaggtgatggtggtttgtttggaagatgtgaggccagtatagaatgagtgcaggttccttttgataccgtaagtccattttaaagcacacctagaatctcttgatacctgcccctagatttgctcacttaagccataggtagccagctcattatatgcagtaacggtaagttaggcctttta

SEQ ID NO: 383882 - DNA, 440 bp, Homo sapiens
ataccaacctccttattctgctgcgtctgctgccacctccacctccgcttcagggcttccctctcagctcccgtcctcatcatggtatagagagctttccgtaacaccaggtcccggtcgtgaaacccccacattcctggagccaggaggccagggagaacagaggagagaaaggacatgagaaaagacaagccagaggtgatgcaaactaccacgacccactgggagagcctcctgtctgcacgcagaacagcctccttactcagcggttctgttaattcccctccagccttcttcctgaggcttcccattaaggcaactaggtgaatgaagcagcacatcctgttcttagcaaaacaatagtgggtgaaaatcaagtgcttttcctctctggtgcccttggcaacccattctcaatgttgctggtttgctttgaggac

SEQ ID NO: 383883 - DNA, 874 bp, Homo sapiens
tagctcggtacccccattactttgtcacaggcacaatcacagatggaagccaggtgctgtgggtgccccaaggaggaattgcctcgggtggattagggaagacttcccagctaaggcttggagcacaggtaggagttcatttggtgctaatagtagaagtcgtggccaggtgcagtggctcacgcctgtaatcccagcttgtgctttgggaggccaaggcaggtggatcatttgaggtcaggagttcaagaccagcatggcttacatgctaaaacccagtctctactaaaaatacaaaaaaaaaaaaaaaaatttagccaggtgtggtggcgggcacctgtaatccaagctactcaggaggctgaggcaggagaatcgcttgaacccgggaggcagaagttgcagtgagctgagatcataccattgtacttcagcctgggcaacaagagaggggaaatccgtccaaaaaaaaaaaaagaaaaaaaagtagaaatagaaggcaatagtagaaggtattccagcagagggaacggcatttgaaaaggcttggcctcctcaggggacgtcaagtacttggttagggctagggcacaggcaagccactgtaactctgccacttgctagttctttggtatctgaataaacacacctattgatttttatcatatgttctatgccctgagaaaagcgtgaccagttcacatgagccagccaaccttccttcctcccttcctgccctcctttcctttttccctccttctctttcctttcttcctcctctccctcctgccttccatttccctccctccctgcactggggacaggtgggtgttgtgagagcaggatggtactgtgacaaagtgcatggggacca

SEQ ID NO: 383884 - DNA, 2604 bp, Homo sapiens
gagctatacgatcggctcggaccctgcgtccatcagagagaccatatgagcacagaactaaacactcagtgaatgattcatttcctgttgtatttcctgctctggggaagacttacagtgagcaccagaacttaatgttgctccagaaatatattgctgctctgtcgttgttttccaggaaggggaagaataagtgggcactggaacttaatcctgaccttttagttgtttctaggccagggaaaggctccacacaagaacctgggcttaatgaaaactctgaccagggaattgaggccttcctgtgaattgtgccccctgtggcactatggccccagcctgtctctttatcatggcatccctgctgatgggagcaagctgcgcagtcttctcccatcagcctccctgttccctccctgtcccagaccgtgggagttaaaacaaacactacccagggttgattgtcagtgggaaccactcactgtttccccagtccaaggaacggaaacaaagtgagcaggcagatgctaggtgaggccacaccacgaggggccagccccagacacaggaatctaaccagatagttggcttagggttaagggccttttagattctaaagtttcacagtagaaaggatgtcggggtctcaattccaagccctgtctaggaaggaagcccccctgcagcctcctgatggcttgatggtatctggcacctgactgtacatacccccactcctactccagataggtgacacacttccaacactgtgaattgctcagcccaaagggcatctgacttcacactgagctgagcctatcctgtgtccctggacttgcccgttggtgccagctctgctttgaggatccacagagcctacctgccctcagacctgccacagcccttcaaagggcaagaggcacaaccatgaccctcaggctagctcttgattccaggccagagacccagtcctttcaattatgctttaatgctttacagaccacagtgtgggaacccgccctcatccctgccaccttctctccaatttttctgtaactcgggagcatgcagtggcaggcctgtgccgaaggacccatccccatctcatctcatgcttgttgcctgccgctatgatataatccctgggcctttggagtttcttccatatcctggtccttggcatctgggctgggggggtccatggacagtgctggacatttcctgattcctggaactcagtcccaggattagggttttctgttccccttggcggtaatcccacgctgattcccataagcagggccagttcttggtcttcttaaaggcagtgctggcctagcagaggccttgctggttgcatctgttctttctggccagagaccttggtgggtaacagctggtgcagcctcacagcccatgtgctcagggcctcagagccatgtgtggtgccagtggccagcaccccatgagatgcaaacatcaggggatccagctaatgcctcattcccccttggggcctggcctagactgggtatgtggggtgtgtgtgtgtgtgtgtgtgtgtgtgtgtgtgtgtgtgtgtgtatttgttcatctatctatccatccatccatccatccatccatccatccagggattcattcattctacatgccaaatgtgggccaggctcaagggacccagagaggagagccctctgggagtccccagtctggtagaggaagcaggagtagacacaatgagagcacattagaaacaggcacaatcacagatggaagccaggtgctgtgggtgccccaaggaggaattgcctcgggtggattagggaagacttcccagctaaggcttggagcacaggtaggagttcatttggtgctaatagtagaagtcgtggccaggtgcagtggctcacgcctgtaatcccagcttgtgctttgggaggccaaggcaggtggatcatttgaggtcaggagttcaagaccagcatggcttacatgctaaaacccagtctctactaaaaatacaaaaaaaaaaaaaaaaatttagccaggtgtggtggcgggcacctgtaatccaagctactcaggaggctgaggcaggagaatcgcttgaacccgggaggcagaagttgcagtgagctgagatcataccattgtacttcagcctgggcaacaagagaggggaaatccgtccaaaaaaaaaaaaagaaaaaaaagtagaaatagaaggcaatagtagaaggtattccagcagagggaacggcatttgaaaaggcttggcctcctcaggggacgtcaagtacttggttagggctagggcacaggcaagccactgtaactctgccacttgctagttctttggtatctgaataaacacacctattgatttttatcatatgttctatgccctgagaaaagcgtgaccagttcacatgagccagccaaccttccttcctcccttcctgccctcctttcctttttccctccttctctttcctttcttcctcctctccctcctgccttccatttccctccctccctgcactggggacaggtgggtgttgtgagagcaggatggtactgtgacaaagtgcatggggacca

SEQ ID NO: 383885 - DNA, 514 bp, Homo sapiens
aatttaggaggacgaaaagtccaaaaacccaatagaaaaatggccaaaaggcatgaacagacaattcagaaagatataaaagtggtctacatatatatgtgtgggtcacacctgtggtctcagctacttgggaggctgaggtgggaggatggcttgaacccaagatgttaatgttaaggctgcagtgagccattttcaccccactgcactccagcctgcctgacaaagagggaccctgtctcaaaaaaagaaaaagaaaaaaaaagcatatatatatataaagatatatataaagagatatatatataaagagatatatatatacacacacacatacataaatgtttaacttcacttagagaaatgcagattaaaattacactgggccaggcacagtggctcacacttgtaatcctagcacttgggaggctgaggtaggtggattgtttaagcccaggagtttgagaccagtgtggacaacatggcgagactcccatctcaaacaaaaaaaaaa

SEQ ID NO: 383886 - DNA, 861 bp, Homo sapiens
aacaacttctggcagaggaacgtggtgacatttcattatgatgtctaaacttagaacttctggagaatttggaaggatacattattcgagaatcatcctttggattcttcaaagccacaggatacattcaatgtcagtaaccatattcttgatccctgtaacatttattggcgtttcgcgtaggtctctgataaatgtttgacgtctttgtgtgtcttcacactttgttatcctgaaactgtgtcatgtagacataaatggtcacagtttgtcttaaaagtctttagggaaaaggtgatactaggcacttggggctaggaaggtcgtgcagagcagagggaaggaaaaaggccccactgctgtcttaccaaatgaatgggaagatttaagatctttcaaagcaagttgagtctagacccttgcccaagttttgtaacatgattttgtctctttccccccttttcatgcagattatccatggagttagcatgcagatagcatggagtttgtctgatagaagttgggctctggtggaagtacggaaattgaatggtcagggaaagatagaatgcaggtttcttagggagtctctattaggtttccagcctgccttcctgggagtggaagagagatgaggttgtgcccttcaaggaggagctttacagagataaagaaactaagccctagaagaggaactctgccagtctatttacaaagcctgcactgaaagctagaccatatactctttggagagggatgatgtgaccagctcatagactagggcctataccatgtaataggtactcaaacttttttaaaataaatgaatcaataaatgaatgtctttatgtaatcgggtca

SEQ ID NO: 383887 - DNA, 249 bp, Homo sapiens
gccccccccccccgtccctgctccttcccccctctccttctcactccccccctatataaagaaactaagccctagaagaggaactctgccagtctatttacaaagcctgcactgaaagctagaccatatactctttggagagggatgatgtgaccagctcatagactagggcctataccatgtaataggtactcaaacttttttaaaataaatgaatcaataaatgaatgtctttatgtaatcgggtca

SEQ ID NO: 383888 - DNA, 865 bp, Homo sapiens
ccaccataatgtggattgagggagggtacaagagtctagagcctgctgaagctaagagatctggcctcttccctccacagcttctcagaggacctaggagtcttgaagggatcccaggcaacaataataacagtaacaaaacctctagtggcaatggttttctctgtaactcctactgtggcttctgtatgtaccttcggctgccaccatgggttattgctcccttatttgagatacaaatggtgctctcaatgacccaaatccagtcccagctacatcttcactcacacaccatgactaaacttcctgactgccactgaaaccccaacttggtgtgaatctgccctggtgagtattaagctggcagcaggaaatgaaatgagctctttggtgcctgctaacggggacaggggcatttggaaaggttggctctcaattctttcggctaatgggaggaaagtgtaaagaatcaacagaagaatggcttctgaacgatccaatctggtttggaaattttccatagtccttacttgcaaggactggaaatttctgtctgggagttcatgacacttgaaccactgcagccacagggtgaagacttgactccgaagctcaaactgttaagctgtttaggccccccattctactccagtggggctgaaacacttctaatctctgactgaagagaaatactaatatgttctccccacaccccccatctctcgctctcgctctctctctctgattatggtctagcaaattctcacaccttccccggagatggaaaaaaatagaagaaacaaagggcttaggtttcagatatattttctttccagctcctgctgcgcttgtggctggcatgtgg

SEQ ID NO: 383889 - DNA, 565 bp, Homo sapiens
gtttttaccagcacaaggccacccaatattcttatttgcaaaaagaggaacccgttcaaattttcccactggcttccacattcatggacattcattctctttcttctcacgattaccacagattgatcgatctatctatggctttttattccctctttgcccttaaagcttttaattcaactatgtagactttgtacttccccccaacccctccacccaaaaccttttaaaaaatctcttctccccctaaggtaaatcttcaattgtaaatgaatgtccttccctaattttaaagtttaatatatggtcattctctaaatttatatcttttctgctcatgaaactgcacattttttacagaagaaaacttgctttaccatttactgagcaatacttatatagaactttatgtgccaagcacttataaataccaatccctttaatcctcataatagtcctattaagtaggtactattagcactctcattttacagagaaataaactgttcaaggacacacagctagtaagtgaggagctgggattcaacccaagcagttggctgga

SEQ ID NO: 383890 - DNA, 353 bp, Homo sapiens
cacccaggcgcacttctgcaccaggcgcacttctcagtggagccacatcttctggcggccccttggcttcctaccagaaggccaacatggacaatgcgcacccaggcgcacttctgtggaatggagtccaattctcagggacagagaaagtgctccggtgtgtcctgctggtggagagcacaatcgtcactggagactggatgagctcagggcaggctgatggattattcaggagaggcttcataggggccaggggcctgagctgggctctccaggggtgcagcctgggcaggggagaaagggagaactctaggaaggggacggtaaaatcatgccagaagtgcgcctgggtg

SEQ ID NO: 383891 - DNA, 2617 bp, Homo sapiens
  misc_feature (2614)..(2614): n is a, c, g, or t
ggctccgggacgagatcaacgagaagcagaagaccattgatgagctcaaagacctaaatcagaagctccagttagagctagagaagcttcaggctgactacgagaagctgaagagcgaagaacacgagaagagcaccaagctgcaggagctgacatttctgtacgagcgacatgagcagtccaagcaggacctcaagggtctggaggagacagttgcccgggaactccagaccctccacaaccttcgcaagctgttcgttcaagacgtcacgactcgagtcaagaaaagtgcagaaatggagcccgaagacagtggggggattcactcccaaaagcagaagatttcctttcttgagaacaacctggaacagcttacaaaggttcacaaacagctggtacgtgacaatgcagatctgcgttgtgagcttcctaaattggaaaaacgacttagggctacggctgagagagttaaggccctggagggtgcactgaaggaggccaaggagggcgccatgaaggagcaagcgccggtaccagcacggaggtggaccgcatcaaggaggccgttcgctacaagagctcgggcaaacggggccattctgcccagattgccaaacccgtccggcctggccactacccagcatcctcacccaccaacccctatggcacccggagccctgagtgcatcagttacaccaacagcctcttccagaactaccagaatctctacctgcaggccacacccagctccacctcagatatgtactttgcaaactcctgtaccagcagtggagccacatcttctggcggccccttggcttcctaccagaaggccaacatggacaatggaaatgccacagatatcaatgacaataggagtgacctgccgtgtggctatgaggctgaggaccaggccaagcttttccctctccaccaagagacagcagccagctaatctcccacacccacggctgcatacctgcactttcagtttctaagagggactgaggcctcttctcagcatgctgcaaacctgtggtctctgatactaactccctccccaacccctgttgttggactgtactatgtttgatgtcttctcttacttactctgtatctctttgtactctgtatctatatatcaaaagctgctgctatgtctctcttctgtcttattctcaagtatctactgatgtatttagcaatttcaaagcatagtctaccttccttatttggggcaatagggaggagggtgaatgtttcttctttctcatctactcgtctcacactgagtggtgttagtcactgagtagaggtcacagagatgacaaaaggaaaaatgggagctagagggttgtgacccttcatacacacacgcacgcacgcacacaaacatgcacacacgcatgcacacacacaaagccttaagcagaagaatgtcttagcatcatgagacagagaaatagactcttcctccctcctctttcacatatagcacaggggaaggtaaaatggaagggctgctaattgagacatataattttcttcatacacccctcaccttaatcaaaggattcaggtgttacttctgccctacaaagtctgccttttgcctccctcttcctgttttcccctggactgagaaatgggttgctcaagggaccatttccctttttcttcaagctccttttgatattccctgccccagagctcatgaccagaacccagagctgatttaaaatattttgaaaaatggaggaggcagactgctcccagcagcctgtcaatggctgctcatctgtccatggagatggttacaggcaggtgtagtcaaaatgattgattccttgggtttgggggtgaataggctgggaaatttctgagccttttttttttgtcacagtgccctcaagttgaagtgatgagctggatttctttcttgttccatactgggcggcatgctcctcccatctccaccccttggtttgggggcttccagctcattggcaaaatctctctagttgccttcctttcaagctggagcctgacttttccccaatgtacattttttttttctccacaaagagttccttctctaatgtccccatctggtattaagtgcactttaaagaaaggggcagggtggattttcaagaggtgggaagctctaaggcttgaccgtgaggggtcttctcccagccattctcagcccatatgcagcaccctccatactgaagaggactgttgttttagtttcagacggtcctttccttccacatggtgctaaggtggttttctaggtaactgcagggatggaggtcactagccattccaaaccaggagagaaagtctggtgtcctgatatccagtcttttctaggaggaagaccaagattctccagcggcagggcagcctatcacccaacttctaagtcaggaaaggaagctgagtgggaatgccagctggtaagcgcaggctgcactggccccttcctcagaacaatggttttcaaactactccacagaatcctcagggtctcttaggactgttcaagggctcatttgctgaggagcctttgaacagtcagtcctaagagacgctgagacttcttccncca

SEQ ID NO: 383892 - DNA, 1881 bp, Homo sapiens
ggctccgggacgagatcaacgagaagcagaagaccattgatgagctcaaagacctaaatcagaagctccagttagagctagagaagcttcaggctgactacgagaagctgaagagcgaagaacacgagaagagcaccaagctgcaggagctgacatttctgtacgagcgacatgagcagtccaagcaggacctcaagggtctggaggagacagttgcccgggaactccagaccctccacaaccttcgcaagctgttcgttcaagacgtcacgactcgagtcaagaaaagtgcagaaatggagcccgaagacagtggggggattcactcccaaaagcagaagatttcctttcttgagaacaacctggaacagcttacaaaggttcacaaacagctggtacgtgacaatgcagatctgcgttgtgagcttcctaaattggaaaaacgacttagggctacggctgagagagttaaggccctggagggtgcactgaaggaggccaaggagggcgccatgaaggagcaagcgccggtaccagcacggaggtggaccgcatcaaggaggccgttcgctacaagagctcgggcaaacggggccattctgcccagattgccaaacccgtccggcctggccactacccagcatcctcacccaccaacccctatggcacccggagccctgagtgcatcagttacaccaacagcctcttccagaactaccagaatctctacctgcaggccacacccagctccacctcagatatgtactttgcaaactcctgtaccagcagtggagccacatcttctggcggccccttggcttcctaccagaaggccaacatggacaatggaaatgccacagatatcaatgacaataggagtgacctgccgtgtggctatgaggctgaggaccaggccaagcttttccctctccaccaagagacagcagccagctaatctcccacacccacggctgcatacctgcactttcagtttctaagagggactgaggcctcttctcagcatgctgcaaacctgtggtctctgatactaactccctccccaacccctgttgttggactgtactatgtttgatgtcttctcttacttactctgtatctctttgtactctgtatctatatatcaaaagctgctgctatgtctctcttctgtcttattctcaagtatctactgatgtatttagcaatttcaaagcatagtctaccttccttatttggggcaatagggaggagggtgaatgtttcttctttctcatctactcgtctcacactgagtggtgttagtcactgagtagaggtcacagagatgacaaaaggaaaaatgggagctagagggttgtgacccttcatacacacacgcacgcacgcacacaaacatgcacacacgcatgcacacacacaaagccttaagcagaagaatgtcttagcatcatgagacagagaaatagactcttcctccctcctctttcacatatagcacaggggaaggtaaaatggaagggctgctaattgagacatataattttcttcatacacccctcaccttaatcaaaggattcaggtgttacttctgccctacaaagtctgccttttgcctccctcttcctgttttcccctggactgagaaatgggttgctcaagggaccatttccctttttcttcaagctccttttgatattccctgccccagagctcatgaccagaacccagagctgatttaaaatattttgaaaaatggaggaggcagactgctcccagcagcctgtcaatggctgctcatctgtccatggagatggttacaggcaggtgtagtcaaaatgattgattcctggtgacatggctgcaggtatcctctagaacagc

SEQ ID NO: 383893 - DNA, 2688 bp, Homo sapiens
ggctccgggacgagatcaacgagaagcagaagaccattgatgagctcaaagacctaaatcagaagctccagttagagctagagaagcttcaggctgactacgagaagctgaagagcgaagaacacgagaagagcaccaagctgcaggagctgacatttctgtacgagcgacatgagcagtccaagcaggacctcaagggtctggaggagacagttgcccgggaactccagaccctccacaaccttcgcaagctgttcgttcaagacgtcacgactcgagtcaagaaaagtgcagaaatggagcccgaagacagtggggggattcactcccaaaagcagaagatttcctttcttgagaacaacctggaacagcttacaaaggttcacaaacagctggtacgtgacaatgcagatctgcgttgtgagcttcctaaattggaaaaacgacttagggctacggctgagagagttaaggccctggagggtgcactgaaggaggccaaggagggcgccatgaaggagcaagcgccggtaccagcacggaggtggaccgcatcaaggaggccgttcgctacaagagctcgggcaaacggggccattctgcccagattgccaaacccgtccggcctggccactacccagcatcctcacccaccaacccctatggcacccggagccctgagtgcatcagttacaccaacagcctcttccagaactaccagaatctctacctgcaggccacacccagctccacctcagatatgtactttgcaaactcctgtaccagcagtggagccacatcttctggcggccccttggcttcctaccagaaggccaacatggacaatggaaatgccacagatatcaatgacaataggagtgacctgccgtgtggctatgaggctgaggaccaggccaagcttttccctctccaccaagagacagcagccagctaatctcccacacccacggctgcatacctgcactttcagtttctaagagggactgaggcctcttctcagcatgctgcaaacctgtggtctctgatactaactccctccccaacccctgttgttggactgtactatgtttgatgtcttctcttacttactctgtatctctttgtactctgtatctatatatcaaaagctgctgctatgtctctcttctgtcttattctcaagtatctactgatgtatttagcaatttcaaagcatagtctaccttccttatttggggcaatagggaggagggtgaatgtttcttctttctcatctactcgtctcacactgagtggtgttagtcactgagtagaggtcacagagatgacaaaaggaaaaatgggagctagagggttgtgacccttcatacacacacgcacgcacgcacacaaacatgcacacacgcatgcacacacacaaagccttaagcagaagaatgtcttagcatcatgagacagagaaatagactcttcctccctcctctttcacatatagcacaggggaaggtaaaatggaagggctgctaattgagacatataattttcttcatacacccctcaccttaatcaaaggattcaggtgttacttctgccctacaaagtctgccttttgcctccctcttcctgttttcccctggactgagaaatgggttgctcaagggaccatttccctttttcttcaagctccttttgatattccctgccccagagctcatgaccagaacccagagctgatttaaaatattttgaaaaatggaggaggcagactgctcccagcagcctgtcaatggctgctcatctgtccatggagatggttacaggcaggtgtagtcaaaatgattgattccttgggtttgggggtgaataggctgggaaatttctgagccttttttttttgtcacagtgccctcaagttgaagtgatgagctggatttctttcttgttccatactgggcggcatgctcctcccatctccaccccttggtttgggggcttccagctcattggcaaaatctctctagttgccttcctttcaagctggagcctgacttttccccaatgtacattttttttttctccacaaagagttccttctctaatgtccccatctggtattaagtgcactttaaagaaaggggcagggtggattttcaagaggtgggaagctctaaggcttgaccgtgaggggtcttctcccagccattctcagcccatatgcagcaccctccatactgaagaggactgttgttttagtttcagacggtcctttccttccacatggtgctaaggtggttttctaggtaactgcagggatggaggtcactagccattccaaaccaggagagaaagtctggtgtcctgatatccagtcttttctaggaggaagaccaagattctccagcggcagggcagcctatcacccaacttctaagtcaggaaaggaagctgagtgggaatgccagctggtaagcgcaggctgcactggcccatgactccttcaaggaaaagaggccctgctccctttacctgctgagctccttttagcagttagggagaactgcagggggaaaaataccagtggagtgtggaataaatccaaagcagtgatttttaaatgtttttcaaaaacaaatcttacatagaaccccaatataaaaaataaagtaatgcagacctgggcagtttgca

SEQ ID NO: 383894 - DNA, 1242 bp, Homo sapiens
  misc_feature (1239)..(1239): n is a, c, g, or t
ggctccgggacgagatcaacgagaagcagaagaccattgatgagctcaaagacctaaatcagaagctccagttagagctagagaagcttcaggctgactacgagaagctgaagagcgaagaacacgagaagagcaccaagctgcaggagctgacatttctgtacgagcgacatgagcagtccaagcaggacctcaagggtctggaggagacagttgcccgggaactccagaccctccacaaccttcgcaagctgttcgttcaagacgtcacgactcgagtcaagaaaagtgcagaaatggagcccgaagacagtggggggattcactcccaaaagcagaagatttcctttcttgagaacaacctggaacagcttacaaaggttcacaaacagctggtacgtgacaatgcagatctgcgttgtgagcttcctaaattggaaaaacgacttagggctacggctgagagagttaaggccctggagggtgcactgaaggaggccaaggagggcgccatgaaggagcaagcgccggtaccagcacggaggtggaccgcatcaaggaggccgttcgctacaagagctcgggcaaacggggccattctgcccagattgccaaacccgtccggcctggccactacccagcatcctcacccaccaacccctatggcacccggagccctgagtgcatcagttacaccaacagcctcttccagaactaccagaatctctacctgcaggccacacccagctccacctcagatatgtactttgcaaactcctgtaccagcagtggagccacatcttctggcggccccttggcttcctaccagaaggccaacatggacaatggaaatgccacagatatcaatgacaataggagtgacctgccgtgtggctatgaggctgaggaccaggccaagcttttccctctccaccaagagacagcagccagctaatctcccacacccacggctgcatacctgcactttcagctgctgagctccttttagcagttagggagaactgcagggggaaaaataccagtggagtgtggaataaatccaaagcagtgatttttaaatgtttttcaaaaacaaatcttacatagaacccccttcctcagaacaatggttttcaaactactccacagaatcctcagggtctcttaggactgttcaagggctcatttgctgaggagcctttgaacagtcagtcctaagagacgctgagacttcttccncca

SEQ ID NO: 383895 - DNA, 1241 bp, Homo sapiens
atgaagtccggtcctggcatccaagccgccatcgacctcacagcgggggccgcaggggggacagcgtgtgtactgactgggcagcccttcgacacaataaaagtgaagatgcagacgttccctgacctgtacaagggcctcaccgactgcttcctgaagacatacgcccaagtgggtctccggggcttctacaagggcaccggcccggcacttatggcctacgtcgccgaaaactcggtcctcttcatgtgctacgggttctgccagcagtttgtcaggaaagtggctggaatggacaagcaggcaaagctgagtgatctccagactgcagccgcggggtccttcgcctctgcatttgctgcactggctctctgccccactgagcttgtgaagtgccggctacagaccatgtatgaaatggagatgtcagggaagatagcaaaaagccataatacaatttggtctgtcgtgaagggtatccttaaaaaggatggccccttgggcttctaccatggactctcgagtactctacttcaagaagtaccgggttatttctttttctttggtggctatgaactgagccgatcgttttttgcgtcagggagatcaaaagatgaactaggccctgtccatttgatgttaagtggtggagttgctggaatttgcctgtggcttgtcgtgttcccagtggattgtattaaatccagaattcaagttctttccatgtatgggaaacaggcaggatttattggtaccctcttaagtgttgtgagaaatgaaggaatagtagccttatattctggactgaaagctactatgattcgagcaatccctgccaatggggcactgtttgtggcctacgaatacagcaggaagatgatgatgaaacagttggaagcatactgaagtgtcttggtgaacctggatccgagtccatgagtttgaggactacagttcatcacagggttcagcagagtacaagaccactgtctaattttgacttcatgggaattttggttttatcttcccttcttctaccctaaatcttaactttatggaagggcctctattttacatcatataatttctgcccataattgtattgaaataggaaagttgctgctcttgcacttgctggaatgtacagggtgggctggttggccctatgtacctaatctgaaaaactaaatatcgttctgtcagggcctttgcataaagccatttgtgtgtacatgcagttt

SEQ ID NO: 383896 - DNA, 468 bp, Homo sapiens
tagagacaggggtttcaccatgttggctaggctggtctcaaactcctgaccctcaagttgatctacccaccttggccctcccaaagtactgggattacagatgttgaagccactgcacctggccctggagaaaagttggagaagattctgatgtctgcactccagcactagaaatcctgatttgatagatctattacaggtgtggcctggacattggcagggttgaaatctccccaggtgattccaatttgcagtcagggtagagacctactgctttaaggtcctctcaaagcctggttctgcctgctcagctggtgggctcaggggagaaggtgagagttttaatggtaatgtccaaggcagcagtgtaacccggcttctgttgtcttacccaccctggttcatgggggtcaaggaaggcatggcccataagggacctgtggtagaggagtcaggcctcctagggcc

SEQ ID NO: 383897 - DNA, 1534 bp, Homo sapiens
  misc_feature (43)..(43): n is a, c, g, or t
  misc_feature (1534)..(1534): n is a, c, g, or t
caggcttaaaaatgaaaagaggaataaaagaaaaactgattgnaagcattagtggctgtacaatctgggggagacaaattctacagaattagtcaaataaagtcactaaacaaataacaacaacaataaaaaccctggaaataacaacttctgggaagaatcagaatccagaattcctataatacgtcatctaaaatatcacttgtaaaacaataacaacaaacaagacgtgcaaagaagcagaaaccctatagctagagaaacaggattgattttaagtgtgtgcatgtccaggggcattgttaaaaaacagtagcaatctgtaaggcaaataaatgaaaatccaacttgcaatactggttgcaagtcacaagtcaacagactagccaaaagtttaacagggagatctagaatgagatagccattgtgtaccttgataagctgccactatccctgttgatctttgttgttctggaaggctacacacataggtgcagctgtgtgcataatctggagacaccagagaaggctttaactaactattcatccatggctgaatatgagacctcataaacttacggaggagatgcaagaaggcatgtcagaaagtaaactgtatcagatttgtaaactgcctgaaggttgaaagtgttctccaacccacaaacagatccattgtcaaagggtagaaatgttactgaatcaagatgtttaagtactgcctctgaccactcaacatgatcactacactatgcttaccaggggtaatctctagaatccaggcttaaaatgaaaagaggagtaaaagaaaaactgattggaaacattagtggctgtgcaatctgggggagacaaattctacagaaatagtcaaacaaagtcactgaacaaaacaacaacaataaaaatcctagaaataatgacaacttctgggaagaatcagaatccagaattcctataatatgttatctaaaatatcacttgtaaaacaacaacaacaaaaaaaacaagatgtgcaaagaagcaggaaaatatgacccatactcagaaaaaaagtagttaaaacatactatatttgacgggtacagatttggacttcgcagaaaaagacttcaaagcagctattataaatctgttcaaaggtgaaagcaaaccatgtttaaaaagtgaatggaaagtattattataataattcactagagaatatcaataaagagatataaattaccaaaaaaaagaaccaaatggaagttctggagttgaaaactacagtaattgaaacaaaaaatttactcaaggggctcaacagcagattcaagatgtcaggagaaagatttagcaaacttgaagatagataaataggacttatccaattggaagaacagaaaacaaatagagaaagatgaacagggcctcagagacctataggacaccattaagcacagcaacatatgtttcatgggagtctcataagcaattgaaagaaagaaagaggggaaagaatatttgaggaaataatgcccaaaaactcacn

SEQ ID NO: 383898 - DNA, 490 bp, Homo sapiens
tcaggggcaccagccaaaccaggaactcgatggaccaccctcatggggccccagagcagcctgagccagggtcagatgggcagaaatgctcctcctctcttctccacttcccccctcctgctctccctggcccgctccctgtcccctgctatcccagtctcatcctggccccctttccctcctaactccgctgtcacttctctcctcttggtccctagaagtgagagtcctgaggcacaggaagagtgagtagctgcgtgcgcggctcctggctgaggctgaggcgcggggtggggggaagaggcaggaaaagcacgggaggagggcccagccttgaggaaagggcaggggcaggggctggcaggcgagagaacctcgatgcatgggtggggccttgtacctcatacctaccctcatacccacatatgcacccaagcattctgcgcctggctgatggttttgcctaaataaatgagtaagccacaccgat

SEQ ID NO: 383899 - DNA, 882 bp, Homo sapiens
ctacatgagtcactgtagaaaggaatggagactgtgactggcttggaccaatagtgttttgctacctgtatgggagtggggctgggttttcctcccctggttactccatgaatggatatctgcacaaaaattggaatggctgctgaaaaggcaaacagcagtgtctgtttcagctcttaattattagctgagtatgcacccctctccagtctcagctcttgctttttttttttttgagtcgtggttgcatattgaacagactgtagttctgaaatgcatcatgctattgctcacttttattctttccttccctttgtctggaattattgccccctccctgccccaacacattgccctctggtccttgcctacctatcgtggttacttttaggtgtcaacttgactgggttgagggatgcctagatggctggtgaagcatcatttctggttgtgtctgtgagtatgttcccaggagagaatgaccttgagtcagtgaactgagagaggaagactcactctttgtgggcaggcacctcccatgggctgggtactggctgggaaaacggggaagaagagggatcctccctttttgctctctcctctccagagcgggacatcttttcttctactgcccctggataccagactccaggttcttcaacttttggactctgggacttgaaccggaggccttccaggtgctctcaggccttctgcctctaacttggaggttgcaccattgacttccctcattctgaggtttctagactgagccacactaatggtttctttggttctccagcttgcaaatggtctattgcggggcttctcttcctctgtaatcatgtaagccaattcctctaataaattctttctacaaaa

SEQ ID NO: 383900 - DNA, 245 bp, Homo sapiens
tgacccagacctctaaataggtaagggtgtgtgtgtgtgtgtgtgtgtgtgtgtgtgtgtgtagaagtgatggcacattaactccaacatataggtactatgggccttttaaatctatataactcttagagcttattaaagttcctttatgtattatctcatgtgattctccccaagagggaagaatgaccattatgtaccatgtaacctcatgttacaggtaggtaactaatactgagagaagt

SEQ ID NO: 383901 - DNA, 419 bp, Homo sapiens
cccaggatctctctattgtttcttactgattatgtatctgcaatgattgcaaaataaaaaggtttaatttttaaaaaggattaaacattacatagcatacacttgagtaaaagacaaaatctggctaaggattatttttgtcctaagtaatatgtggattttgtacaacataaatcacaatcccctaaaatctatattgtaaattgataaaatgtaaaacctgtgtattacagaataaaagatgaacaaaaattacaaaacactaagaaataccctagtgccccaatgtatcagtagacaaacacatggacagatagtttgcaaaaggggaagtacatatggtgaataaacattatgagatgtctaatattgttagctatcaatgaaacatgaaataaaatgatgacattgcacacatc

SEQ ID NO: 383902 - DNA, 249 bp, Homo sapiens
tgtgtaaggcttgtccttatacagtggggtctcgctatgttgcccaggctggtcccgaacttctgggctcagaggatctgctggcatcagcctcacaaagtgctgggattacaggtgtcagccaccgtgcctggcccaggcctttccttttgaatgaatgaatggcttcatcccaaagaaacagttggatcctacatctaggaagataggtacccatgtgtgttccatggaaacaccacagctcatgat

SEQ ID NO: 383903 - DNA, 1502 bp, Homo sapiens
acgcgggttaatgaaataaattgtctactatatataggttttgtgtgaacatacaaatgaaatgtactgtctcagaataatgtggttggggaaatatctggagacaaatacaatgcaattgcaacataacagttacacaccagactcttaacaggaataatgtagtgtgatacttgaaagcctaaactctgaaatgagattgcctgagctgagatctcaattcctctaactatgtaaccctgggcgagttacttcaaagtgcctccgttttcttctctgcaaaataaccattgatttgaaatgtggaggattttgaaacctaagctaagaaatgtgggtttgatatgctgaaaaatagggagctacttaaaatttttgaacaagcaagtcacatgatgaaattaattgaggaacattgtatttgtgattgcatatggatggagtgggaggacctagaggcaaagacattagataggagaccaccagaacaaactagacgtgaaaggtgcagctgtggaaatggaaagagatgggcaaaaccaaaaatcaccacagagaaaaaaaatcatccagatttcatgatagattggatgtattttgaaacacctctctccatacaaatgaaataattcagcaaaattctagaaaatgctggtgtaggagctcagtggaaatctcccgtaagtgctgtgagaaattataaattctggggactccagctgatacagtgtgcattcacttacagcttcctttgcccctttgtacactagagcacaacaggaaatattggcttatctctgtaggaagtgtctctataggagttgcttactgaactgaatatctttgtttagaactaattgacctttctaaaacagcatttttaaagagcttactcaaataaggcagactttaaccatctgataagtcagagacaaatcagtcctcttctaagcaaggttgacagtcagtgcaagagaaaagaaagcacagaaagaaaggcaccatcagacaaaagaacagtgtattagtaaaaaccagataattaagaaaattttatttaatgtgaacattgaattctaacacaaatccttttcctgcattatgatagtatctgtgtgaaccaaccttttttcagccctttttgttatggaatgttaagaatgttagtttacaaggttataaagtagaagagtctaattagaaaccagaaaatatctcagtcttttggtctgaatttgttttcctttggttagattcttaaagtagaaaaaaaaaaaactactacttattttgtaaacattttgaggattttgattcagatattttaaattattatgagagataaagaataaccctgtccaaaaaagtaagaaaatgaataaaatttgtttaaaagaggattctcttaaaatataaccaaagggacagattttgacagcagtcttcattgttgttccatatgagtgttttctaaacctaacagatgtaagcaataaataagt

SEQ ID NO: 383904 - DNA, 356 bp, Homo sapiens
ccctataatagtcccgtgaatagggctagcagtgggatttttgtgttataggcgaggaaataaacactccttttgctgagactaaagagccaggttggggtctctggacacatagtgcaatcaagggaggcttaagacagcagaggccctcagagaagacgttcattctcccagctacttgctaagcacgtgccatgtgatctgggcagtcctgggcacaccagtggtgaaaatacatggtcctgcctgcctgcctggagcttctatttttctgatgggagaatgctgctccattttgttattggaggaacttgtgcagcaaagcctgttggggaaaatggcgggctagaaacctg

SEQ ID NO: 383905 - DNA, 770 bp, Homo sapiens
ggatgctaaaaccacccctatgaaccttgttttctgttgaattgtgtttcccaagaagataatattgcagtcttgatccccaatatttgcaaatatgaccttatttagaaatagggtctttgcagatgtaatcaagaagagggcctactcgtcctaacccaatgactggtatccttataagaagaagaaatttggatgcagagacacaccagagaatgtcctgggatgacagaggcaaagattaaagtggagcatctacaagccaaggaacaccaaggattgctagaggtcaccaaaatctaagagagaggcatggaacagattctctcggtgcctccagaaggatcaatcctgccgacacctagatttcagacttctaatctccagaactgtgagagaatcaatttctgttgttgtgagccactcagtttgcagtaatagtatccctaggaaactcacacacctctgtggatgctggccttgtcctgggctcctccacatgtctcacagccacacacaaggccatcaactcagacatggtggccaggattctcctagtcttgcaaactgaggctgcaggtcagagaatctctcctgctttttgggtatagggaataaaattatcatgcctgggcgttatcaggtctcatttgacttgcttctacatgagatctttctgtatagtgtgatattagaggaactccctggacttaggagcccaaatgttcatgatgagtcaggctttgggttgagagcccaggctttggggt

SEQ ID NO: 383906 - DNA, 479 bp, Homo sapiens
ggtataatcacccagattacatttctctatgagaaacattcacctcgcattttgaaaagcatagaaaaattcactgccaaggactagctggccaacagtagccctagggagatatatttccgttctcccacccagcctctctgcacccatcctcacaatgacatacaccatagtggaagtaacatatgacttatggtgggaaaaaaaataacaaatgataaaatgggaaggagggcaaggggaaaatagagagactgctaccccaccacctgaatggaaggggaccccagcacaaggaggaggcttcagctacactgcacacatgtcccccgggtgtctgaacctgccagaaatctcttagtccattttcctctggttgatagcactgcagagaaattgtttaatgtgtgtctagggtattgttcattgaggaaaagttcagggaatagactattagaattcattaatctccactcaaa

SEQ ID NO: 383907 - DNA, 480 bp, Homo sapiens
gattagctaaatgcagatggccaccgtgagcccttctccagggcacgggtgaggcgacagcaagtagcatcggtctgcaaggtggcgttatctagaagttgtgttcttgtcgtttctctttactggtgcacatcacagagctggagggacacagctggataatcctgggtccagactcagagccttaagctccttttacttatttttttaataacaaagaggaatctcatgttttgctccaacgaacgacataaaggagaagtagtgcatattttaggaactttgtgtcccagataccaaaaagattttgtaccatccttagaataagcagatagacaccatctccccagcccacaaggtcacagctttgaaggttatacgtgtgtttggatgtttacgatcccatttccaggacctttgcactttttatttctcctttccgggaatgctctttccccacatcttggcagcctcccgctc

SEQ ID NO: 383908 - DNA, 159 bp, Homo sapiens
agtgaggtgtgtccacgtcatagcctgggccccgggggattgactgcatcacagggcaggcatttagagggaaccttggccatcactcactcctaattttaatgacatgcattagctaaattgtgttctgagtattcattcggcgctgtttatggtgtg

SEQ ID NO: 383909 - DNA, 742 bp, Homo sapiens
taccagctgatattttctttcctcaggaccagctgttcaggagcatcccggacgagagccaggcacatttgagacttggatccaactaaagaccgccgcagattcttctgcagcaatgtcggtgttagaagaaaatcggccgtttgctcaacaattatccaatgtctactttacaatactttcgctgttctgttttaagctttttgtgaaaatcagccttgccatcctcagtcatttctacatagtgaaaggcaaccgcaaggaagcggcaaggatagcagctgaattttatggagtaacccaaggacaaggttcctgggcagatcgatcaccactacatgaagcagcaagtcaaggtcgccttcttgctctgagaacattattatcacaggtaatatattacatatagtttaaaatataccccctttccatgtgcacagaacatggtcaaaaccaatcaatgcaaatatgataaaaccacttacattttacttctgcccttttattttaactcatgtcagagaagtcaatagtttctcacttatctttgaaacttcttttataaatattttgatataattgtatgtcttagtatttcagatttctcagacagcatatttgttcatcgatagacatttaaagaagtaatgattggatttatgtgttattgattgagctttctaaatatgcttaactctgcacaatatgtgcagctaattacagacttagttcaataataaca

SEQ ID NO: 383910 - DNA, 526 bp, Homo sapiens
cagacattcagcagatctgctctcccaatcagggagagcagagagtcccactaagactgcaggttggaataaagaacagcagggttcctgggcagatcgatcaccactacatgaagcagcaagtcaaggtcgccttcttgctctgagaacattattatcacagggttataatgtaaatgcagtaaccttagaccatgtcaccccattgcacgaagcctgccttggagatcacgtggcatgtgccagaactctgctggaagcaggagctaatgtaaatgcaatcacgatagatggcgtgactccgttattcaacgcatgctcccaaggcagtccaagctgtgcagagctgcttctggagtatggtgccaaagcccagctggagtcatgtcttccatccccaacgcatgaggccgccagtaaaggtcaccatgaatgtcttgacatcctgatatcctggggcatagatgttgaccaagaaattcctcatttgggagactcctctctatgtagcttgtatgtcacagca

SEQ ID NO: 383911 - DNA, 754 bp, Homo sapiens
taccagctgatattttctttcctcaggaccagctgttcaggagcatcccggacgagagccaggcacatttgagacttggatccaactaaagaccgccgcagattcttctgcagcaatgtcggtgttagaagaaaatcggccgtttgctcaacaattatccaatgtctactttacaatactttcgctgttctgttttaagctttttgtgaaaatcagccttgccatcctcagtcatttctacatagtgaaaggcaaccgcaaggaagcggcaaggatagcagctgaattttatggagtaacccaaggacaaggttcctgggcagatcgatcaccactacatgaagcagcaagtcaaggtcgccttcttgctctgagaacattattatcacagggttataatgtaaatgcagtaaccttagaccatgtcaccccattgcacgaagcctgccttggagatcacgtggcatgtgccagaactctgctggaagcaggagctaatgtaaatgcaatcacgatagatggcgtgactccgttattcaacgcatgctcccaaggcagtccaagctgtgcagagctgcttctggagtatggtgccaaagcccagctggagtcatgtcttccatccccaacgcatgaggccgccagtaaaggtcaccatgaatgtcttgacatcctgatatcctggggcatagatgttgaccaagaaattcctcatttgggagactcctctctatgtagcttgtatgtcacagca

SEQ ID NO: 383912 - DNA, 435 bp, Homo sapiens
agtaaatggcagatatacatatatgtatgtgtatatatatatacacatacatatatatacacacacactcacacacacacacaagttaattgagggaaatgaagggagtatttagaacagagttaacagaaaccaacatgaggtggaggaaccctctgagctatcaacagtgaggaacagttgtctaggcctgaaacaacaacgggaaggggaagttactagaacctactgtagccatggaatgggtcaccttgtaggacctgtgtcttttaatagaagaatgaagctactgcttacctgcagcctggcggaaaggaatctggggtaattaatataaacttgctttccttctgttttccagtttcctttttgtggaaactgttggaccaacccagccagaagggtagagcccagttaatgcaactcgtagggtat

SEQ ID NO: 383913 - DNA, 446 bp, Homo sapiens
tttaagattcttccactaatggacttgtattcaagacagcttttcaacttactacatacctttggacattcttttctgtttttttgagacggagttttgcactccagcctgggtgacagagcaagactccgtctcaaaaaaaaaaaaattttaggctaggcacggtggctcgcacctgtaatcgcagcactttgcaaagccagggcaggaggatcacttgagcccaggagttcgagaccaccctgagcaatgtacaagacctgccccccaatctaagctaattacaaaaaatgtaattagctgggtgtggtggcacatgtgtaatcgcagctactccagaagccgaggtgttagaatcgcttgagcccaggagtttgaggttgcagtgagccatgatcatgccactgcacttcacactgggcaacagagcaagaccttgtctcaaa

SEQ ID NO: 383914 - DNA, 457 bp, Homo sapiens
ccaagatgctggctctggccactggaagtcaaactgggtgcacagaccagtgagagggcatgagggagcctagcaggggtgaacagcaaccctcagcctccccacagccctgcctctcctcctgcctctcctcggtctcctttgaggattcagcctctcgtcctcaccacttatggtctgagggcctccaggctcctcttctggctgtctacccctccacacccatagctccagtcatcacttccacagggatgactcagaagttccctctccgggagacccgtcccttacaggccacatccagtagcgctccagccattcagcagctccgcctggacgtcaagggcatgtccaaaaccgcgctcatgatcttcctactcccccatccctgagatttatcctgtggctgtggtgtcctgtggctactgtaacaaatgaccacaaacttggtggcttc

SEQ ID NO: 383915 - DNA, 485 bp, Homo sapiens
agaaagaaagtactgcctgagttcttttttaaacttcagagtttattttctcaagaaattgtatgttcccactctccacttcccctctccctgctgaggaatcatctaaagacattctcaagcttgtccaagccaccttattttgttgttgttgttgcagttctgttgttttgttttaggcttttagcagcctgaagccatggtttttagtttctgtctccagtgatgaaaggaaaagagggatgaggaaggggctttaccagcccaatcacaaatagaaactaggaacctatgactatattctctcccttggacacctaaccggtttacttaacaatatttgcaggattagctggatgcagtgtcgcatgcctgtagccccacctactctagaggctgaggtggagggctttttgcaggggttcgagtctgggctgggcaatataaggagaacccccccccccaccaccctgcatctgaaagag

SEQ ID NO: 383916 - DNA, 377 bp, Homo sapiens
ataataaataaataaaagaaagttcttgcctttgattctatgcagtaactgactgtattttgatgtcatgaattatacttgttaaatatttgagttatattttttaaaaaaagttttttcagctgtaatttatatatcatgaaattcacccattttagatgtataattcaatgatttttagtaaacttacagaattgtgcaatcatcactacaatctaagtttagaacctttatttccttcaccccggaaagaaaccgtgtgtccatttgctgtcactctccattccctcccctcagccttaggcaaccaataatctacttcctgtccccatggatttgccttttttgaacattttatataaatggaatcatacaat

SEQ ID NO: 383917 - DNA, 2036 bp, Homo sapiens
atcatctcccggcaggctgcggaagggggtcgagtagaaggaccgccgctccggcctcccgcgacttctcgaaggtgggcaggtcccaccttgtggaggatggaggtgaccggggacgccggggtaccagaatctggcgagatccggactctaaagccgtgtctgctgcgccgcaactacagccgcgaacagcacggcgtggccgcctcctgcctcgaagacctgaggagcaaggcctgtgacattctggccattgataagtccctgacaccagtcaccctggtcctggcagaggatggcaccatagtggatgatgacgattactttctgtgtctaccttccaatactaagtttgtggcattggctagtaatgagaaatgggcatacaacaattcagatggaggtacagcttggatttcccaagagtcctttgatgtagatgaaacagacagcggggcagggttgaagtggaagaatgtggccaggcagctgaaagaagatctgtccagcatcatcctcctatcagaggaggacctccagatgcttgttgacgctccctgctcagacctggctcaggaactacgtcagagttgtgccaccgtccagcggctgcagcacacactccaacaggtgcttgaccaaagagaggaagtgcgtcagtccaagcagctcctgcagctgtacctccaggctttggagaaagagggcagcctcttgtcaaagcaggaagagtccaaagctgcctttggtgaggaggtggatgcagtagacacgggtatcagcagagagacctcctcggacgttgcgctggcgagccacatccttactgcactgagggagaagcaggctccagagctgagcttatctagtcaggatttggagttggttaccaaggaagaccccaaagcactggctgttgccttgaactgggacataaagaagacggagactgttcaggaggcctgtgagcgggagctcgccctgcgcctgcagcagacgcagagcttgcattctctccggagcatctcagcaagcaaggcctcaccacctggtgacctgcagaatcctaagcgagccagacaggatcccacatagcagcagcgggaagtgtgccaaggaagctctgtggcgttgtgttattggtagacaccctcagcctcatcatttgactacctatgtactactctaccccctgccttagagcaccttccagagaagctattccaggtctcaacatacgccgttccaccaattttttttttagccccaccagcttcaggacttctgccaattttgaatgatatagctgcaccaacaatatcccgcctcctctaattacatatgatgttctctgttcaaaagtaattggcagtgattggccaggcgcagtggctcacgcctgtaatcccagcactgggaggccgaggggggcggatcgtgaagtcaggagatcgagaccatcctggctaacatggtgaaaccctgtctctactaaaaatacaaaaaaaattagccagccatggtggcgggcgcctgtaatcccagctacttgggaggctgaggcaggagaatggcatgaacctgggaggcagagcttgcagtgagctgagattgcgccactgcactccagcctgggcaacagagcgagactccgtctcaaaaaaaaaaaaaaaaaagtaattggcagtgactatgggcgcactgcctaacatttagccctgccccatatggaacatgttaaaaaaaaaaaaagccaggccgagcgtgttggctcacgcttgtaatcccagcactttgggaggccgaggcgggtggatcacgaggtcaggagatcgagaccatcctggctaacacagtgaaacgtgtttttactaaaagtacaaaaaactagctgggcgtggtggcaggagcctgtagtcccagctactcgggaggctgaggcaggagaattgcttgaaccggggaggcagaagttgcagtgagccgagattatgccactgtactccagcctgggtgacagagtgacactctgtctc

SEQ ID NO: 383918 - DNA, 1076 bp, Homo sapiens
atcatctcccggcaggctgcggaagggggtcgagtagaaggaccgccgctccggcctcccgcgacttctcgaaggtgggcaggtcccaccttgtggaggatggaggtgaccggggacgccggggtaccagaatctggcgagatccggactctaaagccgtgtctgctgcgccgcaactacagccgcgaacagcacggcgtggccgcctcctgcctcgaagacctgaggagcaaggcctgtgacattctggccattgataagtccctgacaccagtcaccctggtcctggcagaggatggcaccatagtggatgatgacgattactttctgtgtctaccttccaatactaagtttgtggcattggctagtaatgagaaatgggcatacaacaattcagatggaggtacagcttggatttcccaagagtcctttgatgtagatgaaacagacagcggggcagggttgaagtggaagaatgtggccaggcagctgaaagaagatctgtccagcatcatcctcctatcagaggaggacctccagatgcttgttgacgctccctgctcagacctggctcaggaactacgtcagagttgtgccaccgtccagcggctgcagcacacactccaacaggtgcttgaccaaagagaggaagtgcgtcagtccaagcagctcctgcagctgtacctccaggctttggagaaagagggcagcctcttgtcaaagcaggaagagtccaaagctgcctttggtgaggaggtggatgcagtagacacgggtatcagcagagagacctcctcggacgttgcgctggcgagccacatccttactgcactgagggagaagcaggctccagagctgagcttatctagtcaggatttggaggtgggcggaaaccagggtcactgagctacagaggaggacatgccctgggatgtagtagtatcatgcagaggtgtgtgggcccttttgttcacctctgcagactgtgaatcctagctgccagtttgcctattatatgccaaggcatttgcaaaaatctcattaatctaaatcaaaatagctttaaagaaaaatgc

SEQ ID NO: 383919 - DNA, 1677 bp, Homo sapiens
ttaatcggcacgaggcgaaggtgggcaggtcccaccttgtggaggatggaggtgaccggggacgccggggtaccagaatctggcgagatccggactctaaagccgtgtctgctgcgccgcaactacagccgcgaacagcacggcgtggccgcctcctgcctcgaagacctgaggagcaaggatgcttgttgacgctccctgctcagacctggctcaggaactacgtcagagttgtgccaccgtccagcggctgcagcacacactccaacaggtgcttgaccaaagagaggaagtgcgtcagtccaagcagctcctgcagctgtacctccaggctttggagaaagagggcagcctcttgtcaaagcaggaagagtccaaagctgcctttggtgaggaggtggatgcagtagacacgggtatcagcagagagacctcctcggacgttgcgctggcgagccacatccttactgcactgagggagaagcaggctccagagctgagcttatctagtcaggatttggagttggttaccaaggaagaccccaaagcactggctgttgccttgaactgggacataaagaagacggagactgttcaggaggcctgtgagcgggagctcgccctgcgcctgcagcagacgcagagcttgcattctctccggagcatctcagcaagcaaggcctcaccacctggtgacctgcagaatcctaagcgagccagacaggatcccacatagcagcagcgggaagtgtgccaaggaagctctgtggcgttgtgttattggtagacaccctcagcctcatcatttgactacctatgtactactctaccccctgccttagagcaccttccagagaagctattccaggtctcaacatacgccgttccaccaattttttttttagccccaccagcttcaggacttctgccaattttgaatgatatagctgcaccaacaatatcccgcctcctctaattacatatgatgttctctgttcaaaagtaattggcagtgattggccaggcgcagtggctcacgcctgtaatcccagcactgggaggccgaggggggcggatcgtgaagtcaggagatcgagaccatcctggctaacatggtgaaaccctgtctctactaaaaatacaaaaaaaattagccagccatggtggcgggcgcctgtaatcccagctacttgggaggctgaggcaggagaatggcatgaacctgggaggcagagcttgcagtgagctgagattgcgccactgcactccagcctgggcaacagagcgagactccgtctcaaaaaaaaaaaaaaaaaagtaattggcagtgactatgggcgcactgcctaacatttagccctgccccatatggaacatgttaaaaaaaaaaaaagccaggccgagcgtgttggctcacgcttgtaatcccagcactttgggaggccgaggcgggtggatcacgaggtcaggagatcgagaccatcctggctaacacagtgaaacgtgtttttactaaaagtacaaaaaactagctgggcgtggtggcaggagcctgtagtcccagctactcgggaggctgaggcaggagaattgcttgaaccggggaggcagaagttgcagtgagccgagattatgccactgtactccagcctgggtgacagagtgacactctgtctc

SEQ ID NO: 383920 - DNA, 2385 bp, Homo sapiens
  misc_feature (230)..(230): n is a, c, g, or t
  misc_feature (235)..(235): n is a, c, g, or t
  misc_feature (245)..(245): n is a, c, g, or t
  misc_feature (252)..(252): n is a, c, g, or t
  misc_feature (254)..(254): n is a, c, g, or t
  misc_feature (267)..(267): n is a, c, g, or t
  misc_feature (280)..(280): n is a, c, g, or t
  misc_feature (284)..(284): n is a, c, g, or t
  misc_feature (289)..(289): n is a, c, g, or t
  misc_feature (292)..(292): n is a, c, g, or t
  misc_feature (297)..(297): n is a, c, g, or t
  misc_feature (306)..(306): n is a, c, g, or t
  misc_feature (333)..(333): n is a, c, g, or t
tccgagcgtccccgtggcggtgcgtgccccgagggacttggtgtctgccccccctccctgctgcgaggtttcccgccccgtcgtggcgccgccttcccgcgttcgtccgtccctctgaggttagtcttcagttagcgccgccggttgccccctttttcagagttgaccacaccagggtaatagtgtgcgtccatcgctacaattcgttacaaggccctgagccgggccancttancactttgatncaggttnanaagaattcttcancgttttattcgcnacantcttnttnctgcnatgactccnctcctttgtcttcttatgtttcttgcnaaataattacttccgcatccgccatgttaccctgcccgcgtgcgtccgcccggtccacaccgagggaacgaccgcagactcccccgccttgtcccgtcgtcccaccttgtggaggatggaggtgaccggggacgccggggtaccagaatctggcgagatccggactctaaagccgtgtctgctgcgccgcaactacagccgcgaacagcacggcgtggccgcctcctgcctcgaagacctgaggagcaaggcctgtgacattctggccattgataagtccctgacaccagtcaccctggtcctggcagaggatggcaccatagtggatgatgacgattactttctgtgtctaccttccaatactaagtttgtggcattggctagtaatgagaaatgggcatacaacaattcagatggaggtacagcttggatttcccaagagtcctttgatgtagatgaaacagacagcggggcagggttgaagtggaagaatgtggccaggcagctgaaagaagatctgtccagcatcatcctcctatcagaggaggacctccagatgcttgttgacgctccctgctcagacctggctcaggaactacgtcagagttgtgccaccgtccagcggctgcagcacacactccaacaggtgcttgaccaaagagaggaagtgcgtcagtccaagcagctcctgcagctgtacctccaggctttggagaaagagggcagcctcttgtcaaagcaggaagagtccaaagctgcctttggtgaggaggtggatgcagtagacacgggtatcagcagagagacctcctcggacgttgcgctggcgagccacatccttactgcactgagggagaagcaggctccagagctgagcttatctagtcaggatttggagttggttaccaaggaagaccccaaagcactggctgttgccttgaactgggacataaagaagacggagactgttcaggaggcctgtgagcgggagctcgccctgcgcctgcagcagacgcagagcttgcattctctccggagcatctcagcaagcaaggcctcaccacctggtgacctgcagaatcctaagcgagccagacaggatcccacatagcagcagcgggaagtgtgccaaggaagctctgtggcgttgtgttattggtagacaccctcagcctcatcatttgactacctatgtactactctaccccctgccttagagcaccttccagagaagctattccaggtctcaacatacgccgttccaccaattttttttttagccccaccagcttcaggacttctgccaattttgaatgatatagctgcaccaacaatatcccgcctcctctaattacatatgatgttctctgttcaaaagtaattggcagtgattggccaggcgcagtggctcacgcctgtaatcccagcactgggaggccgaggggggcggatcgtgaagtcaggagatcgagaccatcctggctaacatggtgaaaccctgtctctactaaaaatacaaaaaaaattagccagccatggtggcgggcgcctgtaatcccagctacttgggaggctgaggcaggagaatggcatgaacctgggaggcagagcttgcagtgagctgagattgcgccactgcactccagcctgggcaacagagcgagactccgtctcaaaaaaaaaaaaaaaaaagtaattggcagtgactatgggcgcactgcctaacatttagccctgccccatatggaacatgttaaaaaaaaaaaaagccaggccgagcgtgttggctcacgcttgtaatcccagcactttgggaggccgaggcgggtggatcacgaggtcaggagatcgagaccatcctggctaacacagtgaaacgtgtttttactaaaagtacaaaaaactagctgggcgtggtggcaggagcctgtagtcccagctactcgggaggctgaggcaggagaattgcttgaaccggggaggcagaagttgcagtgagccgagattatgccactgtactccagcctgggtgacagagtgacactctgtctc

SEQ ID NO: 383921 - DNA, 1472 bp, Homo sapiens
atcatctcccggcaggctgcggaagggggtcgagtagaaggaccgccgctccggcctcccgcgacttctcgaaggtgggcaggtcccaccttgtggaggatggaggtgaccggggacgccggggtaccagaatctggcgagatccggactctaaagccgtgtctgctgcgccgcaactacagccgcgaacagcacggcgtggccgcctcctgcctcgaagacctgaggagcaaggcctgtgacattctggccattgataagtccctgacaccagtcaccctggtcctggcagaggatggcaccatagtggatgatgacgattactttctgtgtctaccttccaatactaagtttgtggcattggctagtaatgagaaatgggcatacaacaattcagatggaggtacagcttggatttcccaagagtcctttgatgtagatgaaacagacagcggggcagggttgaagtggaagaatgtggccaggcagctgaaagaagatctgtccagcatcatcctcctatcagaggaggacctccagatgcttgttgacgctccctgctcagacctggctcaggaactacgtcagagttgtgccaccgtccagcggctgcagcacacactccaacaggtgcttgaccaaagagaggaagtgcgtcagtccaagcagctcctgcagctgtacctccaggctttggagaaagagggcagcctcttgtcaaagcaggaagagtccaaagctgcctttggtgaggaggtggatgcagtagacacgggtatcagcagagagacctcctcggacgttgcgctggcgagccacatccttactgcactgagggagaagcaggctccagagctgagcttatctagtcaggatttggaggtgggcggaaaccagggtcactgagctacagaggaggacatgccctgggatgtagtagtatcatgcagaggtgtgtgggcccttttgttcacctctgcagactgtgaatcctagctgccagtttgcctattatatgccaaggcatttgcaaaaatctcattaatctaaatcaaaatagctttaaagaaaaatgcatacacttcctcagatcatcaaacagactctggtccaaggttggtaatgaaatgactgttcctgacagggaggaatagcagggcccaatcttctgagatggcttctgggtctttccatggtcagagaagatctatagtccgtcctgaggtctgtcaatgtcacaggaaaaggcaaacttgaggggatcgtcgcctgctggctaagaccagggagctaaaaacttgaggaagggaacctgcctgggtgggtgctacttctgattcattgtccttgtccctgtcataagtacctccctattgtagatagaagggaaggaaactgttgacttgagcttggctaaatttcctgaaggtggaggaccttagagttgctccaagtaaactttccaaggactt

SEQ ID NO: 383922 - DNA, 1733 bp, Homo sapiens
  misc_feature (23)..(23): n is a, c, g, or t
atatggcatggtgaggccgggtnggaatcggccgaggccaatactaagtttgtggcattggctagtaatgagaaatgggcatacaacaattcagatggaggtacagcttggatttcccaagagtcctttgatgtagatgaaacagacagcggggcagggttgaagtggaagaatgtggccaggcagctgaaagaagatctgtccagcatcatcctcctatcagaggaggacctccagatgcttgttgacgctccctgctcagacctggctcaggaactacgtcagagttgtgccaccgtccagcggctgcagcacacactccaacaggtgcttgaccaaagagaggaagtgcgtcagtccaagcagctcctgcagctgtacctccaggctttggagaaagagggcagcctcttgtcaaagcaggaagagtccaaagctgcctttggtgaggaggtggatgcagtagacacgggtatcagcagagagacctcctcggacgttgcgctggcgagccacatccttactgcactgagggagaagcaggctccagagctgagcttatctagtcaggatttggagttggttaccaaggaagaccccaaagcactggctgttgccttgaactgggacataaagaagacggagactgttcaggaggcctgtgagcgggagctcgccctgcgcctgcagcagacgcagagcttgcattctctccggagcatctcagcaagcaaggcctcaccacctggtgacctgcagaatcctaagcgagccagacaggatcccacatagcagcagcgggaagtgtgccaaggaagctctgtggcgttgtgttattggtagacaccctcagcctcatcatttgactacctatgtactactctaccccctgccttagagcaccttccagagaagctattccaggtctcaacatacgccgttccaccaattttttttttagccccaccagcttcaggacttctgccaattttgaatgatatagctgcaccaacaatatcccgcctcctctaattacatatgatgttctctgttcaaaagtaattggcagtgattggccaggcgcagtggctcacgcctgtaatcccagcactgggaggccgaggggggcggatcgtgaagtcaggagatcgagaccatcctggctaacatggtgaaaccctgtctctactaaaaatacaaaaaaaattagccagccatggtggcgggcgcctgtaatcccagctacttgggaggctgaggcaggagaatggcatgaacctgggaggcagagcttgcagtgagctgagattgcgccactgcactccagcctgggcaacagagcgagactccgtctcaaaaaaaaaaaaaaaaaagtaattggcagtgactatgggcgcactgcctaacatttagccctgccccatatggaacatgttaaaaaaaaaaaaagccaggccgagcgtgttggctcacgcttgtaatcccagcactttgggaggccgaggcgggtggatcacgaggtcaggagatcgagaccatcctggctaacacagtgaaacgtgtttttactaaaagtacaaaaaactagctgggcgtggtggcaggagcctgtagtcccagctactcgggaggctgaggcaggagaattgcttgaaccggggaggcagaagttgcagtgagccgagattatgccactgtactccagcctgggtgacagagtgacactctgtctc

SEQ ID NO: 383923 - DNA, 255 bp, Homo sapiens
tcagaaagtccctgtagatttctaagcgtctgtgtttgtttgttagatgcttgttgacgctccctgctcagacctggctcaggaactacgtcagagttgtgccaccgtccagcggctgcagcacacactccaacaggtgcttgaccaaagagaggaagtgcgtcagtccaagcagctcctgcagctgtacctccaggctttggagaaagagggcagcctcttgtcaaagcaggaaggtaggactctctgcaggca

SEQ ID NO: 383924 - DNA, 400 bp, Homo sapiens
tctatgccctcttccttcccaaattgttatctccaactggaaagacagatgaaaattcaagataggtctccatgtgccagtttgtgcaggatttcaaagccacttcaggtgtaatccctatttcttcgaggaacgttaagtggcctgaaaattgaaggagaaaaaagatggaatatctcctcaagcgtacagatgaagacagccaggtgaccttgagaaagttactttacctctttgtcttgctttctttctctatgaaatgaaaatcatgtgtaatgaaataaaacacataggaaacaaatgcttaattatgtttgtgcattaatgaagctgagttgacttatttcatgggtgtgtacattttgagaggtgacaacgtgctagcagccctggctcgctc

SEQ ID NO: 383925 - DNA, 514 bp, Homo sapiens
tattttatggatgaagaagataacaattatgtcagttttagaaactcattctcagctatctacttcccactcttaaaagtttttcttgaaaacacaactaaaaagagagatgagatgaggctttactgaagaaaagttggttaggaagagattttgatttaggtaaataagaatagtttagaaaccaggctagacttcagacagctcccaggcccaaggatgggaatgagggtagttgttagtctatttagcctcttctcacttggttttcaatttgctatccagtcgtctttcgcagcagggttgacccttcattgctttttggatggcaccgtccacagacaggctcttttgccaagtcctgtcaccctcacatgtgtatatttcttttatcttctttaggaggtaggtaggtctacttgaagccagaagactctaactcaacatctggtataagaagatgcagtagaaattctgtgtatccagctagcttaaacctatgtatttttattag

SEQ ID NO: 383926 - DNA, 489 bp, Homo sapiens
taccaataatctgtttcatggccatacatgtcttctctaagatggtagatgctttctctcacacattgcacttccttgtggatcctcaccagaactacatttgacatccatatttctaccaacagtctcttcagggcaatgtaggtgtttccctatcatgtgtctcagaactcttccagcttctaccattgcccagttccaaagccacttctacatttttaggtgtttgttacagccacattccatttcatggtatcaaaatctttatcagggccagcaaaacaaaaccagcaggagagatttgtataggataggatttaagggaactgggcttacgtgattgtggaggctggcaggtttgaaattttgtagggcaggcaggcaggctggaaagccttgggctgctggctgaagctggcagtttcacaggcgggattttctttccccgggaaaacccgttttgctcagttttgaaggctttcaactgat

SEQ ID NO: 383927 - DNA, 360 bp, Homo sapiens
gcaccttgcatctgatagaggcttgtaagagcagattgacaggtgaatgtcacaggtccataagaaggacaaatagatctaagttgggcaaaagattctatttgttggttctcccttctaagatgataatatgcccctgcacttgagaccttacttgaaacttaaagaaatgtgattggttatggtgctgggagaaaggggtgcacctgggaggacactgagaaagataaacaaaggggaaggaagagaggacaacctgtaacttttagaaaaggctactacttttaactgttggagaaaatgctattgcttgcactcacaatgtcaatatacattattcaggaactttaagtcctggag

SEQ ID NO: 383928 - DNA, 452 bp, Homo sapiens
tgtcctcacagctggccctagtcccatgtggaagtgggttagaggatgatgatgtttgtagcatgctggagtttggagtctccatgccatgggcacactcttccatactgttgccctcactctgacttcttcaccctcacgtcactcccttgctgctgttgagtgcctagaagggacctttccatgatggctatggtgggagcgagggatgttttgccgtgaaattgccttgaaaataaaatagtgggttctatcactgtaaatactcagctttctttggacaaaggacattgtctttgaacagatggagaatattgaagaaaaaagatgtctctaccatcaaattctggacacttgagtgaaacagttgaataaaaagaactcagagcattgctttttttttgagacgaggctcactctgttgtttgggctggagtgcagtgacacgatca

SEQ ID NO: 383929 - DNA, 393 bp, Homo sapiens
atctgagatactttgtcctcatgaataaattagttagtagaatctaatttctagatccttcataatggtaattgagggtaaaaaataataatgtagtagtcaattttagccctttaaacctatggggaactgtatgaataactgtttgaaactgcagggtaatcctgtcacacttgcaaacacatagaagcaacaagactatttcctctcacacttttaattaaaatagtgcctgagtagacttccagggtaaggatcagaaattttctttctaatttccctgttttaatgaccactacttttaaagctatgctggaattcactttcacatatatctaacttacagaaaattttgaagagcctaaatgtctatggtagattcaatgtttcctt

SEQ ID NO: 383930 - DNA, 347 bp, Homo sapiens
agcagtgcttggcaaacgtagctgtgatggttcttctgtccctgtctatggtaacaagtcccctttctagctgaagatgctaagcctgcacatcacaaggaggtgcccacaccacctttcttccatcaatttccctgcccagtggggacggtagatgtctgacagcctgcggggtccagcaacccagccactgagtaataggaccttggtcatttctgcctcgggactgtctgaatagaatgcacctgctaaatgtcccagccctttttcttagcctccttacctctcacaagaccttgaaattaatggatctcgataaattaaagactttcaacacaaacgtttgg

SEQ ID NO: 383931 - DNA, 445 bp, Homo sapiens
attccataaattccagatgggacctactacagagaacctctcgaccacatggccctggttgcactcctccttgaaggaaagtctagattccattaccttctactttccttcttatgagttgtgaaggaaggaagagaatcttagaggaagaatgaaaagaagggagatcatttggggttggctacacattgtaattagaagtaggattgatggggaatgagctaactgtttttataaagtcagcattcaaaaatgcaaaccaccagtaatttaaatattacaaaattgtgcagaatataaatattgaaataattttttccatccacaaaattttagagaaaattacagtatcaaaaaatataaaatggcaagtttggcatatcctcagagtaaagtgtgtgtgtgtatgtgtgtgtgtgtatgtgtgtgtgttttattgggaagg

SEQ ID NO: 383932 - DNA, 1074 bp, Homo sapiens
ctctggagccctggcctcctcccaggttccacatgttgctctcccaatgtgagcaagccctggtggcagcgccaggtccagtgcagcccctccccacagcatgctgggggctaattctgatgtcatctttctgcagaaaaccattagaccatccctccagactgccaccctcaaagccgtctgcccaggccccatctgacactcttgacatctgcaggtcccagaccctatgatgtgtccactctggaggctcctcatcttcctcgggttgctggccttgcccttggcaccacacaagcagccttggcctggcctggcccaagcccacagagacaacaaatccaccctggcaagaattattgctcagggcctcataaagcacaacgcagaaagccgaattcagaacatccactttggggacagactgaatgcctcagcacaagtggccccaggctggtgggctggctaatcagcggcaggaaacaccagcagcagcaagagagcaggtccttcgataacaacatcgtaaagatgtgtgcacatatgagcatcgttgtggagttctggctggagaaagacgagtttggccggagggatctggtgataggcaaatgcgatgcagagcccagcagtgtccatgtggccatcctcactgaggctatcccaccaaagatgaatcagtttctctacaacctcaaagagaatctgcaaaaagttctcccacacatggtagaaagtcaggtatgtcctctgatcggtgaaatcctcgggcagctggatgtgaaactgttgaaaagcctcatagaacaggaggctgctcatgaaccaacccaccatgaaaccagccaaccctctgcatgccaggctggagagtcccccagctgacttctgctgatcagaaggaaagtccacatcttgcaaccttaagtctcccttagagtggggcttctgctaccctaaaaactttaccccaggctctgtggacataccatcctctcctacaataaactctagctctgaagggtgcacaggtccctcccacctgggccctggggtttaggtctagaagtcaga

SEQ ID NO: 383933 - DNA, 776 bp, Homo sapiens
agtggatgtctgttcatttattcatcagatattcattgagtacctagattgtaccagacattcatgggaggacggtgtaagggaaagactctggaatctggtgctctattgccatgtttctaatataaccagcacttattagctgtgtgaccttgggcaaggtctgagctacccctttgatgatcactgacaatgatacttctggcatggggctgagtgaggactaaaagactgtggaaagtatactcaacacatacctcctggctttaatattgcctggattgctctgttctgttctgtgcctctacctttctttctagggctatcccaccaaagatgaatcagtttctctacaacctcaaagagaatctgcaaaaagttctcccacacatggtagaaagtcagcccctggcctgatccttctctctgtgctgatggtccaggtatgtcctctgatcggtgaaatcctcgggcagctggatgtgaaactgttgaaaagcctcatagaacaggaggctgctcatgaaccaacccaccatgaaaccagccaaccctctgcatgccaggctggagagtcccccagctgacttctgctgatcagaaggaaagtccacatcttgcaaccttaagtctcccttagagtggggcttctgctaccctaaaaactttaccccaggctctgtggacataccatcctctcctacaataaactctagctctgaagggtgcacaggtccctcccacctgggccctggggtttaggtctagaagtcaga

SEQ ID NO: 383934 - DNA, 1182 bp, Homo sapiens
ctctggagccctggcctcctcccaggttccacatgttgctctcccaatgtgagcaagccctggtggcagcgccaggtccagtgcagcccctccccacagcatgctgggggctaattctgatgtcatctttctgcagaaaaccattagaccatccctccagactgccaccctcaaagccgtctgcccaggccccatctgacactcttgacatctgcaggtcccagaccctatgatgtgtccactctggaggctcctcatcttcctcgggttgctggccttgcccttggcaccacacaagcagccttggcctggcctggcccaagcccacagagacaacaaatccaccctggcaagaattattgctcagggcctcataaagcacaacgcagaaagccgaattcagaacatccactttggggacagactgaatgcctcagcacaagtggccccaggctggtgggctggctaatcagcggcaggaaacaccagcagcagcaagagagcagcatcaacatcaccaacattcagctggactgtggtgggatccagatatcattccataaggagtggttctcggcaaatatctcacttgaatttgaccttgaattgagaccgtccttcgataacaacatcgtaaagatgtgtgcacatatgagcatcgttgtggagttctggctggagaaagacgagtttggccggagggatctggtgataggcaaatgcgatgcagagcccagcagtgtccatgtggccatcctcactgaggctatcccaccaaagatgaatcagtttctctacaacctcaaagagaatctgcaaaaagttctcccacacatggtagaaagtcaggtatgtcctctgatcggtgaaatcctcgggcagctggatgtgaaactgttgaaaagcctcatagaacaggaggctgctcatgaaccaacccaccatgaaaccagccaaccctctgcatgccaggctggagagtcccccagctgacttctgctgatcagaaggaaagtccacatcttgcaaccttaagtctcccttagagtggggcttctgctaccctaaaaactttaccccaggctctgtggacataccatcctctcctacaataaactctagctctgaagggtgcacaggtccctcccacctgggccctggggtttaggtctagaagtcaga

SEQ ID NO: 383935 - DNA, 1220 bp, Homo sapiens
ctctggagccctggcctcctcccaggttccacatgttgctctcccaatgtgagcaagccctggtggcagcgccaggtccagtgcagcccctccccacagcatgctgggggctaattctgatgtcatctttctgcagaaaaccattagaccatccctccagactgccaccctcaaagccgtctgcccaggccccatctgacactcttgacatctgcaggtcccagaccctatgatgtgtccactctggaggctcctcatcttcctcgggttgctggccttgcccttggcaccacacaagcagccttggcctggcctggcccaagcccacagagacaacaaatccaccctggcaagaattattgctcagggcctcataaagcacaacgcagaaagccgaattcagaacatccactttggggacagactgaatgcctcagcacaagtggccccaggctggtgggctggctaatcagcggcaggaaacaccagcagcagcaagagagcagcatcaacatcaccaacattcagctggactgtggtgggatccagatatcattccataaggagtggttctcggcaaatatctcacttgaatttgaccttgaattgagaccgtccttcgataacaacatcgtaaagatgtgtgcacatatgagcatcgttgtggagttctggctggagaaagacgagtttggccggagggatctggtgataggcaaatgcgatgcagagcccagcagtgtccatgtggccatcctcactgaggctatcccaccaaagatgaatcagtttctctacaacctcaaagagaatctgcaaaaagttctcccacacatggtagaaagtcagcccctggcctgatccttctctctgtgctgatggtccaggtatgtcctctgatcggtgaaatcctcgggcagctggatgtgaaactgttgaaaagcctcatagaacaggaggctgctcatgaaccaacccaccatgaaaccagccaaccctctgcatgccaggctggagagtcccccagctgacttctgctgatcagaaggaaagtccacatcttgcaaccttaagtctcccttagagtggggcttctgctaccctaaaaactttaccccaggctctgtggacataccatcctctcctacaataaactctagctctgaagggtgcacaggtccctcccacctgggccctggggtttaggtctagaagtcaga

SEQ ID NO: 383936 - DNA, 1372 bp, Homo sapiens
ctctggagccctggcctcctcccaggttccacatgttgctctcccaatgtgagcaagccctggtggcagcgccaggtccagtgcagcccctccccacagcatgctgggggctaattctgatgtcatctttctgcagaaaaccattagaccatccctccagactgccaccctcaaagccgtctgcccaggccccatctgacactcttgacatctgcaggtcccagaccctatgatgtgtccactctggaggctcctcatcttcctcgggttgctggccttgcccttggcaccacacaagcagccttggcctggcctggcccaagcccacagagacaacaaatccaccctggcaagaagcttacccatctaattttctcttcaaccaacattgactctgatctacatcctgtatgttagctccgtgctccagactgaaatacagtgttgggtgaactttcaaccagaataccccactttgagcagctgttgcctgccacaccctctgcagttattgctcagggcctcataaagcacaacgcagaaagccgaattcagaacatccactttggggacagactgaatgcctcagcacaagtggccccaggctggtgggctggctaatcagcggcaggaaacaccagcagcagcaagagagcagcatcaacatcaccaacattcagctggactgtggtgggatccagatatcattccataaggagtggttctcggcaaatatctcacttgaatttgaccttgaattgagaccgtccttcgataacaacatcgtaaagatgtgtgcacatatgagcatcgttgtggagttctggctggagaaagacgagtttggccggagggatctggtgataggcaaatgcgatgcagagcccagcagtgtccatgtggccatcctcactgaggctatcccaccaaagatgaatcagtttctctacaacctcaaagagaatctgcaaaaagttctcccacacatggtagaaagtcagcccctggcctgatccttctctctgtgctgatggtccaggtatgtcctctgatcggtgaaatcctcgggcagctggatgtgaaactgttgaaaagcctcatagaacaggaggctgctcatgaaccaacccaccatgaaaccagccaaccctctgcatgccaggctggagagtcccccagctgacttctgctgatcagaaggaaagtccacatcttgcaaccttaagtctcccttagagtggggcttctgctaccctaaaaactttaccccaggctctgtggacataccatcctctcctacaataaactctagctctgaagggtgcacaggtccctcccacctgggccctggggtttaggtctagaagtcaga

SEQ ID NO: 383937 - DNA, 1913 bp, Homo sapiens
  misc_feature (1817)..(1817): n is a, c, g, or t
  misc_feature (1848)..(1848): n is a, c, g, or t
  misc_feature (1888)..(1888): n is a, c, g, or t
caaggtggcgccagggcagcagggccagatctttctcatgcacctcgacctcttgcagactttcttcgtgagatgtactactcatttcaaaactgctttgcagggctcccctatgtattcggggggcccacggcacactcaggctggagatccttcctcactgcgctcaagatggcctcagccagacaccagttacccagctgaaagtcacaatccctcccagaagtctcccaacactagtgctgaccagaggtggggctctcaggctaggagtttcacacacaatgacaggctgctgggggacattgcaggaccccttttcctctcctctccatgctagaagccagccctaggcagctgcagttactccctgtgactcagcagcaggctgattcaacacagctgcccacacaaagccagtggctaatacatctgtttacctttccctatcacccagacacaagcccctttcccaggtcaaaccacaggccgatgcatctccagtttgacagtcaaatcactacttccattgctactttagatcagccaaagtggtgactgctgcagtgtgtggctatccctacaaggcccacccaagggatgcccaaagcccaaccttctccagggctgcagcccagagcaaccccaccagcctaagtccagcagaggacctcccacccaatgtcttgttctaattagaaggggaagttagccacagaaaatcaacttatctataattacaaaattctcttgactcaccttaaagttcctattgacatctactgcttttaaacctatttgaaaactctgatactaaaacaaatgacactctaagaaagtttgggagccccatgctgagaaccatttctgtgcagtgaggatgtttccagaagctacttacctacatgtgaatgtgccattttctttccttttgtagagaaaatcccctttactttttggaacagtaatggcagcttctagtacagccattacagtttcatatgagaaaaattaagaataactataaaattgttaaaatatccaataatggataatgatggccagaagatttaacatacaaagtaattctcaatgtaaagctattcagctcttccaggttgaatgccctgtaacccaccctgaccttccacatcatcttcaaaaagcagtttctctgttccccatgattctcctataaggtaactctttagtcctccatttagcacattttaaatcctccaaagaataagtatcatgtgattattttagctttacaaaaaaaaagttgaatggcgttttattttcatggcctataagcaggtaccttagtagggcagatataggaaaaacaaattagagcaaaacaaatcctctacaaatccaaggcaggaaaaagtggtggcagagtgactcattctcctgtccctcccatcaggtcaaatcaggaggctgcagtgaatgcctgttctttgaatgtgtagcagttgttcctgtaactctttaaaacttgggctataggctgtttagcacagtacagattaaagatacagttacgtaaacagcaaagtaattttatagtgcttcatccatttatcatgctttggtttgctaattttttcacatacctttttctatcacagtctgttgcttttgtacacatttctcatattggggttcgacaggtaaacacaaactgctatttcagtagaaaaagttattgttatgaatattaaacccaataaattgtataaaggtaaaaaaaaaaaaaaaaaaaaaaaaaaaaaaaaaaaaaaaaaaaaaattcctgcgggccgcangctttttccctttgggtgaggggttattttnggcttgggcactgggcccttcgtttttacaacgtcgtganggggggaacccggggggggtttccc

SEQ ID NO: 383938 - DNA, 521 bp, Homo sapiens
aatcgagctcggccccattatgatagtgtaaacaagatgatctgtgtactaattgaagaaatgcaaattaaaactataagcaggtaccttagtagggcagatataggaaaaacaaattagagcaaaacaaatcctctacaaatccaaggcaggaaaaagtggtggcagagtgactcattctcctgtccctcccatcaggtcaaatcaggaggctgcagtgaatgcctgttctttgaatgtgtagcagttgttcctgtaactctttaaaacttgggctataggctgtttagcacagtacagattaaagatacagttacgtaaacagcaaagtaattttatagtgcttcatccatttatcatgctttggtttgctaattttttcacatacctttttctatcacagtctgttgcttttgtacacatttctcatattggggttcgacaggtaaacacaaactgctatttcagtagaaaaagttattgttatgaatattaaacccaataaattgtataaaggtaaa

SEQ ID NO: 383939 - DNA, 1758 bp, Homo sapiens
caaggtggcgccagggcagcagggccagatctttctcatgcacctcgacctcttgcagactttcttcgtgagatgtactactcatttcaaaactgctttgcagggctcccctatgtattcggggggcccacggcacactcaggctggagatccttcctcactgcgctcaagatggcctcagccagacaccagttacccagctgaaagtcacaatccctcccagaagtctcccaacactagtgctgaccagaggtggggctctcaggctaggagtttcacacacaatgacaggctgctgggggacattgcaggaccccttttcctctcctctccatgctagaagccagccctaggcagctgcagttactccctgtgactcagcagcaggctgattcaacacagctgcccacacaaagccagtggctaatacatctgtttacctttccctatcacccagacacaagcccctttcccaggtcaaaccacaggccgatgcatctccagtttgacagtcaaatcactacttccattgctactttagatcagccaaagtggtgactgctgcagtgtgtggctatccctacaaggcccacccaagggatgcccaaagcccaaccttctccagggctgcagcccagagcaaccccaccagcctaagtccagcagaggacctcccacccaatgtcttgttctaattagaaggggaagttagccacagaaaatcaacttatctataattacaaaattctcttgactcaccttaaagttcctattgacatctactgcttttaaacctatttgaaaactctgatactaaaacaaatgacactctaagaaagtttgggagccccatgctgagaaccatttctgtgcagtgaggatgtttccagaagctacttacctacatgtgaatgtgccattttctttccttttgtagagaaaatcccctttactttttggaacagtaatggcagcttctagtacagccattacagtttcatatgagaaaaattaagaataactataaaattgttaaaatatccaataatggataatgatggccagaagatttaacatacaaagtaattctcaatgtaaagctattcagctcttccaggttgaatgccctgtaacccaccctgaccttccacatcatcttcaaaaagcagtttctctgttccccatgattctcctataaggtaactctttagtcctccatttagcacattttaaatcctccaaagaataagtatcatgtgattattttagctttacaaaaaaaaagttgaatggcgttttattttcatggcctataagcaggtaccttagtagggcagatataggaaaaacaaattagagcaaaacaaatcctctacaaatccaaggcaggaaaaagtggtggcagagtgactcattctcctgtccctcccatcaggtcaaatcaggaggctgcagtgaatgcctgttctttgaatgtgtagcagttgttcctgtaactctttaaaacttgggctataggctgtttagcacagtacagattaaagatacagttacgtaaacagcaaagtaattttatagtgcttcatccatttatcatgctttggtttgctaattttttcacatacctttttctatcacagtctgttgcttttgtacacatttctcatattggggttcgacaggtaaacacaaactgctatttcagtagaaaaagttattgttatgaatattaaacccaataaattgtataaaggtaaa

SEQ ID NO: 383940 - DNA, 1285 bp, Homo sapiens
caaggtggcgccagggcagcagggccagatctttctcatgcacctcgacctcttgcagactttcttcgtgagatgtactactcatttcaaaactgctttgcagggctcccctatgtattcggggggcccacggcacactcaggctggagatccttcctcactgcgctcaagatggcctcagccagacaccagttacccagctgaaagtcacaatccctcccagaagtctcccaacactagtgctgaccagaggtggggctctcaggctaggagtttcacacacaatgacaggctgctgggggacattgcaggaccccttttcctctcctctccatgctagaagccagccctaggcagctgcagttactccctgtgactcagcagcaggctgattcaacacagctgcccacacaaagccagtggctaatacatctgtttacctttccctatcacccagacacaagcccctttcccaggtcaaaccacaggccgatgcatctccagtttgacagtcaaatcactacttccattgctactttagatcagccaaagtggtgactgctgcagtgtgtggctatccctacaaggcccacccaagggatgcccaaagcccaaccttctccagggctgcagcccagagcaaccccaccagccctgtaacccaccctgaccttccacatcatcttcaaaaagcagtttctctgttccccatgattctcctataaggtaactctttagtcctccatttagcacattttaaatcctccaaagaataagtatcatgtgattattttagctttacaaaaaaaaagttgaatggcgttttattttcatggcctataagcaggtaccttagtagggcagatataggaaaaacaaattagagcaaaacaaatcctctacaaatccaaggcaggaaaaagtggtggcagagtgactcattctcctgtccctcccatcaggtcaaatcaggaggctgcagtgaatgcctgttctttgaatgtgtagcagttgttcctgtaactctttaaaacttgggctataggctgtttagcacagtacagattaaagatacagttacgtaaacagcaaagtaattttatagtgcttcatccatttatcatgctttggtttgctaattttttcacatacctttttctatcacagtctgttgcttttgtacacatttctcatattggggttcgacaggtaaacacaaactgctatttcagtagaaaaagttattgttatgaatattaaacccaataaattgtataaaggtaaa

SEQ ID NO: 383941 - DNA, 1122 bp, Homo sapiens
tgcgccctgccttcagtggctcttttatcccccaaagactgaaagctgaaggtggagatgttctccacaaacataccctttctgaatttcccttgttttagcactgtgttcagggctctggactaaagtacctctgagtaggtaaaatcagagaatataacgatctcctgagtgattagatttctttggtagattccaagagatcttaaatcataataaactctgaatattaacaagaggtgccagggaggtgtcagtacatttcctatcatagctgccttgttcaaagcataatctcagagcagtcaagctaaactgtttgtagaaaaccatgaagatcaactcatgctcactctctacaatgcaatgtgtacgaggcttgaaggcaaaaacaattcttgggtcccaaggacaacctaaaacttaccagcttttttcaaaaacaacaatcagatgcaaataatggcagtgttgttctatgttctttgtttctgttcattatagaagcaaggaaaaattctatttctattggaaattagaagaaataatttcttcctgactctttttttttctataaacttttatttccaaggaagctgctacaatttgcagtcaattcaggccatggacgtctgtgccctaacagaagcaccgttcaatagaacagcaataaccttaaagtgtgcatctgtagtgaaactctgcacaaagtcccctgcataaagaagagaggaaagcctaccatctgctttagacgaagtgttatttgatgttctgtttccaactgtcagtataagcagcaactagagtaaaggcctgatgtgggaaactatggggggtctttcagggtagtttaccatttaaagcaggggttgaaaattcgaaagcctaaaagggccagggggcttaatgcaaatgggtgaagcagcccaggggcaagctggccaggaaatgccctgtggaaaaagggacatccacgatttacctgaaactgaatgctgctagagcttctgaattttataaaatctctgaaattatacatgatggcagttgattcagagcttagtgcagaccaaacaaatacatcactgagcagaagagggcccatagatcgtcagcttg

SEQ ID NO: 383942 - DNA, 1180 bp, Homo sapiens
tgcgccctgccttcagtggctcttttatcccccaaagactgaaagctgaaggtggagatgttctccacaaacataccctttctgaatttcccttgttttagcactgtgttcagggctctggactaaagtacctctgagtaggtaaaatcagagaatataacgatctcctgagtgattagatttctttggtagattccaagagatcttaaatcataataaactctgaatattaacaagaggtgccagggaggtgtcagtacatttcctatcatagctgccttgttcaaagcataatctcagagcagtcaagctaaactgtttgtagaaaaccatgaagatcaactcatgctcactctctacaatgcaatgtgtacgaggcttgaaggcaaaaacaattcttgggtcccaaggacaacctaaaacttaccagcttttttcaaaaacaacaatcagatgcaaataatggcagtgttgttctatgttctttgtttctgttcattatagaagcaaggaaaaattctatttctattggaaattagaagaaataatttcttcctgactctttttttttctataaacttttatttccaaggaagctgctacaatttgcagtcaattcaggccatggacgtctgtgccctaacagaagcaccgttcaatagaacagcaataaccttaaagtgtgcatctgtagtgaaactctgcacaaagtcccctgcataaagaagagaggaaagcctaccatctgctttagacgaagtgttatttgatgttctgtttccaactgtcagtataagcagcaactagagtaaaggcctgatgtgggaaactatggggggtctttcaaaaaaaagctgacactctattcatttttgggtctcaggaccagagggtacagggtagagggtagtttaccatttaaagcaggggttgaaaattcgaaagcctaaaagggccagggggcttaatgcaaatgggtgaagcagcccaggggcaagctggccaggaaatgccctgtggaaaaagggacatccacgatttacctgaaactgaatgctgctagagcttctgaattttataaaatctctgaaattatacatgatggcagttgattcagagcttagtgcagaccaaacaaatacatcactgagcagaagagggcccatagatcgtcagcttg

SEQ ID NO: 383943 - DNA, 618 bp, Homo sapiens
aggacgggcaaaaggagacgggtaacttagttcagaggaaatgagcaatgacctacaattcttataactaggagagacaccactcagacgtttcctgtgggctgggcccaagaggtctctggctgagcagcagagcagtagttatccaggttaacaacttccaattaaagccagagaggaatgtttctgggagctctgtcatgaagagaccccagtattcgatggaataaagtcataaaggaaagggtcaacaaacattttctgcaagggaccagatagcaaatatttttggctttgtgggacataggggctctggcgcaactactcaactcgacagctgtcgagcaaagagcagccatggaaaacatataaatgaatgaccatagctgtgttccaataaaactttgtttgtcgatgctgaatttgaatttcgtatcattttcatgtgtcatgaaacattgattttgattttttttcaatcatttaaaaatgggaaaaccatcttcgctcacgggctatacttaaaaacagctgaggcttggccgggcacgatggctcacgcctgtaatcccagcactttgggaggccgaggaggacggatcacaaggtcaagagatc

SEQ ID NO: 383944 - DNA, 351 bp, Homo sapiens
atgtagcataacagtgacaaccatggatttccaggtggcattgaatggctagaattggaaactagctctgtattggagacctgggagaagttaccttccaggcatttttttgtttcgtttgggctccttgagctcatggcaggcattgccagagcctaaacctgctgcttggaaaggggaaggttcttcaggtaattactccctcccttcttgtacctctgttcacctcactccagggatgattgaagaaagctccctaccatcttcctcctggcatgaaggggagcaagttctctggtcctggagatgtttcaactgagtccagatgactatttggcagggacgataaag

SEQ ID NO: 383945 - DNA, 812 bp, Homo sapiens
actcctaaagaaaggggaaaacctattaaaaatgaagctcttatttactaatgcatttctatttcaggagcatttggctaaactggggacaaaaaacaaaaacttgttcttaattaacaaaagaactagaaagaagctcatatgaaagcaccaccttgtgttcagtaagcttcaggatagctctgttgacagcagggcatttagagagtcccaagtatagtcatgtatcactggggagggaagaatctttgaggacatctagtttacaatctttattatttttcaggtgtagaaaagagattaaagatcatagaagtcagaataaatttgtaaaagttctcatagtcaaaacagctaagtaatggcattgcccagactccaaaatcctgaccagaatataaatcaccaattgttggtttaaaggggttatttgtgaatcattttccaaaaaaagaagtacactttttgtgttacttaccatttcaaagaaacttattcttcaagaccatttcagatttccttaggaatgtatgtgttacccataattgaccacttcaaacttgtaagaaaaaaaatgttatggtcattttgttatttttagagacaaagtatttctaatctaggtttgcatacaaccttgaggctgtgagatcattagtcaattgctttaattataagccctgttttttttttaaatctaaaaactaataaacatctataagaattataacagattattttcttcattaaattactttgtaatcaagttctagattaaatgtttaaacatgcattaaaggattagttctgaa

SEQ ID NO: 383946 - DNA, 308 bp, Homo sapiens
ttatctaatgatctcttggacttaaagcactttgtttctgcagttacttcgcatgagtgtttactgcctctcagtcagcattctttacagtattaatacacagagaaggaaggaccagctgcattagaatcactgtaacttgttgaaaatccacatttccagacttaacacccagatattctaattcagtacgtctgagtgaggtccaggattctatatttttaacaaacatcccaggtgatttgcatgaagaccaatgtctgagaaccactgcttacaggaatcagagtactttgctggcatctttg

SEQ ID NO: 383947 - DNA, 414 bp, Homo sapiens
gtcagtcttccataactgtttcctgctgacaaaggggcagtggtgatggttctgtgggtcttggcctcttgctagctgtcacagcaggagggtggctttgtggattggtgaaagtggtatccagccaggtccaagagagacaggggcagggttttgccaatgccaaatatacttcagcagtagaagccacaagattacattattaaattgtcccaagagtcccccagtgcaaaccccagctgaacgccatttagttatattctggtgcgttttccttctgcaggaactcaaaccaaggtttcttatgtgtgcttgagttgggggccagagtgacaactggtagaaaactatgttattccccagctaggagaacagaggggaggggtacatgatagtagggagtcaagtttacag

SEQ ID NO: 383948 - DNA, 2003 bp, Homo sapiens
tgggggaaagatttttgagtctacaactgacaaaatgtcttcttcaaattaaaaaaaattgagaagcagcactttaagtctaactctacaccattttattgcatgtattagttttattaatgatttttggtgcatgcctttgggcttattcaaaagtgtacaataggaaagtatatttcctttcttagaaaggagatgttttctactttgcaacatgtgattacaaaaatcttcctctgtgggaagattaaccatgtattgaactactgaaaagtatatatttttagatatacagaaggaatctacatggagcagcattcagacctatatagaagtcatagcattctgtataggaccaaaaaggaaataacattaaacacttaaacagacgttgttgggtagaaatacctttagatcttgcatttacttccaaaaagaaaaaatgccacagaagtttgctgaaaacttttgtcgtttgaattttctctgtcagtgtatttagcccaaatacaacagctttgggttagcacacacataagaatcaaaaaaacaaagctcactaaataaatcagtctggtttgccaatccagcttgactgaaataagtaaaccaatcacttgcaacatgaaaaactgtccaactcctctaaggttctgacaaaataaccttggctgatgtgggaagactcccactttgattactgacctgacagtgaagattcatgcttgacatgatttcagacttgacaatgtctgtttaaggagctatggtacagtttgctaattcaatcccagatacctgttgattacctgtgagatctagagtccaaagtagccagcagccatatccctgagtgctctgtgcccatcagatatcttaaagtaagcagggttgggacaggtcacagcttggatgattgacctcaggtgccgtagacagccccagattcaagaattgtatctgctttcttggcagtcgtcactgaactaatgtcccatactgtgttacttactgtagatgctctcttttagaggaggcccagagcacacatcctaatcgctagcggtactcagagagggggtgctaactctgatgccctggccaaattccagtttagggatgtgggtcttcttcttgtcattctaattggaaatgtgcatcacttcccatttttcttactgatctcagtgcaaactacactagtctgtttctttgccctggtctcaagtctctaagacgctggtgtgtattatgtgggctaagttcatgtgttatcctaaggcacaagagttgaggaatgggtgagcttggtgtcagagcactgtgtggttggagggtggactcttgtgatgctgtggggatgaaattggccctcttttagcataagttggggagtgtgcactggctggaggcttccagaggcttccagccatgaggtgtgagctgaaaccaatttttcctctttccttatagcatgttgagaaaatctgttgggttttcagcagtcagggaaggccggagttctgctttaatctgggtaactgaggctaatatgagcaagactttggttaattaactgggttctcagatgccacagactccgtgagaagtcaccattattttcaatggttgtgatagaatttcccccagtagccattattttaagattatattgcagagttgctttattttgagctttttgtgtatacacaatcccaaactggaagaaattttaaaaaaaggaatcctgctgtgaaaggtatatattactctagatttttccttactgtaaatattgtaagattgtaatactgtcgatattttattaaccaacaaatgttaatctatgtgaaatcagacttattttaaatgtgcttcttatttactgtgtgtggtccctgttgctgacagtattaagttatattctgatgtaagattaactttattaaagaatgtaaacattaatgtttccttatgggaaaacaaataaagtataaagaaga

SEQ ID NO: 383949 - DNA, 1721 bp, Homo sapiens
tgggggaaagatttttgagtctacaactgacaaaatgtcttcttcaaattaaaaaaaattgagaagcagcactttaagtctaactctacaccattttattgcatgtattagttttattaatgatttttggtgcatgcctttgggcttattcaaaagtgtacaataggaaagtatatttcctttcttagaaaggagatgttttctactttgcaacatgtgattacaaaaatcttcctctgtgggaagattaaccatgtattgaactactgaaaagtatatatttttagatatacagaaggaatctacatggagcagcattcagacctatatagaagtcatagcattctgtataggaccaaaaaggaaataacattaaacacttaaacagacgttgttgggtagaaatacctttagatcttgcatttacttccaaaaagaaaaaatgccacagaagtttgctgaaaacttttgtcgtttgaattttctctgtcagtgtatttagcccaaatacaacagctttgggttagcacacacataagaatcaaaaaaacaaagctcactaaataaatcagtctggtttgccaatccagcttgactgaaataagtaaaccaatcacttgcaacatgaaaaactgtccaactcctctaaggttctgacaaaataaccttggctgatgtgggaagactcccactttgattactgacctgacagtgaagattcatgcttgacatgatttcagacttgacaatgtctgtttaaggagctatggtacagtttgctaattcaatcccagatacctgttgattacctgtgagatctagagtccaaagtagccagcagccatatccctgagtgctctgtgcccatcagatatcttaaagtaagcagggttgggacaggtcacagcttggatgattgacctcaggtgccgtagacagccccagattcaagaattgtatctgctttcttggcagtcgtcactgaactaatgtcccatactgtgttacttactgtagatgctctcttttagaggaggcccagagcacacatcctaatcgctagcggtactcagagagggggtgctaactctgatgccctggccaaattccagtttagggatgtgggtcttcttcttgtcattctaattggaaatgtgcatcacttcccatttttcttactgatctcagtgcaaactacactagtctgtttctttgccctggtctcaagtctctaagacgctggtgtgtattatgtgggctaagttcatgtgttatcctaaggcacaagagttgaggaatgggtgagcttggtgtcagagcactgtgtggttggagggtggactcttgtgatgctgtggggatgaaattggccctcttttagcataagttggggagtgtgcactggctggaggcttccagaggcttccagccatgaggtgtgagctgaaaccaatttttcctctttccttatagcatgttgagaaaatctgttgggttttcagcagtcagggaaggccggagttctgctttaatctgggtaactgaggctaatatgagcaagactttggttaattaactgggttctcagatgccacagactccgtgagaagtcaccattattttcaatggttgtgatagaatttcccccagtagccattgcactccgggcaggcattgcactccgggcagccattgcactccgggcagccattgcactcggg

SEQ ID NO: 383950 - DNA, 2891 bp, Homo sapiens
tgggggaaagatttttgagtctacaactgacaaaatgtcttcttcaaattaaaaaaaattgagaagcagcactttaagtctaactctacaccattttattgcatgtattagttttattaatgatttttggtgcatgcctttgggcttattcaaaagtgtacaataggaaagtatatttcctttcttagaaaggagatgttttctactttgcaacatgtgattacaaaaatcttcctctgtgggaagattaaccatgtattgaactactgaaaagtatatatttttagatatacagaaggaatctacatggagcagcattcagacctatatagaagtcatagcattctgtataggaccaaaaaggaaataacattaaacacttaaacagacgttgttgggtagaaatacctttagatcttgcatttacttccaaaaagaaaaaatgccacagaagtttgctgaaaacttttgtcgtttgaattttctctgtcagtgtatttagcccaaatacaacagctttgggttagcacacacataagaatcaaaaaaacaaagctcactaaataaatcagtctggtttgccaatccagcttgactgaaataagtaaaccaatcacttgcaacatgaaaaactgtccaactcctctaaggttctgacaaaataaccttggctgatgtgggaagactcccactttgattactgacctgacagtgaagattcatgcttgacatgatttcagacttgacaatgtctgtttaaggagctatggtacagtttgctaattcaatcccagatacctgttgattacctgtgagatctagagtccaaagtagccagcagccatatccctgagtgctctgtgcccatcagatatcttaaagtaagcagggttgggacaggtcacagcttggatgattgacctcaggtgccgtagacagccccagattcaagaattgtatctgctttcttggcagtcgtcactgaactaatgtcccatactgtgttacttactgtagatgctctcttttagaggaggcccagagcacacatcctaatcgctagcggtactcagagagggggtgctaactctgatgccctggccaaattccagtttagggatgtgggtcttcttcttgtcattctaattggaaatgtgcatcacttcccatttttcttactgatctcagtgcaaactacactagtctgtttctttgccctggtctcaagtctctaagacgctggtgtgtattatgtgggctaagttcatgtgttatcctaaggcacaagagttgaggaatgggtgagcttggtgtcagagcactgtgtggttggagggtggactcttgtgatgctgtggggatgaaattggccctcttttagcataagttggggagtgtgcactggctggaggcttccagaggcttccagccatgaggtgtgagctgaaaccaatttttcctctttccttatagcatgttgagaaaatctgttgggttttcagcagtcagggaaggccggagttctgctttaatctgggtaactgaggctaatatgagcaagactttggttaattaactgggttctcagatgccacagactccgtgagaagtcaccattattttcaatggttgtgatagaatttcccccagtagccattattttaagattatattgcagagttgctttattttgagctttttgtgtatacacaatcccaaactggaagaaattttaaaaaaaggaatcctgctgtgaaaggtatatattactctagatttttccttactgtaaatattgtaagattgtaatactgtcgatattttattaaccaacaaatgttaatctatgtgaaatcagacttattttaaatgtgcttcttatttactgtgtgtggtccctgttgctgacagtattaagttatattctgatgtaagattaactttattaaagaatgtaaacattaatgtttccttatgggaaaacaaataaagtataaagaagacaattcttttcattgaaatatactgtgtatttacacttgctagacccagcaccacttataaatttagtacactgttcagaattttagttaacacagctgacatggttgtgctctgtttgaaagtctaagaataggtattgttggaatatacagtttgtatttgtctgctgtgaatcataatcttgaaatttctaatcaagtttgtaaaatttttatagtgaaacattttaatgacaatttaaaaatttatcttctctaaagaatggtcaaaacaatatcctttcagaaatagaattgttctttaatatctttccaaaatgactttggttaaatggaccagatgtatattagttaaaatttaggactaagttgttgatattctttgagtttacaagttaatccttattggagatgtgccaatatacagttagaatatcattaatttgcactgtttggggaccccatttaagaatgctgaattttgccaactaagaagtaagcaaatgcaatttaaaaagtaaatttgagcattctgtattaaatatgtgcagttattatcacatgaagaaacgcagtgtgtcgggctgtaatattaccatatttgctgtcatgttctcccatctcagtgctgggaaatcaccatgtggaaaccaagcaaacgtgttgtgcatcagccggcttgagtttgttcaatatcaaagctgaaaactagcgaggtctgctgtactgcttattgaagtattgtgattattttaggcattgattcttacaaaatatatactgtaacagtatactttgtacagatttaaattttatttgaaaaaatgaaataaagtaggcaaaaaaataaagatgtttatttttcatgtgactgtataatcaaaaaaa

SEQ ID NO: 383951 - DNA, 400 bp, Homo sapiens
gtcagatgacataaaaggaatatttctaactatagttcttgctccttttgaactttaactgatacaaggacaaagggggggaaatcacattttcagattaaatttgctcttgtcgctgcatgtgctactaggaattaagccctgttacaaatcctccttgtctcctctattcccgttagcattgtttttgctgcagtcaggtactggccttctggaatattcctccagtggcatgctgtaccttaaggttgggagcagctatatatacacagggtacaggctctctagcctcttccgagcatgctattctggtgcctttgttctgtcttaagttcctccaacattcatcttcctctttcagagaatccttgttttacagaagaggccgcttgtgaaagag

SEQ ID NO: 383952 - DNA, 440 bp, Homo sapiens
gaactagagatcatgaaatctggttccattcctttatataagccctaagtccagactaaaacccagacctcttgatacctattatttggctttttaattccaattgaatgaaagaagaaatgattgaatgtgaataaataaaattattgagagctagtttgagcaaagcatcatgtaagatattgtagttccaaaattcagatgttgtcctgtctagagaaattcctcactttctcctgggaaagacagacataaaaaagatctgtggtaacatcatatccttagtgctctaacagagctataaacaaagtactctggggacacagaacatagcaacttactctgtttaggggaagtttaagtttaagacttcacaaaggtagtgttgcaggactagtcttgaggatgaaggagcgtttggcagactgaaaagaggaaaa

SEQ ID NO: 383953 - DNA, 415 bp, Homo sapiens
tttcaaattttgcaataccctctctcattaacaggtatgaacaatgatcttttttttttaaccactactttgtagagtcattaataatcagcctagaaattagtaaagataatgttgtgggctgaaagtttatgtttcctccaaatgcatatgttgaaacactaatctccaatgtgatgctattaggaggtagaggtctttgggaggtcattacgtttagataaggtcataatgatagaggcttcatgatgggattagtttccttataagagtcagggactaaaactctttctctctctttgctgtgtgatgacaaagcaagaaggcagtcaacagaagccaggaagagggctatcccaagaacctgaccatactgacaccttgatctaggactccgtagcctccagaactgtga

SEQ ID NO: 383954 - DNA, 227 bp, Homo sapiens
ccagcctgggccacaagagcaaaactctgtctcaaaaaaaagaaagaaaagaagcattaattatatataacataagtaattaataattaatgaaagccaagcacagtggctcacacatgtaattccagcactttgggaggccaaggcaggcagattgcttgagcccatgaattcaagaccagcctgggcaacatggcaagaccccgtctccaaaaacaaaaacaaaa

SEQ ID NO: 383955 - DNA, 298 bp, Homo sapiens
gagaaatgaaatcacttttttcctacaatcttcaaaataattacatatccagaaatttatattgtacaaaaaatagagttttttttaaagtcttttttgagctaaattcattgtgttatgcttgccaccaaattctgagaccagcattaacataaaattttctacctcgtttggtaccctaaaaattctagttgcctctggcaagctattgacaagaattttagacctctgatgaaataaatgtatcatcatataataatttctgatgtgaggttttaagattaaataactcactata

SEQ ID NO: 383956 - DNA, 878 bp, Homo sapiens
ggcggctcaggacgagggcagatctcgttctggggcaagccgttgacactcgctccctgccaccgcccgggctccgtgccgccaagttttcattttccaccttctctgcctccagtcccccagcccctggccgagagaagggtcttaccggccgggattgctggaaacaccaagaggtggtttttgttttttaaaacttctgtttcttgggagggggtgtggcggggcaggatgagcaactccgttcctctgctctgtttctggagcctctgctattgctttgctgcggggagccccgtaccttttggtccagagggacggctggaagataagctccacaaacccaaagctacacagactgaggtcaaaccatctgtgaggtttaacctccgcacctccaaggacccagagcatgaaggatgctacctctccgtcggccacagccagcccttagaagactgcagtttcaacatgacagctaaaacctttttcatcattcacggatggacgatgagcggtatctttgaaaactggctgcacaaactcgtgtcagccctgcacacaagagagaaagacgccaatgtagttgtggttgactggctccccctggcccaccagctttacacggatgcggtcaataataccagggtggtgggacacagcattgccaggatgctcgactggctgcaggagaaggacgatttttctctcgggaatgtccacttgatcggctacagcctcggagcgcacgtggccgggtatgcaggcaacttcgtgaaaggaacggtgggccgaatcacaggtttggatcctgccgggcccatgtttgaaggggccgacatccacaagaggctctctccggacgatgcagattttgt

SEQ ID NO: 383957 - DNA, 857 bp, Homo sapiens
ccccacaccacctgagtccagacactgggctctggccacgcgtcttagactccaaatctcggctcactggtccctttgaggaggtcgcctggtgttcccgtagccctccaccccaccgtaggagagcgcctgccacgagctccgcgcctcgctaagtgctttgctacgtgaactcttagttttcccaacatccctaagccgccgatacattatcacccacgtattgcggacgagagaaccgcctcggagaagctggctggctcgcttggagttttgcagctagtggcggagcgagcattccgagcagataagctccacaaacccaaagctacacagactgaggtcaaaccatctgtgaggtttaacctccgcacctccaaggacccagagcatgaaggatgctacctctccgtcggccacagccagcccttagaagactgcagtttcaacatgacagctaaaacctttttcatcattcacggatggacgatgagcggtatctttgaaaactggctgcacaaactcgtgtcagccctgcacacaagagagaaagacgccaatgtagttgtggttgactggctccccctggcccaccagctttacacggatgcggtcaataataccagggtggtgggacacagcattgccaggatgctcgactggctgcaggagaaggacgatttttctctcgggaatgtccacttgatcggctacagcctcggagcgcacgtggccgggtatgcaggcaacttcgtgaaaggaacggtgggccgaatcacaggtttggatcctgccgggcccatgtttgaaggggccgacatccacaagaggctctctccggacgatgcagattttgt

SEQ ID NO: 383958 - DNA, 353 bp, Homo sapiens
ccccacaccacctgagtccagacactgggctctggccacgcgtcttagactccaaatctcggctcactggtccctttgaggaggtcgcctggtgttcccgtagccctccaccccaccgtaggagagcgcctgccacgagctccgcgcctcgctaagtgctttgctacgtgaactcttagttttcccaacatccctaagccgccgatacattatcacccacgtattgcggacgagagaaccgcctcggagaagctggctggctcgcttggagttttgcagctagtggcggagcgagcattccgagcaggtactgtgcgatcctccagcgccggccgcagctcacagccccttag

SEQ ID NO: 383959 - DNA, 507 bp, Homo sapiens
tgaacccctgacacggcggtcttttgaatgccttaggtatgatttcactttcgctcacatcaatgctgacctgaatgcctttcatatctgatccgctgtgtctctcccagtaaacatcccctgaggggagaacaaagaaaggagctcttcttcttcttaatcacaattcagccctttcaccgccggcaggctccatttgcattctgccacagaaagccaagatgaaaagaaagagagagagaaagagagagagagagagagagagagagagaggcacagggtagtagctgagtaaaataacttaggtgtttgtggctgtttgttgggcttcccctagttaccagccttatatagctgatgctccaccaggccctgtccctcctgacaggcatatagtgttacaagatggcatgtctgtactattcatggccacccgctcaacacttgaggtaaaaagtgtcaggaggggatcgaattctcccccagaagcctgttagatttggggtc

SEQ ID NO: 383960 - DNA, 312 bp, Homo sapiens
  misc_feature (163)..(163): n is a, c, g, or t
  misc_feature (171)..(171): n is a, c, g, or t
  misc_feature (257)..(257): n is a, c, g, or t
  misc_feature (262)..(262): n is a, c, g, or t
ctaaaggctgaagaggagtgggccagggaaagagctatggggtgaggagaggagggtcagggagaatgtccccagcagaagacaccctgggcaaaggctggaggaggcaagtgaccatctggctggagcccagaagtaagaaggtgggaagcatacacatgtncatgtttntggtgtggagaggcctagaatgtcagatggcaaaaaggaagtagttggccatacggctttggtcgtgttgttgagtatcgtaattncccanctctaaagagttgagattggattctttaggcagtagggagccatttaagt

SEQ ID NO: 383961 - DNA, 425 bp, Homo sapiens
ttaattacagtataaaagggtttctagctgttgaaaaggttgggagctactgaattaggcctccagatcctgtggcctacctgttatacctcaaagcctcaattttcagccgcttccttagcctttctcaaccagggctgtgagacagttaagctctaaggaaaattgtttgagtaactaatatcagttctcccaaggactgtatttaggtattctttacctaccatggatgtgttagggccagactctcttggaaggatgcttctcttctgttctcttcccttgccctctccctctctttatgcttctgttttgtgatcccccatttacacacaggaacaacctcaaagttctgggttgggaattggggaccagaaaatgactatagctttatcttctaatatttgtgttgattaatgcttgaa

SEQ ID NO: 383962 - DNA, 375 bp, Homo sapiens
ttttcctttttttctgaaaaagacagtgcctcccactcccacccactccctaaactcaactgaccactaaatattgcacatttttcattcttgctcctttaagaaataaaaataactcagagtcactagctcttgccccctcttatactttggtatttcagacatttaaatctagtacctaaaaagaaagaattaatcatcatggccaaagtgtgttgatattactttagttccaattataccaccaactgaatcaagatgacttagagtgtcaacacatgtttttcaacaaattatgtctatttgctttttagtatgtattaaacaattcatttcacatgtttatttatgcagacttttgaatcattctacgta

SEQ ID NO: 383963 - DNA, 438 bp, Homo sapiens
ctacctcagggcaactaaaccttcttgctatggagtgttcttaataatacaaaaagagatgcatcattttgaggggggtttattttaacaagaaatatcagatagaaatagatatggatgatagttggcgcgatcaacaaaattaaaagtgtgaaagcatgtcattacttgtgtatatgggctttgtaattttcaaagaatttgacatgcattaaccccttctgtaggatgacaaaatgtaagagcagctgtaatcttagagaccaatgcatcccttactgagaaaatgacatccatagattatactgatcagttatcattgactatagtatttagagtaattaggaatttcgcatggcagttaaatctcactcaattttagatgattccaactatgaaacattacttgtgtctcctgagctatcatttttttcttgt

SEQ ID NO: 383964 - DNA, 350 bp, Homo sapiens
cagccatttaacaatgtaaaatccattcttagttcatgagaggtacaaaaacagacgttgtgctaaaatgtgcctgcatgccatagcttacttatcccttctctagggtattaattgctgacaagccctatgaagtcagagaccttgtctgctttgtttcattgctggagctccaaccctggtatcacacctcacgcagagtctatgctccaaaatatttgtggaatgaaatactactgccatgttaaattatgcagcatggcacaaatcctatgttgaaattgagcgggctttatttattctactctgcatatatgtatcatatgcctactatgtgttctcctttgtgc

SEQ ID NO: 383965 - DNA, 443 bp, Homo sapiens
ctaggtagtgggccaaagaatgaagtagttaaatgtagtgattgagtcagaaacttcatgtatgtagaaggtagctatatggagagtgtagtgaaaggaaagaggtgaggaattgaaatgtcaactctgaattatctgtgtggccaatttactttgtattatatgtggcagtatttttgttctaatttgtcttcctgagaattgggccagttccccgtcatcactgcatttatagaagaaaactaattcttacattcataggtatgggaagagcatgaataacaagacaataaaagtgatatttaatatttaaagtcaattatagggccaggattggtggtccaggcctgtaatcctagcactttgggaggccgaggtgggaagatcagttgaagccaagagtttgagaccagcctgggcagcatagtgaaccttgtctctac

SEQ ID NO: 383966 - DNA, 459 bp, Homo sapiens
tgcctggcacagagtaagtgctcaacaaatgttagccacaggtgggtttttgagtcagagagatgtgcacaagtgtttttgtgttggtgtgtgggcaagtaactatgtggccctgaaccagcgcacgtatcagtgtataaatagcctgtggatgagtgacctggtgggagggtctgtgcagaggcagggccaagagtggaggtttgtgtgtgaaaggcccctggtgtccatccgtgcctgtgtgtgtctgtgttcccatgttaacttgcacatagtctgtgccaagggtgtttctatgtctttcattcatgtgaggatcagctccctgacatttgccgtatctgtccccagtgcctctcctgggattcacactgatgctattctttaaactgactccttttttacataaattatgtttacatgtaatcaagttaaaatacatcttaaatgtattcttta

SEQ ID NO: 383967 - DNA, 1101 bp, Homo sapiens
ggacacaaacttcaggaaaggatttgcacttgtgcagaccgggcgagcagagtaagaagcagtctcactgtgtcgcccaggctggagtgcaagtggcatgatcttggctcacaactgcaacctccgtctcccgggttcaaacgattctcctacctcagcctcccgaatatctgggattacaggtgcccaccaccatgcctggataatttttaaaaatatttttagtagagacagggtttcaccaactaggccaggctgctcttgaactcctgacctcaggtaatccacccgccttggcctcccaaaatgctgggattacaggtgtgagccaccgcgcctgaccaactttagcttttcaaaatctgtcttcgtagacgataatggaaatatctaccaaagctaaatattcacctaccccatgacccagcaattttactcctaggtatatataccaaaaaaaatgagtgttctgtgtccactagagatatgtgccaaagtgttcataatagatccaaactggaaacagctcaaatgtccatcaatagcagaaagataaacaaatgttgggatgttcagagcttgaaatatgacacaatataaaaggacaaactattaaaactcacaacagcatggataaatcttacagacataattattgagcaaaagataccagaaacacaaaagtatatactgtctgattcctttaaataaaggttaagatgattctccctcctgcagccttggtgaagaaggtgccctttcttccccttcggccttctgccatgattgtaagtttcctgaggcctccccagccatgttgaattctcattgtccctgataaaatagcaccctctcttcctctgctcttccacccttttcctcttccgctgtgcaactgaagactgggaaagaatgacatgcaaaataagaggttttggattcagcgtaggactaactactggatgctacttacagaaaactttatatttgtgctgaaaaatcttgttatctaggtgaaagccaatgctatcctaatgacaaaattgttggggaaataaatttataagagactttatttaaagaaataaaagaaaaaataat

SEQ ID NO: 383968 - DNA, 370 bp, Homo sapiens
ccggctaaaagtttaatttctttaaggataaatgtgctcttagaaacagggaagaaagaggctattaaacccgaaagggaaatggaaacagaacatgaataggaaattagggtttcacaaacactagtaattgtatgtgataacaaaagaaaattaattgaagacttaaaatattaagctatatttgtgaggttatgggaaatgtatcactcattcttacattttaggaaattttttagttatgattcagatatccacaaacttaattctaagtattgatcttcataagctttctatgtaatgaaataacgtaagacatagcaattggatgtaacctatgtggatttcagtgaaactaccaggcatgtat

SEQ ID NO: 383969 - DNA, 255 bp, Homo sapiens
aaacaggataaatattaaggaaatcacgcctatgcacctaatagattgctgagaaaaataggaaagtttaaaagctgtcggagaaaaaagggaacaatgatgagaatacatgactagaaaaaaatgcaatcaagaagacagtcttaaatatctttgaattgctaaagtaaaaatactgccaaactaaaattctatatccagtgaaaatattcttcaaaacgagtgaaatagtcgtttttggatatgtgaaagttg

SEQ ID NO: 383970 - DNA, 463 bp, Homo sapiens
aagtgtcatgagggaacatggagacggaggtcaagaagaggagtctgtccctcgaagaaaggtgatgtggaacctgtggaggacaagttgattgggtactagtgagcgaagacttcactaataatgtgtgtgaaaagccaaaacctaagacacaattaagaaaaaaacaaaaacaattaaggaaaaataccatcttggtttctggagagaagtacaattctcaggcctgaggcctttgggaagggatgagatgcagattccaactccttctccttatgagctgttgaaaactgctggggaaaagaagcatccactgctctgagtcttatcatcatatattagttttgactactcatatactcatacatagttttgtcaacttcatatactcatatatagacttcccagactcatacttaaaaaaaaactacatacatagacttcatagactcatgcagttaaa

SEQ ID NO: 383971 - DNA, 724 bp, Homo sapiens
gtggcgaggaggcgcccaggcggaggcggcggcgggcggaggagcgcaggagcgggcggccaggccaccgcgcggcggcggagcgggccgcggcccggcgctccttccccaccgcggcccgacgcaccccggccgccgccatgagcggctcctcaggcaccccgtatctgggcagcaagatcagcctcatctccaaggcgcagatccgctacgagggcattctctacaccatcgacaccgacaactccaccgtggcgctcgccaaagtgaggtcctttggcactgaagaccgtcccacagataggcctgcgccccccagagaggagatttatgagtacatcattttccgaggaagtgacatcaaggatatcactgtgtgtgaacctccgaaagctcagcacacactcccgcaggatcccgccattgttcagtcttccctgggttctgcctccgcctcgcccttccagccgcacgtgccttacagccctttccgagggatggcgccctacggcccgctggcggccagctccctgctcagccagcagtatgccgcctccctgggtctaggtgagtgacctgtttctgtctggtaaactacccttgcgtgtaactgtcactgagtggagcgatggagcctgagggtggggatatgcattcctgtcatgctcagcgttgtagactgttttgttgcacacttagtaaattacccagtgcaacttccgct

SEQ ID NO: 383972 - DNA, 2498 bp, Homo sapiens
aatggtttcaaccaagattgaaaaaccccagagtatgattctattctccatatgtagagaaagatcctgccttgtccttaacctggacctagctttgcagatgggctcagagtgtagaattggcaggtgatccacgacccttgctcagaatccagcatgaagtagtgagacagggaaccctaaacgaggtctgtaggccacttgctgctacaaatcatgcttgcttggttgctattcctagtgtgacaggcggccttcccagcccagctctctgtgtttctaaaacgtgtttgtatgacagaatcctacaagaggttgcttggctctttccaagcttgctagacacaagacaagtgtatcctgacttatttgtgtgctttctttttgctctttctcctttatcttcctttagagaagttggtaagccctccagcctcagccgctgcttccagccctagctcttctccatctccacagcccgtttcagagcttgacttgtcctcagagccacagcagctcactgccaagggagctggttttccatccatcccagtcggcaagagccccatggtggagcaggctgtgcagactggttctgctgacaacctgaatgctaaaaagctgttacctggcaagggcaccacagggacgcagctcaacggtcgtcaggcccagccgagcagcaagacggccagcgatgtagtccagccggcagctgtgcaagctcaagggcaggtgaatgacgagaacagaagacctcagaggaggcgatcaggaaacaggcgaacaaggaatcgctccagagggcaaaaccgtccaactaacgttaaggaaaacacaatcaaatttgagggtgactttgatttcgagagtgcaaatgcccagttcaaccgagaggagcttgacaaagaatttaagaagaaactgaattttaaagatgacaaggctgagaagggggaagagaaggacctggctgtggtgacccagagtgccgaagcgcccgctgaggaagaccttctggggcccaactgctactatgacaaatccaagtcgttcttcgacaacatctcttctgaactcaagaccagctccaggcggacgacgtgggccgaagagaggaagctcaacacagagacctttggggtgtcagggaggtttcttcgtggccgcagttctcggggcggattccgaggaggcaggggcaatgggaccacccgtcgcaaccccacttcccacagggccgggactggcagggtgtgagggtgcagccaaaggctcctactgaagtggcgcataactgacgctgtgtgtgtcaggacgcgaggaaaacgctgcacttacagggagaggtggtcactttgtttacggagtttggaagagacccatactgctacttgtgttttggacttaactgaacttggacatggtctgagttagaaccacttgttttggggaagtattcatgggtaacctctttgaggtctctttatctgtgtttcctttttagttgcgcatagcctaattctaaggttttggtattttgcaaaaaggtttctatagtgaaagctgaatccttactttgtgacttttttttttttttttaatgacaagctttgacttttaaaagtggaaccaaatctgttggcagaggtggcagccaagtacatctctgtaacccagctggcccctggtgctgttggcctggcaccccactgccaagggtggggtctcaggagtcaggcagggccagcacagggtggcgtggggggcaggggtgggtgggtggagggcacggaaggggttttcccatggatcatgttgtataagtgaaccagaccaccctgatggcatccacagtgatgtcaaggttggggctggccaggggtgggtggactagaagcatttgggagtagtggccaggggccctggacgctagccacggagctgctgcacagagcctggtgtccacaagcttccaggttggggttggagcctgggatgagccccggcagcgccttggcccttctgtggtccctgccagcctctgacctgggccggtcagtcattgctggactctggccacacactggcgttctcatccacttggaaacaagccagtcttttctgcaaggtcagttgaccaagagcatatttcccctctgttgtacatcgttgttttgtgtttgtgttgtaacagtgggtggagggagggtggggtctacatttgttgcatgagtcgatgggtcagaactttagtatacgcatgcgtcctctgagtgacagggcattttgtcgaaaataagcaccttggtaactaaacccctctaatagctataaaggctttagttctgtattgattaagttactgtaaaagcttgggtttatttttgtaggacttaatggctaagaattagaacatagcaagggggctcctctgttggagtaatgtaaattgtaattataaataaacatgcaaacctttaaaattttaaaaaaaa

SEQ ID NO: 383973 - DNA, 2458 bp, Homo sapiens
gtggcgaggaggcgcccaggcggaggcggcggcgggcggaggagcgcaggagcgggcggccaggccaccgcgcggcggcggagcgggccgcggcccggcgctccttccccaccgcggcccgacgcaccccggccgccgccatgagcggctcctcaggcaccccgtatctgggcagcaagatcagcctcatctccaaggcgcagatccgctacgagggcattctctacaccatcgacaccgacaactccaccgtggcgctcgccaaagtgaggtcctttggcactgaagaccgtcccacagataggcctgcgccccccagagaggagatttatgagtacatcattttccgaggaagtgacatcaaggatatcactgtgtgtgaacctccgaaagctcagcacacactcccgcaggatcccgccattgttcagtcttccctgggttctgcctccgcctcgcccttccagccgcacgtgccttacagccctttccgagggatggcgccctacggcccgctggcggccagctccctgctcagccagcagtatgccgcctccctgggtctaggagctggttttccatccatcccagtcggcaagagccccatggtggagcaggctgtgcagactggttctgctgacaacctgaatgctaaaaagctgttacctggcaagggcaccacagggacgcagctcaacggtcgtcaggcccagccgagcagcaagacggccagcggaaacaggcgaacaaggaatcgctccagagggcaaaaccgtccaactaacgttaaggaaaacacaatcaaatttgagggtgactttgatttcgagagtgcaaatgcccagttcaaccgagaggagcttgacaaagaatttaagaagaaactgaattttaaagatgacaaggctgagaagggggaagagaaggacctggctgtggtgacccagagtgccgaagcgcccgctgaggaagaccttctggggcccaactgctactatgacaaatccaagtcgttcttcgacaacatctcttctgaactcaagaccagctccaggcggacgacgtgggccgaagagaggaagctcaacacagagacctttggggtgtcagggaggtttcttcgtggccgcagttctcggggcggattccgaggaggcaggggcaatgggaccacccgtcgcaaccccacttcccacagggccgggactggcagggtgtgagggtgcagccaaaggctcctactgaagtggcgcataactgacgctgtgtgtgtcaggacgcgaggaaaacgctgcacttacagggagaggtggtcactttgtttacggagtttggaagagacccatactgctacttgtgttttggacttaactgaacttggacatggtctgagttagaaccacttgttttggggaagtattcatgggtaacctctttgaggtctctttatctgtgtttcctttttagttgcgcatagcctaattctaaggttttggtattttgcaaaaaggtttctatagtgaaagctgaatccttactttgtgacttttttttttttttttaatgacaagctttgacttttaaaagtggaaccaaatctgttggcagaggtggcagccaagtacatctctgtaacccagctggcccctggtgctgttggcctggcaccccactgccaagggtggggtctcaggagtcaggcagggccagcacagggtggcgtggggggcaggggtgggtgggtggagggcacggaaggggttttcccatggatcatgttgtataagtgaaccagaccaccctgatggcatccacagtgatgtcaaggttggggctggccaggggtgggtggactagaagcatttgggagtagtggccaggggccctggacgctagccacggagctgctgcacagagcctggtgtccacaagcttccaggttggggttggagcctgggatgagccccggcagcgccttggcccttctgtggtccctgccagcctctgacctgggccggtcagtcattgctggactctggccacacactggcgttctcatccacttggaaacaagccagtcttttctgcaaggtcagttgaccaagagcatatttcccctctgttgtacatcgttgttttgtgtttgtgttgtaacagtgggtggagggagggtggggtctacatttgttgcatgagtcgatgggtcagaactttagtatacgcatgcgtcctctgagtgacagggcattttgtcgaaaataagcaccttggtaactaaacccctctaatagctataaaggctttagttctgtattgattaagttactgtaaaagcttgggtttatttttgtaggacttaatggctaagaattagaacatagcaagggggctcctctgttggagtaatgtaaattgtaattataaataaacatgcaaacctttaaaattttaaaaaaaa

SEQ ID NO: 383974 - DNA, 1514 bp, Homo sapiens
caccttagggtttgggcggagcgtcccacatggggtgcctggtgccaaccccacccagcgcctcgggacagccaggtgggccctggaaagactagccctcctgccactagctgcgtccctgtccccagtgtattgtacaagtaggattctcagagtgggttgtgagaagaatgggggtagccagtctgactctgggggcaggagggaggctgagtggctcctgctcgccagcaggggcaacagtgctagcttatcccagcagatgcttgacttcctgtcatctcttgcaggctcctactgaagtggcgcataactgacgctgtgtgtgtcaggacgcgaggaaaacgctgcacttacagggagaggtggtcactttgtttacggagtttggaagagacccatactgctacttgtgttttggacttaactgaacttggacatggtctgagttagaaccacttgttttggggaagtattcatgggtaacctctttgaggtctctttatctgtgtttcctttttagttgcgcatagcctaattctaaggttttggtattttgcaaaaaggtttctatagtgaaagctgaatccttactttgtgacttttttttttttttttaatgacaagctttgacttttaaaagtggaaccaaatctgttggcagaggtggcagccaagtacatctctgtaacccagctggcccctggtgctgttggcctggcaccccactgccaagggtggggtctcaggagtcaggcagggccagcacagggtggcgtggggggcaggggtgggtgggtggagggcacggaaggggttttcccatggatcatgttgtataagtgaaccagaccaccctgatggcatccacagtgatgtcaaggttggggctggccaggggtgggtggactagaagcatttgggagtagtggccaggggccctggacgctagccacggagctgctgcacagagcctggtgtccacaagcttccaggttggggttggagcctgggatgagccccggcagcgccttggcccttctgtggtccctgccagcctctgacctgggccggtcagtcattgctggactctggccacacactggcgttctcatccacttggaaacaagccagtcttttctgcaaggtcagttgaccaagagcatatttcccctctgttgtacatcgttgttttgtgtttgtgttgtaacagtgggtggagggagggtggggtctacatttgttgcatgagtcgatgggtcagaactttagtatacgcatgcgtcctctgagtgacagggcattttgtcgaaaataagcaccttggtaactaaacccctctaatagctataaaggctttagttctgtattgattaagttactgtaaaagcttgggtttatttttgtaggacttaatggctaagaattagaacatagcaagggggctcctctgttggagtaatgtaaattgtaattataaataaacatgcaaacctttaaaattttaaaaaaaa

SEQ ID NO: 383975 - DNA, 2161 bp, Homo sapiens
cccgcccgagcccgctgacccccgtccgccaacagccccggcctgcggtgccctccccgccccggggcgccccggagcctggcgcccagaccccgcccagaacccacccagggcacacccggcccgagatcccctgcccgcgccttcaccccggacgcccccgaggcgcccccttcccgcgcgccaccctcccccagcgtagccggccgcacaatggtctccctgggctcccagggcggcgggattgtgcgcgggcgcccggcggtgtttggtgaggggcgggcccggcccccgcggtgccgccccctcggccgcccagcccacctctgcaggtgccagctccgaggagcagggcggctcccgtcagcgggcctcctccccgccagcctggggggatccctgcgggggagcctcgaggtcgggtggcggggccagtgtcccggcgtctcccgaaggctgggggtggggtcacaacacgcgaatcctgcaagcctttctggaacttattagacagctggggccttgatcctgaacaaataccgcgtcctaatgcggcctcctgccaaggcagaagcatccgttggcagccagatgccccggtttaaacgtgaggtcctttggcactgaagaccgtcccacagataggcctgcgccccccagagaggagatttatgagtacatcattttccgaggaagtgacatcaaggatatcactgtgtgtgaacctccgaaagctcagcacacactcccgcaggatcccgccattgttcagtcttccctgggttctgcctccgcctcgcccttccagccgcacgtgccttacagccctttccgagggatggcgccctacggcccgctggcggccagctccctgctcagccagcagtatgccgcctccctgggtctagagaagttggtaagccctccagcctcagccgctgcttccagccctagctcttctccatctccacagcccgtttcagagcttgacttgtcctcagagccacagcagctcactgccaagggagctggttttccatccatcccagtcggcaagagccccatggtggagcaggctgtgcagactggttctgctgacaacctgaatgctaaaaagctgttacctggcaagggcaccacagggacgcagctcaacggtcgtcaggcccagccgagcagcaagacggccagcgatgtagtccagccggcagctgtgcaagctcaagggcaggtgaatgacgagaacagaagacctcagaggaggcgatcaggaaacaggcgaacaaggaatcgctccagagggcaaaaccgtccaactaacgttaaggaaaacacaatcaaatttgagggtgactttgatttcgagagtgcaaatgcccagttcaaccgagaggagcttgacaaagaatttaagaagaaactgaattttaaagatgacaaggctgagaagggggaagagaaggacctggctgtggtgacccagagtgccgaagcgcccgctgaggaagaccttctggggcccaactgctactatgacaaatccaagtcgttcttcgacaacatctcttctgaactcaagaccagctccaggcggacgacgtgggccgaagagaggaagctcaacacagagacctttggggtgtcagggaggtttcttcgtggccgcagttctcggggcggattccgaggaggcaggggcaatgggaccacccgtcgcaaccccacttcccacagggccgggactggcagggtgtgagggtgcagccaaaggtgagtggatgaaccttctggacgctttggtgggagggtgtagggtcaggcacacctggagagcttaggaaggtggggagcaggctcggtttcccaggaagaagagaggcccagaggtgtcaaagccaaaccgagggcctcgaccctatgagtcacccgggaggctcttggccaacttcaacctgcatctgtgggggtaggatccaggccccagcatcctccaagtgagattgcaggtatgggaggtgaggtggtgcgggagtcgcgtgggctgggggctcaccacccaggtgaagccagcaagtgagaccttgctccaaagccagtgtcttggcccaacccggccctaagtgaatcagaggcttcatttttaaccaggtcccagtggatt

SEQ ID NO: 383976 - DNA, 1327 bp, Homo sapiens
cccgcccgagcccgctgacccccgtccgccaacagccccggcctgcggtgccctccccgccccggggcgccccggagcctggcgcccagaccccgcccagaacccacccagggcacacccggcccgagatcccctgcccgcgccttcaccccggacgcccccgaggcgcccccttcccgcgcgccaccctcccccagcgtagccggccgcacaatggtctccctgggctcccagggcggcgggattgtgcgcgggcgcccggcggtgtttggtgaggggcgggcccggcccccgcggtgccgccccctcggccgcccagcccacctctgcaggtgccagctccgaggagcagggcggctcccgtcagcgggcctcctccccgccagcctggggggatccctgcgggggagcctcgaggtcgggtggcggggccagtgtcccggcgtctcccgaaggctgggggtggggtcacaacacgcgaatcctgcaagcctttctggaacttattagacagctggggccttgatcctgaacaaataccgcgtcctaatgcggcctcctgccaaggcagaagcatccgttggcagccagatgccccggtttaaacgtgaggtcctttggcactgaagaccgtcccacagataggcctgcgccccccagagaggagatttatgagtacatcattttccgaggaagtgacatcaaggatatcactgtgtgtgaacctccgaaagctcagcacacactcccgcaggatcccgccattgttcagtcttccctgggttctgcctccgcctcgcccttccagccgcacgtgccttacagccctttccgagggatggcgccctacggcccgctggcggccagctccctgctcagccagcagtatgccgcctccctgggtctagagaagttggtaagccctccagcctcagccgctgcttccagccctagctcttctccatctccacagcccgtttcagagcttgacttgtcctcagagccacagcagctcactgccaagggagctggttttccatccatcccagtcggcaagagccccatggtggagcaggctgtgcagactggttctgctgacaacctgaatgctaaaaagctgttacctggcaagggcaccacagggacgcagctcaacggtcgtcaggcccagccgagcagcaagacggccagcgatgtagtccagccggcagctgtgcaagctcaagggcaggtgaatgacgagaacagaagacctcagaggaggcgatcagggcgacaaggatccacggacagagcgtatgaccgtagggacgcgtagacagggaga

SEQ ID NO: 383977 - DNA, 1091 bp, Homo sapiens
cccgcccgagcccgctgacccccgtccgccaacagccccggcctgcggtgccctccccgccccggggcgccccggagcctggcgcccagaccccgcccagaacccacccagggcacacccggcccgagatcccctgcccgcgccttcaccccggacgcccccgaggcgcccccttcccgcgcgccaccctcccccagcgtagccggccgcacaatggtctccctgggctcccagggcggcgggattgtgcgcgggcgcccggcggtgtttggtgaggggcgggcccggcccccgcggtgccgccccctcggccgcccagcccacctctgcaggtgccagctccgaggagcagggcggctcccgtcagcgggcctcctccccgccagcctggggggatccctgcgggggagcctcgaggtcgggtggcggggccagtgtcccggcgtctcccgaaggctgggggtggggtcacaacacgcgaatcctgcaagcctttctggaacttattagacagctggggccttgatcctgaacaaataccgcgtcctaatgcggcctcctgccaaggcagaagcatccgttggcagccagatgccccggtttaaacgtgaggtcctttggcactgaagaccgtcccacagataggcctgcgccccccagagaggagatttatgagtacatcattttccgaggaagtgacatcaaggatatcactgtgtgtgaacctccgaaagctcagcacacactcccgcaggatcccgccattgttcagatgacaaggctgagaagggggaagagaaggacctggctgtggtgacccagagtgccgaagcgcccgctgaggaagaccttctggggcccaactgctactatgacaaatccaagtcgttcttcgacaacatctcttctgaactcaagaccagtgccgcgggaagccatcagagggttttgtgctgaagcgtggtgcggtctgatgttttacggcgtccttggtgagagtggttggacggtgggcaagtgtggctgctgactggccagttaggggccagtgctgcagcacaggtggcttggaaccaggcagtggtggtgac

SEQ ID NO: 383978 - DNA, 288 bp, Homo sapiens
ttctaaaacgtgtttgtatgacagaatcctacaagaggttgcttggctctttccaagcttgctagacacaagacaagtgtatcctgacttatttgtgtgctttctttttgctctttctcctttatcttcctttagagaagttggtaagccctccagcctcagccgctgcttccagccctagctcttctccatctccacagcccgtttcagagcttgacttgtcctcagagccacagcagctcactgccaagggtaacagcagtttgggagaactgcatgctgtcttgc

SEQ ID NO: 383979 - DNA, 358 bp, Homo sapiens
gcatgtcgtgaaggccaggcagtgagggcgatgggatggggctgtaactcgatgggaagtggatgatcagttctcacaggcagagcaggctgcgcagatgagtgcgggaagtgcttccagacaggccgagtctgggggatgggttcctgtagggttttgtagggcatggcagtgactttggcttttgttccaagtgccgcgggaagccatcagagggttttgtgctgaagcgtggtgcggtctgatgttttacggcgtccttggtgagagtggttggacggtgggcaagtgtggctgctgactggccagttaggggccagtgctgcagcacaggtggcttggaaccaggcagtggtgg

SEQ ID NO: 383980 - DNA, 551 bp, Homo sapiens
agcaataatctttcaaaaacaaaaaacaaaacaaaacaaaaaaaggaattacatggacaggtgaaactggaactgaaatgctgtggaaaaggcagctctcaccatactggaaacttgcaccccaagggctcctccagcatctcaagggtgcaggctgatgggacggtgcttgtttcccagctgaacaagcgccctgatgaaggcgtgcggggtgatgggatggccttcgccgttctcacccgatgtctcgttgttcagtcttccctgggttctgcctccgcctcgcccttccagccgcacgtgccttacagccctttccgagggatggcgccctacggcccgctggcggccagctccctgctcagccagcagtatgccgcctccctgggtctaggtgagtgacctgtttctgtctggtaaactacccttgcgtgtaactgtcactgagtggagcgatggagcctgagggtggggatatgcattcctgtcatgctcagcgttgtagactgttttgttgcacacttagtaaattacccagtgcaacttccgct

SEQ ID NO: 383981 - DNA, 2994 bp, Homo sapiens
cccgcccgagcccgctgacccccgtccgccaacagccccggcctgcggtgccctccccgccccggggcgccccggagcctggcgcccagaccccgcccagaacccacccagggcacacccggcccgagatcccctgcccgcgccttcaccccggacgcccccgaggcgcccccttcccgcgcgccaccctcccccagcgtagccggccgcacaatggtctccctgggctcccagggcggcgggattgtgcgcgggcgcccggcggtgtttggtgaggggcgggcccggcccccgcggtgccgccccctcggccgcccagcccacctctgcaggtgccagctccgaggagcagggcggctcccgtcagcgggcctcctccccgccagcctggggggatccctgcgggggagcctcgaggtcgggtggcggggccagtgtcccggcgtctcccgaaggctgggggtggggtcacaacacgcgaatcctgcaagcctttctggaacttattagacagctggggccttgatcctgaacaaataccgcgtcctaatgcggcctcctgccaaggcagaagcatccgttggcagccagatgccccggtttaaacgtgaggtcctttggcactgaagaccgtcccacagataggcctgcgccccccagagaggagatttatgagtacatcattttccgaggaagtgacatcaaggatatcactgtgtgtgaacctccgaaagctcagcacacactcccgcaggatcccgccattgttcagtcttccctgggttctgcctccgcctcgcccttccagccgcacgtgccttacagccctttccgagggatggcgccctacggcccgctggcggccagctccctgctcagccagcagtatgccgcctccctgggtctagagaagttggtaagccctccagcctcagccgctgcttccagccctagctcttctccatctccacagcccgtttcagagcttgacttgtcctcagagccacagcagctcactgccaagggagctggttttccatccatcccagtcggcaagagccccatggtggagcaggctgtgcagactggttctgctgacaacctgaatgctaaaaagctgttacctggcaagggcaccacagggacgcagctcaacggtcgtcaggcccagccgagcagcaagacggccagcgatgtagtccagccggcagctgtgcaagctcaagggcaggtgaatgacgagaacagaagacctcagaggaggcgatcaggaaacaggcgaacaaggaatcgctccagagggcaaaaccgtccaactaacgttaaggaaaacacaatcaaatttgagggtgactttgatttcgagagtgcaaatgcccagttcaaccgagaggagcttgacaaagaatttaagaagaaactgaattttaaagatgacaaggctgagaagggggaagagaaggacctggctgtggtgacccagagtgccgaagcgcccgctgaggaagaccttctggggcccaactgctactatgacaaatccaagtcgttcttcgacaacatctcttctgaactcaagaccagctccaggcggacgacgtgggccgaagagaggaagctcaacacagagacctttggggtgtcagggaggtttcttcgtggccgcagttctcggggcggattccgaggaggcaggggcaatgggaccacccgtcgcaaccccacttcccacagggccgggactggcagggtgtgagggtgcagccaaaggctcctactgaagtggcgcataactgacgctgtgtgtgtcaggacgcgaggaaaacgctgcacttacagggagaggtggtcactttgtttacggagtttggaagagacccatactgctacttgtgttttggacttaactgaacttggacatggtctgagttagaaccacttgttttggggaagtattcatgggtaacctctttgaggtctctttatctgtgtttcctttttagttgcgcatagcctaattctaaggttttggtattttgcaaaaaggtttctatagtgaaagctgaatccttactttgtgacttttttttttttttttaatgacaagctttgacttttaaaagtggaaccaaatctgttggcagaggtggcagccaagtacatctctgtaacccagctggcccctggtgctgttggcctggcaccccactgccaagggtggggtctcaggagtcaggcagggccagcacagggtggcgtggggggcaggggtgggtgggtggagggcacggaaggggttttcccatggatcatgttgtataagtgaaccagaccaccctgatggcatccacagtgatgtcaaggttggggctggccaggggtgggtggactagaagcatttgggagtagtggccaggggccctggacgctagccacggagctgctgcacagagcctggtgtccacaagcttccaggttggggttggagcctgggatgagccccggcagcgccttggcccttctgtggtccctgccagcctctgacctgggccggtcagtcattgctggactctggccacacactggcgttctcatccacttggaaacaagccagtcttttctgcaaggtcagttgaccaagagcatatttcccctctgttgtacatcgttgttttgtgtttgtgttgtaacagtgggtggagggagggtggggtctacatttgttgcatgagtcgatgggtcagaactttagtatacgcatgcgtcctctgagtgacagggcattttgtcgaaaataagcaccttggtaactaaacccctctaatagctataaaggctttagttctgtattgattaagttactgtaaaagcttgggtttatttttgtaggacttaatggctaagaattagaacatagcaagggggctcctctgttggagtaatgtaaattgtaattataaataaacatgcaaacctttaaaattttaaaaaaaa

SEQ ID NO: 383982 - DNA, 2877 bp, Homo sapiens
cccgcccgagcccgctgacccccgtccgccaacagccccggcctgcggtgccctccccgccccggggcgccccggagcctggcgcccagaccccgcccagaacccacccagggcacacccggcccgagatcccctgcccgcgccttcaccccggacgcccccgaggcgcccccttcccgcgcgccaccctcccccagcgtagccggccgcacaatggtctccctgggctcccagggcggcgggattgtgcgcgggcgcccggcggtgtttggtgaggggcgggcccggcccccgcggtgccgccccctcggccgcccagcccacctctgcaggtgccagctccgaggagcagggcggctcccgtcagcgggcctcctccccgccagcctggggggatccctgcgggggagcctcgaggtcgggtggcggggccagtgtcccggcgtctcccgaaggctgggggtggggtcacaacacgcgaatcctgcaagcctttctggaacttattagacagctggggccttgatcctgaacaaataccgcgtcctaatgcggcctcctgccaaggcagaagcatccgttggcagccagatgccccggtttaaacgtgaggtcctttggcactgaagaccgtcccacagataggcctgcgccccccagagaggagatttatgagtacatcattttccgaggaagtgacatcaaggatatcactgtgtgtgaacctccgaaagctcagcacacactcccgcaggatcccgccattgttcagtcttccctgggttctgcctccgcctcgcccttccagccgcacgtgccttacagccctttccgagggatggcgccctacggcccgctggcggccagctccctgctcagccagcagtatgccgcctccctgggtctaggagctggttttccatccatcccagtcggcaagagccccatggtggagcaggctgtgcagactggttctgctgacaacctgaatgctaaaaagctgttacctggcaagggcaccacagggacgcagctcaacggtcgtcaggcccagccgagcagcaagacggccagcgatgtagtccagccggcagctgtgcaagctcaagggcaggtgaatgacgagaacagaagacctcagaggaggcgatcaggaaacaggcgaacaaggaatcgctccagagggcaaaaccgtccaactaacgttaaggaaaacacaatcaaatttgagggtgactttgatttcgagagtgcaaatgcccagttcaaccgagaggagcttgacaaagaatttaagaagaaactgaattttaaagatgacaaggctgagaagggggaagagaaggacctggctgtggtgacccagagtgccgaagcgcccgctgaggaagaccttctggggcccaactgctactatgacaaatccaagtcgttcttcgacaacatctcttctgaactcaagaccagctccaggcggacgacgtgggccgaagagaggaagctcaacacagagacctttggggtgtcagggaggtttcttcgtggccgcagttctcggggcggattccgaggaggcaggggcaatgggaccacccgtcgcaaccccacttcccacagggccgggactggcagggtgtgagggtgcagccaaaggctcctactgaagtggcgcataactgacgctgtgtgtgtcaggacgcgaggaaaacgctgcacttacagggagaggtggtcactttgtttacggagtttggaagagacccatactgctacttgtgttttggacttaactgaacttggacatggtctgagttagaaccacttgttttggggaagtattcatgggtaacctctttgaggtctctttatctgtgtttcctttttagttgcgcatagcctaattctaaggttttggtattttgcaaaaaggtttctatagtgaaagctgaatccttactttgtgacttttttttttttttttaatgacaagctttgacttttaaaagtggaaccaaatctgttggcagaggtggcagccaagtacatctctgtaacccagctggcccctggtgctgttggcctggcaccccactgccaagggtggggtctcaggagtcaggcagggccagcacagggtggcgtggggggcaggggtgggtgggtggagggcacggaaggggttttcccatggatcatgttgtataagtgaaccagaccaccctgatggcatccacagtgatgtcaaggttggggctggccaggggtgggtggactagaagcatttgggagtagtggccaggggccctggacgctagccacggagctgctgcacagagcctggtgtccacaagcttccaggttggggttggagcctgggatgagccccggcagcgccttggcccttctgtggtccctgccagcctctgacctgggccggtcagtcattgctggactctggccacacactggcgttctcatccacttggaaacaagccagtcttttctgcaaggtcagttgaccaagagcatatttcccctctgttgtacatcgttgttttgtgtttgtgttgtaacagtgggtggagggagggtggggtctacatttgttgcatgagtcgatgggtcagaactttagtatacgcatgcgtcctctgagtgacagggcattttgtcgaaaataagcaccttggtaactaaacccctctaatagctataaaggctttagttctgtattgattaagttactgtaaaagcttgggtttatttttgtaggacttaatggctaagaattagaacatagcaagggggctcctctgttggagtaatgtaaattgtaattataaataaacatgcaaacctttaaaattttaaaaaaaa

SEQ ID NO: 383983 - DNA, 2536 bp, Homo sapiens
gtggcgaggaggcgcccaggcggaggcggcggcgggcggaggagcgcaggagcgggcggccaggccaccgcgcggcggcggagcgggccgcggcccggcgctccttccccaccgcggcccgacgcaccccggccgccgccatgagcggctcctcaggcaccccgtatctgggcagcaagatcagcctcatctccaaggcgcagatccgctacgagggcattctctacaccatcgacaccgacaactccaccgtggcgctcgccaaagtgaggtcctttggcactgaagaccgtcccacagataggcctgcgccccccagagaggagatttatgagtacatcattttccgaggaagtgacatcaaggatatcactgtgtgtgaacctccgaaagctcagcacacactcccgcaggatcccgccattgttcagtcttccctgggttctgcctccgcctcgcccttccagccgcacgtgccttacagccctttccgagggatggcgccctacggcccgctggcggccagctccctgctcagccagcagtatgccgcctccctgggtctaggagctggttttccatccatcccagtcggcaagagccccatggtggagcaggctgtgcagactggttctgctgacaacctgaatgctaaaaagctgttacctggcaagggcaccacagggacgcagctcaacggtcgtcaggcccagccgagcagcaagacggccagcgatgtagtccagccggcagctgtgcaagctcaagggcaggtgaatgacgagaacagaagacctcagaggaggcgatcaggaaacaggcgaacaaggaatcgctccagagggcaaaaccgtccaactaacgttaaggaaaacacaatcaaatttgagggtgactttgatttcgagagtgcaaatgcccagttcaaccgagaggagcttgacaaagaatttaagaagaaactgaattttaaagatgacaaggctgagaagggggaagagaaggacctggctgtggtgacccagagtgccgaagcgcccgctgaggaagaccttctggggcccaactgctactatgacaaatccaagtcgttcttcgacaacatctcttctgaactcaagaccagctccaggcggacgacgtgggccgaagagaggaagctcaacacagagacctttggggtgtcagggaggtttcttcgtggccgcagttctcggggcggattccgaggaggcaggggcaatgggaccacccgtcgcaaccccacttcccacagggccgggactggcagggtgtgagggtgcagccaaaggctcctactgaagtggcgcataactgacgctgtgtgtgtcaggacgcgaggaaaacgctgcacttacagggagaggtggtcactttgtttacggagtttggaagagacccatactgctacttgtgttttggacttaactgaacttggacatggtctgagttagaaccacttgttttggggaagtattcatgggtaacctctttgaggtctctttatctgtgtttcctttttagttgcgcatagcctaattctaaggttttggtattttgcaaaaaggtttctatagtgaaagctgaatccttactttgtgacttttttttttttttttaatgacaagctttgacttttaaaagtggaaccaaatctgttggcagaggtggcagccaagtacatctctgtaacccagctggcccctggtgctgttggcctggcaccccactgccaagggtggggtctcaggagtcaggcagggccagcacagggtggcgtggggggcaggggtgggtgggtggagggcacggaaggggttttcccatggatcatgttgtataagtgaaccagaccaccctgatggcatccacagtgatgtcaaggttggggctggccaggggtgggtggactagaagcatttgggagtagtggccaggggccctggacgctagccacggagctgctgcacagagcctggtgtccacaagcttccaggttggggttggagcctgggatgagccccggcagcgccttggcccttctgtggtccctgccagcctctgacctgggccggtcagtcattgctggactctggccacacactggcgttctcatccacttggaaacaagccagtcttttctgcaaggtcagttgaccaagagcatatttcccctctgttgtacatcgttgttttgtgtttgtgttgtaacagtgggtggagggagggtggggtctacatttgttgcatgagtcgatgggtcagaactttagtatacgcatgcgtcctctgagtgacagggcattttgtcgaaaataagcaccttggtaactaaacccctctaatagctataaaggctttagttctgtattgattaagttactgtaaaagcttgggtttatttttgtaggacttaatggctaagaattagaacatagcaagggggctcctctgttggagtaatgtaaattgtaattataaataaacatgcaaacctttaaaattttaaaaaaaa

SEQ ID NO: 383984 - DNA, 2363 bp, Homo sapiens
agcaataatctttcaaaaacaaaaaacaaaacaaaacaaaaaaaggaattacatggacaggtgaaactggaactgaaatgctgtggaaaaggcagctctcaccatactggaaacttgcaccccaagggctcctccagcatctcaagggtgcaggctgatgggacggtgcttgtttcccagctgaacaagcgccctgatgaaggcgtgcggggtgatgggatggccttcgccgttctcacccgatgtctcgttgttcagtcttccctgggttctgcctccgcctcgcccttccagccgcacgtgccttacagccctttccgagggatggcgccctacggcccgctggcggccagctccctgctcagccagcagtatgccgcctccctgggtctaggagctggttttccatccatcccagtcggcaagagccccatggtggagcaggctgtgcagactggttctgctgacaacctgaatgctaaaaagctgttacctggcaagggcaccacagggacgcagctcaacggtcgtcaggcccagccgagcagcaagacggccagcgatgtagtccagccggcagctgtgcaagctcaagggcaggtgaatgacgagaacagaagacctcagaggaggcgatcaggaaacaggcgaacaaggaatcgctccagagggcaaaaccgtccaactaacgttaaggaaaacacaatcaaatttgagggtgactttgatttcgagagtgcaaatgcccagttcaaccgagaggagcttgacaaagaatttaagaagaaactgaattttaaagatgacaaggctgagaagggggaagagaaggacctggctgtggtgacccagagtgccgaagcgcccgctgaggaagaccttctggggcccaactgctactatgacaaatccaagtcgttcttcgacaacatctcttctgaactcaagaccagctccaggcggacgacgtgggccgaagagaggaagctcaacacagagacctttggggtgtcagggaggtttcttcgtggccgcagttctcggggcggattccgaggaggcaggggcaatgggaccacccgtcgcaaccccacttcccacagggccgggactggcagggtgtgagggtgcagccaaaggctcctactgaagtggcgcataactgacgctgtgtgtgtcaggacgcgaggaaaacgctgcacttacagggagaggtggtcactttgtttacggagtttggaagagacccatactgctacttgtgttttggacttaactgaacttggacatggtctgagttagaaccacttgttttggggaagtattcatgggtaacctctttgaggtctctttatctgtgtttcctttttagttgcgcatagcctaattctaaggttttggtattttgcaaaaaggtttctatagtgaaagctgaatccttactttgtgacttttttttttttttttaatgacaagctttgacttttaaaagtggaaccaaatctgttggcagaggtggcagccaagtacatctctgtaacccagctggcccctggtgctgttggcctggcaccccactgccaagggtggggtctcaggagtcaggcagggccagcacagggtggcgtggggggcaggggtgggtgggtggagggcacggaaggggttttcccatggatcatgttgtataagtgaaccagaccaccctgatggcatccacagtgatgtcaaggttggggctggccaggggtgggtggactagaagcatttgggagtagtggccaggggccctggacgctagccacggagctgctgcacagagcctggtgtccacaagcttccaggttggggttggagcctgggatgagccccggcagcgccttggcccttctgtggtccctgccagcctctgacctgggccggtcagtcattgctggactctggccacacactggcgttctcatccacttggaaacaagccagtcttttctgcaaggtcagttgaccaagagcatatttcccctctgttgtacatcgttgttttgtgtttgtgttgtaacagtgggtggagggagggtggggtctacatttgttgcatgagtcgatgggtcagaactttagtatacgcatgcgtcctctgagtgacagggcattttgtcgaaaataagcaccttggtaactaaacccctctaatagctataaaggctttagttctgtattgattaagttactgtaaaagcttgggtttatttttgtaggacttaatggctaagaattagaacatagcaagggggctcctctgttggagtaatgtaaattgtaattataaataaacatgcaaacctttaaaattttaaaaaaaa

SEQ ID NO: 383985 - DNA, 2408 bp, Homo sapiens
ggggagaaggcggccgagccccagctctccgagcaccgggtcggaagccgcgacccgagccgcgcaggaagctgggaccggaacctcggcggacccggccccacccaactcacctgcgcaggtcaccagcaccctcggaacccagaggcccgcgctctgaaggtgacccccctggggaggaaggcgatggcccctgcgaggacgatggcccgcgcccgcctcgccccggccggcatccctgccgtcgccttgtggcttctgtgcacgctcggcctccagggcacccaggccgggccaccgcccgcgccccctgggctgcccgcgggagccgactgcctgaacagctttaccgccggggtgcctggcttcgtgctggacaccaacgcctcggtcagcaacggagctaccttcctggagtcccccaccgtgcgccggggctgggactgcgtgcgcgcctgctgcaccacccagaactgcaacttggcgctagtggagctgcagcccgaccgcggggaggacgccatcgccgcctgcttcctcatcaactgcctctacgagcagaacttcgtgtgcaagttcgcgcccagggagggcttcatcaactacctcacgagggaagtgtaccgctcctaccgccagctgcggacccagggctttggagggtctgggatccccaaggcctgggcaggcatagacttgaaggtacaaccccaggaacccctggtgctgaaggatgtggaaaacacagattggcgcctactgcggggtgacacggatgtcagggtagagaggaaagacccaaaccaggtggaactgtggggactcaaggaaggcacctacctgttccagctgacagtgactagctcagaccacccagaggacacggccaacgtcacagtcactgtgctgtccaccaagcagacagaagactactgcctcgcatccaacaaggtgggtcgctgccggggctctttcccacgctggtactatgaccccacggagcagatctgcaagagtttcgtttatggaggctgcttgggcaacaagaacaactaccttcgggaagaagagtgcattctagcctgtcggggtgtgcaaggcccctccatggaaaggcgccatccagtgtgctctggcacctgtcagcccacccagttccgctgcagcaatggctgctgcatcgacagtttcctggagtgtgacgacacccccaactgccccgacgcctccgacgaggctgcctgtgaaaaatacacgagtggctttgacgagctccagcgcatccatttccccagtgacaaagggcactgcgtggacctgccagacacaggactctgcaaggagagcatcccgcgctggtactacaaccccttcagcgaacactgcgcccgctttacctatggtggttgttatggcaacaagaacaactttgaggaagagcagcagtgcctcgagtcttgtcgcggcatctccaagaaggatgtgtttggcctgaggcgggaaatccccattcccagcacaggctctgtggagatggctgtcgcagtgttcctggtcatctgcattgtggtggtggtagccatcttgggttactgcttcttcaagaaccagagaaaggacttccacggacaccaccaccacccaccacccacccctgccagctccactgtctccactaccgaggacacggagcacctggtctataaccacaccacccggcccctctgagcctgggtctcaccggctctcacctggccctgcttcctgcttgccaaggcagaggcctgggctgggaaaaactttggaaccagactcttgcctgtttcccaggcccactgtgcctcagagaccagggctccagcccctcttggagaagtctcagctaagctcacgtcctgagaaagctcaaaggtttggaaggagcagaaaacccttgggccagaagtaccagactagatggacctgcctgcataggagtttggaggaagttggagttttgtttcctctgttcaaagctgcctgtccctaccccatggtgctaggaagaggagtggggtggtgtcagaccctggaggccccaaccctgtcctcccgagctcctcttccatgctgtgcgcccagggctgggaggaaggacttccctgtgtagtttgtgctgtaaagagttgctttttgtttatttaatgctgtggcatgggtgaagaggaggggaagaggcctgtttggcctctctgtcctctcttcctcttcccccaagattgagctctctgcccttgatcagccccaccctggcctagaccagcagacagagccaggagaggctcagctgcattccgcagcccccacccccaaggttctccaacatcacagcccagcccacccactgggtaataaaagtggtttgtgga

SEQ ID NO: 383986 - DNA, 295 bp, Homo sapiens
aggatcctgaaacatctaacttgaataccccccacgttgtaagacaagccaaaatcaggggccgtccctagaccttgcgcatgtaccacatcaaggtttctaccagcggtatgcctctctgtcctctcttcctcttcccccaagattgagctctctgcccttgatcagccccaccctggcctagaccagcagacagagccaggagaggctcagctgcattccgcagcccccacccccaaggttctccaacatcacagcccagcccacccactgggtaataaaagtggtttgtgga

SEQ ID NO: 383987 - DNA, 2353 bp, Homo sapiens
cgaggcgcaggcggagcgggctggagcatgtccggccctttgttctgcgctcgtgcgtgtgtccgggtcaccagcaccctcggaacccagaggcccgcgctctgaaggtgacccccctggggaggaaggcgatggcccctgcgaggacgatggcccgcgcccgcctcgccccggccggcatccctgccgtcgccttgtggcttctgtgcacgctcggcctccagggcacccaggccgggccaccgcccgcgccccctgggctgcccgcgggagccgactgcctgaacagctttaccgccggggtgcctggcttcgtgctggacaccaacgcctcggtcagcaacggagctaccttcctggagtcccccaccgtgcgccggggctgggactgcgtgcgcgcctgctgcaccacccagaactgcaacttggcgctagtggagctgcagcccgaccgcggggaggacgccatcgccgcctgcttcctcatcaactgcctctacgagcagaacttcgtgtgcaagttcgcgcccagggagggcttcatcaactacctcacgagggaagtgtaccgctcctaccgccagctgcggacccagggctttggagggtctgggatccccaaggcctgggcaggcatagacttgaaggtacaaccccaggaacccctggtgctgaaggatgtggaaaacacagattggcgcctactgcggggtgacacggatgtcagggtagagaggaaagacccaaaccaggtggaactgtggggactcaaggaaggcacctacctgttccagctgacagtgactagctcagaccacccagaggacacggccaacgtcacagtcactgtgctgtccaccaagcagacagaagactactgcctcgcatccaacaaggtgggtcgctgccggggctctttcccacgctggtactatgaccccacggagcagatctgcaagagtttcgtttatggaggctgcttgggcaacaagaacaactaccttcgggaagaagagtgcattctagcctgtcggggtgtgcaaggcccctccatggaaaggcgccatccagtgtgctctggcacctgtcagcccacccagttccgctgcagcaatggctgctgcatcgacagtttcctggagtgtgacgacacccccaactgccccgacgcctccgacgaggctgcctgtgaaaaatacacgagtggctttgacgagctccagcgcatccatttccccagtgacaaagggcactgcgtggacctgccagacacaggactctgcaaggagagcatcccgcgctggtactacaaccccttcagcgaacactgcgcccgctttacctatggtggttgttatggcaacaagaacaactttgaggaagagcagcagtgcctcgagtcttgtcgcggcatctccaagaaggatgtgtttggcctgaggcgggaaatccccattcccagcacaggctctgtggagatggctgtcgcagtgttcctggtcatctgcattgtggtggtggtagccatcttgggttactgcttcttcaagaaccagagaaaggacttccacggacaccaccaccacccaccacccacccctgccagctccactgtctccactaccgaggacacggagcacctggtctataaccacaccacccggcccctctgagcctgggtctcaccggctctcacctggccctgcttcctgcttgccaaggcagaggcctgggctgggaaaaactttggaaccagactcttgcctgtttcccaggcccactgtgcctcagagaccagggctccagcccctcttggagaagtctcagctaagctcacgtcctgagaaagctcaaaggtttggaaggagcagaaaacccttgggccagaagtaccagactagatggacctgcctgcataggagtttggaggaagttggagttttgtttcctctgttcaaagctgcctgtccctaccccatggtgctaggaagaggagtggggtggtgtcagaccctggaggccccaaccctgtcctcccgagctcctcttccatgctgtgcgcccagggctgggaggaaggacttccctgtgtagtttgtgctgtaaagagttgctttttgtttatttaatgctgtggcatgggtgaagaggaggggaagaggcctgtttggcctctctgtcctctcttcctcttcccccaagattgagctctctgcccttgatcagccccaccctggcctagaccagcagacagagccaggagaggctcagctgcattccgcagcccccacccccaaggttctccaacatcacagcccagcccacccactgggtaataaaagtggtttgtgga

SEQ ID NO: 383988 - DNA, 2572 bp, Homo sapiens
ggggagaaggcggccgagccccagctctccgagcaccgggtcggaagccgcgacccgagccgcgcaggaagctgggaccggaacctcggcggacccggccccacccaactcacctgcgcaggtcaccagcaccctcggaacccagaggcccgcgctctgaaggtgacccccctggggaggaaggcgatggcccctgcgaggacgatggcccgcgcccgcctcgccccggccggcatccctgccgtcgccttgtggcttctgtgcacgctcggcctccagggcacccaggccgggccaccgcccgcgccccctgggctgcccgcgggagccgactgcctgaacagctttaccgccggggtgcctggcttcgtgctggacaccaacgcctcggtcagcaacggagctaccttcctggagtcccccaccgtgcgccggggctgggactgcgtgcgcgcctgctgcaccacccagaactgcaacttggcgctagtggagctgcagcccgaccgcggggaggacgccatcgccgcctgcttcctcatcaactgcctctacgagcagaacttcgtgtgcaagttcgcgcccagggagggcttcatcaactacctcacgagggaagtgtaccgctcctaccgccagctgcggacccagggctttggagggtctgggatccccaaggcctgggcaggcatagacttgaaggtacaaccccaggaacccctggtgctgaaggatgtggaaaacacagattggcgcctactgcggggtgacacggatgtcagggtagagaggaaagacccaaaccaggtggaactgtggggactcaaggaaggcacctacctgttccagctgacagtgactagctcagaccacccagaggacacggccaacgtcacagtcactgtgctgtccaccaagcagacagaagactactgcctcgcatccaacaaggtgggtcgctgccggggctctttcccacgctggtactatgaccccacggagcagatctgcaagagtttcgtttatggaggctgcttgggcaacaagaacaactaccttcgggaagaagagtgcattctagcctgtcggggtgtgcaaggtgggcctttgagaggcagctctggggctcaggcgactttcccccagggcccctccatggaaaggcgccatccagtgtgctctggcacctgtcagcccacccagttccgctgcagcaatggctgctgcatcgacagtttcctggagtgtgacgacacccccaactgccccgacgcctccgacgaggctgcctgtgaaaaatgtgaggcctgggggatagagggggttgggcagcagacagggaggtcctgacagccttgccctgaacccctgggagacccttgttgggtctgagactctgacctttcctctctgcagacacgagtggctttgacgagctccagcgcatccatttccccagtgacaaagggcactgcgtggacctgccagacacaggactctgcaaggagagcatcccgcgctggtactacaaccccttcagcgaacactgcgcccgctttacctatggtggttgttatggcaacaagaacaactttgaggaagagcagcagtgcctcgagtcttgtcgcggcatctccaagaaggatgtgtttggcctgaggcgggaaatccccattcccagcacaggctctgtggagatggctgtcgcagtgttcctggtcatctgcattgtggtggtggtagccatcttgggttactgcttcttcaagaaccagagaaaggacttccacggacaccaccaccacccaccacccacccctgccagctccactgtctccactaccgaggacacggagcacctggtctataaccacaccacccggcccctctgagcctgggtctcaccggctctcacctggccctgcttcctgcttgccaaggcagaggcctgggctgggaaaaactttggaaccagactcttgcctgtttcccaggcccactgtgcctcagagaccagggctccagcccctcttggagaagtctcagctaagctcacgtcctgagaaagctcaaaggtttggaaggagcagaaaacccttgggccagaagtaccagactagatggacctgcctgcataggagtttggaggaagttggagttttgtttcctctgttcaaagctgcctgtccctaccccatggtgctaggaagaggagtggggtggtgtcagaccctggaggccccaaccctgtcctcccgagctcctcttccatgctgtgcgcccagggctgggaggaaggacttccctgtgtagtttgtgctgtaaagagttgctttttgtttatttaatgctgtggcatgggtgaagaggaggggaagaggcctgtttggcctctctgtcctctcttcctcttcccccaagattgagctctctgcccttgatcagccccaccctggcctagaccagcagacagagccaggagaggctcagctgcattccgcagcccccacccccaaggttctccaacatcacagcccagcccacccactgggtaataaaagtggtttgtgga

SEQ ID NO: 383989 - DNA, 2330 bp, Homo sapiens
ggggagaaggcggccgagccccagctctccgagcaccgggtcggaagccgcgacccgagccgcgcaggaagctgggaccggaacctcggcggacccggccccacccaactcacctgcgcaggtcaccagcaccctcggaacccagaggcccgcgctctgaaggtgacccccctggggaggaaggcgatggcccctgcgaggacgatggcccgcgcccgcctcgccccggccggcatccctgccgtcgccttgtggcttctgtgcacgctcggcctccagggcacccaggccgggccaccgcccgcgccccctgggctgcccgcgggagccgactgcctgaacagctttaccgccggggtgcctggcttcgtgctggacaccaacgcctcggtcagcaacggagctaccttcctggagtcccccaccgtgcgccggggctgggactgcgtgcgcgcctgctgcaccacccagaactgcaacttggcgctagtggagctgcagcccgaccgcggggaggacgccatcgccgcctgcttcctcatcaactgcctctacgagcagaacttcgtgtgcaagttcgcgcccagggagggcttcatcaactacctcacgagggaagtgtaccgctcctaccgccagctgcggacccagggctttggagggtctgggatccccaaggcctgggcaggcatagacttgaaggtacaaccccaggaacccctggtgctgaaggatgtggaaaacacagattggcgcctactgcggggtgacacggatgtcagggtagagaggaaagacccaaaccaggtggaactgtggggactcaaggaaggcacctacctgttccagctgacagtgactagctcagaccacccagaggacacggccaacgtcacagtcactgtgctgtccaccaagcagacagaagactactgcctcgcatccaacaaggtgggtcgctgccggggctctttcccacgctggtactatgaccccacggagcagatctgcaagagtttcgtttatggaggctgcttgggcaacaagaacaactaccttcgggaagaagagtgcattctagcctgtcggggtgtgcaaggtgggcctttgagaggcagctctggggctcaggcgactttcccccagggcccctccatggaaaggcgccatccagacacgagtggctttgacgagctccagcgcatccatttccccagtgacaaagggcactgcgtggacctgccagacacaggactctgcaaggagagcatcccgcgctggtactacaaccccttcagcgaacactgcgcccgctttacctatggtggttgttatggcaacaagaacaactttgaggaagagcagcagtgcctcgagtcttgtcgcggcatctccaagaaggatgtgtttggcctgaggcgggaaatccccattcccagcacaggctctgtggagatggctgtcgcagtgttcctggtcatctgcattgtggtggtggtagccatcttgggttactgcttcttcaagaaccagagaaaggacttccacggacaccaccaccacccaccacccacccctgccagctccactgtctccactaccgaggacacggagcacctggtctataaccacaccacccggcccctctgagcctgggtctcaccggctctcacctggccctgcttcctgcttgccaaggcagaggcctgggctgggaaaaactttggaaccagactcttgcctgtttcccaggcccactgtgcctcagagaccagggctccagcccctcttggagaagtctcagctaagctcacgtcctgagaaagctcaaaggtttggaaggagcagaaaacccttgggccagaagtaccagactagatggacctgcctgcataggagtttggaggaagttggagttttgtttcctctgttcaaagctgcctgtccctaccccatggtgctaggaagaggagtggggtggtgtcagaccctggaggccccaaccctgtcctcccgagctcctcttccatgctgtgcgcccagggctgggaggaaggacttccctgtgtagtttgtgctgtaaagagttgctttttgtttatttaatgctgtggcatgggtgaagaggaggggaagaggcctgtttggcctctctgtcctctcttcctcttcccccaagattgagctctctgcccttgatcagccccaccctggcctagaccagcagacagagccaggagaggctcagctgcattccgcagcccccacccccaaggttctccaacatcacagcccagcccacccactgggtaataaaagtggtttgtgga

SEQ ID NO: 383990 - DNA, 2282 bp, Homo sapiens
ggggagaaggcggccgagccccagctctccgagcaccgggtcggaagccgcgacccgagccgcgcaggaagctgggaccggaacctcggcggacccggccccacccaactcacctgcgcaggtcaccagcaccctcggaacccagaggcccgcgctctgaaggtgacccccctggggaggaaggcgatggcccctgcgaggacgatggcccgcgcccgcctcgccccggccggcatccctgccgtcgccttgtggcttctgtgcacgctcggcctccagggcacccaggccgggccaccgcccgcgccccctgggctgcccgcgggagccgactgcctgaacagctttaccgccggggtgcctggcttcgtgctggacaccaacgcctcggtcagcaacggagctaccttcctggagtcccccaccgtgcgccggggctgggactgcgtgcgcgcctgctgcaccacccagaactgcaacttggcgctagtggagctgcagcccgaccgcggggaggacgccatcgccgcctgcttcctcatcaactgcctctacgagcagaacttcgtgtgcaagttcgcgcccagggagggcttcatcaactacctcacgagggaagtgtaccgctcctaccgccagctgcggacccagggctttggagggtctgggatccccaaggcctgggcaggcatagacttgaaggtacaaccccaggaacccctggtgctgaaggatgtggaaaacacagattggcgcctactgcggggtgacacggatgtcagggtagagaggaaagacccaaaccaggtggaactgtggggactcaaggaaggcacctacctgttccagctgacagtgactagctcagaccacccagaggacacggccaacgtcacagtcactgtgctgtccaccaagcagacagaagactactgcctcgcatccaacaaggtgggtcgctgccggggctctttcccacgctggtactatgaccccacggagcagatctgcaagagtttcgtttatggaggctgcttgggcaacaagaacaactaccttcgggaagaagagtgcattctagcctgtcggggtgtgcaaggcccctccatggaaaggcgccatccagacacgagtggctttgacgagctccagcgcatccatttccccagtgacaaagggcactgcgtggacctgccagacacaggactctgcaaggagagcatcccgcgctggtactacaaccccttcagcgaacactgcgcccgctttacctatggtggttgttatggcaacaagaacaactttgaggaagagcagcagtgcctcgagtcttgtcgcggcatctccaagaaggatgtgtttggcctgaggcgggaaatccccattcccagcacaggctctgtggagatggctgtcgcagtgttcctggtcatctgcattgtggtggtggtagccatcttgggttactgcttcttcaagaaccagagaaaggacttccacggacaccaccaccacccaccacccacccctgccagctccactgtctccactaccgaggacacggagcacctggtctataaccacaccacccggcccctctgagcctgggtctcaccggctctcacctggccctgcttcctgcttgccaaggcagaggcctgggctgggaaaaactttggaaccagactcttgcctgtttcccaggcccactgtgcctcagagaccagggctccagcccctcttggagaagtctcagctaagctcacgtcctgagaaagctcaaaggtttggaaggagcagaaaacccttgggccagaagtaccagactagatggacctgcctgcataggagtttggaggaagttggagttttgtttcctctgttcaaagctgcctgtccctaccccatggtgctaggaagaggagtggggtggtgtcagaccctggaggccccaaccctgtcctcccgagctcctcttccatgctgtgcgcccagggctgggaggaaggacttccctgtgtagtttgtgctgtaaagagttgctttttgtttatttaatgctgtggcatgggtgaagaggaggggaagaggcctgtttggcctctctgtcctctcttcctcttcccccaagattgagctctctgcccttgatcagccccaccctggcctagaccagcagacagagccaggagaggctcagctgcattccgcagcccccacccccaaggttctccaacatcacagcccagcccacccactgggtaataaaagtggtttgtgga

SEQ ID NO: 383991 - DNA, 1640 bp, Homo sapiens
gcctcgtgccgcctcgtgccgaggaaagacccaaaccaggtggaactgtggggactcaaggaaggcacctacctgttccagctgacagtgactagctcagaccacccagaggacacggccaacgtcacagtcactgtgctgtccaccaagcagacagaagactactgcctcgcatccaacaaggtgggtcgctgccggggctctttcccacgctggtactatgaccccacggagcagatctgcaagagtttcgtttatggaggctgcttgggcaacaagaacaactaccttcgggaagaagagtgcattctagcctgtcggggtgtgcaaggcccctccatggaaaggcgccatccagtgtgctctggcacctgtcagcccacccagttccgctgcagcaatggctgctgcatcgacagtttcctggagtgtgacgacacccccaactgccccgacgcctccgacgaggctgcctgtgaaaaatacacgagtggctttgacgagctccagcgcatccatttccccagtgacaaagggcactgcgtggacctgccagacacaggactctgcaaggagagcatcccgcgctggtactacaaccccttcagcgaacactgcgcccgctttacctatggtggttgttatggcaacaagaacaactttgaggaagagcagcagtgcctcgagtcttgtcgcggcatctccaagaaggatgtgtttggcctgaggcgggaaatccccattcccagcacaggctctgtggagatggctgtcgcagtgttcctggtcatctgcattgtggtggtggtagccatcttgggttactgcttcttcaagaaccagagaaaggacttccacggacaccaccaccacccaccacccacccctgccagctccactgtctccactaccgaggacacggagcacctggtctataaccacaccacccggcccctctgagcctgggtctcaccggctctcacctggccctgcttcctgcttgccaaggcagaggcctgggctgggaaaaactttggaaccagactcttgcctgtttcccaggcccactgtgcctcagagaccagggctccagcccctcttggagaagtctcagctaagctcacgtcctgagaaagctcaaaggtttggaaggagcagaaaacccttgggccagaagtaccagactagatggacctgcctgcataggagtttggaggaagttggagttttgtttcctctgttcaaagctgcctgtccctaccccatggtgctaggaagaggagtggggtggtgtcagaccctggaggccccaaccctgtcctcccgagctcctcttccatgctgtgcgcccagggctgggaggaaggacttccctgtgtagtttgtgctgtaaagagttgctttttgtttatttaatgctgtggcatgggtgaagaggaggggaagaggcctgtttggcctctctgtcctctcttcctcttcccccaagattgagctctctgcccttgatcagccccaccctggcctagaccagcagacagagccaggagaggctcagctgcattccgcagcccccacccccaaggttctccaacatcacagcccagcccacccactgggtaataaaagtggtttgtgga

SEQ ID NO: 383992 - DNA, 1715 bp, Homo sapiens
gacgctctctctgtggggtgacgctctctgtggggtgacgctctctctgtggggcgacgctctctctgttggggtgacacggatgtcagggtagagaggaaagacccaaaccaggtggaactgtggggactcaaggaaggcacctacctgttccagctgacagtgactagctcagaccacccagaggacacggccaacgtcacagtcactgtgctgtccaccaagcagacagaagactactgcctcgcatccaacaaggtgggtcgctgccggggctctttcccacgctggtactatgaccccacggagcagatctgcaagagtttcgtttatggaggctgcttgggcaacaagaacaactaccttcgggaagaagagtgcattctagcctgtcggggtgtgcaaggcccctccatggaaaggcgccatccagtgtgctctggcacctgtcagcccacccagttccgctgcagcaatggctgctgcatcgacagtttcctggagtgtgacgacacccccaactgccccgacgcctccgacgaggctgcctgtgaaaaatacacgagtggctttgacgagctccagcgcatccatttccccagtgacaaagggcactgcgtggacctgccagacacaggactctgcaaggagagcatcccgcgctggtactacaaccccttcagcgaacactgcgcccgctttacctatggtggttgttatggcaacaagaacaactttgaggaagagcagcagtgcctcgagtcttgtcgcggcatctccaagaaggatgtgtttggcctgaggcgggaaatccccattcccagcacaggctctgtggagatggctgtcgcagtgttcctggtcatctgcattgtggtggtggtagccatcttgggttactgcttcttcaagaaccagagaaaggacttccacggacaccaccaccacccaccacccacccctgccagctccactgtctccactaccgaggacacggagcacctggtctataaccacaccacccggcccctctgagcctgggtctcaccggctctcacctggccctgcttcctgcttgccaaggcagaggcctgggctgggaaaaactttggaaccagactcttgcctgtttcccaggcccactgtgcctcagagaccagggctccagcccctcttggagaagtctcagctaagctcacgtcctgagaaagctcaaaggtttggaaggagcagaaaacccttgggccagaagtaccagactagatggacctgcctgcataggagtttggaggaagttggagttttgtttcctctgttcaaagctgcctgtccctaccccatggtgctaggaagaggagtggggtggtgtcagaccctggaggccccaaccctgtcctcccgagctcctcttccatgctgtgcgcccagggctgggaggaaggacttccctgtgtagtttgtgctgtaaagagttgctttttgtttatttaatgctgtggcatgggtgaagaggaggggaagaggcctgtttggcctctctgtcctctcttcctcttcccccaagattgagctctctgcccttgatcagccccaccctggcctagaccagcagacagagccaggagaggctcagctgcattccgcagcccccacccccaaggttctccaacatcacagcccagcccacccactgggtaataaaagtggtttgtgga

SEQ ID NO: 383993 - DNA, 1307 bp, Homo sapiens
ttgttgatggtggatatacaggcattggttaccttggtgtccttgttaatggtgatcctcggccctccgcagccggcgtcacttacttctcgccctcgaagagcaagaacgactcgaaggctggaggggcgttcatgctcccgccgccgttgcgtccagaccccaagtgtccgccaccgccgccaccccgtcgggtggagccggcactgcgtggacctgccagacacaggactctgcaaggagagcatcccgcgctggtactacaaccccttcagcgaacactgcgcccgctttacctatggtggttgttatggcaacaagaacaactttgaggaagagcagcagtgcctcgagtcttgtcgcggcatctccaagaaggatgtgtttggcctgaggcgggaaatccccattcccagcacaggctctgtggagatggctgtcgcagtgttcctggtcatctgcattgtggtggtggtagccatcttgggttactgcttcttcaagaaccagagaaaggacttccacggacaccaccaccacccaccacccacccctgccagctccactgtctccactaccgaggacacggagcacctggtctataaccacaccacccggcccctctgagcctgggtctcaccggctctcacctggccctgcttcctgcttgccaaggcagaggcctgggctgggaaaaactttggaaccagactcttgcctgtttcccaggcccactgtgcctcagagaccagggctccagcccctcttggagaagtctcagctaagctcacgtcctgagaaagctcaaaggtttggaaggagcagaaaacccttgggccagaagtaccagactagatggacctgcctgcataggagtttggaggaagttggagttttgtttcctctgttcaaagctgcctgtccctaccccatggtgctaggaagaggagtggggtggtgtcagaccctggaggccccaaccctgtcctcccgagctcctcttccatgctgtgcgcccagggctgggaggaaggacttccctgtgtagtttgtgctgtaaagagttgctttttgtttatttaatgctgtggcatgggtgaagaggaggggaagaggcctgtttggcctctctgtcctctcttcctcttcccccaagattgagctctctgcccttgatcagccccaccctggcctagaccagcagacagagccaggagaggctcagctgcattccgcagcccccacccccaaggttctccaacatcacagcccagcccacccactgggtaataaaagtggtttgtgga

SEQ ID NO: 383994 - DNA, 1061 bp, Homo sapiens
  misc_feature (1025)..(1025): n is a, c, g, or t
ggggagaaggcggccgagccccagctctccgagcaccgggtcggaagccgcgacccgagccgcgcaggaagctgggaccggaacctcggcggacccggccccacccaactcacctgcgcaggtcaccagcaccctcggaacccagaggcccgcgctctgaaggtgacccccctggggaggaaggcgatggcccctgcgaggacgatggcccgcgcccgcctcgccccggccggcatccctgccgtcgccttgtggcttctgtgcacgctcggcctccagggcacccaggccgggccaccgcccgcgccccctgggctgcccgcgggagccgactgcctgaacagctttaccgccggggtgcctggcttcgtgctggacaccaacgcctcggtcagcaacggagctaccttcctggagtcccccaccgtgcgccggggctgggactgcgtgcgcgcctgctgcaccacccagaactgcaacttggcgctagtggagctgcagcccgaccgcggggaggacgccatcgccgcctgcttcctcatcaactgcctctacgagcagaacttcgtgtgcaagttcgcgcccagggagggcttcatcaactacctcacgagggaagtgtaccgctcctaccgccagctgcggacccagggctttggagggtctgggatccccaaggcctgggcaggcatagacttgaaggtacaaccccaggaacccctggtgctgaaggatgtggaaaacacagattggcgcctactgcggggtgacacggatgtcagggtagagaggaaagacccaaaccaggtggaactgtggggactcaaggaaggcacctacctgttccagctgacagtgactagctcagaccacccagaggacacggccaacgtcacagtcactgtgctgtccaccaagcagacagaagactactgcctcgcatccaacaaggtgggtcgctgccggggctctttcccacgctggtactatgaccccacgagagcgtcccccacagagagagcgcnccccacagagagagcgtcaccccacagagagagcgt

SEQ ID NO: 383995 - DNA, 1144 bp, Homo sapiens
  misc_feature (1108)..(1108): n is a, c, g, or t
ggggagaaggcggccgagccccagctctccgagcaccgggtcggaagccgcgacccgagccgcgcaggaagctgggaccggaacctcggcggacccggccccacccaactcacctgcgcaggtcaccagcaccctcggaacccagaggcccgcgctctgaaggtgacccccctggggaggaaggcgatggcccctgcgaggacgatggcccgcgcccgcctcgccccggccggcatccctgccgtcgccttgtggcttctgtgcacgctcggcctccagggcacccaggccgggccaccgcccgcgccccctgggctgcccgcgggagccgactgcctgaacagctttaccgccggggtgcctggcttcgtgctggacaccaacgcctcggtcagcaacggagctaccttcctggagtcccccaccgtgcgccggggctgggactgcgtgcgcgcctgctgcaccacccagaactgcaacttggcgctagtggagctgcagcccgaccgcggggaggacgccatcgccgcctgcttcctcatcaactgcctctacgagcagaacttcgtgtgcaagttcgcgcccagggagggcttcatcaactacctcacgagggaagtgtaccgctcctaccgccagctgcggacccagggctttggagggtctgggatccccaaggcctgggcaggcatagacttgaaggtacaaccccaggaacccctggtgctgaaggatgtggaaaacacagattggcgcctactgcggggtgacacggatgtcagggtagagaggaaagacccaaaccaggtggaactgtggggactcaaggaaggcacctacctgttccagctgacagtgactagctcagaccacccagaggacacggccaacgtcacagtcactgtgctgtccaccaagcagacagaaggtgagggaggggtgaggagcagcacctggagcccccgctgtgcggattggccgcacggtcccctcataagctctcccccctagactactgcctcgcatccaacaaggtgggtcgctgccggggctctttcccacgctggtactatgaccccacgagagcgtcccccacagagagagcgcnccccacagagagagcgtcaccccacagagagagcgt

SEQ ID NO: 383996 - DNA, 142 bp, Homo sapiens
ctcccttccacccgtctgtgctctggcacctgtcagcccacccagttccgctgcagcaatggctgctgcatcgacagtttcctggagtgtgacgacacccccaactgccccgacgcctccgacgaggctgcctgtgaaaaat

SEQ ID NO: 383997 - DNA, 2333 bp, Homo sapiens
gctgatcaggtgtgtctcctcctctgtcccctcccttcttctcagggtcaccagcaccctcggaacccagaggcccgcgctctgaaggtgacccccctggggaggaaggcgatggcccctgcgaggacgatggcccgcgcccgcctcgccccggccggcatccctgccgtcgccttgtggcttctgtgcacgctcggcctccagggcacccaggccgggccaccgcccgcgccccctgggctgcccgcgggagccgactgcctgaacagctttaccgccggggtgcctggcttcgtgctggacaccaacgcctcggtcagcaacggagctaccttcctggagtcccccaccgtgcgccggggctgggactgcgtgcgcgcctgctgcaccacccagaactgcaacttggcgctagtggagctgcagcccgaccgcggggaggacgccatcgccgcctgcttcctcatcaactgcctctacgagcagaacttcgtgtgcaagttcgcgcccagggagggcttcatcaactacctcacgagggaagtgtaccgctcctaccgccagctgcggacccagggctttggagggtctgggatccccaaggcctgggcaggcatagacttgaaggtacaaccccaggaacccctggtgctgaaggatgtggaaaacacagattggcgcctactgcggggtgacacggatgtcagggtagagaggaaagacccaaaccaggtggaactgtggggactcaaggaaggcacctacctgttccagctgacagtgactagctcagaccacccagaggacacggccaacgtcacagtcactgtgctgtccaccaagcagacagaagactactgcctcgcatccaacaaggtgggtcgctgccggggctctttcccacgctggtactatgaccccacggagcagatctgcaagagtttcgtttatggaggctgcttgggcaacaagaacaactaccttcgggaagaagagtgcattctagcctgtcggggtgtgcaaggcccctccatggaaaggcgccatccagtgtgctctggcacctgtcagcccacccagttccgctgcagcaatggctgctgcatcgacagtttcctggagtgtgacgacacccccaactgccccgacgcctccgacgaggctgcctgtgaaaaatacacgagtggctttgacgagctccagcgcatccatttccccagtgacaaagggcactgcgtggacctgccagacacaggactctgcaaggagagcatcccgcgctggtactacaaccccttcagcgaacactgcgcccgctttacctatggtggttgttatggcaacaagaacaactttgaggaagagcagcagtgcctcgagtcttgtcgcggcatctccaagaaggatgtgtttggcctgaggcgggaaatccccattcccagcacaggctctgtggagatggctgtcgcagtgttcctggtcatctgcattgtggtggtggtagccatcttgggttactgcttcttcaagaaccagagaaaggacttccacggacaccaccaccacccaccacccacccctgccagctccactgtctccactaccgaggacacggagcacctggtctataaccacaccacccggcccctctgagcctgggtctcaccggctctcacctggccctgcttcctgcttgccaaggcagaggcctgggctgggaaaaactttggaaccagactcttgcctgtttcccaggcccactgtgcctcagagaccagggctccagcccctcttggagaagtctcagctaagctcacgtcctgagaaagctcaaaggtttggaaggagcagaaaacccttgggccagaagtaccagactagatggacctgcctgcataggagtttggaggaagttggagttttgtttcctctgttcaaagctgcctgtccctaccccatggtgctaggaagaggagtggggtggtgtcagaccctggaggccccaaccctgtcctcccgagctcctcttccatgctgtgcgcccagggctgggaggaaggacttccctgtgtagtttgtgctgtaaagagttgctttttgtttatttaatgctgtggcatgggtgaagaggaggggaagaggcctgtttggcctctctgtcctctcttcctcttcccccaagattgagctctctgcccttgatcagccccaccctggcctagaccagcagacagagccaggagaggctcagctgcattccgcagcccccacccccaaggttctccaacatcacagcccagcccacccactgggtaataaaagtggtttgtgga

SEQ ID NO: 383998 - DNA, 2456 bp, Homo sapiens
ggggagaaggcggccgagccccagctctccgagcaccgggtcggaagccgcgacccgagccgcgcaggaagctgggaccggaacctcggcggacccggccccacccaactcacctgcgcaggtcaccagcaccctcggaacccagaggcccgcgctctgaaggtgacccccctggggaggaaggcgatggcccctgcgaggacgatggcccgcgcccgcctcgccccggccggcatccctgccgtcgccttgtggcttctgtgcacgctcggcctccagggcacccaggccgggccaccgcccgcgccccctgggctgcccgcgggagccgactgcctgaacagctttaccgccggggtgcctggcttcgtgctggacaccaacgcctcggtcagcaacggagctaccttcctggagtcccccaccgtgcgccggggctgggactgcgtgcgcgcctgctgcaccacccagaactgcaacttggcgctagtggagctgcagcccgaccgcggggaggacgccatcgccgcctgcttcctcatcaactgcctctacgagcagaacttcgtgtgcaagttcgcgcccagggagggcttcatcaactacctcacgagggaagtgtaccgctcctaccgccagctgcggacccagggctttggagggtctgggatccccaaggcctgggcaggcatagacttgaaggtacaaccccaggaacccctggtgctgaaggatgtggaaaacacagattggcgcctactgcggggtgacacggatgtcagggtagagaggaaagacccaaaccaggtggaactgtggggactcaaggaaggcacctacctgttccagctgacagtgactagctcagaccacccagaggacacggccaacgtcacagtcactgtgctgtccaccaagcagacagaagactactgcctcgcatccaacaaggtgggtcgctgccggggctctttcccacgctggtactatgaccccacggagcagatctgcaagagtttcgtttatggaggctgcttgggcaacaagaacaactaccttcgggaagaagagtgcattctagcctgtcggggtgtgcaaggtgggcctttgagaggcagctctggggctcaggcgactttcccccagggcccctccatggaaaggcgccatccagtgtgctctggcacctgtcagcccacccagttccgctgcagcaatggctgctgcatcgacagtttcctggagtgtgacgacacccccaactgccccgacgcctccgacgaggctgcctgtgaaaaatacacgagtggctttgacgagctccagcgcatccatttccccagtgacaaagggcactgcgtggacctgccagacacaggactctgcaaggagagcatcccgcgctggtactacaaccccttcagcgaacactgcgcccgctttacctatggtggttgttatggcaacaagaacaactttgaggaagagcagcagtgcctcgagtcttgtcgcggcatctccaagaaggatgtgtttggcctgaggcgggaaatccccattcccagcacaggctctgtggagatggctgtcgcagtgttcctggtcatctgcattgtggtggtggtagccatcttgggttactgcttcttcaagaaccagagaaaggacttccacggacaccaccaccacccaccacccacccctgccagctccactgtctccactaccgaggacacggagcacctggtctataaccacaccacccggcccctctgagcctgggtctcaccggctctcacctggccctgcttcctgcttgccaaggcagaggcctgggctgggaaaaactttggaaccagactcttgcctgtttcccaggcccactgtgcctcagagaccagggctccagcccctcttggagaagtctcagctaagctcacgtcctgagaaagctcaaaggtttggaaggagcagaaaacccttgggccagaagtaccagactagatggacctgcctgcataggagtttggaggaagttggagttttgtttcctctgttcaaagctgcctgtccctaccccatggtgctaggaagaggagtggggtggtgtcagaccctggaggccccaaccctgtcctcccgagctcctcttccatgctgtgcgcccagggctgggaggaaggacttccctgtgtagtttgtgctgtaaagagttgctttttgtttatttaatgctgtggcatgggtgaagaggaggggaagaggcctgtttggcctctctgtcctctcttcctcttcccccaagattgagctctctgcccttgatcagccccaccctggcctagaccagcagacagagccaggagaggctcagctgcattccgcagcccccacccccaaggttctccaacatcacagcccagcccacccactgggtaataaaagtggtttgtgga

SEQ ID NO: 383999 - DNA, 2381 bp, Homo sapiens
ggggagaaggcggccgagccccagctctccgagcaccgggtcggaagccgcgacccgagccgcgcaggaagctgggaccggaacctcggcggacccggccccacccaactcacctgcgcaggtcaccagcaccctcggaacccagaggcccgcgctctgaaggtgacccccctggggaggaaggcgatggcccctgcgaggacgatggcccgcgcccgcctcgccccggccggcatccctgccgtcgccttgtggcttctgtgcacgctcggcctccagggcacccaggccgggccaccgcccgcgccccctgggctgcccgcgggagccgactgcctgaacagctttaccgccggggtgcctggcttcgtgctggacaccaacgcctcggtcagcaacggagctaccttcctggagtcccccaccgtgcgccggggctgggactgcgtgcgcgcctgctgcaccacccagaactgcaacttggcgctagtggagctgcagcccgaccgcggggaggacgccatcgccgcctgcttcctcatcaactgcctctacgagcagaacttcgtgtgcaagttcgcgcccagggagggcttcatcaactacctcacgagggaagtgtaccgctcctaccgccagctgcggacccagggctttggagggtctgggatccccaaggcctgggcaggcatagacttgaaggtacaaccccaggaacccctggtgctgaaggatgtggaaaacacagattggcgcctactgcggggtgacacggatgtcagggtagagaggaaagacccaaaccaggtggaactgtggggactcaaggaaggcacctacctgttccagctgacagtgactagctcagaccacccagaggacacggccaacgtcacagtcactgtgctgtccaccaagcagacagaagactactgcctcgcatccaacaaggtgggtcgctgccggggctctttcccacgctggtactatgaccccacggagcagatctgcaagagtttcgtttatggaggctgcttgggcaacaagaacaactaccttcgggaagaagagtgcattctagcctgtcggggtgtgcaagtgtgctctggcacctgtcagcccacccagttccgctgcagcaatggctgctgcatcgacagtttcctggagtgtgacgacacccccaactgccccgacgcctccgacgaggctgcctgtgaaaaatacacgagtggctttgacgagctccagcgcatccatttccccagtgacaaagggcactgcgtggacctgccagacacaggactctgcaaggagagcatcccgcgctggtactacaaccccttcagcgaacactgcgcccgctttacctatggtggttgttatggcaacaagaacaactttgaggaagagcagcagtgcctcgagtcttgtcgcggcatctccaagaaggatgtgtttggcctgaggcgggaaatccccattcccagcacaggctctgtggagatggctgtcgcagtgttcctggtcatctgcattgtggtggtggtagccatcttgggttactgcttcttcaagaaccagagaaaggacttccacggacaccaccaccacccaccacccacccctgccagctccactgtctccactaccgaggacacggagcacctggtctataaccacaccacccggcccctctgagcctgggtctcaccggctctcacctggccctgcttcctgcttgccaaggcagaggcctgggctgggaaaaactttggaaccagactcttgcctgtttcccaggcccactgtgcctcagagaccagggctccagcccctcttggagaagtctcagctaagctcacgtcctgagaaagctcaaaggtttggaaggagcagaaaacccttgggccagaagtaccagactagatggacctgcctgcataggagtttggaggaagttggagttttgtttcctctgttcaaagctgcctgtccctaccccatggtgctaggaagaggagtggggtggtgtcagaccctggaggccccaaccctgtcctcccgagctcctcttccatgctgtgcgcccagggctgggaggaaggacttccctgtgtagtttgtgctgtaaagagttgctttttgtttatttaatgctgtggcatgggtgaagaggaggggaagaggcctgtttggcctctctgtcctctcttcctcttcccccaagattgagctctctgcccttgatcagccccaccctggcctagaccagcagacagagccaggagaggctcagctgcattccgcagcccccacccccaaggttctccaacatcacagcccagcccacccactgggtaataaaagtggtttgtgga

SEQ ID NO: 384000 - DNA, 2400 bp, Homo sapiens
ggggagaaggcggccgagccccagctctccgagcaccgggtcggaagccgcgacccgagccgcgcaggaagctgggaccggaacctcggcggacccggccccacccaactcacctgcgcaggtcaccagcaccctcggaacccagaggcccgcgctctgaaggtgacccccctggggaggaaggcgatggcccctgcgaggacgatggcccgcgcccgcctcgccccggccggcatccctgccgtcgccttgtggcttctgtgcacgctcggcctccagggcacccaggccgggccaccgcccgcgccccctgggctgcccgcgggagccgactgcctgaacagctttaccgccggggtgcctggcttcgtgctggacaccaacgcctcggtcagcaacggagctaccttcctggagtcccccaccgtgcgccggggctgggactgcgtgcgcgcctgctgcaccacccagaactgcaacttggcgctagtggagctgcagcccgaccgcggggaggacgccatcgccgcctgcttcctcatcaactgcctctacgagcagaacttcgtgtgcaagttcgcgcccagggagggcttcatcaactacctcacgagggaagtgtaccgctcctaccgccagctgcggacccagggctttggagggtctgggatccccaaggcctgggcaggcatagacttgaaggtacaaccccaggaacccctggtgctgaaggatgtggaaaacacagattggcgcctactgcggggtgacacggatgtcagggtagagaggaaagacccaaaccaggtggaactgtggggactcaaggaaggcacctacctgttccagctgacagtgactagctcagaccacccagaggacacggccaacgtcacagtcactgtgctgtccaccaagcagacagaagactactgcctcgcatccaacaaggtgggtcgctgccggggctctttcccacgctggtactatgaccccacggagcagatctgcaagagtttcgtttatggaggctgcttgggcaacaagaacaactaccttcgggaagaagagtgcattctagcctgtcggggtgtgcaaggtgggcctttgagaggcagtgtgctctggcacctgtcagcccacccagttccgctgcagcaatggctgctgcatcgacagtttcctggagtgtgacgacacccccaactgccccgacgcctccgacgaggctgcctgtgaaaaatacacgagtggctttgacgagctccagcgcatccatttccccagtgacaaagggcactgcgtggacctgccagacacaggactctgcaaggagagcatcccgcgctggtactacaaccccttcagcgaacactgcgcccgctttacctatggtggttgttatggcaacaagaacaactttgaggaagagcagcagtgcctcgagtcttgtcgcggcatctccaagaaggatgtgtttggcctgaggcgggaaatccccattcccagcacaggctctgtggagatggctgtcgcagtgttcctggtcatctgcattgtggtggtggtagccatcttgggttactgcttcttcaagaaccagagaaaggacttccacggacaccaccaccacccaccacccacccctgccagctccactgtctccactaccgaggacacggagcacctggtctataaccacaccacccggcccctctgagcctgggtctcaccggctctcacctggccctgcttcctgcttgccaaggcagaggcctgggctgggaaaaactttggaaccagactcttgcctgtttcccaggcccactgtgcctcagagaccagggctccagcccctcttggagaagtctcagctaagctcacgtcctgagaaagctcaaaggtttggaaggagcagaaaacccttgggccagaagtaccagactagatggacctgcctgcataggagtttggaggaagttggagttttgtttcctctgttcaaagctgcctgtccctaccccatggtgctaggaagaggagtggggtggtgtcagaccctggaggccccaaccctgtcctcccgagctcctcttccatgctgtgcgcccagggctgggaggaaggacttccctgtgtagtttgtgctgtaaagagttgctttttgtttatttaatgctgtggcatgggtgaagaggaggggaagaggcctgtttggcctctctgtcctctcttcctcttcccccaagattgagctctctgcccttgatcagccccaccctggcctagaccagcagacagagccaggagaggctcagctgcattccgcagcccccacccccaaggttctccaacatcacagcccagcccacccactgggtaataaaagtggtttgtgga

SEQ ID NO: 384001 - DNA, 3137 bp, Homo sapiens
ggggagaaggcggccgagccccagctctccgagcaccgggtcggaagccgcgacccgagccgcgcaggaagctgggaccggaacctcggcggacccggccccacccaactcacctgcgcaggtcaccagcaccctcggaacccagaggcccgcgctctgaaggtgacccccctggggaggaaggcgatggcccctgcgaggacgatggcccgcgcccgcctcgccccggccggcatccctgccgtcgccttgtggcttctgtgcacgctcggcctccagggcacccaggccgggccaccgcccgcgccccctgggctgcccgcgggagccgactgcctgaacagctttaccgccggggtgcctggcttcgtgctggacaccaacgcctcggtcagcaacggagctaccttcctggagtcccccaccgtgcgccggggctgggactgcgtgcgcgcctgctgcaccacccagaactgcaacttggcgctagtggagctgcagcccgaccgcggggaggacgccatcgccgcctgcttcctcatcaactgcctctacgagcagaacttcgtgtgcaagttcgcgcccagggagggcttcatcaactacctcacgagggaagtgtaccgctcctaccgccagctgcggacccagggctttggagggtctgggatccccaaggcctgggcaggcatagacttgaaggtacaaccccaggaacccctggtgctgaaggatgtggaaaacacagattggcgcctactgcggggtgacacggatgtcagggtagagaggaaagacccaaaccaggtggaactgtggggactcaaggaaggcacctacctgttccagctgacagtgactagctcagaccacccagaggacacggccaacgtcacagtcactgtgctgtccaccaagcagacagaagactactgcctcgcatccaacaaggtgggtcgctgccggggctctttcccacgctggtactatgaccccacggagcagatctgcaagagtttcgtttatggaggctgcttgggcaacaagaacaactaccttcgggaagaagagtgcattctagcctgtcggggtgtgcaaggcccctccatggaaaggcgccatccagtgtgctctggcacctgtcagcccacccagttccgctgcagcaatggctgctgcatcgacagtttcctggagtgtgacgacacccccaactgccccgacgcctccgacgaggctgcctgtgaaaaatacacgagtggctttgacgagctccagcgcatccatttccccagtgacaaagggcactgcgtggacctgccagacacaggactctgcaaggagagcatcccgcgctggtactacaaccccttcagcgaacactgcgcccgctttacctatggtggttgttatggcaacaagaacaactttgaggaagagcagcagtgcctcgagtcttgtcgcggcatctccaagaaggatgtgtttggcctgaggcgggaaatccccattcccagcacaggctctgtggagatggctgtcgcagtgttcctggtcatctgcattgtggtggtggtagccatcttgggttactgcttcttcaagaaccagagaaaggacttccacggacaccaccaccacccaccacccacccctgccagctccactgtctccactaccgaggacacggagcacctggtctataaccacaccacccggcccctctgagcctgggtctcaccggctctcacctggccctgcttcctgcttgccaaggcagaggcctgggctgggaaaaactttggaaccagactcttgcctgtttcccaggcccactgtgcctcagagaccagggctccagcccctcttggagaagtctcagctaagctcacgtcctgagaaagctcaaaggtttggaaggagcagaaaacccttgggccagaagtaccagactagatggacctgcctgcataggagtttggaggaagttggagttttgtttcctctgttcaaagctgcctgtccctaccccatggtgctaggaagaggagtggggtggtgtcagaccctggaggccccaaccctgtcctcccgagctcctcttccatgctgtgcgcccagggctgggaggaaggacttccctgtgtagtttgtgctgtaaagagttgctttttgtttatttaatgctgtggcatgggtgaagaggaggggaagaggcctgtttggcctctctgtcctctcttcctcttcccccaagattgagctctctgcccttgatcagccccaccctggcctagaccagcagacagagccaggagaggctcagctgcattccgcagcccccacccccaaggttctccaacatcacagcccagcccacccactgggtaataaaagtggtttgtggagtttctggctctgttctgtgggccaggagagggactaggttgctggggggtgatgggaccgtcctgttcagctggttcaggcttcagccaccctgttgagcaggttttcccatcgtctctctcgaaactggcctggcccctgactttggagagcagtgccatgtttgaccaccagaggggaggagtgagcgggccacgggagccacgagtgtggggaggctgcagtgctgctgtgtagcatttcttcctggtgtgagcctctccacaagcctgttgagtggttgagctctccacaattctgctcatttggaggttggggttaggggtgcacaggcaccttggctcctacctccatgttagggcccaggtgactagctgtctccctcccaacagaagccctggcttctgcgctggagtgcagcacccccaaccaggctctgagctccttcccaggagcctttagtagagacacgccactccaacccacacccctgcatttgttcaagctacctcccggtgccaaaaaaaaaatcatactttgagctcattcgttcgtttattcagtgaattacattgagctcctctgtgccagacactgccaatcattagaaatttgatactgctgagaggggcagaggaagcactatttaaatgctttacgtatctcgagttgctggcgctgcacacagcccttgtgatgacaatacaatcatccgcattttacaggtg

SEQ ID NO: 384002 - DNA, 1434 bp, Homo sapiens
tgctaggtagcgaggctgggtttgcccgaacctcgtgtgaagggtgcagtacctaagccggagcggggtagaggcgggccggcacccccttctgacctccagtgccgccggcctcaagatcagacatggcccagaacttgaaggacttggcgggacggctgcccgccgggccccggggcatgggcacggccctgaagctgttgctgggggccggcgccgtggcctacggtgtgcgcgaatctgtgttcaccgtggaaggcgggcacagagccatcttcttcaatcggatcggtggagtgcagcaggacactatcctggccgagggccttggcactgcgtggacctgccagacacaggactctgcaaggagagcatcccgcgctggtactacaaccccttcagcgaacactgcgcccgctttacctatggtggttgttatggcaacaagaacaactttgaggaagagcagcagtgcctcgagtcttgtcgcggcatctccaagaaggatgtgtttggcctgaggcgggaaatccccattcccagcacaggctctgtggagatggctgtcgcagtgttcctggtcatctgcattgtggtggtggtagccatcttgggttactgcttcttcaagaaccagagaaaggacttccacggacaccaccaccacccaccacccacccctgccagctccactgtctccactaccgaggacacggagcacctggtctataaccacaccacccggcccctctgagcctgggtctcaccggctctcacctggccctgcttcctgcttgccaaggcagaggcctgggctgggaaaaactttggaaccagactcttgcctgtttcccaggcccactgtgcctcagagaccagggctccagcccctcttggagaagtctcagctaagctcacgtcctgagaaagctcaaaggtttggaaggagcagaaaacccttgggccagaagtaccagactagatggacctgcctgcataggagtttggaggaagttggagttttgtttcctctgttcaaagctgcctgtccctaccccatggtgctaggaagaggagtggggtggtgtcagaccctggaggccccaaccctgtcctcccgagctcctcttccatgctgtgcgcccagggctgggaggaaggacttccctgtgtagtttgtgctgtaaagagttgctttttgtttatttaatgctgtggcatgggtgaagaggaggggaagaggcctgtttggcctctctgtcctctcttcctcttcccccaagattgagctctctgcccttgatcagccccaccctggcctagaccagcagacagagccaggagaggctcagctgcattccgcagcccccacccccaaggttctccaacatcacagcccagcccacccactgggtaataaaagtggtttgtgga

SEQ ID NO: 384003 - DNA, 1416 bp, Homo sapiens
cgtgggtccttgcagagcgtggcttccttgcagaggagcaggaatttaatcaaaaaggccaaatcccatgtcatcatctgactcttcagactcctccttcttctcatctttcttctcctctgctgcagcaggggcagaaccagcagcaggggctgcagagcctggggcagcagagacggctacagccccaccagcaggtacactggcaagcttgccaataccctgggcaatgacgtcttcaatgttttttccattcagctcactgataaccttgttgagccggtcgtcgtctgcaaggaacccacgccttgggcactgcgtggacctgccagacacaggactctgcaaggagagcatcccgcgctggtactacaaccccttcagcgaacactgcgcccgctttacctatggtggttgttatggcaacaagaacaactttgaggaagagcagcagtgcctcgagtcttgtcgcggcatctccaagaaggatgtgtttggcctgaggcgggaaatccccattcccagcacaggctctgtggagatggctgtcgcagtgttcctggtcatctgcattgtggtggtggtagccatcttgggttactgcttcttcaagaaccagagaaaggacttccacggacaccaccaccacccaccacccacccctgccagctccactgtctccactaccgaggacacggagcacctggtctataaccacaccacccggcccctctgagcctgggtctcaccggctctcacctggccctgcttcctgcttgccaaggcagaggcctgggctgggaaaaactttggaaccagactcttgcctgtttcccaggcccactgtgcctcagagaccagggctccagcccctcttggagaagtctcagctaagctcacgtcctgagaaagctcaaaggtttggaaggagcagaaaacccttgggccagaagtaccagactagatggacctgcctgcataggagtttggaggaagttggagttttgtttcctctgttcaaagctgcctgtccctaccccatggtgctaggaagaggagtggggtggtgtcagaccctggaggccccaaccctgtcctcccgagctcctcttccatgctgtgcgcccagggctgggaggaaggacttccctgtgtagtttgtgctgtaaagagttgctttttgtttatttaatgctgtggcatgggtgaagaggaggggaagaggcctgtttggcctctctgtcctctcttcctcttcccccaagattgagctctctgcccttgatcagccccaccctggcctagaccagcagacagagccaggagaggctcagctgcattccgcagcccccacccccaaggttctccaacatcacagcccagcccacccactgggtaataaaagtggtttgtgga

SEQ ID NO: 384004 - DNA, 1131 bp, Homo sapiens
ggggagaaggcggccgagccccagctctccgagcaccgggtcggaagccgcgacccgagccgcgcaggaagctgggaccggaacctcggcggacccggccccacccaactcacctgcgcaggtcaccagcaccctcggaacccagaggcccgcgctctgaaggtgacccccctggggaggaaggcgatggcccctgcgaggacgatggcccgcgcccgcctcgccccggccggcatccctgccgtcgccttgtggcttctgtgcacgctcggcctccagggcacccaggccgggccaccgcccgcgccccctgggctgcccgcgggagccgactgcctgaacagctttaccgccggggtgcctggcttcgtgctggacaccaacgcctcggtcagcaacggagctaccttcctggagtcccccaccgtgcgccggggctgggactgcgtgcgcgcctgctgcaccacccagaactgcaacttggcgctagtggagctgcagcccgaccgcggggaggacgccatcgccgcctgcttcctcatcaactgcctctacgagcagaacttcgtgtgcaagttcgcgcccagggagggcttcatcaactacctcacgagggaagtgtaccgctcctaccgccagctgcggacccagggctttggagggtctgggatccccaaggcctgggcaggcatagacttgaaggtacaaccccaggaacccctggtgctgaaggatgtggaaaacacagattggcgcctactgcggggtgacacggatgtcagggtagagaggaaagacccaaaccaggtggaactgtggggactcaaggaaggcacctacctgttccagctgacagtgactagctcagaccacccagaggacacggccaacgtcacagtcactgtgctgtccaccaagcagacagaagactactgcctcgcagcctgctcgagggacaggaagatcactacaacaatttgtctgcctccaaggtcctctgaggcagcaggctctggggcttctgctgtcctttggagggtgtcttctgggtagagggatgggaaggaagggacccttacccccggctcttctcctgacctgccaataaaaatttatggtccaagggaaaaa

SEQ ID NO: 384005 - DNA, 530 bp, Homo sapiens
aacatataggaatacctactgttgatcagattttcatgacaatttaacttcccattccccatagtccaagagggttataaaaccagatttagccattactgcctttttaaaaaattaaatgatgggagtcttcctctgtcgcccaggctggagtgcagtggcatgatcatagctcactgcaacctcaaacttctgggctcaagtgattctcccacctcggcttcccaagtagctgggactacaggtgcatgccacccatttaaaattttttttttcttagagatgggagtcttgctatgtttcccaggctggtctcaaatttctggccttaatttcctgatcctccttccttggtctcctgagtaactgggattacagatgtgagccaccacacctggaggccatcactgtcttactgttccaaccaagtggtagaactggaaaacaactattctggtatattcaatttgctgcagaaatctaccctcaaattacctgtatctcatctatattaggaagaattttaatag

SEQ ID NO: 384006 - DNA, 415 bp, Homo sapiens
tgtacttgccctaccagcacacgggagtgcatcacacaccccaacccacaccaactgccattgaagatggagccctggcaggcacagagccaaaaatcccccacccccaccagcacctcacccttgacctaatgctgcagagaggaaaagggaccctcttatatcctgagggaccactgttgcttggggagcacagagaaggcacctagacccgtgctggccagcacctcaccccaaaccaacactatctccagtgcaacagcacacacagtcagcaggggccccctggtccccaccctagctgtcttgcctccaccactgggtgaatgcccacagggaggcaggcacttttgcatccgctagcactctgctgcagttgccgcactttggtcccctcagtgcagtggaccccaaa

SEQ ID NO: 384007 - DNA, 254 bp, Homo sapiens
atttgtctgaaaaatatatttctacatgatctgataaagttcagataaggggcattctgttcctaagaatgtcctaaaaatggaaagctgataaaagattatgcttagaattatacaggtaaaagacctacaacagttgttctcttgttttgatcccataggttatttgttattactcttctttaacagagtgattttctattcttaaccttcttaagagccaatacagagtagaaagaaatattttcagaaag

SEQ ID NO: 384008 - DNA, 896 bp, Homo sapiens
tgctgatatcgtgagtacttattgtacaattactttatggacccctgcattctcttctaaatgggtgataggaaccctggacaagagcaaaaggctccgcactgaccaataatcctaatagcacctaacatttagtgaatgatcactatgacaatcctatgctaaaggttcaaccgtatgcagttgctatttttgcaggccaaatattggcagtttcaaagggctcaatcgaatacggtatctatcttaatttttttttattctaccatagtagaatgaggttttaacctcagttagagatgagaaaactgagacttgtggaggttagtgtcttaccaaggtcccacagctagtaggtggtggaagcaaggctgggcccatcctgctacatcccagagctgatgctttgaggcaccacaaggcaagggaagttggctgccctcgggtgctctcagtgtagttctgaagacacagccatgtctcaggaaactcccaaaataaacacaaaactgaatatatgcactactaagttggattcaatttcctgagacagtacaggaagccagcgtgtcctgttcaaagttaacagagaagaagcgcatagactctggaaaaaatctaacaatgcaacatcccttcagaacatcttgttattttcttgtacatttgctggccttggcctcgggccgtaattacattatcttcaaacagcaactagaaatattgctcattaaacatgaacacgggaatgtttaatttgttaggacgtaggtgttttgaaagcaaatcattggttcagggcattgaactgagtgctgccattggagttgtctttggtgaacaccatgtcctggccagaactttgccatgatgcgtgttcactgcagatgagagaa

SEQ ID NO: 384009 - DNA, 919 bp, Homo sapiens
tcacaggactatttgagtaattttccattatactctgcatggcccagagagatttaaagttaaagcagagtaccacttttgtaaataaaatgaaatcaaactctaacaattgtaaggcatgattttccaagcctccggggtttagggcaagtaactgctgccgtccctgccggctccaaccctgttggtctcctgaggcctggttctctgggttgtacatttcttttagaaccaccccagtttatttctgaccttgtgcccacatcccatagtcatggtgcagcatatatatttttttttttaataaccctggatgtgcaggtggtcatatttcctaaggtttcaataaagaatgtatctcagaacaccagggtaggaatggctcttaagtttgcactgggtgcttgaggtaagattaggcagacccagagggtagtggagactttgaccttatcatgaaactctttaaatatcataattttgaaaacataagatatgaggtatttcagagcagtactctattctctaggcactaaagatagaagtgaatgaagctcttttttcctgacttctcagcctcctcacaatcccttggtgagtggccctcttttggacaagtgcaggggctgagtgtggaggttgagtgtcatgtccacagacacatgtgacaggaagaagtattttgagcataagaacttggttcctggccgggcatggtggttcacgcctgtaatcccagcactttggaaggccgaggaaggtggatcatgaggtcgagaccatcctggccaacacggtgaaatcccgtctctactaaaagtacaaaaattagcgtggtggcgcatgcctgtaatcccagctactccggaggctgaggcaggagaatcgcttgaaccagggagttggaggttgcagtgag

SEQ ID NO: 384010 - DNA, 491 bp, Homo sapiens
ctgcggccgcgtgggtgggggtccggggtcggggggcggtgcgaggcccggcggcgtcggctgagggaccagcgggactggggcgaacccggcgtgggccgagccttggagctcgggcgtcgggtcaccgcgtcccgggactgaccacctgtccggtgcgccgctcagagaccggggtggccgcagcctccgccacttgcccttgactttacacttccgccgaagcctacgaacttgccaaccggaaacaaatgggaacgaattttgttcagcaactacaaaaggcagatgtgaaaagtagttgcagaacaattcggtgcccgctgccgctcgttgtgctgaggacgaacggcgctgcgggcctggctccctatggcggctccctgctcgcgcttcactccaaggggaacccacagaggttttggaggagttattaataaattgtcttttttggtgacaaaaaggaaaaagaaattggaacctcgtgccgc

SEQ ID NO: 384011 - DNA, 541 bp, Homo sapiens
  misc_feature (502)..(504): n is a, c, g, or t
ggcctacggctgtggggcgcgcagagtccacctggcggccaagggcgctggcgaccgctgaagctcctgggggtgttcggggtccgggctgcgcctgtgcccgcgggaaggctgggcgcttcccacacacagaccccgctccgggccagccccgcagggagactaccagggctggcggtagctgggcgtggtcgggtcgggggcggctgtgggcggccggcaggcagcgcgcggggcagccctcggcagacggccaatggcggcggtgctcggggcgctcggggcgacgcggcgcttgttggcggcgctgcgaggccagagcctagggctagcggccatgtcatcaggtactcacaggttgactgcagaggagaggaaccaagctatacttgaccttaaagcagcaggatggtcggaattaagtgagagagatgccatctacaaagaattctccttccacaattttaatcagcattgtgctatatgtcccgagtgcccaacnnncgcctgggggtaccgagcgcgtgtgcgtacctcagtg

SEQ ID NO: 384012 - DNA, 5308 bp, Homo sapiens
ggcctacggctgtggggcgcgcagagtccacctggcggccaagggcgctggcgaccgctgaagctcctgggggtgttcggggtccgggctgcgcctgtgcccgcgggaaggctgggcgcttcccacacacagaccccgctccgggccagccccgcagggagactaccagggctggcggtagctgggcgtggtcgggtcgggggcggctgtgggcggccggcaggcagcgcgcggggcagccctcggcagacggccaatggcggcggtgctcggggcgctcggggcgacgcggcgcttgttggcggcgctgcgaggccagagcctagggctagcggccatgtcatcaggtactcacaggttgactgcagaggagaggaaccaagctatacttgaccttaaagcagcaggatggtcggaattaagtgagagagatgccatctacaaagaattctccttccacaattttaatcaggcatttggctttatgtcccgagttgccctacaagcagagaagatgaatcatcacccagaatggttcaatgtatacaacaaggtccagataactctcacctcacatgactgtggtgaactgaccaaaaaagatgtgaagctggccaagtttattgaaaaagcagctgcttctgtgtgatttcttccaaaatacataagtctgagaggctaaacttgatggctgtgttaacatatgtcacgtgtagcacagtggagaaagcaggatatggctcataatgacagtggtgaagacctgcgaatgaagttgctagttaacacctacattagggtttgacataggtctatgttatgggtcgctgcatctgctggaactcacagactttactatagagaatcaaagatcccgtatccgaagtctatggaaatgctcatggtggtaaattccaacagaatgaaacaccaaacttgcttaaagtaactcacgtttcaatttgaaagagatattgtcaaaattggaggcccccaggttcctgtctgttccaaatctttgcatgatgacagtggtttctctgatgtggtaagctttggctttcttctgttttctttctaaaagatcactggagtagagaggagttaaacagacatgacctttgacctcttgcatgacctccacagatagcaaaccgggccgacacatggttgacgatgtccttttctacaatgaagttaatgaaagttctgaaaatagtgattactttctgacattgataggatttaggaaacctctggataaatagcttaagcatggctgtttatgtttttgctatagacaaaaagcagcagcatgtacattgtatttggacacaagcctgcctcggttaatatattgaactattggaccactagggttagtagggagcggtctgtacactttctgattcagcattcagaaacattctaggtggactctgtagctttcagttttgtaaagttatcggaaaaacatcgggagggtttggccatcatatgtgagctttgtgtttcaatgccagttactcaggattagtaaattaatgactgtccagaggacttcagggtcaccaagctgctgcacctgccattggctgactctccccggctatctgtggctgagatggtgctgcttaggtcacgcagagcatgagctgctgctgaaagggcacaggagatggcccttgggcttctcatcccaggatgcctgccctgcccaccaatccatgagaagatatgtatgatttcagtaggccctggatcagcttgtcacctctggtttcctgtttgctttccactcactcagctggagtttcatttccagactaaagtcttcatcattggcttcagaaacagcattcatctgtggctgtgctgatgtagtacaccaagaacaactgggctcttctctgtcactttcagtgggctaccttccctcacctctccaagcagcatgaaagaattctttacatttttaatctcttttttgtttttccctgaaagtatgctttggtgcttaaagagagaagtcacaaaagtatactactgagtttcctggagatgaaatcctgttgtccctagctatgtgaatgagcacagggatccctgatgccattattttgtatattcatacggcacacacttactgagggccttctgtgtgccctaggggattgagcacagtgacatatcagggcaggtagaaacagatggagagctgatgcgggctgtcttagagcagctgccccaggaggcccctgtggatggatgttgggcaggagccctgagacgttaggggcatataactaaaggacatagcaggagttataggaggagctgatccctgagggaaacaatgaagacggagaagatggggctaaagtttgaattgtggggacattaatcacggtgattcttaaaactttgctgttgatgattttaaatggagaaaatgagtacgtaagatgttatttcccagttcagtatataggttgcccacaaagtattttcctaccatgaatggtcatatatacttgttgtagaataccagggacagcagagatggtggggtagttacttccttttcttacagcccaagaactttggtgtccaggagattgaccaatttagccactgagcatttaatacaacacagggctacccagatcccactgtcctgatttgccctgaaagccaaaggagtcaggagaaggtgagtggggtgaatatattaatcctgagagttgaacagagcaaaaatccctattacttttgtacttaaaacatctctgccacatgtgctcactctttatattctgtttaggtggtttatatgtgcacatcccatcctatgcctgcagttagccaactcagggtttatattgcctcctttctttttttcttttttttttttttttttaagagatggggtctcgttctgtcatgcagactggagtgcagtggtgtgatcacagctcattgtaacctccaacgcctggactgaagtgatcctcctgccttggcctctctggtagctgggactacaggtgcatgccaccacacccacctaattttttttatttttattttttgtagagacagtctcactatcttgctcgggctggtcctgaactcctgggctcaagttatcttgctgcctcagcctcccatgggtaatctttatttccttttttttttttttttggagatggagtttcgctcttgtcgcccaggctggagtgcaatggcacgatcttggctcactgcagtctccacctcctgggttcaggtgattctccatcctcggcctactgagtagctgagattacaggcaactgccaccatgcgcggctaatttgtgtatttttttttagtaagagatggggtttcgccatgttggccggactggtcttagactcctgacctcaagcgacctgcctgccttggcctcccaaagtgctgggattacaggcatgagccgctatgcctcgtcgctgatttttatttcttattttttttttagagatgggggtctcactatgctgctcaggctgatctcaaactcctggcctcaagtgatcctcccaccttagcctcccaagttgctgggattataagtgtgagccactatccctacctcactattaccttctttgcttctcttgttttcttttgttctaagtcaaacccatcacaatcttttcttgtccttccaggtgttttccagtgctgtgccctggatgtgctctctttctcttagagcccagagaacttgcttttcccccttatatatgacccttaactttttctaacacattattaagggcctgtgtctatcagctgggggcacttcttgaagggagggcctttgtgtggtctgtttctagtgacttccagctttaacccagagcctcatgattgctgggtgcccatagcctttttgctgaatggaggcactcagtctccttgggaagagagaatccatgatagacccacttgggagctccccacttcaggggcctacacactggtaatgcaacagaatgcccaagagtgacctcataaagcaaggattcccttcgtggccccttctctgctgcctctcagaatccagacgctaaggaaaatccctaagcagagattttctgttggatgctaaaagcaaggaataaaagttgaaaatttggaaaatgtctcaacaccgtcaccagcgccactcgagagtcatttctagttcaccagttgacactacatcggtgggattttgcccaacattcaagaaatattgcaccactgcactccagcctgggtgacggaacgggactctgtctcagaaaaaaaaaaaaagaagaggaaaaagaaaaatatatattctatatttttttaacttatgagaatgtgttcatttcatttgtaacatataatgggaaacagtaatacgtactctgagaaaaattgcaaagcacagataaatggaaataaacaggaaaaagaatcacctataacctcaccatccatagacagacactgttaaaattttggcatatttcctgctgattttttctactgctgatttttgcacaggtgagataattttgaacagagaattttgtatctttggtttttgtgtttcgctgcacacaaaaacaaaagatataaaaatggatcataaacatttttctaaatcctgaaaagtgcatagacatattttagtgcctgtatttcacaagatggacataccataatttacttacacagtcctttttgttagatgtttaagttgttttcaagcttctcagtgctggaaaaaatactgagatagacatgtttagttgaagttatttcatttcaggttatattatcttgggtcagagaatgaatggttctcaggcttttcaaaagagctggtcagtttttatgcctctggcagtttttgagagtgctcaatcatactacactgttgccagcattagatcttatcacatttaagtcattgctaattttataaacaaaaacaatggttttactttgcatctccctgattggtattgctgtagaacatatttggagaagtttgtttgtctttggtgtttatttcatgaatagattgtgtgcccattttctcttggggtattcagttttttattactgatgtgagcatgtgtatgggtgattatttgatgattatcagttttgcttagtagactggcaatatttagtcttgctgtcactgtgttcccagtgcctactagattgcttgatatgtagttgccactcaataaagatttgttgagtcaaaaaaaaaaca

SEQ ID NO: 384013 - DNA, 5196 bp, Homo sapiens
  misc_feature (13)..(13): n is a, c, g, or t
  misc_feature (52)..(52): n is a, c, g, or t
ggtagctggctgngcctggcgcctcctgcgccgccggagctttgctgctggnccgtgataaatgattttgggatttctgaagtgggagtgagttgcagcttaatggcagagaatccagggaatgcagcttagcccacagttgccctttgatgaggagccttcactaatgttcatctttctgggtgacagcctctctctcacctgagcctacagtaactctgcaagtagtcatcaggtactcacaggttgactgcagaggagaggaaccaagctatacttgaccttaaagcagcaggatggtcggaattaagtgagagagatgccatctacaaagaattctccttccacaattttaatcaggcatttggctttatgtcccgagttgccctacaagcagagaagatgaatcatcacccagaatggttcaatgtatacaacaaggtccagataactctcacctcacatgactgtggtgaactgaccaaaaaagatgtgaagctggccaagtttattgaaaaagcagctgcttctgtgtgatttcttccaaaatacataagtctgagaggctaaacttgatggctgtgttaacatatgtcacgtgtagcacagtggagaaagcaggatatggctcataatgacagtggtgaagacctgcgaatgaagttgctagttaacacctacattagggtttgacataggtctatgttatgggtcgctgcatctgctggaactcacagactttactatagagaatcaaagatcccgtatccgaagtctatggaaatgctcatggtggtaaattccaacagaatgaaacaccaaacttgcttaaagtaactcacgtttcaatttgaaagagatattgtcaaaattggaggcccccaggttcctgtctgttccaaatctttgcatgatgacagtggtttctctgatgtggtaagctttggctttcttctgttttctttctaaaagatcactggagtagagaggagttaaacagacatgacctttgacctcttgcatgacctccacagatagcaaaccgggccgacacatggttgacgatgtccttttctacaatgaagttaatgaaagttctgaaaatagtgattactttctgacattgataggatttaggaaacctctggataaatagcttaagcatggctgtttatgtttttgctatagacaaaaagcagcagcatgtacattgtatttggacacaagcctgcctcggttaatatattgaactattggaccactagggttagtagggagcggtctgtacactttctgattcagcattcagaaacattctaggtggactctgtagctttcagttttgtaaagttatcggaaaaacatcgggagggtttggccatcatatgtgagctttgtgtttcaatgccagttactcaggattagtaaattaatgactgtccagaggacttcagggtcaccaagctgctgcacctgccattggctgactctccccggctatctgtggctgagatggtgctgcttaggtcacgcagagcatgagctgctgctgaaagggcacaggagatggcccttgggcttctcatcccaggatgcctgccctgcccaccaatccatgagaagatatgtatgatttcagtaggccctggatcagcttgtcacctctggtttcctgtttgctttccactcactcagctggagtttcatttccagactaaagtcttcatcattggcttcagaaacagcattcatctgtggctgtgctgatgtagtacaccaagaacaactgggctcttctctgtcactttcagtgggctaccttccctcacctctccaagcagcatgaaagaattctttacatttttaatctcttttttgtttttccctgaaagtatgctttggtgcttaaagagagaagtcacaaaagtatactactgagtttcctggagatgaaatcctgttgtccctagctatgtgaatgagcacagggatccctgatgccattattttgtatattcatacggcacacacttactgagggccttctgtgtgccctaggggattgagcacagtgacatatcagggcaggtagaaacagatggagagctgatgcgggctgtcttagagcagctgccccaggaggcccctgtggatggatgttgggcaggagccctgagacgttaggggcatataactaaaggacatagcaggagttataggaggagctgatccctgagggaaacaatgaagacggagaagatggggctaaagtttgaattgtggggacattaatcacggtgattcttaaaactttgctgttgatgattttaaatggagaaaatgagtacgtaagatgttatttcccagttcagtatataggttgcccacaaagtattttcctaccatgaatggtcatatatacttgttgtagaataccagggacagcagagatggtggggtagttacttccttttcttacagcccaagaactttggtgtccaggagattgaccaatttagccactgagcatttaatacaacacagggctacccagatcccactgtcctgatttgccctgaaagccaaaggagtcaggagaaggtgagtggggtgaatatattaatcctgagagttgaacagagcaaaaatccctattacttttgtacttaaaacatctctgccacatgtgctcactctttatattctgtttaggtggtttatatgtgcacatcccatcctatgcctgcagttagccaactcagggtttatattgcctcctttctttttttcttttttttttttttttttaagagatggggtctcgttctgtcatgcagactggagtgcagtggtgtgatcacagctcattgtaacctccaacgcctggactgaagtgatcctcctgccttggcctctctggtagctgggactacaggtgcatgccaccacacccacctaattttttttatttttattttttgtagagacagtctcactatcttgctcgggctggtcctgaactcctgggctcaagttatcttgctgcctcagcctcccatgggtaatctttatttccttttttttttttttttggagatggagtttcgctcttgtcgcccaggctggagtgcaatggcacgatcttggctcactgcagtctccacctcctgggttcaggtgattctccatcctcggcctactgagtagctgagattacaggcaactgccaccatgcgcggctaatttgtgtatttttttttagtaagagatggggtttcgccatgttggccggactggtcttagactcctgacctcaagcgacctgcctgccttggcctcccaaagtgctgggattacaggcatgagccgctatgcctcgtcgctgatttttatttcttattttttttttagagatgggggtctcactatgctgctcaggctgatctcaaactcctggcctcaagtgatcctcccaccttagcctcccaagttgctgggattataagtgtgagccactatccctacctcactattaccttctttgcttctcttgttttcttttgttctaagtcaaacccatcacaatcttttcttgtccttccaggtgttttccagtgctgtgccctggatgtgctctctttctcttagagcccagagaacttgcttttcccccttatatatgacccttaactttttctaacacattattaagggcctgtgtctatcagctgggggcacttcttgaagggagggcctttgtgtggtctgtttctagtgacttccagctttaacccagagcctcatgattgctgggtgcccatagcctttttgctgaatggaggcactcagtctccttgggaagagagaatccatgatagacccacttgggagctccccacttcaggggcctacacactggtaatgcaacagaatgcccaagagtgacctcataaagcaaggattcccttcgtggccccttctctgctgcctctcagaatccagacgctaaggaaaatccctaagcagagattttctgttggatgctaaaagcaaggaataaaagttgaaaatttggaaaatgtctcaacaccgtcaccagcgccactcgagagtcatttctagttcaccagttgacactacatcggtgggattttgcccaacattcaagaaatattgcaccactgcactccagcctgggtgacggaacgggactctgtctcagaaaaaaaaaaaaagaagaggaaaaagaaaaatatatattctatatttttttaacttatgagaatgtgttcatttcatttgtaacatataatgggaaacagtaatacgtactctgagaaaaattgcaaagcacagataaatggaaataaacaggaaaaagaatcacctataacctcaccatccatagacagacactgttaaaattttggcatatttcctgctgattttttctactgctgatttttgcacaggtgagataattttgaacagagaattttgtatctttggtttttgtgtttcgctgcacacaaaaacaaaagatataaaaatggatcataaacatttttctaaatcctgaaaagtgcatagacatattttagtgcctgtatttcacaagatggacataccataatttacttacacagtcctttttgttagatgtttaagttgttttcaagcttctcagtgctggaaaaaatactgagatagacatgtttagttgaagttatttcatttcaggttatattatcttgggtcagagaatgaatggttctcaggcttttcaaaagagctggtcagtttttatgcctctggcagtttttgagagtgctcaatcatactacactgttgccagcattagatcttatcacatttaagtcattgctaattttataaacaaaaacaatggttttactttgcatctccctgattggtattgctgtagaacatatttggagaagtttgtttgtctttggtgtttatttcatgaatagattgtgtgcccattttctcttggggtattcagttttttattactgatgtgagcatgtgtatgggtgattatttgatgattatcagttttgcttagtagactggcaatatttagtcttgctgtcactgtgttcccagtgcctactagattgcttgatatgtagttgccactcaataaagatttgttgagtcaaaaaaaaaaca

SEQ ID NO: 384014 - DNA, 4906 bp, Homo sapiens
ggcctacggctgtggggcgcgcagagtccacctggcggccaagggcgctggcgaccgctgaagctcctgggggtgttcggggtccgggctgcgcctgtgcccgcgggaaggctgggcgcttcccacacacagaccccgctccgggccagccccgcagggagactaccagggctggcggtagctgggcgtggtcgggtcgggggcggctgtgggcggccggcaggcagcgcgcggggcagccctcggcagacggccaatggcggcggtgctcggggcgctcggggcgacgcggcgcttgttggcggcgctgcgaggccagagcctagggctagcggccatgtcatcaggtactcacaggttgactgcagaggagaggaaccaagctatacttgaccttaaagcagcaggatggtcggaattaagtgagagagatgccatctacaaagaattctccttccacaattttaatcaggcatttggctttatgtcccgagttgccctacaagcagagaagatgaatcatcacccagaatggttcaatgtatacaacaaggtccagataactctcacctcacatgactgtggtgaactgaccaaaaaagatgtgaagctggccaagtttattgaaaaagcagctgcttctgtgtgatttcttccaaaatacataagtctgagaggctaaacttgatggctgtgttaacatatgtcacgtgtagcacagtggagaaagcaggatatggctcataatgacagtggtgaagacctgcgaatgaagttgctagttaacacctacattagggtttgacataggtctatgttatgggtcgctgcatctgctggaactcacagactttactatagagaatcaaagatcccgtatccgaagtctatggaaatgctcatggtggtaaattccaacagaatgaaacaccaaacttgcttaaagtaactcacgtttcaatttgaaagagatattgtcaaaattggaggcccccaggttcctgtctgttccaaatctttgcatgatgacagtggtttctctgatgtggtaagctttggctttcttctgttttctttctaaaagatcactggagtagagaggagttaaacagacatgacctttgacctcttgcatgacctccacagatagcaaaccgggccgacacatggttgacgatgtccttttctacaatgaagttaatgaaagttctgaaaatagtgattactttctgacattgataggatttaggaaacctctggataaatagcttaagcatggctgtttatgtttttgctatagacaaaaagcagcagcatgtacattgtatttggacacaagcctgcctcggttaatatattgaactattggaccactagggttagtagggagcggtctgtacactttctgattcagcattcagaaacattctaggtggactctgtagctttcagttttgtaaagttatcggaaaaacatcgggagggtttggccatcatatgtgagctttgtgtttcaatgccagttactcaggattagtaaattaatgactgtccagaggacttcagggtcaccaagctgctgcacctgccattggctgactctccccggctatctgtggctgagatggtgctgcttaggtcacgcagagcatgagctgctgctgaaagggcacaggagatggcccttgggcttctcatcccaggatgcctgccctgcccaccaatccatgagaagatatgtatgatttcagtaggccctggatcagcttgtcacctctggtttcctgtttgctttccactcactcagctggagtttcatttccagactaaagtcttcatcattggcttcagaaacagcattcatctgtggctgtgctgatgtagtacaccaagaacaactgggctcttctctgtcactttcagtgggctaccttccctcacctctccaagcagcatgaaagaattctttacatttttaatctcttttttgtttttccctgaaagtatgctttggtgcttaaagagagaagtcacaaaagtatactactgagtttcctggagatgaaatcctgttgtccctagctatgtgaatgagcacagggatccctgatgccattattttgtatattcatacggcacacacttactgagggccttctgtgtgccctaggggattgagcacagtgacatatcagggcaggtagaaacagatggagagctgatgcgggctgtcttagagcagctgccccaggaggcccctgtggatggatgttgggcaggagccctgagacgttaggggcatataactaaaggacatagcaggagttataggaggagctgatccctgagggaaacaatgaagacggagaagatggggctaaagtttgaattgtggggacattaatcacggtgattcttaaaactttgctgttgatgattttaaatggagaaaatgagtacgtaagatgttatttcccagttcagtatataggttgcccacaaagtattttcctaccatgaatggtcatatatacttgttgtagaataccagggacagcagagatggtggggtagttacttccttttcttacagcccaagaactttggtgtccaggagattgaccaatttagccactgagcatttaatacaacacagggctacccagatcccactgtcctgatttgccctgaaagccaaaggagtcaggagaaggtgagtggggtgaatatattaatcctgagagttgaacagagcaaaaatccctattacttttgtacttaaaacatctctgccacatgtgctcactctttatattctgtttaggtggtttatatgtgcacatcccatcctatgcctgcagttagccaactcagggtttatattgcctcctttctttttttcttttttttttttttttttaagagatggggtctcgttctgtcatgcagactggagtgcagtggtgtgatcacagctcattgtaacctccaacgcctggactgaagtgatcctcctgccttggcctctctggtagctgggactacaggtgcatgccaccacacccacctaattttttttatttttattttttgtagagacagtctcactatcttgctcgggctggtcctgaactcctgggctcaagttatcttgctgcctcagcctcccatgggtaatctttatttccttttttttttttttttggagatggagtttcgctcttgtcgcccaggctggagtgcaatggcacgatcttggctcactgcagtctccacctcctgggttcaggtgattctccatcctcggcctactgagtagctgagattacaggcaactgccaccatgcgcggctaatttgtgtatttttttttagtaagagatggggtttcgccatgttggccggactggtcttagactcctgacctcaagcgacctgcctgccttggcctcccaaagtgctgggattacaggcatgagccgctatgcctcgtcgctgatttttatttcttattttttttttagagatgggggtctcactatgctgctcaggctgatctcaaactcctggcctcaagtgatcctcccaccttagcctcccaagttgctgggattataagtgtgagccactatccctacctcactattaccttctttgcttctcttgttttcttttgttctaagtcaaacccatcacaatcttttcttgtccttccaggtgttttccagtgctgtgccctggatgtgctctctttctcttagagcccagagaacttgcttttcccccttatatatgacccttaactttttctaacacattattaagggcctgtgtctatcagctgggggcacttcttgaagggagggcctttgtgtggtctgtttctagtgacttccagctttaacccagagcctcatgattgctgggtgcccatagcctttttgctgaatggaggcactcagtctccttgggaagagagaatccatgatagacccacttgggagctccccacttcaggggcctacacactggtaatgcaacagaatgcccaagagtgacctcataaagcaaggattcccttcgtggccccttctctgctgcctctcagaatccagacgctaaggaaaatccctaagcagagattttctgttggatgctaaaagcaaggaataaaagttgaaaatttggaaaatgtctcaacaccgtcaccagcgccactcgagagtcatttctagttcaccagttgacactacatcggtgggattttgcccaacattcaagaaatttaagtaaatattatctatctccattgcctgttaagaaatgtgctagtagaagtgtgagggcagggtgtcagtgttctctcagcctcttccctcagatactcgtctgcttaccaaaataagttgcatgtccttgacaatctggtttctatgattggtgaggctggcatgctattacctttatgtgccctgtagacttgaatgaccagtttgaccagtttgactgttagataatcagaaggcttttctctttttttataatagaccccatctcaaatcagataatgaaaattacatatcttgaactcctgacctcaagtgagctgcctgcgtcgggctcccaaagtgctggcattacgggcatgagccatcgcgcctggccagtgacatggtttttaagtctccttgaatctcctctcaaaaactgagcaagcctgggcaacaaagtgggactcctatctctctttttttttgttttgagacgaagtctcgactctggcctgggcaacagagtgagaccttgtcctaaacaaccaaccaaaaaaaccagagcaactaggtagcaaagccaagaacccacaggcagcatttacaacaaaactggttagtttccttactacaagc

SEQ ID NO: 384015 - DNA, 1805 bp, Homo sapiens
ttgcactgtcacccaggctggagtgtagtagtgtaatcatagctcacagcagcctcaaactcctggcctcaagtgatcctcccaccttagcctcccaagttgctgggattataagtgtgagccactatccctacctcactattaccttctttgcttctcttgttttcttttgttctaagtcaaacccatcacaatcttttcttgtccttccaggtgttttccagtgctgtgccctggatgtgctctctttctcttagagcccagagaacttgcttttcccccttatatatgacccttaactttttctaacacattattaagggcctgtgtctatcagctgggggcacttcttgaagggagggcctttgtgtggtctgtttctagtgacttccagctttaacccagagcctcatgattgctgggtgcccatagcctttttgctgaatggaggcactcagtctccttgggaagagagaatccatgatagacccacttgggagctccccacttcaggggcctacacactggtaatgcaacagaatgcccaagagtgacctcataaagcaaggattcccttcgtggccccttctctgctgcctctcagaatccagacgctaaggaaaatccctaagcagagattttctgttggatgctaaaagcaaggaataaaagttgaaaatttggaaaatgtctcaacaccgtcaccagcgccactcgagagtcatttctagttcaccagttgacactacatcggtgggattttgcccaacattcaagaaatattgcaccactgcactccagcctgggtgacggaacgggactctgtctcagaaaaaaaaaaaaagaagaggaaaaagaaaaatatatattctatatttttttaacttatgagaatgtgttcatttcatttgtaacatataatgggaaacagtaatacgtactctgagaaaaattgcaaagcacagataaatggaaataaacaggaaaaagaatcacctataacctcaccatccatagacagacactgttaaaattttggcatatttcctgctgattttttctactgctgatttttgcacaggtgagataattttgaacagagaattttgtatctttggtttttgtgtttcgctgcacacaaaaacaaaagatataaaaatggatcataaacatttttctaaatcctgaaaagtgcatagacatattttagtgcctgtatttcacaagatggacataccataatttacttacacagtcctttttgttagatgtttaagttgttttcaagcttctcagtgctggaaaaaatactgagatagacatgtttagttgaagttatttcatttcaggttatattatcttgggtcagagaatgaatggttctcaggcttttcaaaagagctggtcagtttttatgcctctggcagtttttgagagtgctcaatcatactacactgttgccagcattagatcttatcacatttaagtcattgctaattttataaacaaaaacaatggttttactttgcatctccctgattggtattgctgtagaacatatttggagaagtttgtttgtctttggtgtttatttcatgaatagattgtgtgcccattttctcttggggtattcagttttttattactgatgtgagcatgtgtatgggtgattatttgatgattatcagttttgcttagtagactggcaatatttagtcttgctgtcactgtgttcccagtgcctactagattgcttgatatgtagttgccactcaataaagatttgttgagtcaaaaaaaaaaca

SEQ ID NO: 384016 - DNA, 1593 bp, Homo sapiens
ggcctacggctgtggggcgcgcagagtccacctggcggccaagggcgctggcgaccgctgaagctcctgggggtgttcggggtccgggctgcgcctgtgcccgcgggaaggctgggcgcttcccacacacagaccccgctccgggccagccccgcagggagactaccagggctggcggtagctgggcgtggtcgggtcgggggcggctgtgggcggccggcaggcagcgcgcggggcagccctcggcagacggccaatggcggcggtgctcggggcgctcggggcgacgcggcgcttgttggcggcgctgcgaggccagagcctagggctagcggccatgtcatcaggtactcacaggttgactgcagaggagaggaaccaagctatacttgaccttaaagcagcaggatggtcggaattaagtgagagagatgccatctacaaagaattctccttccacaattttaatcagggcatgcttcatcttctcagaggttttcaaagctgcccacagcccagccctaagcctacctcgcattactctgcaagaagcctctttgctcagagattagaactgcaatgttcatgagaggtcacctactcatccctttcactgaagaagtggggaaaacaaggctcagacagggcatttggctttatgtcccgagttgccctacaagcagagaagatgaatcatcacccagaatggttcaatgtatacaacaaggtccagataactctcacctcacatgactgtggtgaactgaccaaaaaagatgtgaagctggccaagtttattgaaaaagcagctgcttctgtgtgatttcttccaaaatacatgtaaaatcttgtacacatcttagctgcaatgtatgttgaaggaaatttatgtgaacaaatagagttgttctttttctcttttttttaagacagagtgttgctctgtcgcccaggccagagtgcagtggtatgatctcggctcactgtaacctccgcctcccaggttcaggtgattctcctgcctcagcctcctgagtagctgggattacaagcacgtgtcaccacgcctggctaatttttgtatttttagtatagacagggttttaccacgttggtcaggctggtctcgaactcctgacctcgtgatccgcctgcctcagcctcccaaagtgctgggattacaggcatgagccaccatgcctggctgttgaattgttcttaaggcatcatatctagaagcaaagaaaaaagaaaaataacaatttaagttgtgtaaattgtttgcctttatatattacatttggtaaaatcagtgcttaaatacgcaatgatttaaactggaaaaaaaaaaaaaaaaaaaaaaaaaaaaaaaaaaaaaaaaaaaaaaaaaaaaaaaaaaaaaaaacaaaacaaaaaaaaaaagacaaaccagcgaaaacagacacggaaacaacaaaagagcacaaagaaaaagaaacaccacgcgaaccgggcgagaggcagaagagggagcggaaggagagaaaaagggccagaaagcgacacagcgcggaacaacccgcggacacacaagaagaggaccagcgagaccca

SEQ ID NO: 384017 - DNA, 1096 bp, Homo sapiens
tcacaggactatttgagtaattttccattatactctgcatggcccagagagatttaaagttaaagcagagtaccacttttgtaaataaaatgaaatcaaactctaacaattgtaaggcatgattttccaagcctccggggtttagggcaagtaactgctgccgtccctgccggctccaaccctgttggtctcctgaggcctggttctctgggttgtacatttcttttagaaccaccccagtttatttctgaccttgtgcccacatcccatagtcatggtgcagcatatatatttttttttttaataaccctggatgtgcaggtggtcatatttcctaaggtttcaataaagaatgtatctcagaacaccagggtaggaatggctcttaagtttgcactgggtgcttgaggtaagattaggcagacccagagggtagtggagactttgaccttatcatgaaactctttaaatatcataattttgaaaacataagatatgaggtatttcagagcagtactctattctctaggcactaaagatagaagtgaatgaagctcttttttcctgacttctcagcctcctcacaatcccttggtgagtggccctcttttggacaagtgcaggggctgagtgtggaggttgagtgtcatgtccacagacacatgtgacaggaagaagtattttgagcataagaacttggttcctggctgttgaattgttcttaaggcatcatatctagaagcaaagaaaaaagaaaaataacaatttaagttgtgtaaattgtttgcctttatatattacatttggtaaaatcagtgcttaaatacgcaatgatttaaactggaaaaaaaaaaaaaaaaaaaaaaaaaaaaaaaaaaaaaaaaaaaaaaaaaaaaaaaaaaaaaaaacaaaacaaaaaaaaaaagacaaaccagcgaaaacagacacggaaacaacaaaagagcacaaagaaaaagaaacaccacgcgaaccgggcgagaggcagaagagggagcggaaggagagaaaaagggccagaaagcgacacagcgcggaacaacccgcggacacacaagaagaggaccagcgagaccca

SEQ ID NO: 384018 - DNA, 424 bp, Homo sapiens
ccactttgtcatgaccaagttggtctctgctcagataatctcactgccttccaattatattttatagggcatgcttcatcttctcagaggttttcaaagctgcccacagcccagccctaagcctacctcgcattactctgcaagaagcctctttgctcagagattagaactgcaatgttcatgagaggtcacctactcatccctttcactgaagaagtggggaaaacaaggctcagacagggtgagtaccttgaccaaggccacaaaaattagtgtccatgcaggaattggaaccaaggcccttttcatctcagttcagtggtttttttgtttttgttttgttttgtttttagagatggggtcttgttcggtcacccaggttgcagcctggaactcctgggctcaagcgatcctcctgcctcag

SEQ ID NO: 384019 - DNA, 5865 bp, Homo sapiens
ggcctacggctgtggggcgcgcagagtccacctggcggccaagggcgctggcgaccgctgaagctcctgggggtgttcggggtccgggctgcgcctgtgcccgcgggaaggctgggcgcttcccacacacagaccccgctccgggccagccccgcagggagactaccagggctggcggtagctgggcgtggtcgggtcgggggcggctgtgggcggccggcaggcagcgcgcggggcagccctcggcagacggccaatggcggcggtgctcggggcgctcggggcgacgcggcgcttgttggcggcgctgcgaggccagagcctagggctagcggccatgtcatcaggtactcacaggttgactgcagaggagaggaaccaagctatacttgaccttaaagcagcaggatggtcggaattaagtgagagagatgccatctacaaagaattctccttccacaattttaatcaggcatttggctttatgtcccgagttgccctacaagcagagaagatgaatcatcacccagaatggttcaatgtatacaacaaggtccagataactctcacctcacatgactgtggtgaactgaccaaaaaagatgtgaagctggccaagtttattgaaaaagcagctgcttctgtgtgatttcttccaaaatacataagtctgagaggctaaacttgatggctgtgttaacatatgtcacgtgtagcacagtggagaaagcaggatatggctcataatgacagtggtgaagacctgcgaatgaagttgctagttaacacctacattagggtttgacataggtctatgttatgggtcgctgcatctgctggaactcacagactttactatagagaatcaaagatcccgtatccgaagtctatggaaatgctcatggtggtaaattccaacagaatgaaacaccaaacttgcttaaagtaactcacgtttcaatttgaaagagatattgtcaaaattggaggcccccaggttcctgtctgttccaaatctttgcatgatgacagtggtttctctgatgtggtaagctttggctttcttctgttttctttctaaaagatcactggagtagagaggagttaaacagacatgacctttgacctcttgcatgacctccacagatagcaaaccgggccgacacatggttgacgatgtccttttctacaatgaagttaatgaaagttctgaaaatagtgattactttctgacattgataggatttaggaaacctctggataaatagcttaagcatggctgtttatgtttttgctatagacaaaaagcagcagcatgtacattgtatttggacacaagcctgcctcggttaatatattgaactattggaccactagggttagtagggagcggtctgtacactttctgattcagcattcagaaacattctaggtggactctgtagctttcagttttgtaaagttatcggaaaaacatcgggagggtttggccatcatatgtgagctttgtgtttcaatgccagttactcaggattagtaaattaatgactgtccagaggacttcagggtcaccaagctgctgcacctgccattggctgactctccccggctatctgtggctgagatggtgctgcttaggtcacgcagagcatgagctgctgctgaaagggcacaggagatggcccttgggcttctcatcccaggatgcctgccctgcccaccaatccatgagaagatatgtatgatttcagtaggccctggatcagcttgtcacctctggtttcctgtttgctttccactcactcagctggagtttcatttccagactaaagtcttcatcattggcttcagaaacagcattcatctgtggctgtgctgatgtagtacaccaagaacaactgggctcttctctgtcactttcagtgggctaccttccctcacctctccaagcagcatgaaagaattctttacatttttaatctcttttttgtttttccctgaaagtatgctttggtgcttaaagagagaagtcacaaaagtatactactgagtttcctggagatgaaatcctgttgtccctagctatgtgaatgagcacagggatccctgatgccattattttgtatattcatacggcacacacttactgagggccttctgtgtgccctaggggattgagcacagtgacatatcagggcaggtagaaacagatggagagctgatgcgggctgtcttagagcagctgccccaggaggcccctgtggatggatgttgggcaggagccctgagacgttaggggcatataactaaaggacatagcaggagttataggaggagctgatccctgagggaaacaatgaagacggagaagatggggctaaagtttgaattgtggggacattaatcacggtgattcttaaaactttgctgttgatgattttaaatggagaaaatgagtacgtaagatgttatttcccagttcagtatataggttgcccacaaagtattttcctaccatgaatggtcatatatacttgttgtagaataccagggacagcagagatggtggggtagttacttccttttcttacagcccaagaactttggtgtccaggagattgaccaatttagccactgagcatttaatacaacacagggctacccagatcccactgtcctgatttgccctgaaagccaaaggagtcaggagaaggtgagtggggtgaatatattaatcctgagagttgaacagagcaaaaatccctattacttttgtacttaaaacatctctgccacatgtgctcactctttatattctgtttaggtggtttatatgtgcacatcccatcctatgcctgcagttagccaactcagggtttatattgcctcctttctttttttcttttttttttttttttttaagagatggggtctcgttctgtcatgcagactggagtgcagtggtgtgatcacagctcattgtaacctccaacgcctggactgaagtgatcctcctgccttggcctctctggtagctgggactacaggtgcatgccaccacacccacctaattttttttatttttattttttgtagagacagtctcactatcttgctcgggctggtcctgaactcctgggctcaagttatcttgctgcctcagcctcccatgggtaatctttatttccttttttttttttttttggagatggagtttcgctcttgtcgcccaggctggagtgcaatggcacgatcttggctcactgcagtctccacctcctgggttcaggtgattctccatcctcggcctactgagtagctgagattacaggcaactgccaccatgcgcggctaatttgtgtatttttttttagtaagagatggggtttcgccatgttggccggactggtcttagactcctgacctcaagcgacctgcctgccttggcctcccaaagtgctgggattacaggcatgagccgctatgcctcgtcgctgatttttatttcttattttttttttagagatgggggtctcactatgctgctcaggctgatctcaaactcctggcctcaagtgatcctcccaccttagcctcccaagttgctgggattataagtgtgagccactatccctacctcactattaccttctttgcttctcttgttttcttttgttctaagtcaaacccatcacaatcttttcttgtccttccaggtgttttccagtgctgtgccctggatgtgctctctttctcttagagcccagagaacttgcttttcccccttatatatgacccttaactttttctaacacattattaagggcctgtgtctatcagctgggggcacttcttgaagggagggcctttgtgtggtctgtttctagtgacttccagctttaacccagagcctcatgattgctgggtgcccatagcctttttgctgaatggaggcactcagtctccttgggaagagagaatccatgatagacccacttgggagctccccacttcaggggcctacacactggtaatgcaacagaatgcccaagagtgacctcataaagcaaggattcccttcgtggccccttctctgctgcctctcagaatccagacgctaaggaaaatccctaagcagagattttctgttggatgctaaaagcaaggaataaaagttgaaaatttggaaaatgtctcaacaccgtcaccagcgccactcgagagtcatttctagttcaccagttgacactacatcggtgggattttgcccaacattcaagaaatttaagtaaatattatctatctccattgcctgttaagaaatgtgctagtagaagtgtgagggcagggtgtcagtgttctctcagcctcttccctcagatactcgtctgcttaccaaaataagttgcatgtccttgacaatctggtttctatgattggtgaggctggcatgctattacctttatgtgccctgtagacttgaatgaccagtttgaccagtttgactgttagataatcagaaggcttttctctttttttataatagaccccatctcaaatcagataatgaaaattacatatcttgatatattagaaaagtatatacattctggctgggcacggtggctcacgcctgtaatccctgcactttgagaggctggggcggatcacttgaggtcaggagtttgagaccggcctggccagcgtggcgaaaccccatctctactaaaaatacacagattagcccggagtgatggtgtgcacctgttgtcccagctactcaggatgctgaggcaggagaatccctttaacctggggggcgaaggttgcagtgagccaggattgcaccactgcactccagcctgggtgacggaacgggactctgtctcagaaaaaaaaaaaaagaagaggaaaaagaaaaatatatattctatatttttttaacttatgagaatgtgttcatttcatttgtaacatataatgggaaacagtaatacgtactctgagaaaaattgcaaagcacagataaatggaaataaacaggaaaaagaatcacctataacctcaccatccatagacagacactgttaaaattttggcatatttcctgctgattttttctactgctgatttttgcacaggtgagataattttgaacagagaattttgtatctttggtttttgtgtttcgctgcacacaaaaacaaaagatataaaaatggatcataaacatttttctaaatcctgaaaagtgcatagacatattttagtgcctgtatttcacaagatggacataccataatttacttacacagtcctttttgttagatgtttaagttgttttcaagcttctcagtgctggaaaaaatactgagatagacatgtttagttgaagttatttcatttcaggttatattatcttgggtcagagaatgaatggttctcaggcttttcaaaagagctggtcagtttttatgcctctggcagtttttgagagtgctcaatcatactacactgttgccagcattagatcttatcacatttaagtcattgctaattttataaacaaaaacaatggttttactttgcatctccctgattggtattgctgtagaacatatttggagaagtttgtttgtctttggtgtttatttcatgaatagattgtgtgcccattttctcttggggtattcagttttttattactgatgtgagcatgtgtatgggtgattatttgatgattatcagttttgcttagtagactggcaatatttagtcttgctgtcactgtgttcccagtgcctactagattgcttgatatgtagttgccactcaataaagatttgttgagtcaaaaaaaaaaca

SEQ ID NO: 384020 - DNA, 548 bp, Homo sapiens
aggtgacttagaggatccccaggcgctggaggcagagcctagggctagcggcatgtcatcaggtactcacaggttgactgcagaggagaggaaccaagctatacttgaccttaaagcagcaggatggtcggaattaagtgagagagatgccatctacaaagaattctccttccacaattttaatcagcatttggctttatgtcccgagttgcccaacaagcgcctgccaggcgcttgttaggcgcttgttggaggaagacagtgaatacctaagtcacaactgtaaacataaatggaggaaggggcttggggtccccatgacatcatcccccctcttttaagctagctgagggcccccagtccccagcacagtgtgagagaagaagcagggtgtcagacaccttcctgggcctacggggagccaggggccttggaagattaggttggcgcactctgctcaggactgagagcaatcacaccccaggacccagcgaggtcagctgtgtgctccccagattggaatcgtgcccaggccaacaagcgcctgg

SEQ ID NO: 384021 - DNA, 1419 bp, Homo sapiens
ggcctacggctgtggggcgcgcagagtccacctggcggccaagggcgctggcgaccgctgaagctcctgggggtgttcggggtccgggctgcgcctgtgcccgcgggaaggctgggcgcttcccacacacagaccccgctccgggccagccccgcagggagactaccagggctggcggtagctgggcgtggtcgggtcgggggcggctgtgggcggccggcaggcagcgcgcggggcagccctcggcagacggccaatggcggcggtgctcggggcgctcggggcgacgcggcgcttgttggcggcgctgcgaggccagagcctagggctagcggccatgtcatcaggtactcacaggttgactgcagaggagaggaaccaagctatacttgaccttaaagcagcaggatggtcggaattaagtgagagagatgccatctacaaagaattctccttccacaattttaatcaggcatttggctttatgtcccgagttgccctacaagcagagaagatgaatcatcacccagaatggttcaatgtatacaacaaggtccagataactctcacctcacatgactgtggtgaactgaccaaaaaagatgtgaagctggccaagtttattgaaaaagcagctgcttctgtgtgatttcttccaaaatacatgtaaaatcttgtacacatcttagctgcaatgtatgttgaaggaaatttatgtgaacaaatagagttgttctttttctcttttttttaagacagagtgttgctctgtcgcccaggccagagtgcagtggtatgatctcggctcactgtaacctccgcctcccaggttcaggtgattctcctgcctcagcctcctgagtagctgggattacaagcacgtgtcaccacgcctggctaatttttgtatttttagtatagacagggttttaccacgttggtcaggctggtctcgaactcctgacctcgtgatccgcctgcctcagcctcccaaagtgctgggattacaggcatgagccaccatgcctggctgttgaattgttcttaaggcatcatatctagaagcaaagaaaaaagaaaaataacaatttaagttgtgtaaattgtttgcctttatatattacatttggtaaaatcagtgcttaaatacgcaatgatttaaactggaaaaaaaaaaaaaaaaaaaaaaaaaaaaaaaaaaaaaaaaaaaaaaaaaaaaaaaaaaaaaaaacaaaacaaaaaaaaaaagacaaaccagcgaaaacagacacggaaacaacaaaagagcacaaagaaaaagaaacaccacgcgaaccgggcgagaggcagaagagggagcggaaggagagaaaaagggccagaaagcgacacagcgcggaacaacccgcggacacacaagaagaggaccagcgagaccca

SEQ ID NO: 384022 - DNA, 4998 bp, Homo sapiens
ggcctacggctgtggggcgcgcagagtccacctggcggccaagggcgctggcgaccgctgaagctcctgggggtgttcggggtccgggctgcgcctgtgcccgcgggaaggctgggcgcttcccacacacagaccccgctccgggccagccccgcagggagactaccagggctggcggtagctgggcgtggtcgggtcgggggcggctgtgggcggccggcaggcagcgcgcggggcagccctcggcagacggccaatggcggcggtgctcggggcgctcggggcgacgcggcgcttgttggcggcgctgcgaggccagagcctagggctagcggccatgtcatcaggtactcacaggttgactgcagaggagaggaaccaagctatacttgaccttaaagcagcaggatggtcggaattaagtgagagagatgccatctacaaagaattctccttccacaattttaatcaggcatttggctttatgtcccgagttgccctacaagcagagaagatgaatcatcacccagaatggttcaatgtatacaacaaggtccagataactctcacctcacatgactgtggtgaactgaccaaaaaagatgtgaagctggccaagtttattgaaaaagcagctgcttctgtgtgatttcttccaaaatacataagtctgagaggctaaacttgatggctgtgttaacatatgtcacgtgtagcacagtggagaaagcaggatatggctcataatgacagtggtgaagacctgcgaatgaagttgctagttaacacctacattagggtttgacataggtctatgttatgggtcgctgcatctgctggaactcacagactttactatagagaatcaaagatcccgtatccgaagtctatggaaatgctcatggtggtaaattccaacagaatgaaacaccaaacttgcttaaagtaactcacgtttcaatttgaaagagatattgtcaaaattggaggcccccaggttcctgtctgttccaaatctttgcatgatgacagtggtttctctgatgtggtaagctttggctttcttctgttttctttctaaaagatcactggagtagagaggagttaaacagacatgacctttgacctcttgcatgacctccacagatagcaaaccgggccgacacatggttgacgatgtccttttctacaatgaagttaatgaaagttctgaaaatagtgattactttctgacattgataggatttaggaaacctctggataaatagcttaagcatggctgtttatgtttttgctatagacaaaaagcagcagcatgtacattgtatttggacacaagcctgcctcggttaatatattgaactattggaccactagggttagtagggagcggtctgtacactttctgattcagcattcagaaacattctaggtggactctgtagctttcagttttgtaaagttatcggaaaaacatcgggagggtttggccatcatatgtgagctttgtgtttcaatgccagttactcaggattagtaaattaatgactgtccagaggacttcagggtcaccaagctgctgcacctgccattggctgactctccccggctatctgtggctgagatggtgctgcttaggtcacgcagagcatgagctgctgctgaaagggcacaggagatggcccttgggcttctcatcccaggatgcctgccctgcccaccaatccatgagaagatatgtatgatttcagtaggccctggatcagcttgtcacctctggtttcctgtttgctttccactcactcagctggagtttcatttccagactaaagtcttcatcattggcttcagaaacagcattcatctgtggctgtgctgatgtagtacaccaagaacaactgggctcttctctgtcactttcagtgggctaccttccctcacctctccaagcagcatgaaagaattctttacatttttaatctcttttttgtttttccctgaaagtatgctttggtgcttaaagagagaagtcacaaaagtatactactgagtttcctggagatgaaatcctgttgtccctagctatgtgaatgagcacagggatccctgatgccattattttgtatattcatacggcacacacttactgagggccttctgtgtgccctaggggattgagcacagtgacatatcagggcaggtagaaacagatggagagctgatgcgggctgtcttagagcagctgccccaggaggcccctgtggatggatgttgggcaggagccctgagacgttaggggcatataactaaaggacatagcaggagttataggaggagctgatccctgagggaaacaatgaagacggagaagatggggctaaagtttgaattgtggggacattaatcacggtgattcttaaaactttgctgttgatgattttaaatggagaaaatgagtacgtaagatgttatttcccagttcagtatataggttgcccacaaagtattttcctaccatgaatggtcatatatacttgttgtagaataccagggacagcagagatggtggggtagttacttccttttcttacagcccaagaactttggtgtccaggagattgaccaatttagccactgagcatttaatacaacacagggctacccagatcccactgtcctgatttgccctgaaagccaaaggagtcaggagaaggtgagtggggtgaatatattaatcctgagagttgaacagagcaaaaatccctattacttttgtacttaaaacatctctgccacatgtgctcactctttatattctgtttaggtggtttatatgtgcacatcccatcctatgcctgcagttagccaactcagggtttatattgcctcctttctttttttcttttttttttttttttttaagagatggggtctcgttctgtcatgcagactggagtgcagtggtgtgatcacagctcattgtaacctccaacgcctggactgaagtgatcctcctgccttggcctctctggtagctgggactacaggtgcatgccaccacacccacctaattttttttatttttattttttgtagagacagtctcactatcttgctcgggctggtcctgaactcctgggctcaagttatcttgctgcctcagcctcccatgggtaatctttatttccttttttttttttttttggagatggagtttcgctcttgtcgcccaggctggagtgcaatggcacgatcttggctcactgcagtctccacctcctgggttcaggtgattctccatcctcggcctactgagtagctgagattacaggcaactgccaccatgcgcggctaatttgtgtatttttttttagtaagagatggggtttcgccatgttggccggactggtcttagactcctgacctcaagcgacctgcctgccttggcctcccaaagtgctgggattacaggcatgagccgctatgcctcgtcgctgatttttatttcttattttttttttagagatgggggtctcactatgctgctcaggctgatctcaaactcctggcctcaagtgatcctcccaccttagcctcccaagttgctgggattataagtgtgagccactatccctacctcactattaccttctttgcttctcttgttttcttttgttctaagtcaaacccatcacaatcttttcttgtccttccaggtgttttccagtgctgtgccctggatgtgctctctttctcttagagcccagagaacttgcttttcccccttatatatgacccttaactttttctaacacattattaagggcctgtgtctatcagctgggggcacttcttgaagggagggcctttgtgtggtctgtttctagtgacttccagctttaacccagagcctcatgattgctgggtgcccatagcctttttgctgaatggaggcactcagtctccttgggaagagagaatccatgatagacccacttgggagctccccacttcaggggcctacacactggtaatgcaacagaatgcccaagagtgacctcataaagcaaggattcccttcgtggccccttctctgctgcctctcagaatccagacgctaaggaaaatccctaagcagagattttctgttggatgctaaaagcaaggaataaaagttgaaaatttggaaaatgtctcaacaccgtcaccagcgccactcgagagtcatttctagttcaccagttgacactacatcggtgggattttgcccaacattcaagaaatgaggaacgatgatgaatgtcgggcatttgtgaagagagtcataatgagccgtttctttaagataattatgattagcactgtcacatcgaatgcgttttttatggccttgtggaccagttatgacataaggtaccgcttgttcagacttcttgagttctcggagatcttctttgtgtccatctgcacatctgagttgtccatgaaggtctatgtggaccccatcaactactggaagaacggctacaacctgctggatgtgatcattatcatcgttatgtttttaccctatgccctccgccagctcatgggcaaacagttcacttacctgtatatcgctgatggcatgcagtccctgcgcatcctcaagcttatcggctatagccagggcatccggacgctgatcaccgccgtggggcagacagtctacaccgtggcctctgtgctcctcctgctcttcctcctcatgtacatcttcgctatcttgggcttctgcctgtttggatctccagacaatggtgaccatgataactgggggaacctggctgcggcttttttcaccctcttcagcttggccacggttgatggctggacagacctgcagaagcagttggacaatcgggaatttgctttgagccgggcattcaccatcatcttcatcttgctcgcctctttcatcttcctcaacatgttcgtgggtgtgatgatcatgcacac

SEQ ID NO: 384023 - DNA, 717 bp, Homo sapiens
cgttgggactttccctctcagacatttattggttcattcattcgttcattttgctgtaactcacagtggcccccatcctaaggtgcactgctgggattggtctatgtgctgatgatgttctccttgtcttcagagtagagacggagtttcaccgtgttagccaggatggtctcgatctcctgacctcgtgatccgcctcgtgatcctcctgatcctcgaagccgcccgcctcggcctcccaaagtgctgggattacaggcgggagccaccgcgcctggccgttccctgggtcttttgagtggtgtgagttgaatggtggtagattctaggacagttcagtaggagcccgtcctcaaaaggaaaataacagaacttcctgctaatctggtattggggctgagcaattactgcacactgatgagattgaccataattgcatcctgagtttgaagaggaggtcacgctactaagacgagataaaatcagctccaacgacaaacatcatctctgggggtttccagattctcaattttcatttaatccccagccttagtggaaagcaagagtcggagtcggcattctgggcagggaggcaggtgaggcaggtacacatctcctcttctccccaacgccccatgtttctatttctgaataaaatgaaccatcatggtgctaaggtaaagctaaactagctgagccacctcctgaagaggacat

SEQ ID NO: 384024 - DNA, 764 bp, Homo sapiens
agcggacggggtcgagtcagtgccgtttgcgccagttggaatcgaagcctcttaaaatggcagatgatttggacttcgagacaggagatgcaggggcctcagccaccttcccaatgcagtgctcagcattacgtaagaatggctttgtggtgctcaaaggctggccatgtaagatcgtggagatgtctgcttcgaagactggcaagcacggccacgccaaggtccatctggttggtattgacatctttactgggaagaaatatgaagatatctgcccgtcaactcataatatggatgtccccaacatcaaaaggaatgacttccagctgattggcatccaggatgggtacctatcactgctccaggacagcggggaggtaccagaggaccttcgtctccctgagggagaccttggcaaggagattgagcagaagtacgactgtggagaagagatcctgatcacggtgctgtctgccatgacagaggaggcagctgttgcaatcaaggccatggcaaaataactggctcccaaggtggcagtggtggcagcagtgatcctccgaacctgcagaggccccctcccccagcctggcctggctctggcctggtcctaggttggactcctcctacacaatttatttgacgttttattttggttttccccaccccctcaatctgtcagggagcccctgcccttcacctagctcccttggccaggagcgagcgaagccatggtcttggtgaagctgccctcctcttctccc

SEQ ID NO: 384025 - DNA, 551 bp, Homo sapiens
ttttaaaatatttaagtatcagagaaagtcattttaacagagaaaaatcaaaatcatttcaggctgcaacaaatttctatagaataactgtatcagtatttcaaccaatatacatgtcttgactgaaagctataaactggctcactgcaacgtccacctcccgggttcaagtgattctcctgcctcagcctcctgagtagctggaattacaggcacacaccatcactcctatttttttttgtattcttggtggagacagggtttcactgtgttggccaggctggtcctgacctcaagtgatccacccatctcggcctgtaatcccagccccctgggagacagggcaggcagatcacctgatgtcaggagtttgggaccagcctggccaacatgatgaaactccatctctactaaaaatacaaaacttagccaagcatggtggcaggcacctgtaatcccagctacttgggagcctgaagcaggagaatggcttgaacctgggaggcagagtttgcagtgagctgagaacaagccactgcactccagcctgg

SEQ ID NO: 384026 - DNA, 1123 bp, Homo sapiens
ttttaaaatatttaagtatcagagaaagtcattttaacagagaaaaatcaaaatcatttcaggctgcaacaaatttctatagaataactgtatcagtatttcaaccaatatacatgtcttgactgaaagctataaactggctcactgcaacgtccacctcccgggttcaagtgattctcctgcctcagcctcctgagtagctggaattacaggcacacaccatcactcctatttttttttgtattcttggtggagacagggtttcactgtgttggccaggctggtcctgacctcaagtgatccacccatctcggcctcccaaagtgctgggattacaggcatgagccactgagcccagccagacttttcaatgtttaagtggatttttttcaccctctaaagttttaaggaaaagttattaatctttaaatgtaaaaacattcatgagtcccaagcatagcaatatttaggcatattctgttctaggaaagaataaagcagagacttgaccaagatagggatgtcatcaattcaggaaacattatcaagcaaatatggaaagtagaaatcaaataactgtttttctcattaactttcaccctgttcttccctggtatgttggcaattccctgcgcatgctaagaaaaaaaaaaaaacagtcacaaagctttgttattcaaagcttggtgttatgtacaagtctgagaattggcttttggaaaaaaatttatgatgaccaaataaaatgtaccattttaatgaagtctgtggacaaggttcaattagattggttattttaaaatgattcattgattattttaaactgattacttaaagaaaaatatcaaaaagtatacagttttaaggccgggcatggtggctcatgcctgtaatcccagccccctgggagacagggcaggcagatcacctgatgtcaggagtttgggaccagcctggccaacatgatgaaactccatctctactaaaaatacaaaacttagccaagcatggtggcaggcacctgtaatcccagctacttgggagcctgaagcaggagaatggcttgaacctgggaggcagagtttgcagtgagctgagaacaagccactgcactccagcctgg

SEQ ID NO: 384027 - DNA, 2088 bp, Homo sapiens
cctctgggctgccatttgcagggaatttcatgtacatattcagacatgcagacttgcacaactgcttattatagaaatattctttgttactaagtgtctaacagacttaaacatacagggtttccgtatatggagaaaagtgattccacccactccatgccctggcacgtcatgatgccagcccttagatttatttggcttccagaatttaaatagacagtgatgtaaatcagaagttagtgtttcacctactggcactaagtaactaaatcatcacattggtgatgaggaaggtaaatccttttcagtttggctacagaatggaaataacatttattacaatatgatctaagttatattgacaacagaatgatttatttctatgttataaaagatgaagaaggagaggagaatacagagaagttaaatggtttggcagtgatcacacaacaagccgaaagtagaatccaagtctctctggagtcccttctctgatcaaagtttcatcttattgaatgtcacagcattataaagtgagataaatgtatctcaccacacatgtgcttagtgaattattctcagtagatagcttcttctatttttaaacattttgttctgagattttaaaatttcaattctattctcttatgttttaaaaccgtgttcacagatttgagctaaaatgggaatcgaagagtgactttggcatttttccatgactattcttgtattgatcttaaactggcatcacacgtgttccaggagggcacttgttttgcacaacagttttacaaactagctgtctataagaggcagttcattaaaatttaatgtttttaaatgatctttagatgtatagaattttttaaagactacatattagagaaagcatgcatacaaaatatttttttttttgcccagtagtggtgataatagctaacatttattgaactcttactctgtaatagccactgttccagtgattaactctttattttaattttttttaattttatttttattatatattgacaaattacagttacatatttatggggtgcaaagtggtgttaagattttttaatacaatgtggaaagattaagttaagctagttagcatatccatcacctcgatatttaacattttttgtgacgagaacattagagatttactgttagtgatattgaaatgtatataacaattatattcaccatgctgtgcaattgatctaaaaaaggatcaaacttattcttcctgcctaactggggctttgtaccctttgactgtaatctccttttccccgctacccccttggccgctggtaaccaccattctactgtctacttctatgagtttagtcgtttttcaatgcaatctctataaaaattccaatgccatttctcatacatatagaaaaataatcctaaaatttatataaaaccacagagaaacccaagtagccaaggcaattgtaagcaaaaaagaacaaagctggagcattacactactagatttcaaactactgtattctataaaatgatagtaattagaacacattgtacagtataaaaaaagacacattgaccagtggaacagggtagagagcccagaagagaacccatgcaactgtggtcaattgatcttcaacaaatgtatcaagaatatacagtaggaaaggacagtgtcttcaataaatggtgtttggaaaattggatatccatatgcaaaagagggaaatcgaacccttacctcacaccacctacaaaatcaaatcaaattggattaacatcttcagcataagacctgaaactgttaaactactggaagaaaacataggagaaaagctaaatgacattgtgtctggacaatgatatttatagttattaaatatttttatttaaatcctcaaaacaactctatgagatattattattcccattttatggataaggaaactgatgtacagagtgattaaatgacttgctagaggctaggtgcagtggcccatgcctgtaatcccagcactctgggtggaaggatcgcttgaggccaggagttcaagaccagcttaggcaagactctgtctc

SEQ ID NO: 384028 - DNA, 709 bp, Homo sapiens
  misc_feature (3)..(3): n is a, c, g, or t
  misc_feature (234)..(234): n is a, c, g, or t
  misc_feature (696)..(696): n is a, c, g, or t
ggncaaggttttgccatgttggtcaggctcgtcttgaattcctgacctcaggtgatccacctgccttggcctcccaaagtgccaggattacaggcgtgagccaccacacccggctggaagactgtttctaaagtcagacaaaggatagactaaatgtgttttctgagaaacgttagtctagggaatctgagaggccagaacctctatcatgagtaaaagaatcatggctcatantctctagttttcatctcatactgttgacttctaatcgagttccttgttttagtaacaaataaaataaatgttttctgctctcaaatctacagggactttattaaaattggaggaacaacatttgacagtcttttgaacgtttagaaaaataggatttattgtggctaagtctaaaaggtctcatgattacaattgactgaaaaggaaggaatgcattgctttccatgcgtggtgacttaattttatgtgcagtactatgcaatacacagagacttacctaactgctgttcttggagggtctattaggcattaaagtgtaagtatccctattgttatttacactaggaaaaaaagcatacctcaggtctttgagaatccaggaaagctttgttttagaatattgctccagcacttgcagtgagccgagatcccgccactgcactccagcctgggcgacagagngagactctgtctc

SEQ ID NO: 384029 - DNA, 2303 bp, Homo sapiens
  misc_feature (2187)..(2187): n is a, c, g, or t
  misc_feature (2303)..(2303): n is a, c, g, or t
atgcgaggcttcgggccaggcttgacggccaggcgtctcctcccgctgcggttgcccccgcggccgcccgggccccggctggcgagcgggcaggcggccggcgccctggagcgggccatggacgagctgctgcgccgcgcggtgccgccgacgccggcctacgagctgcgcgagaagacaccggcgcccgccgagggtcagtgcgcggacttcgtgagcttctacggtgggctggccgagacggcccagcgggccgaactgctgggccgcctggcgcggggcttcggcgtggaccacggccaggtggcggagcagagcgccggcgtgctccatctgcgccagcagcagcgggaggcggcggtgctgctgcaggccgaggaccggctgcgctacgcgctggtgccgcgctatcgcggcctcttccaccacatcagcaagctggacggcggcgtgcgcttcctggtgcagctgcgggccgacctgctggaggcgcaggccctcaagctggtggaggggccggacgtccgggaaatgaatggggtgctgaaaggaatgctctcagaatggttttcctccgggttcctgaacctagaacgggttacctggcattcaccgtgtgaagtgcttcagaaaatcagtgaggctgaggctgtgcatcctgtaaaaaactggatggacatgaagcgccgcgttgggccctacagaaggtgttacttcttttctcactgttcgacccctggggagcccctggtcgttttgcacgtggcactgactggtgacatctccagcaacatccaggcaatcgtgaaggaacatcctccatcagaaacagaagagaagaacaaaatcactgctgcgatcttttattccatcagcttgacccagcagggactccaaggggtggagctgggaacattcctcataaagcgagtcgtcaaggagttgcagagagagtttcctcaccttggggtgttttcaagtctgtcacctatacctggtttcaccaaatggcttctggggcttctgaactcgcaaacgaaggagcatgggaggaatgaactctttacagattcggaatgtaaggaaatctcggagatcacaggtggccccattaacgagaccctcaagctcctcctcagcagcagcgagtgggtgcagtcggagaagctggtgcgggcgctgcagactccgctgatgaggctgtgcgcctggtacctgtatggagagaagcaccgcggctacgcgctgaaccccgtggccaacttccacctgcagaacggggcggtgctgtggcgcatcaactggatggcggatgtgagcctcagaggcatcaccggctcctgcggcctgatggccaactaccgctacttcctggaggagacgggccccaacagcacctcctacctcggctccaagatcatcaaagcctctgagcaggtcctcagcctagtggcccagtttcaaaagaacagcaagctctgacagtaaacctctcctaaagcacagggccccggctaagaaaacgatcattttcaggaggggccgggagttatgtatctgaagcagctttccaagcaaagccaaagttgactgtgttcttgtcccgcagccggtccacactgtgaggccaggcctcaacttccctcaccctgggcgtgacatgcacccagtgcaagacggttgtgggtgcgggtgcacacaaatgagtgggttgctgtgctgtctccggaagattctgtcgttgcccttggcctggctccctgcccggggctggtgctgtggtacctacatcttcaggaagctgtgcagcctctgccattgccatcccagggggatctggcatcctcctaaggaccggggcgcgtggcccagataagaataggtgttcctttgtgctcataaaacagaatgcggcgatggttgctttagccgtttctcaccatgcaatgcagagggacaaagggctgtgctacacttcccagttacattctgaagctcataaatgtatgagaaggtttgtgattttgcacaaggtgtgtgtagtaagttaaattgttgaacacaaaaatgttgctgcttgaggcataagttggataataggctttaaatgatcagggattcaggttcataatgaacttcacagtaaagaacacgtttgttctgtaaaaaaaaaagaactaattttgnaaaccatgttggccggctcggccaaatgatttttgattgagcaaggttttgcttggggcgcaatttaagctcctttggcaattcccctttagtgagggggttacaaataacgggcn

SEQ ID NO: 384030 - DNA, 1120 bp, Homo sapiens
taggctagtacgaggcctggtggtgtggaatgtaaggaaatctcggagatcacaggtggccccattaacgagaccctcaagctcctcctcagcagcagcgagtgggtgcagtcggagaagctggtgcgggcgctgcagactccgctgatgaggctgtgcgcctggtacctgtatggagagaagcaccgcggctacgcgctgaaccccgtggccaacttccacctgcagaacggggcggtgctgtggcgcatcaactggatggcggatgtgagcctcagaggcatcaccggctcctgcggcctgatggccaactaccgctacttcctggaggagacgggccccaacagcacctcctacctcggctccaagatcatcaaagcctctgagcaggtcctcagcctagtggcccagtttcaaaagaacagcaagctctgacagtaaacctctcctaaagcacagggccccggctaagaaaacgatcattttcaggaggggccgggagttatgtatctgaagcagctttccaagcaaagccaaagttgactgtgttcttgtcccgcagccggtccacactgtgaggccaggcctcaacttccctcaccctgggcgtgacatgcacccagtgcaagacggttgtgggtgcgggtgcacacaaatgagtgggttgctgtgctgtctccggaagattctgtcgttgcccttggcctggctccctgcccggggctggtgctgtggtacctacatcttcaggaagctgtgcagcctctgccattgccatcccagggggatctggcatcctcctaaggaccggggcgcgtggcccagataagaataggtgttcctttgtgctcataaaacagaatgcggcgatggttgctttagccgtttctcaccatgcaatgcagagggacaaagggctgtgctacacttcccagttacattctgaagctcataaatgtatgagaaggtttgtgattttgcacaaggtgtgtgtagtaagttaaattgttgaacacaaaaatgttgctgcttgaggcataagttggataataggctttaaatgatcagggattcaggttcataatgaacttcacagtaaagaacacgtttgttctgtaaa

SEQ ID NO: 384031 - DNA, 2167 bp, Homo sapiens
atgcgaggcttcgggccaggcttgacggccaggcgtctcctcccgctgcggttgcccccgcggccgcccgggccccggctggcgagcgggcaggcggccggcgccctggagcgggccatggacgagctgctgcgccgcgcggtgccgccgacgccggcctacgagctgcgcgagaagacaccggcgcccgccgagggtcagtgcgcggacttcgtgagcttctacggtgggctggccgagacggcccagcgggccgaactgctgggccgcctggcgcggggcttcggcgtggaccacggccaggtggcggagcagagcgccggcgtgctccatctgcgccagcagcagcgggaggcggcggtgctgctgcaggccgaggaccggctgcgctacgcgctggtgccgcgctatcgcggcctcttccaccacatcagcaagctggacggcggcgtgcgcttcctggtgcagctgcgggccgacctgctggaggcgcaggccctcaagctggtggaggggccggacgtccgggaaatgaatggggtgctgaaaggaatgctctcagaatggttttcctccgggttcctgaacctagaacgggttacctggcattcaccgtgtgaagtgcttcagaaaatcagtgaggctgaggctgtgcatcctgtaaaaaactggatggacatgaagcgccgcgttgggccctacagaaggtgttacttcttttctcactgttcgacccctggggagcccctggtcgttttgcacgtggcactgactggtgacatctccagcaacatccaggcaatcgtgaaggaacatcctccatcagaaacagaagagaagaacaaaatcactgctgcgatcttttattccatcagcttgacccagcagggactccaaggggtggagctgggaacattcctcataaagcgagtcgtcaaggagttgcagagagagtttcctcaccttggggtgttttcaagtctgtcacctatacctggtttcaccaaatggcttctggggcttctgaactcgcaaacgaaggagcatgggaggaatgaactctttacagattcggaatgtaaggaaatctcggagatcacaggtggccccattaacgagaccctcaagctcctcctcagcagcagcgagtgggtgcagtcggagaagctggtgcgggcgctgcagactccgctgatgaggctgtgcgcctggtacctgtatggagagaagcaccgcggctacgcgctgaaccccgtggccaacttccacctgcagaacggggcggtgctgtggcgcatcaactggatggcggatgtgagcctcagaggcatcaccggctcctgcggcctgatggccaactaccgctacttcctggaggagacgggccccaacagcacctcctacctcggctccaagatcatcaaagcctctgagcaggtcctcagcctagtggcccagtttcaaaagaacagcaagctctgacagtaaacctctcctaaagcacagggccccggctaagaaaacgatcattttcaggaggggccgggagttatgtatctgaagcagctttccaagcaaagccaaagttgactgtgttcttgtcccgcagccggtccacactgtgaggccaggcctcaacttccctcaccctgggcgtgacatgcacccagtgcaagacggttgtgggtgcgggtgcacacaaatgagtgggttgctgtgctgtctccggaagattctgtcgttgcccttggcctggctccctgcccggggctggtgctgtggtacctacatcttcaggaagctgtgcagcctctgccattgccatcccagggggatctggcatcctcctaaggaccggggcgcgtggcccagataagaataggtgttcctttgtgctcataaaacagaatgcggcgatggttgctttagccgtttctcaccatgcaatgcagagggacaaagggctgtgctacacttcccagttacattctgaagctcataaatgtatgagaaggtttgtgattttgcacaaggtgtgtgtagtaagttaaattgttgaacacaaaaatgttgctgcttgaggcataagttggataataggctttaaatgatcagggattcaggttcataatgaacttcacagtaaagaacacgtttgttctgtaaa

SEQ ID NO: 384032 - DNA, 2113 bp, Homo sapiens
atgcgaggcttcgggccaggcttgacggccaggcgtctcctcccgctgcggttgcccccgcggccgcccgggccccggctggcgagcgggcaggcggccggcgccctggagcgggccatggacgagctgctgcgccgcgcggtgccgccgacgccggcctacgagctgcgcgagaagacaccggcgcccgccgagggtcagtgcgcggacttcgtgagcttctacggtgggctggccgagacggcccagcgggccgaactgctgggccgcctggcgcggggcttcggcgtggaccacggccaggtggcggagcagagcgccggcgtgctccatctgcgccagcagcagcgggaggcggcggtgctgctgcaggccgaggaccggctgcgctacgcgctggtgccgcgctatcgcggcctcttccaccacatcagcaagctggacggcggcgtgcgcttcctggtgcagctgcgggccgacctgctggaggcgcaggccctcaagctggtggaggggccggacgtccgggaaatgaatggggtgctgaaaggaatgctctcagaatggttttcctccgggttcctgaacctagaacgggttacctggcattcaccgtgtgaagtgcttcagaaaatcagtgaggctgaggctgtgcatcctgtaaaaaactggatggacatgaagcgccgcgttgggccctacagaaggtgttacttcttttctcactgttcgacccctggggagcccctggtcgttttgcacgtggcactgactggtgacatctccagcaacatccaggcaatcgtgaaggaacatcctccatcagaaacagaagagaagaacagggtggagctgggaacattcctcataaagcgagtcgtcaaggagttgcagagagagtttcctcaccttggggtgttttcaagtctgtcacctatacctggtttcaccaaatggcttctggggcttctgaactcgcaaacgaaggagcatgggaggaatgaactctttacagattcggaatgtaaggaaatctcggagatcacaggtggccccattaacgagaccctcaagctcctcctcagcagcagcgagtgggtgcagtcggagaagctggtgcgggcgctgcagactccgctgatgaggctgtgcgcctggtacctgtatggagagaagcaccgcggctacgcgctgaaccccgtggccaacttccacctgcagaacggggcggtgctgtggcgcatcaactggatggcggatgtgagcctcagaggcatcaccggctcctgcggcctgatggccaactaccgctacttcctggaggagacgggccccaacagcacctcctacctcggctccaagatcatcaaagcctctgagcaggtcctcagcctagtggcccagtttcaaaagaacagcaagctctgacagtaaacctctcctaaagcacagggccccggctaagaaaacgatcattttcaggaggggccgggagttatgtatctgaagcagctttccaagcaaagccaaagttgactgtgttcttgtcccgcagccggtccacactgtgaggccaggcctcaacttccctcaccctgggcgtgacatgcacccagtgcaagacggttgtgggtgcgggtgcacacaaatgagtgggttgctgtgctgtctccggaagattctgtcgttgcccttggcctggctccctgcccggggctggtgctgtggtacctacatcttcaggaagctgtgcagcctctgccattgccatcccagggggatctggcatcctcctaaggaccggggcgcgtggcccagataagaataggtgttcctttgtgctcataaaacagaatgcggcgatggttgctttagccgtttctcaccatgcaatgcagagggacaaagggctgtgctacacttcccagttacattctgaagctcataaatgtatgagaaggtttgtgattttgcacaaggtgtgtgtagtaagttaaattgttgaacacaaaaatgttgctgcttgaggcataagttggataataggctttaaatgatcagggattcaggttcataatgaacttcacagtaaagaacacgtttgttctgtaaa

SEQ ID NO: 384033 - DNA, 1008 bp, Homo sapiens
atgcgaggcttcgggccaggcttgacggccaggcgtctcctcccgctgcggttgcccccgcggccgcccgggccccggctggcgagcgggcaggcggccggcgccctggagcgggccatggacgagctgtgtggcgcatcaactggatggcggatgtgagcctcagaggcatcaccggctcctgcggcctgatggccaactaccgctacttcctggaggagacgggccccaacagcacctcctacctcggctccaagatcatcaaagcctctgagcaggtcctcagcctagtggcccagtttcaaaagaacagcaagctctgacagtaaacctctcctaaagcacagggccccggctaagaaaacgatcattttcaggaggggccgggagttatgtatctgaagcagctttccaagcaaagccaaagttgactgtgttcttgtcccgcagccggtccacactgtgaggccaggcctcaacttccctcaccctgggcgtgacatgcacccagtgcaagacggttgtgggtgcgggtgcacacaaatgagtgggttgctgtgctgtctccggaagattctgtcgttgcccttggcctggctccctgcccggggctggtgctgtggtacctacatcttcaggaagctgtgcagcctctgccattgccatcccagggggatctggcatcctcctaaggaccggggcgcgtggcccagataagaataggtgttcctttgtgctcataaaacagaatgcggcgatggttgctttagccgtttctcaccatgcaatgcagagggacaaagggctgtgctacacttcccagttacattctgaagctcataaatgtatgagaaggtttgtgattttgcacaaggtgtgtgtagtaagttaaattgttgaacacaaaaatgttgctgcttgaggcataagttggataataggctttaaatgatcagggattcaggttcataatgaacttcacagtaaagaacacgtttgttctgtaaa

SEQ ID NO: 384034 - DNA, 591 bp, Homo sapiens
tggtacctgcctgtgcctgcacctgacactcaggcctctggggaggcccgtagagatactggcaaatctgaggcaagggcagggttgagggacactgcaggctaacaccatgcagattttaggaaccacatggtaaaatgaaaaatggaaaccagtgtcccattagggatccaactgtcaaattatttgaagtttgtgtgtttgaaaaaatgattaaaaggtgatgggtacatggtagtcattataccattctctctgtatttatgtatatttgaaaatttctgtaataaatttctaaaaatggtaagtatgttctctaacacatgcccttactcttgttacatcgggggtagaggcagaaattcagggatggattcagaaagaactgagacacagttaccagtctccatctccaatcagttaagcacagcaattcaaatcataggagaatgggacgcgcactggccacattctaaggttacatgtgaggggagtctcagcagaccttcaaggagtcctaagaataacgtggcaacagcaaactaaattctgcatgtttgtacgtataagtgggagctaaacattgaatac

SEQ ID NO: 384035 - DNA, 453 bp, Homo sapiens
tgaaatgtgagatgcaggggaaaaaatgaaatgaagactttaaagtggacgtggccaatttacttatgaatttttagctccatcacttattaactgtgtgattttgggcaagtcacttaatttctgtgaacgtagttttttctttgtaaaattgagacaataatagctctcttacagggttgttttgaggacattaatatatataaatgtaggggaaaagaaatatttttcccattgctatgttcatggctgaggctcctgtagcaaaagacattaacgagagaggtcgggcgtggtggctcacgcctgtaatcccagcactttgggaggccgaggcaggcggatcacctgaggtcaggagttcgagacagcctgaccaaaatggtgaaaccccgtctctactaaaaatacaaaaaattagccgggcgtggtggtggcgcctgtagtcccagc

SEQ ID NO: 384036 - DNA, 407 bp, Homo sapiens
ccattctttatgaaataggaaaatgacactctaagaagttattctttatggcttggggaaatgaaaaaagagaaaccgtattagataaaatatttccatcacaagacaccaaatattcatcatcccttgtgttctaacatgacttaatttttttattattattattatttttaaatcttttcatatacgttgaccaggctggtctcgaactcctagcctgggcaatatggtgagaccccatctttataaacatttaaaaattagccatgcatggtggtatgcatgtatagtcccagctacttggctgaagtgggaggatcacttgagcccatgaagttgaggctgcagtgagccataatcacaccactgcactccagcctgggcgacagagcaagacactgcctcaa

SEQ ID NO: 384037 - DNA, 352 bp, Homo sapiens
ataaacatgacatggtatagtagaagatggtaagtgctatggggaaaaatgcaacagagtaaggaggattatatgttgtgaaggggcagagggaagtgctggttgtaattttattttatttttccgtccattacttatcagtctcagtacttgtgagtttaaatagagtggtcagggtagatctcattgagatgaaaagaaggaattaaccaagcagatacctatgtaagtgcattctgtgcagaggccttaaggaaggatgatgcttgtgtgtacatgggaaaacaaggaggccgtggaggctggagcacaagagagtattaggagtagaggtcagatcatgcaggacctt

SEQ ID NO: 384038 - DNA, 3729 bp, Homo sapiens
acttaatggttaaaaagcaatgataaaactggacattaatgaaattgatttttagttacagttggaataagttttttaccaaaaagaaaccagagacgttagttaaggagacttaaaaagatctgaaatatgaaaagagaatgagaagatgagcagaagataaatttgtgggacacaagtataacttggggtagaaactggagaagagaatcgaaaaacaataatgccagaaggacccttggtatgaaagtactaatggaatgtgattcatagaaagttcatagaaagtgagtccttgcaacttgagaaacatacatacatatatatttataatctctaaagcaacatcaggaatcttctaatatatgataaagaatttgtgtagaattacgttgttcacagtattattggagagacaaataagatttcaaggaattcatttataatcaaaagtgaaatgtgtcttcttgaaaccagcaagaaatagatgaattgagtgaaacgtgttgttattaggagaagtgggataacgtatacaaaaagaacttgcgatctgaatatgatctgaatatgagggtggataggaattttttgacagtgaaatctgttatgatgtagtctcatttccaagaaaagtcttgagttccatccccccttctgaatttaaattgaaacctggacagaaaacaaactatcctgtagtttccactgctcaggaggaaaaaaagaaatctatattatctaatgcatctttgccatctttattttctagaattctattagacttttcaattataggctattaggaaagaatataactcttagaattcccctaaatataattatcaactcatttgattaatatgcatattttttcccgtaagatttacaatacacgtgtgttttagtgaattaccaatggcttggagagaatgaaattggaataactaactgaaaaccctagatgtttgtagcattgagacccaatatctttttggaggccctctccatgttagcttattgtcaaattctggtgtgtaaacaaactccttgacccatgttaagttcagcatcctgcattttgttcatgaatcacattttaaaaggagaaaagctcctaagtttttttaaacagtgatttcaaagagaagataggcctttcataattgctaattatacatataggattaatagtcataaattatagtaaataaaacttgtacctattccttttataaatatgaattggctaggcacagtggctcacagctgtaatcccagcactttgggaggctgaggcgggcagatcacaaggtcaggtgtttgagactagcctggccaacatggcaaaaccctgtgtctactaaaaatacaaaaattagccaggcgtggtggcaggcacctgtaattccagctactcaggaagctggggcacgagaatcacttgaaccctggtggcagagtttgcagtgagctgagattgttccactgcattcctgggcactgcctgggtgacagaatgagactctgcctcaaaaaaaaaaaaagttattaaaaatagatatttaagattccaaaatgtagttgatccagtttgtttccctgtagcaagtagtgggatttgggtttcatgacatataattaaaatgttaatcacataactataatgccaacaattttctttatacatttttgtttaattatgttgacatatactttgtgttgtaccttatttcatgttactaaattttacataaagatgctggtctatttttatttaatcatatactgttatggtttgaatatagtttgttcctaccaaaactcatgttgaaattagattccccatgtgctagtgttgggaggcagagcctaatggaaggtgtttgggtcatgggggcagatagatcccacatgaataaactaatgccctcctactggggtgagtgagttctcattcttgctgtcgtgggaatggattagttctcacaagcaagggttactaaagagtctggctttcttgattttctcctttttgcctcctgccttcccatgtgatctctttgcacatacctactcccctttcactttgtaccaagagtggaagcaacatgagaccctcaccagatacagctgcccaatcttgagccttccagccaccagaatcatgagccaaataaaactctttttaaaaataagttacccagtcttagatattctattatagcgacacaaaatggactaagctgtactctgttgcattaaaatgtgttgtttatatgcaagtgacaaaaactcaaaatagtgtcagcatgaagggcagttcattggcttatatacagggaagtccaggcaatgactgggtcctgggtccaaacgtcaaaagcagtcatcttgccatcctacacacttggctctgattattttcttctttatggattggttttcttttcagattttccctttggggatattctgtatgggatgaggaacagtgaggtgagaggatggtggataacagcaattgacattttcagcttaccttagcataacaaggctgaaagcttttataaagcaagctatgtaaaattttggagaagtacttttattttgcccagattggatcacattccgttcctgagctaatcaagagaggaattcacccaaaggagggggaaatttttagaagaaagccagaatgtagggagcaggtgaggaaaggtagttactgggaatacgaaagtaacacattcattgcaccctgtttgaatttgagtagcaagaagtttctgatttgtactaacagaaggagtaaagttcagatttaatctgcaagtcttgattgtttttaactagagattttaatctcttcttcttattattgctgctttgagttgccattataggtttttggattttttttttaatgccatccatttttatttgacatcatgttgttgctagtttgagcagatgcacatagcatatgtttccattaccaatttggaaatttttcccagtggcatcagcatttgagagatactgattttgaaattagagtactaggggaaaatgcttcaaaaatgaagactacttaaataaaaattggctttaaataaacctttggggatctgtacttgactaaaaagtattttctttaaactttggtctttgaaaactaaagtgtgtgtgcatgtgttcattaaaatgacctataacatgaacattttccatactggagtgtgatgtactgtactcattttgaactttagaaccaaatgcatcctttagcatttgatgagctgctatataattctatttccagttttattttcttgccaaataaagtaccaaagctcagcctgatatttggtaacccctgacttggtcccaacctaattttacagcttgcttactctctcattcactctccttttcaaactgcttcagtcacataaaacatcaaggaccaatttcattctgcatgtgggtatacagttttcccagcatcatttattgaagagattattttttcctcattatgtcttggtagccttgtcaaagatagttgcatgggtttatttctgggatctaatctgttcctttggtctatgtgtctttttatggagaacaatgctgttttgattactatagctttgtaatatattttgaagttgggtggtgtgatgccttcagcttgttctttttgctttggccactcaagctcct

SEQ ID NO: 384039 - DNA, 952 bp, Homo sapiens
gcgctcagcccgttgccgcgccggccctgcggacgtgcgcgcgctgccttcgcggcacctgggcctgaggtgcgtgcctcccgggccctcgccagctccagatgcgtgaggaggacttcagaaacccgactgagaagtggagcgacccccagggagggtcggacctgcctcaataccgccaaggtctttcatttcttgttcgcttactttcgtgaaatcctcacatcgttttaatggtactagtcaagacaagaaaatcaacaggctttcagccttgaggcaacattggatattattgagacatctgtggaatttaagaacagtatggagctcatcagagtatatcattgaagaatatgatggctgaaaacaatttaaaaatgctaaagattcaacagtgtgtggtagccaacaaactacctagaaacaggccatatgtttgcaatatttgttttaagcactttgaaacaccatcaaaattagctaggcactatctcattcatactggtcaaaagccatttgaatgtgatgtgtgtcataaaacctttagacaactagttcatctggagaggcatcaactaactcatagtctgccttttaaatgtagtatttgtcagcgtcactttaaaaatctgaagacatttgtgaagcaccaacaacttcacaatgaaacctatcagaataatgttaaacaggtcagaagattgctggaggccaagcaagaaaagtcaatgtatggagtgtataatacttttaccacagaggaaagatgggcattacacccgtgctctaagtctgatcccatgtatagcatgaaaagaagaaagaatattcatgcatgtacaatctgtggcaagatgtttccatcacagtcaaaacttgataggcatgtacttattcatactggtcagaggccttttaaatgtgtcttgtgtactaaatcttttcgaca

SEQ ID NO: 384040 - DNA, 280 bp, Homo sapiens
gcgctcagcccgttgccgcgccggccctgcggacgtgcgcgcgctgccttcgcggcacctgggcctgaggtgcgtgcctcccgggccctcgccagctccagatgcgtgaggaggacttcagaaacccgactgagaagtggagcgacccccagggagggtcggacctgcctcaataccgccaaggccttttatttatggctagtttgctctcgtgaaatactaacatcgttttaatggcactcatcaagtacgcaaatgatatgatttaacctcgcgcaat

SEQ ID NO: 384041 - DNA, 3078 bp, Homo sapiens
gcattcttttctgcaatgctgacacttccttctagttacaccctttggcactctaatctgtggtcttagttttagtcactgatgaagatatttggcacattaactcttatttcagttaacaccagatgaagtgaactcaattcctcttctcacacaaaagttggccccaaactagttcaaaaatatatttgaattctttcttggctagtgtcggttatttgtgtccctttagtgatctgattaatatttgcttttgtgatggttgtcacatcaagatagctgcaagcattgttaaagagacatttgataagagggactacttacctggaattcacccccagaccaccgaaatcttaactactgatgacagttttgtgtatcctttaaggagctcttgaactctgaattctatagagaaaataaaaagatttgttgaaaatgactgaccccatgtgggttgagaactatatccagttaactaaactgtaaacagctaactgaatctgttaacagttaagtatgttatctataaaataagcttcaagtagcactgtgttgtaacttcttggtgcctccaaattaagagttaaacccttagatctggctaaggaaatgactttatcctagcccaaaggagaccttttcctcaactcttcctccattatttttattctctattgtttactcatcgtctcatatgtcccctgtcatgttacattggaatcatttcttttagatgcaaactgcagctgatgtgttcattgggtctattgcagcccccaccaagtgttcacttctggtgagaggcatatccagggcctgagtgctggaacccaaagatgacaagggtggagcattgatgagttaacctcgcagctggagggtctgtgctgcatagtctccccttgggccatgagagcacatgcttgagaattacataagcctgtagcagggcagggctcagggctacggaattgataacaccagtgggactaaggcatccaccatctgttctttgttatgttcatgcccatcaccaaagtaaaaatcacagtcatccttctctccaccatttctgtctcaatcaatcacttcctcctaggctggccaaattatcttcttcaacttgccagaggaagagggaatgtcttttggtaaggcacagaggagcccttggttttccagttacactcctgctaattgcagagatttctcagttcgtggtaatcatggaggcttgcatctttaagcgcttgccatctgcaaaaactggccccagttgctatccggagatggcatctcccactgaaatctgcatgaactttgtccctgtgggctgcagggacctgagtagttttcaagtccctggcttttgataggaagcaaaaagcttctagattgagtacagcctgaaaaaggaagagaaatcgtgatacttcctgtgttgcaataacaaacacccgtcctaactgctgctagacagggaactggcagtttaacctcttcctgctcactagggaggtggggcagggcgagtgggagtggggagctcccctttcttgcaggctccatccacagaacacttcctacaaaccccttcctgcctttgtaatcctagtggtgcaaagctgccctgtctgctctgtgcagagccctctctgtgctctgcctcgcctgtgccctctctaattgccctcttccttacaaaatccagctgccggttgaggcttctctccctgaatttacagccatctaatcaactggtaatttactttcaatcagtgccggattgtgttcctcagattcatatctcctttttcatttagtgaggaaatgattgcctttcctctttaccatttgttttaaatattagctgccatgttgtgccgagcaatggtctcttaaatacgaaggtacgatctggcagttcaagacagcatttgtccaaagctgtctgaacacttacagtgtgctcgaggcaagtccgcatgcctaggactggggtagcgtctgtcatgctgtcttatgccccagtgacttaagttcttcagttgtcagtgtcaaatcttgatttctagaggctccttgttatttaattccagccaggaactgatttccttgcaggcttctgtgaggccatcctgaatggctgcagtggggtgaggatggtctggggctgtgctatgaggctttgaccctgaagtttcacctgttaagatctgaaaaactgcaggccaagaacattaacaggttgttttgtggcttgtggggcaggttgagtagcacagaagagaagctggggagatggagagagagcaggcaaggggagagtcagagatgaaatgagtgaccagtgggtcagctgaggctcatccgcccagaccctgctcttaggcatatcttgaatgtgtccctggacatgctcttacatgtgaatgatgttagtaagtctcatcctttctgctgagaagcactttcctagtaggacaggatcggggctgaggaactttcgaccccagcccactttctagctatttgctcttattaaaaatcttcctgctggccaggcacagtgactcaagcctgtaatcccagccttctccttgtggccctgctgtttccaggatcgtctcaagccagacatgtgaaccactcagccactgaggctctcggagaactcagggaaagagcccctgggcaaggcacaaacgggtttcagctgctacgccacgcagtgaaacgggacctcttaccaccgcgcaccccaccttaccaagggacaggccagcagcacagacaacgctgtggataaggagagtagagacttcctcttcctgcctcctgtcttctggagttgtgaccgcagggtggcccaggtggatcggcttcagaggccaggaggcagctctctgcagccgaagagcaggagcctcacccagggtctgtggctctgactaagcctggactgcctctcggctgtgctccgtggactggctcctcagggatccatgtgagagaccggagtatgatcctcagtgcgaggacaaataaaagtagtgattatttccaccccaaact

SEQ ID NO: 384042 - DNA, 794 bp, Homo sapiens
gtgggatagtagcgtgtccacattgtcctttgagaatgagaagtcatcctggagcacagctcttcccacgctccgggcccacacacccagcctcactccatcaaaggagccccgctgcctgcccacccaccctgggtgctttctggcttgcagtgctcttggcagacatgaggcaacgattgctcccgtccgtcaccagccttctccttgtggccctgctgtttccaggatcgtctcaagccagacatgtgaaccactcagccactgaggctctcggagaactcagggaaagagcccctgggcaaggcacaaacgggtttcagctgctacgccacgcagtgaaacgggacctcttaccaccgcgcaccccaccttaccaagtgcacatctctcaccaggaggctcgaggaccctcatttaagatctgcgtgggctttttagggcctagatgggccaggggatgttccaccgggaattagaaataccatctgccgtatgcagcaagggatctgcagactttttttctgccattctggtgagaaaaagcgtgacatttgctctgatccctggaataggtgttgcgtatcaaatacagatgaagaaggaaaagagaaaccagagatggatggcagatctgggatctaaaatataagctcccggaaggcagggatgttgaagtatcccaagggcttaaaggaatgtgtggcttatagtaggtgttcaataaatatttgttgaatgaatttagcaccaaaggtgaagagctgataaaagacatttttttaacttcctta

SEQ ID NO: 384043 - DNA, 887 bp, Homo sapiens
gtgggatagtagcgtgtccacattgtcctttgagaatgagaagtcatcctggagcacagctcttcccacgctccgggcccacacacccagcctcactccatcaaaggagccccgctgcctgcccacccaccctgggtgctttctggcttgcagtgctcttggcagacatgaggcaacgattgctcccgtccgtcaccagccttctccttgtggccctgctgtttccaggatcgtctcaagccagacatgtgaaccactcagccactgaggctctcggagaactcagggaaagagcccctgggcaaggcacaaacgggtttcagctgctacgccacgcagtgaaacgggacctcttaccaccgcgcaccccaccttaccaaggggatgttccaccgggaattagaaataccatctgccgtatgcagcaagggatctgcagactttttttctgccattctggtgagaaaaagcgtgacatttgctctgatccctggaataggtgttgcgtatcaaatacagatgaagaaggaaaagagaaaccagagatggatggcagatctgggatctaaaatataagctcccggaaggcagggatgttgaagtatcccaagggcttaaaggaatgtgtggcttatagtaggtgttcaataaatatttgttgaatgaatttagcaccaaaaaaaaaaaaaaaaaaaaaaaaaagaggggaaaaaaaaaaaataatgaaaaaaaaacaggatttgaaaaaaaatcctcgggggggggccggggcccgaattttcccaatagtggggctgttaaaaatcaatgggcgctcgtttaacaacgtgggggactggaaaaaccctggggttccccacttaatgcgttttgtggaaaatcccctt

SEQ ID NO: 384044 - DNA, 613 bp, Homo sapiens
gatgacatgtatttgcacaaaaattctcaggcacattaaattattgtaaactgaagtaaaacctgggtgctttctggcttgcagtgctcttggcagacatgaggcaacgattgctcccgtccgtcaccagccttctccttgtggccctgctgtttccaggatcgtctcaagccagacatgtgaaccactcagccactgaggctctcggagaactcagggaaagagcccctgggcaaggcacaaacgggtttcagctgctacgccacgcagtgaaacgggacctcttaccaccgcgcaccccaccttaccaagggacaggccagcagcacagacaacgctgtggataaggagagtagagacttcctcttcctgcctcctgtcttctggagttgtgaccgcagggtggcccaggtggatcggcttcagaggccaggaggcagctctctgcagccgaagagcaggagcctcacccagggtctgtggctctgactaagcctggactgcctctcggctgtgctccgtggactggctcctcagggatccatgtgagagaccggagtatgatcctcagtgcgaggacaaataaaagtagtgattatttccaccccaaact

SEQ ID NO: 384045 - DNA, 765 bp, Homo sapiens
tgccaggcggaggcctcagagcatcctcagacgtgtgtttccacttgcacaggatcgtctcaagccagacatgtgaaccactcagccactgaggctctcggagaactcagggaaagagcccctgggcaaggcacaaacgggtttcagctgctacgccacgcagtgaaacgggacctcttaccaccgcgcaccccaccttaccaagtgcacatctctcaccaggaggctcgaggaccctcatttaagatctgcgtgggctttttagggcctagatgggccaggggatgttccaccgggaattagaaataccatctgccgtatgcagcaagggatctgcagactttttttctgccattctggaaatgaaatgaaggaggtgggctcgatctcagactccatcagagcacagcagcctgggggtgtggaagcagagcctcacccaaggaccaaggggtctccaccagggacaggccagcagcacagacaacgctgtggataaggagagtagagacttcctcttcctgcctcctgtcttctggagttgtgaccgcagggtggcccaggtggatcggcttcagaggccaggaggcagctctctgcagccgaagagcaggagcctcacccagggtctgtggctctgactaagcctggactgcctctcggctgtgctccgtggactggctcctcagggatccatgtgagagaccggagtatgatcctcagtgcgaggacaaataaaagtagtgattatttccaccccaaact

SEQ ID NO: 384046 - DNA, 692 bp, Homo sapiens
gatgacatgtatttgcacaaaaattctcaggcacattaaattattgtaaactgaagtaaaacctgggtgctttctggcttgcagtgctcttggcagacatgaggcaacgattgctcccgtccgtcaccagccttctccttgtggccctgctgtttccaggatcgtctcaagccagacatgtgaaccactcagccactgaggctctcggagaactcagggaaagagcccctgggcaaggcacaaacgggtttcagctgctacgccacgcagtgaaacgggacctcttaccaccgcgcaccccaccttaccaaggggatgttccaccgggaattagaaataccatctgccgtatgcagcaagggatctgcagactttttttctgccattctggggacaggccagcagcacagacaacgctgtggataaggagagtagagacttcctcttcctgcctcctgtcttctggagttgtgaccgcagggtggcccaggtggatcggcttcagaggccaggaggcagctctctgcagccgaagagcaggagcctcacccagggtctgtggctctgactaagcctggactgcctctcggctgtgctccgtggactggctcctcagggatccatgtgagagaccggagtatgatcctcagtgcgaggacaaataaaagtagtgattatttccaccccaaact

SEQ ID NO: 384047 - DNA, 717 bp, Homo sapiens
gatgacatgtatttgcacaaaaattctcaggcacattaaattattgtaaactgaagtaaaacctgggtgctttctggcttgcagtgctcttggcagacatgaggcaacgattgctcccgtccgtcaccagccttctccttgtggccctgctgtttccaggatcgtctcaagccagacatgtgaaccactcagccactgaggctctcggagaactcagggaaagagcccctgggcaaggcacaaacgggtttcagctgctacgccacgcagtgaaacgggacctcttaccaccgcgcaccccaccttaccaagaaatgaaatgaaggaggtgggctcgatctcagactccatcagagcacagcagcctgggggtgtggaagcagagcctcacccaaggaccaaggggtctccaccagggacaggccagcagcacagacaacgctgtggataaggagagtagagacttcctcttcctgcctcctgtcttctggagttgtgaccgcagggtggcccaggtggatcggcttcagaggccaggaggcagctctctgcagccgaagagcaggagcctcacccagggtctgtggctctgactaagcctggactgcctctcggctgtgctccgtggactggctcctcagggatccatgtgagagaccggagtatgatcctcagtgcgaggacaaataaaagtagtgattatttccaccccaaact

SEQ ID NO: 384048 - DNA, 440 bp, Homo sapiens
gtgagcattcataaaacacaccctatcatcctcctggcaacatttcagatataaattatcgttcctgttttaaagctaagaggccaaagttcggttaaactggggcttgtccaaaagtacttagccttgtcagaatatataacccttggcagcgggctggggtcatcttctattctctgcactatatgagttaaatgtcaactctcttctgttgtatccataggggatgttccaccgggaattagaaataccatctgccgtatgcagcaagggatctgcagactttttttctgccattctggtgagaaaaagcgtgacatttgctctgatccctggaataggtgttgcgtatcaaatacagatgaagaaggaaaagagaaaccagagatggatggcagatctgggatctaaaatataagctcccggaaggcagggatgtt

SEQ ID NO: 384049 - DNA, 494 bp, Homo sapiens
aagtctctcttaggcacaggcacctctgcagggctctctgtcatgcctctagaggggagagccattgttccatccctgaagggaatgacttcctgaagggcattggcccctattagccttggctcagagtgaaacgcagcaaacgtgcatgcctcagaactggcagacacgttctcagccaggagtgccaccaacccacaccagcagatctgtgtaccagaaacacaaaataacatgaagggccactggggggctggagcctggttccataaggatgggacttctgggcaggtgccgttagacagcagcaccttcttttggcctcatgttcctcagaaatgaaatgaaggaggtgggctcgatctcagactccatcagagcacagcagcctgggggtgtggaagcagagcctcacccaaggaccaaggggtctccaccaggtgagatggggaggatgggaaccccgtccctccctgccagggtgctgcaggtga

SEQ ID NO: 384050 - DNA, 963 bp, Homo sapiens
gtgggatagtagcgtgtccacattgtcctttgagaatgagaagtcatcctggagcacagctcttcccacgctccgggcccacacacccagcctcactccatcaaaggagccccgctgcctgcccacccaccctgggtgctttctggcttgcagtgctcttggcagacatgaggcaacgattgctcccgtccgtcaccagccttctccttgtggccctgctgtttccaggatcgtctcaagccagacatgtgaaccactcagccactgaggctctcggagaactcagggaaagagcccctgggcaaggcacaaacgggtttcagctgctacgccacgcagtgaaacgggacctcttaccaccgcgcaccccaccttaccaagtgcacatctctcaccaggaggctcgaggaccctcatttaagatctgcgtgggctttttagggcctagatgggccaggggatgttccaccgggaattagaaataccatctgccgtatgcagcaagggatctgcagactttttttctgccattctggtgagaaaaagcgtgacatttgctctgatccctggaataggtgttgcgtatcaaatacagatgaagaaggaaaagagaaaccagagatggatggcagatctgggatctaaaatataagctcccggaaggcagggatgttgaagtatcccaagggcttaaaggaatgtgtggcttatagtaggtgttcaataaatatttgttgaatgaatttagcaccaaaaaaaaaaaaaaaaaaaaaaaaaagaggggaaaaaaaaaaaataatgaaaaaaaaacaggatttgaaaaaaaatcctcgggggggggccggggcccgaattttcccaatagtggggctgttaaaaatcaatgggcgctcgtttaacaacgtgggggactggaaaaaccctggggttccccacttaatgcgttttgtggaaaatcccctt

SEQ ID NO: 384051 - DNA, 894 bp, Homo sapiens
gatgacatgtatttgcacaaaaattctcaggcacattaaattattgtaaactgaagtaaaacctgggtgctttctggcttgcagtgctcttggcagacatgaggcaacgattgctcccgtccgtcaccagccttctccttgtggccctgctgtttccaggatcgtctcaagccagacatgtgaaccactcagccactgaggctctcggagaactcagggaaagagcccctgggcaaggcacaaacgggtttcagctgctacgccacgcagtgaaacgggacctcttaccaccgcgcaccccaccttaccaagtgcacatctctcaccaggaggctcgaggaccctcatttaagatctgcgtgggctttttagggcctagatgggccaggggatgttccaccgggaattagaaataccatctgccgtatgcagcaagggatctgcagactttttttctgccattctggtgagaaaaagcgtgacatttgctctgatccctggaataggtgttgcgtatcaaatacagatgaagaaggaaaagagaaaccagagatggatggcagatctgggatctaaaatataagctcccggaaggcagggatgttgaagtatcccaagggcttaaaggaatgtgtggcttatagtaggtgttcaataaatatttgttgaatgaatttagcaccaaaaaaaaaaaaaaaaaaaaaaaaaagaggggaaaaaaaaaaaataatgaaaaaaaaacaggatttgaaaaaaaatcctcgggggggggccggggcccgaattttcccaatagtggggctgttaaaaatcaatgggcgctcgtttaacaacgtgggggactggaaaaaccctggggttccccacttaatgcgttttgtggaaaatcccctt

SEQ ID NO: 384052 - DNA, 872 bp, Homo sapiens
gatgacatgtatttgcacaaaaattctcaggcacattaaattattgtaaactgaagtaaaacctgggtgctttctggcttgcagtgctcttggcagacatgaggcaacgattgctcccgtccgtcaccagccttctccttgtggccctgctgtttccaggatcgtctcaagccagacatgtgaaccactcagccactgaggctctcggagaactcagggaaagagcccctgggcaaggcacaaacgggtttcagctgctacgccacgcagtgaaacgggacctcttaccaccgcgcaccccaccttaccaagtgcacatctctcaccaggaggctcgaggaccctcatttaagatctgcgtgggctttttagggcctagatgggccaggggatgttccaccgggaattagaaataccatctgccgtatgcagcaagggatctgcagactttttttctgccattctggaaatgaaatgaaggaggtgggctcgatctcagactccatcagagcacagcagcctgggggtgtggaagcagagcctcacccaaggaccaaggggtctccaccagggacaggccagcagcacagacaacgctgtggataaggagagtagagacttcctcttcctgcctcctgtcttctggagttgtgaccgcagggtggcccaggtggatcggcttcagaggccaggaggcagctctctgcagccgaagagcaggagcctcacccagggtctgtggctctgactaagcctggactgcctctcggctgtgctccgtggactggctcctcagggatccatgtgagagaccggagtatgatcctcagtgcgaggacaaataaaagtagtgattatttccaccccaaact

SEQ ID NO: 384053 - DNA, 276 bp, Homo sapiens
aaattctcaaatattgctaatagtactgtggattttcctacattggtaaattgaaggaattgctaaatgctgaattcagcaaccagtttgagattgttgaaaataaagattgtttctttttcaatgcaagttcacagatcactggagttctagctacagtttgttctagaccagaggttgcagatatttttgtcctataaagagacacatggttaatatttttggctttgtgagttgtatagttttcgttgtagctgttcagctctgctacatgaa

SEQ ID NO: 384054 - DNA, 421 bp, Homo sapiens
gctgtgaagaatatgaagaggttagtattctcccccagtttggcagaggctggccatctgtgaactgcccatgctttctagaatgtcggagttttggagtgtgatgatgcgtctgtatatcatatctttctagtcttccattgcgctttcatttgttagtctcctcttgttttgccatttttctactccctcacatgtgcttttgcccttcttaaaaatattcttcgtctgtaatccgagcattttgggaggccgagagaccagcctgaccaatatggtgaaaatccgtctctattaaaaatacaaaaatgagccgggcgtggtggcagcgcctgtagtcccacctactcggtaggctgagacaggagaattgcttgaaccctggaggcagaggttgtggtgagcagagattgcgccactg

SEQ ID NO: 384055 - DNA, 410 bp, Homo sapiens
tcctctccttatcataacactatttaaaggaagaaattgtaggatgaaacggggttactcatgggagtactttgacgtgccaaaagtaaaacactgaaaaagaaaaaaggtcacttttctagcttcaaaaaccacaagggatgaatcaaatgctttgagacgtaatatgtgatgctcttctagaactgaagctgtgtgttctttcaatcccagtcaatgtggttgcttgtgtataccttaggtagataataaaattcattgttaaaaaaatgtacagctactgatttagggtggtttctaaaggtcactgtaaatgaatatgtttggaacagttgataaggcagaatgcaggacggagattttttctctcatttaacaagttagcaatttcttcaatccgttaaattacc

SEQ ID NO: 384056 - DNA, 1048 bp, Homo sapiens
gcactttgggaggccgaggtaggtggatcacctgaggtcaggggttcaagaccagccttgccaacatggtgaaccctgtctctactaaaaatacaaaaattagccgggcatggtggtgcatgcctgtattcccagctactctggaggctaaggcaggagaatcacttgaacccgggaggtggaggctgcagtgaatcaagattgcaccactgcacactagcctaggcaaaagagcaagactctgtctcaagaaaaaaaaaaaaaaagaatttataggaagatgaataattttttaaaattaaattataaaggaaccgcctttattgaaatcattatctttatctgaattccataacttaaaaatagcttttcccccattccctccctctcaacagtatgaaaataagaaaaaatgtattgcagttttaaaagaaagaagaaaatatgtatgactttagattggagtctcaggaaagttctgaaaagagggtggacaaaaggcttcagtatccttagggcacagtaaatctatttattcctccaccaacttgaagcctaaagccaaaactgtcatgctgtcacatagacaaacttctcaagacgtaaagctgaacttctcctaccttaaaatgaatgcaaactaccgaggaaatagcaaaatacccgaggaaataacaaactggaagagtattttggctttttcagtacctcctaaccacagcgttttagagctgaatttgaagataagctgagtaatttaaacaggataaaagtgtcattttcagattggatagagcaggaaaatatatggcttttgttttccttctggttgttactttttaccgaatctgggcaatctatctaaagaggggtcatagttctgacctctggctttgtgagcatattattgcacgcacggtatcaattggtcaccttcttttcctagccagcccttgaagctgtgttggtggcctgtgaccttccaatgcaatctagactgtggaactcactgtgtactgcgatccatgggcaaatggtgtgtgcagga

SEQ ID NO: 384057 - DNA, 690 bp, Homo sapiens
  misc_feature (282)..(282): n is a, c, g, or t
taagaatctgattcagctgatggagtgtggcttgtttttcaattttggtaattgggtctggaggaataattttatccctaatgcaggttggcagccgtgggtaagatccagtagttagtacatcaatggcatatgggatggcacaactaggcaggcgtgcatggaccagagcatctctagctaacgaggccaggcgatcagcagtgtccacaaacaggatggcttgctgatctaaaaagcttgaaatcatcgcacatttttccactttgccagcattattancccatttcactaaagctaataatcgaacgaagagttggcgtgtccggctagcaaactgcactatttctattttcctttccacatcagatttccttggcagtatgttgactgcccgaggcggaagtcgatcggcagagcggaagggggacctgcagaggaccttccgacaggtctgtgtctgttctctcagctgtctagcaccgcagcgctggggggcgcgtgggagtgaggcggtacctgtgagcgcgcgggagagcggaaaagggagccgcgcgccgccggaaaccagggtgagggctgagccggagtcgtcaccgggaacgtcagcagttgccccgcccttaccctcgccgctctccctcccgcctccgccccctggcgttgtaaaggcgacaatttgcccagaga

SEQ ID NO: 384058 - DNA, 910 bp, Homo sapiens
agcgggcactggggccatggcggcgcaggaccgggcttggcgcaacggcacacgatgcggtcctcgagcctcccgggcgctcggtcaccgcgccgaaacgggagcgggcagagtcgccaccgcctaccgccgggccgcctcagaacaggaagccgtgcgccgaccgcggaagcccgcccccatgtagcgagaagtccgccgaccccagggacaggagcaaggggcgggggaagacggggatgggggggaagcagggcggccccgcagaggggaagctgcgcctccgcaaacgctcagaagcagcttcgccagacagccgcaacgtacatgttgactgcccgaggcggaagtcgatcggcagagcggaagggggacctgcagaggaccttccgacaggttggtcagaccatgcccatggttcctcctctcgacttcactatgaatgccgcatctgttgaatgaatgcagtttctgctcttgcttttggatagaagtgattgcaaatcttatcaaaataatgaaaaaaattacttttcaattccttttcaacccttttgagtctgaggggcagctgtacattaaatgaaaccatatgtatcataatttcatttttccatcaaaagagctttaaaggaaattcccctttttctccatgttttcaatattttttgttccttttgttaaaatcagattaatctcatgaaacatctgaagcatttaagtcaatttaagagctgagaaaatatcatgctgctagttctgaaacgatctgaagtgtgaatcaggtgatcaccaaataggggaacaactgaaaaatgtgaatgaaagaagtatgtacctatactatagtgtcaaatattgtactgtaagctttaaaatgataaattggaaactttccaaaaaaaaaaaa

SEQ ID NO: 384059 - DNA, 543 bp, Homo sapiens
catacacagcagacgtgtgcctgtggagtggaattctggaaaagctcacagcccagaacataatgcagactcccccagccacagcaccttccaatcctgagaagagtgctgattctccatctgagcacccattctcctgcaacatcaggggagaggatttcacctaagggtcagaccagcgtctccaaacccagctccccacctttgcctgttggtggcacttgtgggagaaggggagatgatatgaaaagagccacaacaggagtcacctggacagggtggagcttgatggaaactgacatttgtgcccattggaggcaaatgtagaatttggtatcttccgtagcgtcaggcacatgaaactctccagtgcccatgacttttgacagtgacttcagagcacatctgggagacccatgtggcccaggctccacacagaggatacagaggaccaactgtataccacttcatgtgatgttggagtgctgttctgcacgcctaactttatggcttggtggatcagacaatgcccaatgtatgatg

SEQ ID NO: 384060 - DNA, 415 bp, Homo sapiens
cctcattccacacctcctcctgtgtgctccttactctactgagaatgaagccctccacaccacccgccatgcttctcagggaaacattagtagcctactttcagaagtcacctccactatcaatattccatgaaagcttaaccaaagcatttgggcagatttagtgctaggaaatataatttttatgtgcataaagaatatttaacacttaaaaaatttttattgtggtaaaaacacttaatgtaacatccaccctcttaataaatgcttaaatgagtaatacattgttgtttactattgatcaacactgttaacataaacaacaacaaattacaacaatgtgttgtcttttgcctattaaacggtcatggcagatgtcccatgctggtagggatttgataggatgaccactctc

SEQ ID NO: 384061 - DNA, 354 bp, Homo sapiens
ttcctgctgtctatagcatgtacccatttgtacctgttcatttgtggggggcgtggtgctcctggctgaactgaagccagtacaggccacagaagaagtcatgacctctgtctggggaaggaagagtgtgtagaggaagttttgggtgccaatgcccagggccagagagggagaaatctgtggagtgccttgtcctgacgtagacacatgggccaggtctgggctctactgagaaaggcattgatatgatgagcacatattattcttataattaaaacaacaacaacaacaaaaaaccaagttatccatggatagtccataagcaagcatggttgattctccctacagaatatc

SEQ ID NO: 384062 - DNA, 516 bp, Homo sapiens
atctgaagagaatcatagactttgttaataagattttcactgattcatgccacttcctcaaagaagtcttactttccctaccaaagactactggaatacctgttctacattttcataacaccctgcatacctccttcatataacttatcacaattttaattatacaaaaattatgtacttaattgtttaatgtttgtacctgctactaggctgtaagttccaggaggtgagagattaagtctgtcttgtttgccctgtctccaaaacatctagcacaggattttttacataacaatacttcataaatatttgttgagtaaatgattaaaattctttttgaaaactactgaaatttgtaggtcagtaaaatctagagaattatgcctcagaaattgccattaaattttttattgagaaatgaagcaagctcctctatgccatataaaaagaaaaaatgtaactacgtggcaatccttttcttatattagaaaaagaattacttctttctggaaggta

SEQ ID NO: 384063 - DNA, 391 bp, Homo sapiens
cccatcaccacttctattcaatactgtactggaggtcagctaaataaatcagttaaaactaacaagcataagagctgcaaggaaaaaacggtcactatttattcacaattacatgactgggtacagagacaatccaacataagctacagagaatatcagaattaataactgattaggcaaggggtacaaggccaatatgcaaaaatcattgtatttctatataccaacaacaaacagagaaaatgacatttaaagtagatacggctgggcacggtggctcatgcctgaaatcccagcactttgggaggccgaggcaggtggatcacaaaagtcaagagttcaagaccagcctggccaatatggtgaaatcccatgtctactaaaaatacaa

SEQ ID NO: 384064 - DNA, 365 bp, Homo sapiens
actcctcccaactaacaatgacccaaacaggcaggaaaatccctgcagctggccatagtggtgccaccgggtgggaagaaggcaggagaggaagcgcagaaggatcattaatcatgagagatgatcatcttaagagaagtgaggaggtgggagactcatattatttttatttatttattttttgagatggagtctcgctctgttgctcaggctggagtgcggtggcacgatcttggctcactgcaaactctgcctcctgggttcactccattctcctgcctcagcctcccgagtaactgggactacaggtgcctgccaccacacccggctaattttttgtatttttagtagagacagggtttcac

SEQ ID NO: 384065 - DNA, 408 bp, Homo sapiens
aatcgcttgaatccgggaagcagaggttgcagtgagccaagatcatgctactgcactccagcctgggtgacagagcgagactccgtctcaaaaaaaaaaaaaaagaaggggcagggcagaaaggtgcagaccacatccccagggaaacccacccctgagacccagggctgggggtgtgtcaagtaattgagggtgggcctgggggtgtaggcagtagggatgagggccacacttcagtgctgtaggtcacgccctcagggaggcaatctctggagaccccaagcctgtaatgaggacatgtgggagatgaacattgagaatgggctcctgtgggctgggtgcagtggcttatgcttataatcctagcaatttgtgaggccgaggtgggcagatcacctgaggtcagga

SEQ ID NO: 384066 - DNA, 576 bp, Homo sapiens
ctggcccagcagtcctgcttctgtgtgaactcagccaacaaatgcagccttctgttgtcccaggaagcacagacaccagagaaggcattcccaccaacaccagccactggtagccaggcaagccacacctgccagagctggcccagtggctctacttctacctgaatttgtcaagggacgcagcctcctgttgcactggaaacacccagacagcagggcagccaactgcatccacccacccccgcgtcctgtagccagatgggccacacccagtagtttccaatccagtggtcctgattctgcctgaactctgcaggcagggacaacctcgtgtttccccaggaagcacacagacagcagattggagctgacctggcaaggttacagcttgtctgccacctgtggcccttgcctaagggagctccatggaccagaacaccccaaaaaagaaatgcaaatagggagacagtaattggaaggggctcctccaagacctaggagtggactagaattgaaagcagttaaccaaacccaccttggtttggtttgccctgtagtcaaacccccaagggcatc

SEQ ID NO: 384067 - DNA, 788 bp, Homo sapiens
taggtttcacctattttaatttagtgaaatatttgggaagcctgattcattcgtagaatgatgggggacacattttctaaagcagggtagttttgttcaataaaaaataaatgtcagtgaggataaagaacctgcagttaagcgttaagctttgtggccagtcttgggattaaaatgagcactaaatccgagaaacaaacccatgtgacatcatctagggcagacctgcttttgacttcagtgagtgagctccaggagtgaattctcaggaggcacacacccagagagtctgcacaaatacattacacacccagggttcagcacttctcactggtccagtaagttgagatttgggtttgggatattttatatccacctagaaatatacatttggaaattaacccttttattaagagtcaagcttttataacaaatgtttaataagactcatatttgaatttttgagtttttcaaagcctgcttcttgaagctcttggtaataaggacctaaaatatctgaaataaaacttccctttccactttcctcctcttcttcttctttctttcacatcctgttttttttctcctctcttcctttcttctttttcttcctgtttctgcagacccttgcccttgtgtttaattctctcatcatgtatgtagtccctgctgtttgctcattgcataatcagcgctagaggaaagccaagaggtaaagtctcatcattccttaatgatgcaggtagcatccctgagctcctgtctgctttgtcactcatgttggaaag

SEQ ID NO: 384068 - DNA, 411 bp, Homo sapiens
ttgtttaccttgaagtgacaggctcacttcatacagtttcaagagactgtctgcccagatgcctaagtctaaaaccatagtttgtctatcattctttcaagtaaaaatggtggtcggtgaaaaaagaagctgctaaatcaatatgcaacttgaataatcgcccaaatgcttttccttgtgacaaccaccgtactctaccagtgtgcagcagaggcggtttatgcatatttcccatttcttcaaacaagtttaaaaagatgtactcaggatcaggcatggtggcccacacctcccagcactctgggaggccaagacgggtagatcactttaggtcaggagttccagaccagcctggccaacatggcgaaaccccgtctctactaaaaatacaaaaattagctgggtgtggtg

SEQ ID NO: 384069 - DNA, 308 bp, Homo sapiens
gaaagcatttgaactaagtctgtaaaaatggcagataataattaacacttggtagcaagaaacgctttctgaaatactgaaacactgcttgtttcactgtaacttatcacctagtgctgtatctgcatagtctcacaattcaactttatatccaacatgggtgttcatttctatttggataaaatttactgaaatatactagaaagaaaactggtcttaaaatgcaaaaggctctgccactaattcactgatcttaacttagtttactaattaacttcttattatagttttccaaatccgcatgcacg

SEQ ID NO: 384070 - DNA, 717 bp, Homo sapiens
cctcccagaggtatatctgttttagtttgtaatcaggaatgatcaaggaaaattatgtggcctctaaagcaggctgataatgttttgcataaatcggaaaggccaaggggtggaaatgactaggaagcagatttcagcttactgtaaaagagtatctacccttgaaatttgatgccctgtactaaatgtaggaggctgaaaaacaacatactactaagcatcaagttgctgagactctgcactggtcttctgaatacaaatattattattgactagtggttaattgtggtaatgataagtgttcataatcttattttgagatgtgatatccattccatatatgaagggagagccaaacaaacaaaccaaaaaaaggaaacaaacaaaaaaggaaataaaattcctcgtgtgacagtttatgctgagataaaggcagtggtaacatcaaaggatggtttgaaggagctttgaatagtccccataatatcatcagtccatcagagccactctaaataaacaggataaattttaaatgtgctcaatgtggttccaagctaagggcattggcccaatggtgtctgtattagttcgttttcatgctgctgataaagacatactcgagactgggaagaaaaagaggtttaattggacttacagttccacatagctggggaggcctcagaatcatggtgggaggcaaaaggcacttcttacatg

SEQ ID NO: 384071 - DNA, 1184 bp, Homo sapiens
cgcacttttccacctcagaagtgcctcagcagaaaggcgatgaacctcgggggtgcatcatctttctgttagaatgggagcatgagttttctgatcattttcccttcacagattcctccgccagaaatcttactcgcggcgccttcatttccgggtccgccattttgttgcctctgtttctccacgagggggggttaaaggcccccaaaacatgcacacatgaaaagggcaaaaagtaaccgtccttgacagggagtcttaactagagaaggaaacgggactaaactggcgggctccgtggaagcgtggccggcagcgtcccggacgaggagatgtctttggtggacttgggaaagaggttgctagaagcagcaagaaaaggccaagatgatgaagtgagaacgttgatggcaaatggcgccccattcaccacagactggcttggaacatcacccctccaccttgcagctcaatatggtcattattccacagcagaagtactccttcgagcaggtgttagcagggatgcccggactaaagtagacaggacccccttgcacatggctgcagccgatggacatgcgcacatcgtggaactgcttgttcggaatggtgcagatgtgaatgccaaggacatgctgaagatgacagctttgcattgggccacagagcgccaccatcgagatgtcgtagagttacttatcaaatatggagctgatgtccatgctttcagcaaatttgataaatcagcctttgacatagctctggagaaaaacaatgctgagattttggtcatcctccaggaagcaatgcagaatcaggtgaatgttaatccagagagagccaaccctgtgactgaccctgtgagtatggctgctccattcatcttcacgtcgggtgaggttgttaacctcgcaagccttatttcttcaaccaacaccaaaacaacctcagccaatacagaggaaattatagaaggaaattccgttgactcatcaatccagcaagtaatggggagtggaggccagagggtcatcaccatagtgactgatggagtccctctgggtaatatccaaacttcaatccctactggaggcattggccagccatttattgtaactgtgcaagatggacagcaagttctaactgtacctgctggtaaggttgcagaggagactgtaatt

SEQ ID NO: 384072 - DNA, 1130 bp, Homo sapiens
cgcacttttccacctcagaagtgcctcagcagaaaggcgatgaacctcgggggtgcatcatctttctgttagaatgggagcatgagttttctgatcattttcccttcacagattcctccgccagaaatcttactcgcggcgccttcatttccgggtccgccattttgttgcctctgtttctccacgagggggggttaaaggcccccaaaacatgcacacatgaaaagggcaaaaagtaaccgtccttgacagggagtcttaactagagaaggaaacgggactaaactggcgggctccgtggaagcgtggccggcagcgtcccggacgaggagatgtctttggtggacttgggaaagaggttgctagaagcagcaagaaaaggccaagatgatgaagtgagaacgttgatggcaaatggcgccccattcaccacagactggcttggaacatcacccctccaccttgcagctcaatatggtcattattccacagcagaagtactccttcgagcaggtgttagcagggatgcccggactaaagtagacaggacccccttgcacatggctgcagccgatggacatgcgcacatcgtggaactgcttgttcggaatggtgcagatgtgaatgccaaggacatgctgaagatgacagctttgcattgggccacagagcgccaccatcgagatgtcgtagagttacttatcaaatatggagctgatgtccatgctttcagcaaatttgataaatcagcctttgacatagctctggtgaatgttaatccagagagagccaaccctgtgactgaccctgtgagtatggctgctccattcatcttcacgtcgggtgaggttgttaacctcgcaagccttatttcttcaaccaacaccaaaacaacctcagccaatacagaggaaattatagaaggaaattccgttgactcatcaatccagcaagtaatggggagtggaggccagagggtcatcaccatagtgactgatggagtccctctgggtaatatccaaacttcaatccctactggaggcattggccagccatttattgtaactgtgcaagatggacagcaagttctaactgtacctgctggtaaggttgcagaggagactgtaatt

SEQ ID NO: 384073 - DNA, 667 bp, Homo sapiens
agatgtctgagtgggcaggaggtagttctagtttagattgtgttatcagggcaggtttctcaaggacgtagggttggagccttccaggtagatggcacagtcaaagaaaaggccctggggatgagaaccagcttgggaaaaaaagtaaccaaaactgagaaagatactatgtgagttcagagagggagatcaagaccagatcacttgcctaacacttttaaattctaattgtccatatagttaattaaaaataataatctgattttaacgctctaaagcttaaaaacatctagttcaaactgaacttcacccagttggtctgttttgttacaatattttttatcaaatataaaattgtacttaaaagagaaagttataaatgaataattccacccaggtgttcccaagtccaccagtcttttaaaatcactctttcccttcaagtataaatagaacacacactctttcataaaaagttacccaactcccatctgtaacagaaaaacctcaaatccttcctgagaatcattagcacttttcttcaagtaaatttgccctaatttactgcttttgctaaattttagtctcacttatatctatcctctgactcctttatttcctaatgaagagcctatttccttaattttctttagttgcactcccagcc

SEQ ID NO: 384074 - DNA, 429 bp, Homo sapiens
gttaaaaaattacaatgcatcttagagaatattggataaatatcaaattataaggtagagtttttcaaaacttgtgggctcaactaaagtagggcttagaggaaaatttacagctttaagtgagaaattagaaaaaaaggtaataggctgggcatgctgactcatgcctgtaatcccaccactttgtgaggccaaggtagaggataacttgaggtcaggagtttgagacccacctgggtaacattacacaggaccctgtctctacaaaacaatgttttgtaaaattagccagccatggagggacacacttgtagtcctacctccttgggaggctgaggcagtaggattacttgagcctaggattttgaggttgcagtgagctgtgttcatgccactgcactccagctgggtgacaaagtgtgacactaa

SEQ ID NO: 384075 - DNA, 190 bp, Homo sapiens
agtttgaagtgctgccatctcaacttgtctgagaagcactgtttgtccttgcacaaaaggggtgtaagtatgtacaggggaaggggacacacattctttgccttgcccaaggtccacactcctggaaaggcattctttccaaatataggcaacagaaggtgcacctggcctcttctttccattctgaatg

SEQ ID NO: 384076 - DNA, 2270 bp, Homo sapiens
  misc_feature (221)..(221): n is a, c, g, or t
  misc_feature (1230)..(1230): n is a, c, g, or t
  misc_feature (1632)..(1632): n is a, c, g, or t
ggccaagaattgtgtgtctgccaccagcgccccctggcctaggtggcccctgggtgtccttaatctcctgtgtgtgttagaggggcaggcattgcacccaccgaactccctagacctgttcgctggtccttactcttcctggctgtcagatccaactaccaggctctgtggccacagtctcctgctgggctgcccctggtgccccagccagagacccccangtgcgtcccttcatcgcccttccctcccttcttcgctgatggctgtctgggtgactgtgttcgtcttctcttccccaggtgaccaggcattgatgcacccccaggaaggccacgcgctcaggaggccccccccccgctggctgctgctcacatggtgtctgggcccttggcactccggtggtgcgcgtgggcagggcgcggggacatggggcccgacatggagctgcccagccactcgaagcagctcctgctgcagctgaaccagcagaggaccaagggcttcctgtgtgacgtcatcatcatggtggagaactccatcttccgggcccacaagaacgtcctagccgccagcagcatctatttcaagtccctggtcctgcacgacaacctcatcaacctggacacagacatggtcagctccacagtgttccagcagatcttggacttcatctacacaggcaagctgctgcccagcgaccagccagccgagcccaacttcagcaccctcctcactgccgccagctacctccagctgcccgagttggcagccctctgccgccgcaaactcaagcgagccggcaagccctttggctctgggagggcggggtccactggcatggggcggcccccccgcagccagcggctgtccacggcctctgtcatccaagctcggtatcaggggctcgtggatgggcgcaagggggcccacgccccccaggagctcccccaagccaaaggctcagacgatgaactctttcttggtggctctaaccaggatagcgtgcaaggtctgggccgggctgtctgcccagctggcggggaggcgggtctggggggctgcagcagcagcaccaacgggagcagcgggggctgcgagcaggagctgggcttggacctgtccaagaaaagcccacccttgccccctgccaccccaggtccccacctcactcccgatgacgcagcccagctgagcgacagccaacatggctcgccccctgcggcctctgcncctcccgttgccaacagtgcctcttattctgagctggggggcacccctgatgagcccatggatctggagggggccgaggacaaccacctgagcctgctggaggcgcctggtgggcagcctcggaagagcctccggcactccactcggaagaaggagtggggcaagaaggagcctgtggctggctccccctttgagcggagagaagcagggcccaagggtccctgcccgggagaggagggtgagggggtcggggacagggttcccaatggcatcctggctagtggggctggccctagcgggccctatggggagcccccctacccctgcaaggaggaggaggagaacggcaaggatgcaagtgaagacagtgcgcagagcgggagcgaggggggcagcggccangccagcgcccactacatgtaccggcaggagggctacgagacggtgtcctacggggacaacttgtatgtgtgcattccctgcgccaagggcttccccagctctgagcagctcaatgcgcacgtggagactcacacggaggaagagctgttcatcaaggaagagggggcctacgagacaggcagtgggggtgccgaggaggaggccgaggacctgtcagcacccagtgcggcctacacggctgagccccggcccttcaagtgttcggtctgcgagaagacctacaaggacccagccacgctgcggcagcacgagaagacgcactggctgacacggcccttcccctgcaacatctgtggcaaaatgttcacgcagcgcggcaccatgacgcgtcacatgcggagccacctgggcctgaagcccttcgcctgcgatgagtgtggcatgcgcttcacccgtcagtaccgcctcacggagcacatgcgtgtgcactcgggcgagaaaccttacgagtgccagctgtgcgggggcaagttcacccagcagcgcaacctcatcagccacctgcgcatgcacacctccccctcctagaagccaaagacccgcgggcgccctctgccaccttgctccccgggaaccca

SEQ ID NO: 384077 - DNA, 247 bp, Homo sapiens
caaagaagaatcaccatgtgacatgagtcaggtcctcctaggagttgccatcagggagggaattatatgatatccctgaaaaccaggtctaagcaaagcatacaacactataattgtcctcttatttttctataaaatgaggattttcacatgttccttatgagttgctgtagccaaagccttcttccttgtgatctgggaaaaaagggttcctcctgtttgtcttagatcaccctgcaggtacatg

SEQ ID NO: 384078 - DNA, 253 bp, Homo sapiens
tttaaagtgaaccagtaacagtatagttgagcagtaacctttggatttcactgttttaataatctatgctttaaactgcatcagtttatatattatatattatatatatagttaataatattctttattaacaatattgccaaaatttttttaaacaagagtttaccaggaagaaaataagttaggttttaataatttattttgcatgtttaatatcattatttaaaaaatatatttcttaggaaattagctc

SEQ ID NO: 384079 - DNA, 793 bp, Homo sapiens
tgctgagattatgagccactgtgcccggcccccagttccaaaacctataatcaattgtatacttagcagttcaatatccctaatctgaaaacccaaaatgctcctgtgagcgtatcctttgagtgctatgtcggcactccaaaagtttcaggttttggaccattttggatctcggtactcaaaaagctttggattttggagcattttgaatttcaaatttttggattagggatgctcaacctgtacaaaatagtagtagtcaagacaatgtgatactggcatagaatagacataaggtcagtgcagtagaattgagaattgtcttagtctgcttgggctgctgtaacaaaatactgtaaactgtgtggcttgtaaacatcaaatttattttccacatttctggaagctggaaagtccaagatcaaggcactagcagatttcgtgtctgagaagggcatgttcttactgtggaaggggcgactgagctcactctttcctcttttacaaggacactaatcccactcatgagggctctgccctcatgacctaataatttcccaaagatcccacctcctaaagccggaggttaggatttcagcacgtgaatttgtgtatgtgtggtgtatgtatgtgtatgtgtatgtattggggtggaggaggctcacaaaacattcagactgtaacaagaatagcagggcatggtggttcatgcctgtaatcccagcactttgggaggccaaggcaagcagatcgtttgagcccaggagcttgagaccagtgtgggaaacatccc

SEQ ID NO: 384080 - DNA, 1217 bp, Homo sapiens
ccgggaggctgcccggctagaaatcaacgtgctcaaaaaaatcaaggagaaggacaaagaaaacaagttcctgtgtgtcttgatgtctgactggttcaacttccacggtcacatgtgcatcgcctttgagctcctgggcaagaacactttgagttcctgaaggagaataacttccagccttaccccctaccacatgtccggcacatggcctaccagctctgccacgcccttagatttctgcatgagaatcagctgacccatacagacttgaaaccagagaacatcctgtttgtgaattctgagtttgaaaccctctacaatgagcacaagagctgtgaggagaagtcagtgaagaacaccagcatccgagtggctgactttggcagtgccacatttgaccatgagcaccacaccaccattgtggccacccgtcactatcgcccgcctgaggtgatccttgagctgggctgggcacagccctgtgacgtctggagcattggctgcattctctttgagtactaccggggcttcacactcttccagacccacgaaaaccgagagcacctggtgatgatggagaagatcctagggcccatcccatcacacatgatccaccgtaccaggaagcagaaatatttctacaaagggggcctagtttgggatgagaacagctctgacggccggtatgtgaaggagaactgcaaacctctgaagagttacatgctccaagactccctggagcacgtgcagctgtttgacctgatgaggaggatgttagaatttgaccctgcccagcgcatcacactggccgaggccctgctgcaccccttctttgctggcctgacccctgaggagcggtccttccacaccagccgcaacccaagcagatgacaggcacaggccaccgcatgaggagatggagggcgggactgggccgcccagccccttgactccagcctcgaccgccaggccccaggccagagccacccaatgaacagtgcaatgtgaaggaaggcaggagcctgcaggggagcagacttggtgcccagctgccagaaagcacagatttgacccaagctatttatatgttataaagttataataaagtgtttcttactgtttgtaacccctggtaccagtgtgtccatctccaggctccttgccttccccttacctgaccttattaataaagtctttcttagcagttcaaaaaaaaa

SEQ ID NO: 384081 - DNA, 801 bp, Homo sapiens
aggcatcgggatgggctgggacagggcatgttctgggcagggagtgaagagctaaccagagagaaatgtagtcacagcccagtccacctccacccacaagggctgaggagcctaggcacaggctggcaggagaagctggggctgccgcttcattggtaggtttgcatgtcctggggcagtgagggcacttgcccatctttcttgttcctttttctccttgaaggggccagagctagtactgacccccttgcactgtccctaatcttccacagacccacgacatgatccaccgtaccaggaagcagaaatatttctacaaagggggcctagtttgggatgagaacagctctgacggccggtatgtgaaggagaactgcaaacctctgaagagttacatgctccaagactccctggagcacgtgcagctgtttgacctgatgaggaggatgttagaatttgaccctgcccagcgcatcacactggccgaggccctgctgcaccccttctttgctggcctgacccctgaggagcggtccttccacaccagccgcaacccaagcagatgacaggcacaggccaccgcatgaggagatggagggcgggactgggccgcccagccccttgactccagcctcgaccgccaggccccaggccagagccacccaatgaacagtgcaatgtgaaggaaggcaggagcctgcaggggagcagacttggtgcccagctgccagaaagcacagatttgacccaagctatttatatgttataaagttataataaagtgtttcttactgtttgtaa

SEQ ID NO: 384082 - DNA, 1085 bp, Homo sapiens
ttacgggctagtggggccggtgtgaatcggacgaggcccaagactgctgggtgctggcaatggggcttcttgcaaactgccccagaggggcccttagccctaccccttccccatagggtggctatgaatgtaattggggaacaccagaagagccagatgtcagaagccctgctgcttcctgtccctctctctcctcgaaattttgggaagaactaggcaggactgaggtgagggggagggaagacctagacatggccaggaagcctctgtcaactgcatttggtgctcggacaagtgaatttcgcagaggtgatctctacccacctgtcaggactttgcatgtgggggcagaggcatcaacccagcaagacacctagtagcctggcaagttccgagcaaaacgttaaacaggcatgaaaggaaaggagctgctcattgtccaggagggcggaagtagagtcctccaaggaggcatcactgcctcctcgatccagtccagcaaggcgtcccagaggcaaggggacctgctgtggcttcccacgaccctgccgtcacactgaggcaccttgtgtccctgagcagagttacatgctccaagactccctggagcacgtgcagctgtttgacctgatgaggaggatgttagaatttgaccctgcccagcgcatcacactggccgaggccctgctgcaccccttctttgctggcctgacccctgaggagcggtccttccacaccagccgcaacccaagcagatgacaggcacaggccaccgcatgaggagatggagggcgggactgggccgcccagccccttgactccagcctcgaccgccaggccccaggccagagccacccaatgaacagtgcaatgtgaaggaaggcaggagcctgcaggggagcagacttggtgcccagctgccagaaagcacagatttgacccaagctatttatatgttataaagttataataaagtgtttcttactgtttgtaacccctggtaccagtgtgtccatctccaggctccttgccttccccttacctgaccttattaataaagtctttcttagcagttcaaaaaaaaa

SEQ ID NO: 384083 - DNA, 1126 bp, Homo sapiens
ccgggaggctgcccggctagaaatcaacgtgctcaaaaaaatcaaggagaaggacaaagaaaacaagttcctgtgtgtcttgatgtctgactggttcaacttccacggtcacatgtgcatcgcctttgagctcctgggcaagaacactttgagttcctgaaggagaataacttccagccttaccccctaccacatgtccggcacatggcctaccagctctgccacgcccttagatttctgcatgagaatcagctgacccatacagacttgaaaccagagaacatcctgtttgtgaattctgagtttgaaaccctctacaatgagcacaagagctgtgaggagaagtcagtgaagaacaccagcatccgagtggctgactttggcagtgccacatttgaccatgagcaccacaccaccattgtggccacccgtcactatcgcccgcctgaggtgatccttgagctgggctgggcacagccctgtgacgtctggagcattggctgcattctctttgagtactaccggggcttcacactcttccagacccacgaaaaccgagagcacctggtgatgatggagaagatcctagggcccatcccatcacacatgatccaccgtaccaggaagcagaaatatttctacaaagggggcctagtttgggatgagaacagctctgacggccggtatgtgaaggagaactgcaaacctctgaagagttacatgctccaagactccctggagcacgtgcagctgtttgacctgatgaggaggatgttagaatttgaccctgcccagcgcatcacactggccgaggccctgctgcaccccttctttgctggcctgacccctgaggagcggtccttccacaccagccgcaacccaagcagatgacaggcacaggccaccgcatgaggagatggagggcgggactgggccgcccagccccttgactccagcctcgaccgccaggccccaggccagagccacccaatgaacagtgcaatgtgaaggaaggcaggagcctgcaggggagcagacttggtgcccagctgccagaaagcacagatttgacccaagctatttatatgttataaagttataataaagtgtttcttactgtttgtaa

SEQ ID NO: 384084 - DNA, 1028 bp, Homo sapiens
ccgggaggctgcccggctagaaatcaacgtgctcaaaaaaatcaaggagaaggacaaagaaaacaagttcctgtgtgtcttgatgtctgactggttcaacttccacggtcacatgtgcatcgcctttgagctcctgggcaagaacactttgagttcctgaaggagaataacttccagccttaccccctaccacatgtccggcacatggcctaccagctctgccacgcccttagatttctgcatgagaatcagctgacccatacagacttgaaaccagagaacatcctgtttgtgaattctgagtttgaaaccctctacaatgagcacaagagctgtgaggagaagtcagtgaagaacaccagcatccgagtggctgactttggcagtgccacatttgaccatgagcaccacaccaccattgtggccacccgtcactatcgcccgcctgaggtgatccttgagctgggctgggcacagccctgtgacgtctggagcattggctgcattctctttgagtactaccggggcttcacactcttccagacccacgaaaaccgagagcacctggtgatgatggagaagatcctagggcccatcccatcacacatgatccaccgtaccaggaagcagaaatatttctacaaagggggcctagtttgggatgagaacagctctgacggccggtatgtgaaggagaactgcaaacctctgaagagttacatgctccaagactccctggagcacgtgcagctgtttgacctgatgaggaggatgttagaatttgaccctgcccagcgcatcacactggccgaggccctgctgcaccccttctttgctggcctgacccctgaggagcggtccttccacaccagccgcaacccaagcagatgacaggcacaggccaccgcatgaggagatggagggcgggactgggccgcccagccccttgactccagcctcgaccgccaggccccaagccacgcaaccctacaagccacggtcacccacaagccacggacgggtaagga

SEQ ID NO: 384085 - DNA, 994 bp, Homo sapiens
ttacgggctagtggggccggtgtgaatcggacgaggcccaagactgctgggtgctggcaatggggcttcttgcaaactgccccagaggggcccttagccctaccccttccccatagggtggctatgaatgtaattggggaacaccagaagagccagatgtcagaagccctgctgcttcctgtccctctctctcctcgaaattttgggaagaactaggcaggactgaggtgagggggagggaagacctagacatggccaggaagcctctgtcaactgcatttggtgctcggacaagtgaatttcgcagaggtgatctctacccacctgtcaggactttgcatgtgggggcagaggcatcaacccagcaagacacctagtagcctggcaagttccgagcaaaacgttaaacaggcatgaaaggaaaggagctgctcattgtccaggagggcggaagtagagtcctccaaggaggcatcactgcctcctcgatccagtccagcaaggcgtcccagaggcaaggggacctgctgtggcttcccacgaccctgccgtcacactgaggcaccttgtgtccctgagcagagttacatgctccaagactccctggagcacgtgcagctgtttgacctgatgaggaggatgttagaatttgaccctgcccagcgcatcacactggccgaggccctgctgcaccccttctttgctggcctgacccctgaggagcggtccttccacaccagccgcaacccaagcagatgacaggcacaggccaccgcatgaggagatggagggcgggactgggccgcccagccccttgactccagcctcgaccgccaggccccaggccagagccacccaatgaacagtgcaatgtgaaggaaggcaggagcctgcaggggagcagacttggtgcccagctgccagaaagcacagatttgacccaagctatttatatgttataaagttataataaagtgtttcttactgtttgtaa

SEQ ID NO: 384086 - DNA, 1107 bp, Homo sapiens
ggaagaggccccagcactgacctccgtgggggtggagatgaggaggatggaaagggtgtcttcctccagcatcttcctgaagctcccggataatgagcacccatgtggcaggcctgggcctggacaagatgaagctgggcaatccccagtccttcctggaccaggaggaggcagatgaccagcagctgctggaaccagaggcgtggaagacctacaccgagcgccgcaatgccctgcgtgagttcctgacctcggacctgagtccgcacctgctcaagcgccaccacgcccgcatgcagctgctgcgtaagtgctcctactacatcgaggtcctgcccaagcacctggccctgggcgaccagaacccgctggtgctgcctagcgccttgttccagctcatcgacccctggaagttccagcgcatgaagaaggtgggcacagctcagaccaagatccagctcctgctgctcggggacctgttggaacagctcgaccatggccgtgctgagctggatgccctgctccggtcgccagacccacggcccttcctggccgactgggcgctggtggagcggcggctggcggacgtgtcggccgtcatggacagcttcctgaccatgatggtgccggggcggctacacgtcaagcaccgcctggtgtctgatgtcagtgccaccaagatcccgcacatctggctcatgctgagcaccaagatgcctgtcgtgtttgaccgaaaggcgtcggcggctcaccaggactgggcccggctgcgctggttcgtcaccatccagccagccacatcggagcagtatgagttgcgcttcaggctgctggacccgcggacacagcaggagtgcgcccagtgtggcgtcatccccgtggctgcctgcaccttcgacgtccgaaacctgctgcccaaccgatcctataagttcaccatcaagagggccgagacctccacgctggtgtacgagccctggagggacagcctcaccctgcacaccaagccggagcccctggaggggcccgccctcagccactctgtctgagagatgattttctaatatttatccactaataaagaagagtgtaaatgcacatatggaa

SEQ ID NO: 384087 - DNA, 1156 bp, Homo sapiens
acccgcggagtgcggagggaggctgggctctgggaagtccgcgcgcggctccgcttcagaggcagggcaagtgggcgcggtcctggggcggcggcgggggccgggagaggagggctgggggtctcgagaagctcccggataatgagcacccatgtggcaggcctgggcctggacaagatgaagctgggcaatccccagtccttcctggaccaggaggaggcagatgaccagcagctgctggaaccagaggcgtggaagacctacaccgagcgccgcaatgccctgcgtgagttcctgacctcggacctgagtccgcacctgctcaagcgccaccacgcccgcatgcagctgctgcgtaagtgctcctactacatcgaggtcctgcccaagcacctggccctgggcgaccagaacccgctggtgctgcctagcgccttgttccagctcatcgacccctggaagttccagcgcatgaagaaggtgggcacagctcagaccaagatccagctcctgctgctcggggacctgttggaacagctcgaccatggccgtgctgagctggatgccctgctccggtcgccagacccacggcccttcctggccgactgggcgctggtggagcggcggctggcggacgtgtcggccgtcatggacagcttcctgaccatgatggtgccggggcggctacacgtcaagcaccgcctggtgtctgatgtcagtgccaccaagatcccgcacatctggctcatgctgagcaccaagatgcctgtcgtgtttgaccgaaaggcgtcggcggctcaccaggactgggcccggctgcgctggttcgtcaccatccagccagccacatcggagcagtatgagttgcgcttcaggctgctggacccgcggacacagcaggagtgcgcccagtgtggcgtcatccccgtggctgcctgcaccttcgacgtccgaaacctgctgcccaaccgatcctataagttcaccatcaagagggccgagacctccacgctggtgtacgagccctggagggacagcctcaccctgcacaccaagccggagcccctggaggggcccgccctcagccactctgtctgagagatgattttctaatatttatccactaataaagaagagtgtaaatgcacatatggaa

SEQ ID NO: 384088 - DNA, 1122 bp, Homo sapiens
acccgcggagtgcggagggaggctgggctctgggaagtccgcgcgcggctccgcttcagaggcaggctcccggataatgagcacccatgtggcaggcctgggcctggacaagatgaagctgggcaatccccagtccttcctggaccaggaggaggcagatgaccagcagctgctggaaccagaggcgtggaagacctacaccgagcgccgcaatgccctgcgtgagttcctgacctcggacctgagtccgcacctgctcaagcgccaccacgcccgcatgcagctgctgcgtaagtgctcctactacatcgaggtcctgcccaagcacctggccctgggcgaccagaacccgctggtgctgcctagcgccttgttccagctcatcgacccctggaagttccagcgcatgaagaaggtgggcacagctcagaccaagatccagctcctgctgctcggggacctgttggaacagctcgaccatggccgtgctgagctggatgccctgctccggtcgccagacccacggcccttcctggccgactgggcgctggtggagcggcggctggcggacgtgtcggccgtcatggacagcttcctgaccatgatggtgccggggcggctacacgtcaagcaccgcctggtgtctgatgtcagtgccaccaagatcccgcacatctggctcatgctgagcaccaagatgcctgtcgtgtttgaccgaaaggcgtcggcggctcaccaggactgggcccggctgcgctggttcgtcaccatccagccagccacatcggagcagtatgagttgcgcttcaggctgctggacccgcggacacagcaggagtgcgcccagtgtggcgtcatccccgtggctgcctgcaccttcgacgtccgaaacctgctgcccaaccgatcctataagttcaccatcaagagggccgagacctccacgctggtgtacgagccctggagggacagcctcaccctgcacaccaagccggagcccctggaggggcccgccctcagccactctgtctgagagatgattttctaatatttatccactaataaagaagagtgtaaatgcacatatggaattaaagaagcaaacctatttatgttttaaag

SEQ ID NO: 384089 - DNA, 846 bp, Homo sapiens
ggcgtggagcgtccccagggagaaccggagcgggaggatggcccgcgaatgtccccgagggggatcctgtgctgcttaggaccacgccgtcccctctccacggccccgaggggtgccagcaacccctttcagcagcagggttaggaactggggcccttgcaaggccacaggtcaggcggttctggccagaagtccgcagtcctagttcttccctgtcctgtcccacaggccactggttgtcagtagaggtttttgcccctcagtataaactgtgtccagatctgtaggctgcccatccagccctccaggcagcctcttcccatcgagttgtgcccccgaagaaggacagaggtccagcatggggtcagtgggctgaatccatcccccgaacatgccacagcccaggggaggccagcctgcctggcagctgacacccagccctccccccagctcccggataatgagcacccatgtggcaggcctgggcctggacaagatgaagctgggcaatccccagtccttcctggaccaggaggaggcagatgaccagcagctgctggaaccagaggcgtggaagacctacaccgagcgccgcaatgccctgcgtgagttcctgacctcggacctgagtccgcacctgctcaagcgccaccacgcccgcatgcagctgctgcgtaagtgctcctactacatcgaggtcctgcccaagcacctggccctgggcgaccagaacccgctggtgctgcctagcgccttgttccagctcatcgacccctggaagttccagcgcatgaagaaggtgggcacagctcagaccaagatccagctcctgctgctcggggacct

SEQ ID NO: 384090 - DNA, 1091 bp, Homo sapiens
acccgcggagtgcggagggaggctgggctctgggaagtccgcgcgcggctccgcttcagaggcaggctcccggataatgagcacccatgtggcaggcctgggcctggacaagatgaagctgggcaatccccagtccttcctggaccaggaggaggcagatgaccagcagctgctggaaccagaggcgtggaagacctacaccgagcgccgcaatgccctgcgtgagttcctgacctcggacctgagtccgcacctgctcaagcgccaccacgcccgcatgcagctgctgcgtaagtgctcctactacatcgaggtcctgcccaagcacctggccctgggcgaccagaacccgctggtgctgcctagcgccttgttccagctcatcgacccctggaagttccagcgcatgaagaaggtgggcacagctcagaccaagatccagctcctgctgctcggggacctgttggaacagctcgaccatggccgtgctgagctggatgccctgctccggtcgccagacccacggcccttcctggccgactgggcgctggtggagcggcggctggcggacgtgtcggccgtcatggacagcttcctgaccatgatggtgccggggcggctacacgtcaagcaccgcctggtgtctgatgtcagtgccaccaagatcccgcacatctggctcatgctgagcaccaagatgcctgtcgtgtttgaccgaaaggcgtcggcggctcaccaggactgggcccggctgcgctggttcgtcaccatccagccagccacatcggagcagtatgagttgcgcttcaggctgctggacccgcggacacagcaggagtgcgcccagtgtggcgtcatccccgtggctgcctgcaccttcgacgtccgaaacctgctgcccaaccgatcctataagttcaccatcaagagggccgagacctccacgctggtgtacgagccctggagggacagcctcaccctgcacaccaagccggagcccctggaggggcccgccctcagccactctgtctgagagatgattttctaatatttatccactaataaagaagagtgtaaatgcacatatggaa

SEQ ID NO: 384091 - DNA, 1295 bp, Homo sapiens
acccgcggagtgcggagggaggctgggctctgggaagtccgcgcgcggctccgcttcagaggcaggctcccggataatgagcacccatgtggcaggcctgggcctggacaagatgaagctgggcaatccccagtccttcctggaccaggaggaggcagatgaccagcagctgctggaaccagaggcgtggaagacctacaccgagcgccgcaatgccctgcgtgagttcctgacctcggacctgagtccgcacctgctcaagcgccaccacgcccgcatgcagctgctgcgtaagtgctcctactacatcgaggtcctgcccaagcacctggccctgggcgaccagaacccgctggtgctgcctagcgccttgttccagctcatcgacccctggaagttccagcgcatgaagaaggtgggcacagctcagaccaagatccagctcctgctgctcggggacctgttggaacagctcgaccatggccgtgctgagctggatgccctgctccggtcgccagacccacggcccttcctggccgactgggcgctggtggagcggcggctggcggacgtgtcggccgtcatggacagcttcctgaccatgatggtgccggggcggctacacgtcaagcaccgcctggtgtctgatgtcagtgccaccaagatcccgcacatctggctcatgctgagcaccaagatgcctgtcgtgtttgaccgaaaggcgtcggcggctcaccaggactgggcccggctgcgctggttcgtcaccatccagccagccacatcggagcagtatgagttgcgcttcaggctgctggacccgcggacacagcaggagtgcgcccagtgtggcgtcatccccgtggctgcctgcaccttcgacgtccgaaacctgctgcccaaccgatcctataagttcaccatcaagagggccgagacctccacgctggtgtacgagccctggagggacagcctcaccctgcacaccaagccggagcccctggaggggcccgccctcagccactctgtctgagagatgattttctaatatttatccactaataaagaagagtgtaaatgcacatatggaaaaaaacaaaacatagtatataatgaatcccaatagaaatgaaaacaaacaaaaaaaggagaagaaacagacacggaggacacatatagagggaaaccgtactgtagtggacaaaccgtgtcatgcagtatgatgcgactactcactgactgtcactagggcgggtgttactcttattacgggttgttcatattcagactgcgat

SEQ ID NO: 384092 - DNA, 738 bp, Homo sapiens
ggaagaggccccagcactgacctccgtgggggtggagatgaggaggatggaaagggtgtcttcctccagcatcttcctgaagctcccggataatgagcacccatgtggcaggcctgggcctggacaagatgaagctgggcaatccccagtccttcctggaccaggaggaggcagatgaccagcagctgctggaaccagaggcgtggaagacctacaccgagcgccgcaatgccctgcgtgagttcctgacctcggacctgagtccgcacctgctcaagcgccaccacgcccgcatgcagctgctgcgtaagtgctcctactacatcgaggtcctgcccaagcacctggccctgggcgaccagaacccgctggtgctgcctagcgccttgttccagctcatcgacccctggaagttccagcgcatgaagaaggtgggcacagctcagaccaggagtgcgcccagtgtggcgtcatccccgtggctgcctgcaccttcgacgtccgaaacctgctgcccaaccgatcctataagttcaccatcaagagggccgagacctccacgctggtgtacgagccctggagggacagcctcaccctgcacaccaagccggagcccctggaggggcccgccctcagccactctgtctgagagatgattttctaatatttatccactaataaagaagagtgtaaatgcacatatggaattaaagaagcaaacctatttatgttttaaag

SEQ ID NO: 384093 - DNA, 506 bp, Homo sapiens
gctcggtaccccaacgatggtcctcagctagaagagttttcagttgtggttgttgcccaggctggagtgcagtggcgccatcttggctcactgcacctccaccttccgggctcaagcgattctccagcctcagcctcctgagtagctaggactgcaggtgctccaccacgcccggctaatttttgtatttttagtagagatggggtttccccatgttggccaggctggtctcgaactcctggcctcaggtgtgatccgcccgcctccgcctccccaagcgctgagattacaggtgtgagccaccgtgcccaggccctcagtaggttttaaggagtccccagccctcctcccttctgggcccgaccagcttatactgctccatcttccccggccacatgccccgccaagtactgcacagggaccccccacccaggggccctgctccgtgagataatgtgaaatacgactgtggaccaaacgcaataaaacctctgtttgtacgaaga

SEQ ID NO: 384094 - DNA, 313 bp, Homo sapiens
aattaacattgagccataaaaatccccaaatatggtctcgaactcctggcctcaggtgtgatccgcccgcctccgcctccccaagcgctgagattacaggtgtgagccaccgtgcccaggccctcagtaggttttaaggagtccccagccctcctcccttctgggcccgaccagcttatactgctccatcttccccggccacatgccccgccaagtactgcacagggaccccccacccaggggccctgctccgtgagataatgtgaaatacgactgtggaccaaacgcaataaaacctctgtttgtacgaaga

SEQ ID NO: 384095 - DNA, 341 bp, Homo sapiens
ggataacttgaggccaggagttcaagaccagcctggcaacatggtgaaaccccgtctctactaaaaatacaaaaattagcctggcgtggtggcacacgcctgtaatcctagctacttgggaggctgagtgtgagccaccgtgcccaggccctcagtaggttttaaggagtccccagccctcctcccttctgggcccgaccagcttatactgctccatcttccccggccacatgccccgccaagtactgcacagggaccccccacccaggggccctgctccgtgagataatgtgaaatacgactgtggaccaaacgcaataaaacctctgtttgtacgaaga

SEQ ID NO: 384096 - DNA, 367 bp, Homo sapiens
tccttgtaatccaagcagtcgcaagatcaaccgctccatgcagaactggcaccagctagaaaacctgtccaacttcatcaaggccatggtcagctacggcatgaaccctgtggacctgttcgaggccaacgacctgtttgagagtgggaacatgacgcaggtgcaggtgtctcttctcgccctggcggggaaggccaagactaaggggctgcagagcggggtggacattggcgtcaagtactcggagaagcaggagcggaatttcgacgatgccaccatgaaggctggccagtgcgtcatcgggctgcagaccaacaaatgcgccagccagtcggcactatgctttgttaacaggaggggatcctaa

SEQ ID NO: 384097 - DNA, 2166 bp, Homo sapiens
tcaggctggttacgcccccggagtaacgggatgtcctgtgcggccccgtcccgccgcccgcccgccagccatgagctccacgcagttcaacaagggcccctcgtacgggctgtcggccgaggtcaagaaccggctcctgtccaaatatgacccccagaaggaggcagagctccgcacctggatcgagggactcaccggcctctccatcggccccgacttccagaagggcctgaaggatggaactatcttatgcacactcatgaacaagctacagccgggctccgtccccaagatcaaccgctccatgcagaactggcaccagctagaaaacctgtccaacttcatcaaggccatggtcagctacggcatgaaccctgtggacctgttcgaggccaacgacctgtttgagagtgggaacatgacgcaggtgcaggtgtctcttctcgccctggcggggaaggccaagactaaggggctgcagagcggggtggacattggcgtcaagtactcggagaagcaggagcggaatttcgacgatgccaccatgaaggctggccagtgcgtcatcgggctgcagatgggcaccaacaaatgcgccagccagtcgggcatgactgcctacggcacgagaaggcatctctatgaccccaagaaccatatcctgccccccatggaccactcgaccatcagcctccagatgggcacgaacaagtgcgccagccaggtgggcatgacggctcccgggacccggcggcacatctatgataccaagctgggaaccgacaagtgtgacaactcctccatgtccctgcagatgggctacacgcagggcgccaaccagagcggccaggtcttcggcctgggccggcagatatatgaccccaagtactgcccgcaaggcacagtggccgatggggctccctcgggcaccggcgactgcccggacccgggggaggtccctgaatatcccccttactaccaggaggaggccggctactgaggctcccagcacgctctctccccacatcgtctccccatctgggtttttgggtttttctgtgttttcatctttttttttttttttcttaacccgttcagtgctgccagtcaaccaagggtctgtgagtgtcagcgtgggatcaggcagcagagcttttttcccctttgccttgatccttcgcaaggctgagccactgggctgtgggggaaggggtcaaggccatatcccaatacgtgtagggcgagggtccctgctggcacattcaggctgtgctgggaagaagagacctgggcttggaaggaaccggtccccgacggtttctggttgcctcgcctcttcccccttttgtcagctgagcagtttgtggtttctatgcccgcaagtttcaggaagtattcacaaaagaaaaatacattttttcccccaggggtggggcaaggacagtggagagagtgctaggaaatgagtcccctgggaaaggggaccgggccgtgatgttaaatatctccggctcccaagtgactggatttgcctaggaccttcagatcaacagacttcagaccctcagacctgccccggggccaggtggagaaagtgagggccgtacaaggaagtgaaattctgagttgttggggctaagcctgaccccctctccatgctccccgccccaactcactctggcctcagtagatttttttttcagttgtggttgttgcccaggctggagtgcagtggcgccatcttggctcactgcacctccaccttccgggctcaagcgattctccagcctcagcctcctgagtagctaggactgcaggtgctccaccacgcccggctaatttttgtatttttagtagagatggggtttccccatgttggccaggctggtctcgaactcctggcctcaggtgtgatccgcccgcctccgcctccccaagcgctgagattacaggtgtgagccaccgtgcccaggccctcagtaggttttaaggagtccccagccctcctcccttctgggcccgaccagcttatactgctccatcttccccggccacatgccccgccaagtactgcacagggaccccccacccaggggccctgctccgtgagataatgtgaaatacgactgtggaccaaacgcaataaaacctctgtttgtacgaaga

SEQ ID NO: 384098 - DNA, 2171 bp, Homo sapiens
  misc_feature (28)..(28): n is a, c, g, or t
caatgccaggctggtacggtcctgaggngtttggactgtcctgtgcggccccgtcccgccgcccgcccgccagccatgagctccacgcagttcaacaagggcccctcgtacgggctgtcggccgaggtcaagaaccggctcctgtccaaatatgacccccagaaggaggcagagctccgcacctggatcgagggactcaccggcctctccatcggccccgacttccagaagggcctgaaggatggaactatcttatgcacactcatgaacaagctacagccgggctccgtccccaagatcaaccgctccatgcagaactggcaccagctagaaaacctgtccaacttcatcaaggccatggtcagctacggcatgaaccctgtggacctgttcgaggccaacgacctgtttgagagtgggaacatgacgcaggtgcaggtgtctcttctcgccctggcggggaaggccaagactaaggggctgcagagcggggtggacattggcgtcaagtactcggagaagcaggagcggaatttcgacgatgccaccatgaaggctggccagtgcgtcatcgggctgcagatgggcaccaacaaatgcgccagccagtcgggcatgactgcctacggcacgagaaggcatctctatgaccccaagaaccatatcctgccccccatggaccactcgaccatcagcctccagatgggcacgaacaagtgcgccagccaggtgggcatgacggctcccgggacccggcggcacatctatgataccaagctgggaaccgacaagtgtgacaactcctccatgtccctgcagatgggctacacgcagggcgccaaccagagcggccaggtcttcggcctgggccggcagatatatgaccccaagtactgcccgcaaggcacagtggccgatggggctccctcgggcaccggcgactgcccggacccgggggaggtccctgaatatcccccttactaccaggaggaggccggctactgaggctcccagcacgctctctccccacatcgtctccccatctgggtttttgggtttttctgtgttttcatctttttttttttttttcttaacccgttcagtgctgccagtcaaccaagggtctgtgagtgtcagcgtgggatcaggcagcagagcttttttcccctttgccttgatccttcgcaaggctgagccactgggctgtgggggaaggggtcaaggccatatcccaatacgtgtagggcgagggtccctgctggcacattcaggctgtgctgggaagaagagacctgggcttggaaggaaccggtccccgacggtttctggttgcctcgcctcttcccccttttgtcagctgagcagtttgtggtttctatgcccgcaagtttcaggaagtattcacaaaagaaaaatacattttttcccccaggggtggggcaaggacagtggagagagtgctaggaaatgagtcccctgggaaaggggaccgggccgtgatgttaaatatctccggctcccaagtgactggatttgcctaggaccttcagatcaacagacttcagaccctcagacctgccccggggccaggtggagaaagtgagggccgtacaaggaagtgaaattctgagttgttggggctaagcctgaccccctctccatgctccccgccccaactcactctggcctcagtagatttttttttcagttgtggttgttgcccaggctggagtgcagtggcgccatcttggctcactgcacctccaccttccgggctcaagcgattctccagcctcagcctcctgagtagctaggactgcaggtgctccaccacgcccggctaatttttgtatttttagtagagatggggtttccccatgttggccaggctggtctcgaactcctggcctcaggtgtgatccgcccgcctccgcctccccaagcgctgagattacaggtgtgagccaccgtgcccaggccctcagtaggttttaaggagtccccagccctcctcccttctgggcccgaccagcttatactgctccatcttccccggccacatgccccgccaagtactgcacagggaccccccacccaggggccctgctccgtgagataatgtgaaatacgactgtggaccaaacgcaataaaacctctgtttgtacgaaga

SEQ ID NO: 384099 - DNA, 2586 bp, Homo sapiens
cctcttgggctcaacggatcctcccccttcggcctcagcctcccaagtagctagaactccaggtgcaagctaccgcacccagtaagaatcctattctcttttggactgacaaactcctactcatccaacaaagccccagctccaatggccccttctctgaggaacctgccctggttccctggtccacctcccagctagtagagttccctgggaaggggttagacgcctctaagtggcagagaggggccctcattcctgccccaaaggtagccttctcccctcccctttctggcagaagagaagtctgagatggagaaagagtgagagccgcccaggagctctgagcagagagcccgcaggagtgccacgtcccggcggcctcggcccctccctgcctcagtttcccgtggcatcaaagggggcgaggggcccctccaggcctctggtgacgggggtgctgtgcccaggcgggggtccgggggcgaccgaggggtctcaggaagtccgcggccgcaggaattcggcgcctccaggccttataaggacatttgcgctccgggccaatcagcggcgggggcgtggcgcgcggagcccggcgcgtcccaaccccgcgccagcccggcggtcccgtcccgtcccgtcctgtgcggccccgtcccgccgcccgcccgccagccatgagctccacgcagttcaacaagggcccctcgtacgggctgtcggccgaggtcaagaaccggctcctgtccaaatatgacccccagaaggaggcagagctccgcacctggatcgagggactcaccggcctctccatcggccccgacttccagaagggcctgaaggatggaactatcttatgcacactcatgaacaagctacagccgggctccgtccccaagatcaaccgctccatgcagaactggcaccagctagaaaacctgtccaacttcatcaaggccatggtcagctacggcatgaaccctgtggacctgttcgaggccaacgacctgtttgagagtgggaacatgacgcaggtgcaggtgtctcttctcgccctggcggggaaggccaagactaaggggctgcagagcggggtggacattggcgtcaagtactcggagaagcaggagcggaatttcgacgatgccaccatgaaggctggccagtgcgtcatcgggctgcagatgggcaccaacaaatgcgccagccagtcgggcatgactgcctacggcacgagaaggcatctctatgaccccaagaaccatatcctgccccccatggaccactcgaccatcagcctccagatgggcacgaacaagtgcgccagccaggtgggcatgacggctcccgggacccggcggcacatctatgataccaagctgggaaccgacaagtgtgacaactcctccatgtccctgcagatgggctacacgcagggcgccaaccagagcggccaggtcttcggcctgggccggcagatatatgaccccaagtactgcccgcaaggcacagtggccgatggggctccctcgggcaccggcgactgcccggacccgggggaggtccctgaatatcccccttactaccaggaggaggccggctactgaggctcccagcacgctctctccccacatcgtctccccatctgggtttttgggtttttctgtgttttcatctttttttttttttttcttaacccgttcagtgctgccagtcaaccaagggtctgtgagtgtcagcgtgggatcaggcagcagagcttttttccccagctgagcagtttgtggtttctatgcccgcaagtttcaggaagtattcacaaaagaaaaatacattttttcccccaggggtggggcaaggacagtggagagagtgctaggaaatgagtcccctgggaaaggggaccgggccgtgatgttaaatatctccggctcccaagtgactggatttgcctaggaccttcagatcaacagacttcagaccctcagacctgccccggggccaggtggagaaagtgagggccgtacaaggaagtgaaattctgagttgttggggctaagcctgaccccctctccatgctccccgccccaactcactctggcctcagtagatttttttttcagttgtggttgttgcccaggctggagtgcagtggcgccatcttggctcactgcacctccaccttccgggctcaagcgattctccagcctcagcctcctgagtagctaggactgcaggtgctccaccacgcccggctaatttttgtatttttagtagagatggggtttccccatgttggccaggctggtctcgaactcctggcctcaggtgtgatccgcccgcctccgcctccccaagcgctgagattacaggtgtgagccaccgtgcccaggccctcagtaggttttaaggagtccccagccctcctcccttctgggcccgaccagcttatactgctccatcttccccggccacatgccccgccaagtactgcacagggaccccccacccaggggccctgctccgtgagataatgtgaaatacgactgtggaccaaacgcaataaaacctctgtttgtacgaaga

SEQ ID NO: 384100 - DNA, 2530 bp, Homo sapiens
cctcttgggctcaacggatcctcccccttcggcctcagcctcccaagtagctagaactccaggtgcaagctaccgcacccagtaagaatcctattctcttttggactgacaaactcctactcatccaacaaagccccagctccaatggccccttctctgaggaacctgccctggttccctggtccacctcccagctagtagagttccctgggaaggggttagacgcctctaagtggcagagaggggccctcattcctgccccaaaggtagccttctcccctcccctttctggcagaagagaagtctgagatggagaaagagtgagagccgcccaggagctctgagcagagagcccgcaggagtgccacgtcccggcggcctcggcccctccctgcctcagtttcccgtggcatcaaagggggcgaggggcccctccaggcctctggtgacgggggtgctgtgcccaggcgggggtccgggggcgaccgaggggtctcaggaagtccgcggccgcaggaattcggcgcctccaggccttataaggacatttgcgctccgggccaatcagcggcgggggcgtggcgcgcggagcccggcgcgtcccaaccccgcgccagcccggcggtcccgtcccgtcccgtcctgtgcggccccgtcccgccgcccgcccgccagccatgagctccacgcagttcaacaagggcccctcgtacgggctgtcggccgaggtcaagaaccggctcctgtccaaatatgacccccagaaggaggcagagctccgcacctggatcgagggactcaccggcctctccatcggccccgacttccagaagggcctgaaggatggaactatcttatgcacactcatgaacaagctacagccgggctccgtccccaagatcaaccgctccatgcagaactggcaccagctagaaaacctgtccaacttcatcaaggccatggtcagctacggcatgaaccctgtggacctgttcgaggccaacgacctgtttgagagtgggaacatgacgcaggtgcaggtgtctcttctcgccctggcggggaaggccaagactaaggggctgcagagcggggtggacattggcgtcaagtactcggagaagcaggagcggaatttcgacgatgccaccatgaaggctggccagtgcgtcatcgggctgcagatgggcaccaacaaatgcgccagccagtcgggcatgactgcctacggcacgagaaggcatctctatgaccccaagaaccatatcctgccccccatggaccactcgaccatcagcctccagatgggcacgaacaagtgcgccagccaggtgggcatgacggctcccgggacccggcggcacatctatgataccaagctgggaaccgacaagtgtgacaactcctccatgtccctgcagatgggctacacgcagggcgccaaccagagcggccaggtcttcggcctgggccggcagatatatgaccccaagtactgcccgcaaggcacagtggccgatggggctccctcgggcaccggcgactgcccggacccgggggaggtccctgaatatcccccttactaccaggaggaggccggctactgaggctcccagcacgctctctccccacatcgtctccccatctgggtttttgggtttttctgtgttttcatctttttttttttttttcttaacccgttcagtgctgccagtcaaccaagggtctgtgagtgtcagcgtgggatcaggcagcagagcttttttcccctttgccttgatccttcgcaaggctgagccactgggctgtgggggaaggggtcaaggccatatcccaatacgtgtagggcgagggtccctgctggcacattcaggctgtgctgggaagaagagacctgggcttggaaggaaccggtccccgacggtttctggttgcctcgcctcttcccccttttgtcagctgagcagtttgtggtttctatgcccgcaagtttcaggaagtattcacaaaagaaaaatacattttttcccccaaactcactctggcctcagtagatttttttttcagttgtggttgttgcccaggctggagtgcagtggcgccatcttggctcactgcacctccaccttccgggctcaagcgattctccagcctcagcctcctgagtagctaggactgcaggtgctccaccacgcccggctaatttttgtatttttagtagagatggggtttccccatgttggccaggctggtctcgaactcctggcctcaggtgtgatccgcccgcctccgcctccccaagcgctgagattacaggtgtgagccaccgtgcccaggccctcagtaggttttaaggagtccccagccctcctcccttctgggcccgaccagcttatactgctccatcttccccggccacatgccccgccaagtactgcacagggaccccccacccaggggccctgctccgtgagataatgtgaaatacgactgtggaccaaacgcaataaaacctctgtttgtacgaaga

SEQ ID NO: 384101 - DNA, 2570 bp, Homo sapiens
cctcttgggctcaacggatcctcccccttcggcctcagcctcccaagtagctagaactccaggtgcaagctaccgcacccagtaagaatcctattctcttttggactgacaaactcctactcatccaacaaagccccagctccaatggccccttctctgaggaacctgccctggttccctggtccacctcccagctagtagagttccctgggaaggggttagacgcctctaagtggcagagaggggccctcattcctgccccaaaggtagccttctcccctcccctttctggcagaagagaagtctgagatggagaaagagtgagagccgcccaggagctctgagcagagagcccgcaggagtgccacgtcccggcggcctcggcccctccctgcctcagtttcccgtggcatcaaagggggcgaggggcccctccaggcctctggtgacgggggtgctgtgcccaggcgggggtccgggggcgaccgaggggtctcaggaagtccgcggccgcaggaattcggcgcctccaggccttataaggacatttgcgctccgggccaatcagcggcgggggcgtggcgcgcggagcccggcgcgtcccaaccccgcgccagcccggcggtcccgtcccgtcccgtcctgtgcggccccgtcccgccgcccgcccgccagccatgagctccacgcagttcaacaagggcccctcgtacgggctgtcggccgaggtcaagaaccggctcctgtccaaatatgacccccagaaggaggcagagctccgcacctggatcgagggactcaccggcctctccatcggccccgacttccagaagggcctgaaggatggaactatcttatgcacactcatgaacaagctacagccgggctccgtccccaagatcaaccgctccatgcagaactggcaccagctagaaaacctgtccaacttcatcaaggccatggtcagctacggcatgaaccctgtggacctgttcgaggccaacgacctgtttgagagtgggaacatgacgcaggtgcaggtgtctcttctcgccctggcggggaaggccaagactaaggggctgcagagcggggtggacattggcgtcaagtactcggagaagcaggagcggaatttcgacgatgccaccatgaaggctggccagtgcgtcatcgggctgcagatgggcaccaacaaatgcgccagccagtcgggcatgactgcctacggcacgagaaggcatctctatgaccccaagaaccatatcctgccccccatggaccactcgaccatcagcctccagatgggcacgaacaagtgcgccagccaggtgggcatgacggctcccgggacccggcggcacatctatgataccaagctgggaaccgacaagtgtgacaactcctccatgtccctgcagatgggctacacgcagggcgccaaccagagcggccaggtcttcggcctgggccggcagatatatgaccccaagtactgcccgcaaggcacagtggccgatggggctccctcgggcaccggcgactgcccggacccgggggaggtccctgaatatcccccttactaccaggaggaggccggctactgaggctcccagcacgctctctccccacatcgtctccccatctgggtttttgggtttttctgtgttttcatctttttttttttttttcttaacccgttcagtgctgccagtcaaccaagggtctgtgagtgtcagcgtgggatcaggcagcagagcttttttcccctttgccttgatccttcgcaaggctgagccactgggctgtgggggaaggggtcaaggccatatcccaatacgtgtagggcgagggtccctgctggcacattcaggctgtgctgggaagaagagacctgggcttggaaggaaccggtccccgacggtttctggttgcctcgcctcttcccccttttgtcagctgagcagtttgtggtttctatgcccgcaagtttcaggaagtattcacaaaagaaaaatacattttttcccccaggggtggggcaaggacagtggagagagtgctaggaaatgagtcccctgggaaaggggaccgggccgtgatgttaaatatctccggctcccaagtgactggatttgcctaggaccttcagatcaacagacttcagaccctcagacctgccccggggccaggtggagaaagtgagggccgtacaaggaagtgaaattctgagttgttggggctaagcctgaccccctctccatgctccccgccccaactcactctggcctcagtagatttttttttcagttgtggttgttgcccaggctggagtgcagtggcgccatcttggctcactgcacctccaccttccgggctcaagcgattctccagcctcagcctcctgagtagctaggactgcaggtgctccaccacgcccggctaatttttgtatttttagtagagatggggtttccccatgttggccaggctggtctcgaactcctggcctcaggtgtgatccgcccgtcttccacagcggacccgtcttccgcagccttctgtcttcc

SEQ ID NO: 384102 - DNA, 2329 bp, Homo sapiens
cctcttgggctcaacggatcctcccccttcggcctcagcctcccaagtagctagaactccaggtgcaagctaccgcacccagtaagaatcctattctcttttggactgacaaactcctactcatccaacaaagccccagctccaatggccccttctctgaggaacctgccctggttccctggtccacctcccagctagtagagttccctgggaaggggttagacgcctctaagtggcagagaggggccctcattcctgccccaaaggtagccttctcccctcccctttctggcagaagagaagtctgagatggagaaagagtgagagccgcccaggagctctgagcagagagcccgcaggagtgccacgtcccggcggcctcggcccctccctgcctcagtttcccgtggcatcaaagggggcgaggggcccctccaggcctctggtgacgggggtgctgtgcccaggcgggggtccgggggcgaccgaggggtctcaggaagtccgcggccgcaggaattcggcgcctccaggccttataaggacatttgcgctccgggccaatcagcggcgggggcgtggcgcgcggagcccggcgcgtcccaaccccgcgccagcccggcggtcccgtcccgtcccgtcctgtgcggccccgtcccgccgcccgcccgccagccatgagctccacgcagttcaacaagggcccctcgtacgggctgtcggccgaggtcaagaaccggctcctgtccaaatatgacccccagaaggaggcagagctccgcacctggatcgagggactcaccggcctctccatcggccccgacttccagaagggcctgaaggatggaactatcttatgcacactcatgaacaagctacagccgggctccgtccccaagatcaaccgctccatgcagaactggcaccagctagaaaacctgtccaacttcatcaaggccatggtcagctacggcatgaaccctgtggacctgttcgaggccaacgacctgtttgagagtgggaacatgacgcaggtgcaggtgtctcttctcgccctggcggggaaggccaagactaaggggctgcagagcggggtggacattggcgtcaagtactcggagaagcaggagcggaatttcgacgatgccaccatgaaggctggccagtgcgtcatcgggctgcagatgggcaccaacaaatgcgccagccagtcgggcatgactgcctacggcacgagaaggcatctctatgaccccaagaaccatatcctgccccccatggaccactcgaccatcagcctccagatgggcacgaacaagtgcgccagccaggtgggcatgacggctcccgggacccggcggcacatctatgataccaagctgggaaccgacaagtgtgacaactcctccatgtccctgcagatgggctacacgcagggcgccaaccagagcggccaggtcttcggcctgggccggcagatatatgaccccaagtactgcccgcaaggcacagtggccgatggggctccctcgggcaccggcgactgcccggacccgggggaggtccctgaatatcccccttactaccaggaggaggccggctactgaggctcccagcacgctctctccccacatcgtctccccatctgggtttttgggtttttctgtgttttcatctttttttttttttttcttaacccgttcagtgctgccagtcaaccaagggtctgtgagtgtcagcgtgggatcaggcagcagagcttttttcccctttgccttgatccttcgcaaggctgagccactgggctgtgggggaaggggtcaaggccatatcccaatacgtgtagggcgagggtccctgctggcacattcaggctgtgctgggaagaagagacctgggcttggaaggaaccggtccccgacggtttctggttgcctcgcctcttcccccttttgtcagctgagcagtttgtggtttctatgcccgcaagtttcaggaagtattcacaaaagaaaaatacattttttcccccaggggtggggcaaggacagtggagagagtgctaggaaatgagtcccctgggaaaggggaccgggccgtgatgttaaatatctccggctcccaagtgactggatttgcctaggaccttcagatcaacagacttcagaccctcagacctgccccggggccaggtggagaaagtgagggccgtacaaggaagtgaaattctgagttgttggggctaagcctgaccccctctccatgctccccgccccaactcactctggcctcagtagatttttcctgggcgacagaatgaaactcctca

SEQ ID NO: 384103 - DNA, 2895 bp, Homo sapiens
cctcttgggctcaacggatcctcccccttcggcctcagcctcccaagtagctagaactccaggtgcaagctaccgcacccagtaagaatcctattctcttttggactgacaaactcctactcatccaacaaagccccagctccaatggccccttctctgaggaacctgccctggttccctggtccacctcccagctagtagagttccctgggaaggggttagacgcctctaagtggcagagaggggccctcattcctgccccaaaggtagccttctcccctcccctttctggcagaagagaagtctgagatggagaaagagtgagagccgcccaggagctctgagcagagagcccgcaggagtgccacgtcccggcggcctcggcccctccctgcctcagtttcccgtggcatcaaagggggcgaggggcccctccaggcctctggtgacgggggtgctgtgcccaggcgggggtccgggggcgaccgaggggtctcaggaagtccgcggccgcaggaattcggcgcctccaggccttataaggacatttgcgctccgggccaatcagcggcgggggcgtggcgcgcggagcccggcgcgtcccaaccccgcgccagcccggcggtcccgtcccgtcccgtcctgtgcggccccgtcccgccgcccgcccgccagccatgagctccacgcagttcaacaagggcccctcgtacgggctgtcggccgaggtcaagaaccggctcctgtccaaatatgacccccagaaggaggcagagctccgcacctggatcgagggactcaccggcctctccatcggccccgacttccagaagggcctgaaggatggaactatcttatgcacactcatgaacaagctacagccgggctccgtccccaagatcaaccgctccatgcagaactggcaccagctagaaaacctgtccaacttcatcaaggccatggtcagctacggcatgaaccctgtggacctgttcgaggccaacgacctgtttgagagtgggaacatgacgcaggtgcaggtgtctcttctcgccctggcggggaaggccaagactaaggggctgcagagcggggtggacattggcgtcaagtactcggagaagcaggagcggaatttcgacgatgccaccatgaaggctggccagtgcgtcatcgggctgcagatgggcaccaacaaatgcgccagccagtcgggcatgactgcctacggcacgagaaggcatctctatgaccccaagaaccatatcctgccccccatggaccactcgaccatcagcctccagatgggcacgaacaagtgcgccagccaggatctcactctgttgcccaggctggagtgcagtggcacgatctcggctcactgcaacctctgcctcccgggttcaagagattctccttcctgcctcagcctcccgagtagctgggactacaggtgggcatgacggctcccgggacccggcggcacatctatgataccaagctgggaaccgacaagtgtgacaactcctccatgtccctgcagatgggctacacgcagggcgccaaccagagcggccaggtcttcggcctgggccggcagatatatgaccccaagtactgcccgcaaggcacagtggccgatggggctccctcgggcaccggcgactgcccggacccgggggaggtccctgaatatcccccttactaccaggaggaggccggctactgaggctcccagcacgctctctccccacatcgtctccccatctgggtttttgggtttttctgtgttttcatctttttttttttttttcttaacccgttcagtgctgccagtcaaccaagggtctgtgagtgtcagcgtgggatcaggcagcagagcttttttcccctttgccttgatccttcgcaaggctgagccactgggctgtgggggaaggggtcaaggccatatcccaatacgtgtagggcgagggtccctgctggcacattcaggctgtgctgggaagaagagacctgggcttggaaggaaccggtccccgacggtttctggttgcctcgcctcttcccccttttgtcagctgagcagtttgtggtttctatgcccgcaagtttcaggaagtattcacaaaagaaaaatacattttttcccccaggggtggggcaaggacagtggagagagtgctaggaaatgagtcccctgggaaaggggaccgggccgtgatgttaaatatctccggctcccaagtgactggatttgcctaggaccttcagatcaacagacttcagaccctcagacctgccccggggccaggtggagaaagtgagggccgtacaaggaagtgaaattctgagttgttggggctaagcctgaccccctctccatgctccccgccccaactcactctggcctcagtagatttttttttcagttgtggttgttgcccaggctggagtgcagtggcgccatcttggctcactgcacctccaccttccgggctcaagcgattctccagcctcagcctcctgagtagctaggactgcaggtgctccaccacgcccggctaatttttgtatttttagtagagatggggtttccccatgttggccaggctggtctcgaactcctggcctcaggtgtgatccgcccgcctccgcctccccaagcgctgagattacaggtgtgagccaccgtgcccaggccctcagtaggttttaaggagtccccagccctcctcccttctgggcccgaccagcttatactgctccatcttccccggccacatgccccgccaagtactgcacagggaccccccacccaggggccctgctccgtgagataatgtgaaatacgactgtggaccaaacgcaataaaacctctgtttgtacgaaga

SEQ ID NO: 384104 - DNA, 2746 bp, Homo sapiens
cctcttgggctcaacggatcctcccccttcggcctcagcctcccaagtagctagaactccaggtgcaagctaccgcacccagtaagaatcctattctcttttggactgacaaactcctactcatccaacaaagccccagctccaatggccccttctctgaggaacctgccctggttccctggtccacctcccagctagtagagttccctgggaaggggttagacgcctctaagtggcagagaggggccctcattcctgccccaaaggtagccttctcccctcccctttctggcagaagagaagtctgagatggagaaagagtgagagccgcccaggagctctgagcagagagcccgcaggagtgccacgtcccggcggcctcggcccctccctgcctcagtttcccgtggcatcaaagggggcgaggggcccctccaggcctctggtgacgggggtgctgtgcccaggcgggggtccgggggcgaccgaggggtctcaggaagtccgcggccgcaggaattcggcgcctccaggccttataaggacatttgcgctccgggccaatcagcggcgggggcgtggcgcgcggagcccggcgcgtcccaaccccgcgccagcccggcggtcccgtcccgtcccgtcctgtgcggccccgtcccgccgcccgcccgccagccatgagctccacgcagttcaacaagggcccctcgtacgggctgtcggccgaggtcaagaaccggctcctgtccaaatatgacccccagaaggaggcagagctccgcacctggatcgagggactcaccggcctctccatcggccccgacttccagaagggcctgaaggatggaactatcttatgcacactcatgaacaagctacagccgggctccgtccccaagatcaaccgctccatgcagaactggcaccagctagaaaacctgtccaacttcatcaaggccatggtcagctacggcatgaaccctgtggacctgttcgaggccaacgacctgtttgagagtgggaacatgacgcaggtgcaggccaagactaaggggctgcagagcggggtggacattggcgtcaagtactcggagaagcaggagcggaatttcgacgatgccaccatgaaggctggccagtgcgtcatcgggctgcagatgggcaccaacaaatgcgccagccagtcgggcatgactgcctacggcacgagaaggcatctctatgaccccaagaaccatatcctgccccccatggaccactcgaccatcagcctccagatgggcacgaacaagtgcgccagccaggtgggcatgacggctcccgggacccggcggcacatctatgataccaagctgggaaccgacaagtgtgacaactcctccatgtccctgcagatgggctacacgcagggcgccaaccagagcggccaggtcttcggcctgggccggcagatatatgaccccaagtactgcccgcaaggcacagtggccgatggggctccctcgggcaccggcgactgcccggacccgggggaggtccctgaatatcccccttactaccaggaggaggccggctactgaggctcccagcacgctctctccccacatcgtctccccatctgggtttttgggtttttctgtgttttcatctttttttttttttttcttaacccgttcagtgctgccagtcaaccaagggtctgtgagtgtcagcgtgggatcaggcagcagagcttttttcccctttgccttgatccttcgcaaggctgagccactgggctgtgggggaaggggtcaaggccatatcccaatacgtgtagggcgagggtccctgctggcacattcaggctgtgctgggaagaagagacctgggcttggaaggaaccggtccccgacggtttctggttgcctcgcctcttcccccttttgtcagctgagcagtttgtggtttctatgcccgcaagtttcaggaagtattcacaaaagaaaaatacattttttcccccaggggtggggcaaggacagtggagagagtgctaggaaatgagtcccctgggaaaggggaccgggccgtgatgttaaatatctccggctcccaagtgactggatttgcctaggaccttcagatcaacagacttcagaccctcagacctgccccggggccaggtggagaaagtgagggccgtacaaggaagtgaaattctgagttgttggggctaagcctgaccccctctccatgctccccgccccaactcactctggcctcagtagatttttttttcagttgtggttgttgcccaggctggagtgcagtggcgccatcttggctcactgcacctccaccttccgggctcaagcgattctccagcctcagcctcctgagtagctaggactgcaggtgctccaccacgcccggctaatttttgtatttttagtagagatggggtttccccatgttggccaggctggtctcgaactcctggcctcaggtgtgatccgcccgcctccgcctccccaagcgctgagattacaggtgtgagccaccgtgcccaggccctcagtaggttttaaggagtccccagccctcctcccttctgggcccgaccagcttatactgctccatcttccccggccacatgccccgccaagtactgcacagggaccccccacccaggggccctgctccgtgagataatgtgaaatacgactgtggaccaaacgcaataaaacctctgtttgtacgaaga

SEQ ID NO: 384105 - DNA, 2656 bp, Homo sapiens
cctcttgggctcaacggatcctcccccttcggcctcagcctcccaagtagctagaactccaggtgcaagctaccgcacccagtaagaatcctattctcttttggactgacaaactcctactcatccaacaaagccccagctccaatggccccttctctgaggaacctgccctggttccctggtccacctcccagctagtagagttccctgggaaggggttagacgcctctaagtggcagagaggggccctcattcctgccccaaaggtagccttctcccctcccctttctggcagaagagaagtctgagatggagaaagagtgagagccgcccaggagctctgagcagagagcccgcaggagtgccacgtcccggcggcctcggcccctccctgcctcagtttcccgtggcatcaaagggggcgaggggcccctccaggcctctggtgacgggggtgctgtgcccaggcgggggtccgggggcgaccgaggggtctcaggaagtccgcggccgcaggaattcggcgcctccaggccttataaggacatttgcgctccgggccaatcagcggcgggggcgtggcgcgcggagcccggcgcgtcccaaccccgcgccagcccggcggtcccgtcccgtcccgtcctgtgcggccccgtcccgccgcccgcccgccagccatgagctccacgcagttcaacaagggcccctcgtacgggctgtcggccgaggtcaagaaccggctcctgtccaaatatgacccccagaaggaggcagagctccgcacctggatcgagggactcaccggcctctccatcggccccgacttccagaagggcctgaaggatggaactatcttatgcacactcatgaacaagctacagccgggctccgtccccaagatcaaccgctccatgcagaactggcaccagctagaaaacctgtccaacttcatcaaggccatggtcagctacggcatgaaccctgtggacctgttcgaggccaacgacctgtttgagagtgggaacatgacgcaggtgcaggtgtctcttctcgccctggcggggaagatgggcaccaacaaatgcgccagccagtcgggcatgactgcctacggcacgagaaggcatctctatgaccccaagaaccatatcctgccccccatggaccactcgaccatcagcctccagatgggcacgaacaagtgcgccagccaggtgggcatgacggctcccgggacccggcggcacatctatgataccaagctgggaaccgacaagtgtgacaactcctccatgtccctgcagatgggctacacgcagggcgccaaccagagcggccaggtcttcggcctgggccggcagatatatgaccccaagtactgcccgcaaggcacagtggccgatggggctccctcgggcaccggcgactgcccggacccgggggaggtccctgaatatcccccttactaccaggaggaggccggctactgaggctcccagcacgctctctccccacatcgtctccccatctgggtttttgggtttttctgtgttttcatctttttttttttttttcttaacccgttcagtgctgccagtcaaccaagggtctgtgagtgtcagcgtgggatcaggcagcagagcttttttcccctttgccttgatccttcgcaaggctgagccactgggctgtgggggaaggggtcaaggccatatcccaatacgtgtagggcgagggtccctgctggcacattcaggctgtgctgggaagaagagacctgggcttggaaggaaccggtccccgacggtttctggttgcctcgcctcttcccccttttgtcagctgagcagtttgtggtttctatgcccgcaagtttcaggaagtattcacaaaagaaaaatacattttttcccccaggggtggggcaaggacagtggagagagtgctaggaaatgagtcccctgggaaaggggaccgggccgtgatgttaaatatctccggctcccaagtgactggatttgcctaggaccttcagatcaacagacttcagaccctcagacctgccccggggccaggtggagaaagtgagggccgtacaaggaagtgaaattctgagttgttggggctaagcctgaccccctctccatgctccccgccccaactcactctggcctcagtagatttttttttcagttgtggttgttgcccaggctggagtgcagtggcgccatcttggctcactgcacctccaccttccgggctcaagcgattctccagcctcagcctcctgagtagctaggactgcaggtgctccaccacgcccggctaatttttgtatttttagtagagatggggtttccccatgttggccaggctggtctcgaactcctggcctcaggtgtgatccgcccgcctccgcctccccaagcgctgagattacaggtgtgagccaccgtgcccaggccctcagtaggttttaaggagtccccagccctcctcccttctgggcccgaccagcttatactgctccatcttccccggccacatgccccgccaagtactgcacagggaccccccacccaggggccctgctccgtgagataatgtgaaatacgactgtggaccaaacgcaataaaacctctgtttgtacgaaga

SEQ ID NO: 384106 - DNA, 1682 bp, Homo sapiens
cctcttgggctcaacggatcctcccccttcggcctcagcctcccaagtagctagaactccaggtgcaagctaccgcacccagtaagaatcctattctcttttggactgacaaactcctactcatccaacaaagccccagctccaatggccccttctctgaggaacctgccctggttccctggtccacctcccagctagtagagttccctgggaaggggttagacgcctctaagtggcagagaggggccctcattcctgccccaaaggtagccttctcccctcccctttctggcagaagagaagtctgagatggagaaagagtgagagccgcccaggagctctgagcagagagcccgcaggagtgccacgtcccggcggcctcggcccctccctgcctcagtttcccgtggcatcaaagggggcgaggggcccctccaggcctctggtgacgggggtgctgtgcccaggcgggggtccgggggcgaccgaggggtctcaggaagtccgcggccgcaggaattcggcgcctccaggccttataaggacatttgcgctccgggccaatcagcggcgggggcgtggcgcgcggagcccggcgcgtcccaaccccgcgccagcccggcggtcccgtcccgtcccgtcctgtgcggccccgtcccgccgcccgcccgccagccatgagctccacgcagttcaacaagggcccctcgtacgggctgtcggccgaggtcaagaaccggctcctgtccaaatatgacccccagaaggaggcagagctccgcacctggatcgagggactcaccggcctctccatcggccccgacttccagaagggcctgaaggatggaactatcttatgcacactcatgaacaagctacagccgggctccgtccccaagatcaaccgctccatgcagaactggcaccagctagaaaacctgtccaacttcatcaaggccatggtcagctacggcatgaaccctgtggacctgttcgaggccaacgacctgtttgagagtgggaacatgacgcaggtgcaggtgtctcttctcgccctggcggggaaggccaagactaaggggctgcagagcggggtggacattggcgtcaagtactcggagaagcaggagcggaatttcgacgatgccaccatgaaggctggccagtgcgtcatcgggctgcagatgggcaccaacaaatgcgccagccagtcgggcatgactgcctacggcacgagaaggcatctctatgaccccaagaaccatatcctgccccccatggaccactcgaccatcagcctccagatgggcacgaacaagtgcgccagccaggtgggcatgacggctcccgggacccggcggcacatctatgataccaagctgggaaccgacaagtgtgacaactcctccatgtccctgcagatgggctacacgcagggcgccaaccagagcggccaggtcttcggcctgggccggcagatatatgaccccaagtactgcccgcaaggcacagtggccgatggggctccctcgggcaccggcgactgcccggacccgggggaggtccctgaatatcccccttactaccaggagaatcgctttaacctggaaggcggaggttgtggtgagctgagatcacaccattgcactccagcctgggcaataatagtaaaactccatctc

SEQ ID NO: 384107 - DNA, 848 bp, Homo sapiens
gatcgtatgtttgacccaggctgagcctaatcagctgagcagtttgtggtttctatgcccgcaagtttcaggaagtattcacaaaagaaaaatacattttttcccccaggggtggggcaaggacagtggagagagtgctaggaaatgagtcccctgggaaaggggaccgggccgtgatgttaaatatctccggctcccaagtgactggatttgcctaggaccttcagatcaacagacttcagaccctcagacctgccccggggccaggtggagaaagtgagggccgtacaaggaagtgaaattctgagttgttggggctaagcctgaccccctctccatgctccccgccccaactcactctggcctcagtagatttttttttcagttgtggttgttgcccaggctggagtgcagtggcgccatcttggctcactgcacctccaccttccgggctcaagcgattctccagcctcagcctcctgagtagctaggactgcaggtgctccaccacgcccggctaatttttgtatttttagtagagatggggtttccccatgttggccaggctggtctcgaactcctggcctcaggtgtgatccgcccgcctccgcctccccaagcgctgagattacaggtgtgagccaccgtgcccaggccctcagtaggttttaaggagtccccagccctcctcccttctgggcccgaccagcttatactgctccatcttccccggccacatgccccgccaagtactgcacagggaccccccacccaggggccctgctccgtgagataatgtgaaatacgactgtggaccaaacgcaataaaacctctgtttgtacgaaga

SEQ ID NO: 384108 - DNA, 783 bp, Homo sapiens
gcaaacctgccgggcgaccctagaggaacccctatccgcggtcggggtggggcaaggacagtggagagagtgctaggaaatgagtcccctgggaaaggggaccgggccgtgatgttaaatatctccggctcccaagtgactggatttgcctaggaccttcagatcaacagacttcagaccctcagacctgccccggggccaggtggagaaagtgagggccgtacaaggaagtgaaattctgagttgttggggctaagcctgaccccctctccatgctccccgccccaactcactctggcctcagtagatttttttttcagttgtggttgttgcccaggctggagtgcagtggcgccatcttggctcactgcacctccaccttccgggctcaagcgattctccagcctcagcctcctgagtagctaggactgcaggtgctccaccacgcccggctaatttttgtatttttagtagagatggggtttccccatgttggccaggctggtctcgaactcctggcctcaggtgtgatccgcccgcctccgcctccccaagcgctgagattacaggtgtgagccaccgtgcccaggccctcagtaggttttaaggagtccccagccctcctcccttctgggcccgaccagcttatactgctccatcttccccggccacatgccccgccaagtactgcacagggaccccccacccaggggccctgctccgtgagataatgtgaaatacgactgtggaccaaacgcaataaaacctctgtttgtacgaaga

SEQ ID NO: 384109 - DNA, 359 bp, Homo sapiens
ccggccccgcccacgtagatttgcccggctaatttttgtatttttagtagagatggggtttccccatgttggccaggctggtctcgaactcctggcctcaggtgtgatccgcccgcctccgcctccccaagcgctgagattacaggtgtgagccaccgtgcccaggccctcagtaggttttaaggagtccccagccctcctcccttctgggcccgaccagcttatactgctccatcttccccggccacatgccccgccaagtactgcacagggaccccccacccaggggccctgctccgtgagataatgtgaaatacgactgtggaccaaacgcaataaaacctctgtttgtacgaaga

SEQ ID NO: 384110 - DNA, 2773 bp, Homo sapiens
cctcttgggctcaacggatcctcccccttcggcctcagcctcccaagtagctagaactccaggtgcaagctaccgcacccagtaagaatcctattctcttttggactgacaaactcctactcatccaacaaagccccagctccaatggccccttctctgaggaacctgccctggttccctggtccacctcccagctagtagagttccctgggaaggggttagacgcctctaagtggcagagaggggccctcattcctgccccaaaggtagccttctcccctcccctttctggcagaagagaagtctgagatggagaaagagtgagagccgcccaggagctctgagcagagagcccgcaggagtgccacgtcccggcggcctcggcccctccctgcctcagtttcccgtggcatcaaagggggcgaggggcccctccaggcctctggtgacgggggtgctgtgcccaggcgggggtccgggggcgaccgaggggtctcaggaagtccgcggccgcaggaattcggcgcctccaggccttataaggacatttgcgctccgggccaatcagcggcgggggcgtggcgcgcggagcccggcgcgtcccaaccccgcgccagcccggcggtcccgtcccgtcccgtcctgtgcggccccgtcccgccgcccgcccgccagccatgagctccacgcagttcaacaagggcccctcgtacgggctgtcggccgaggtcaagaaccggctcctgtccaaatatgacccccagaaggaggcagagctccgcacctggatcgagggactcaccggcctctccatcggccccgacttccagaagggcctgaaggatggaactatcttatgcacactcatgaacaagctacagccgggctccgtccccaagatcaaccgctccatgcagaactggcaccagctagaaaacctgtccaacttcatcaaggccatggtcagctacggcatgaaccctgtggacctgttcgaggccaacgacctgtttgagagtgggaacatgacgcaggtgcaggtgtctcttctcgccctggcggggaaggccaagactaaggggctgcagagcggggtggacattggcgtcaagtactcggagaagcaggagcggaatttcgacgatgccaccatgaaggctggccagtgcgtcatcgggctgcagatgggcaccaacaaatgcgccagccagtcgggcatgactgcctacggcacgagaaggcatctctatgaccccaagaaccatatcctgccccccatggaccactcgaccatcagcctccagatgggcacgaacaagtgcgccagccaggtgggcatgacggctcccgggacccggcggcacatctatgataccaagctgggaaccgacaagtgtgacaactcctccatgtccctgcagatgggctacacgcagggcgccaaccagagcggccaggtcttcggcctgggccggcagatatatgaccccaagtactgcccgcaaggcacagtggccgatggggctccctcgggcaccggcgactgcccggacccgggggaggtccctgaatatcccccttactaccaggaggaggccggctactgaggctcccagcacgctctctccccacatcgtctccccatctgggtttttgggtttttctgtgttttcatctttttttttttttttcttaacccgttcagtgctgccagtcaaccaagggtctgtgagtgtcagcgtgggatcaggcagcagagcttttttcccctttgccttgatccttcgcaaggctgagccactgggctgtgggggaaggggtcaaggccatatcccaatacgtgtagggcgagggtccctgctggcacattcaggctgtgctgggaagaagagacctgggcttggaaggaaccggtccccgacggtttctggttgcctcgcctcttcccccttttgtcagctgagcagtttgtggtttctatgcccgcaagtttcaggaagtattcacaaaagaaaaatacattttttcccccaggggtggggcaaggacagtggagagagtgctaggaaatgagtcccctgggaaaggggaccgggccgtgatgttaaatatctccggctcccaagtgactggatttgcctaggaccttcagatcaacagacttcagaccctcagacctgccccggggccaggtggagaaagtgagggccgtacaaggaagtgaaattctgagttgttggggctaagcctgaccccctctccatgctccccgccccaactcactctggcctcagtagatttttttttcagttgtggttgttgcccaggctggagtgcagtggcgccatcttggctcactgcacctccaccttccgggctcaagcgattctccagcctcagcctcctgagtagctaggactgcaggtgctccaccacgcccggctaatttttgtatttttagtagagatggggtttccccatgttggccaggctggtctcgaactcctggcctcaggtgtgatccgcccgcctccgcctccccaagcgctgagattacaggtgtgagccaccgtgcccaggccctcagtaggttttaaggagtccccagccctcctcccttctgggcccgaccagcttatactgctccatcttccccggccacatgccccgccaagtactgcacagggaccccccacccaggggccctgctccgtgagataatgtgaaatacgactgtggaccaaacgcaataaaacctctgtttgtacgaaga

SEQ ID NO: 384111 - DNA, 2159 bp, Homo sapiens
gctggtacggccgagatttaggatcggcctgtgcggccccgtcccgccgcccgcccgccagccatgagctccacgcagttcaacaagggcccctcgtacgggctgtcggccgaggtcaagaaccggctcctgtccaaatatgacccccagaaggaggcagagctccgcacctggatcgagggactcaccggcctctccatcggccccgacttccagaagggcctgaaggatggaactatcttatgcacactcatgaacaagctacagccgggctccgtccccaagatcaaccgctccatgcagaactggcaccagctagaaaacctgtccaacttcatcaaggccatggtcagctacggcatgaaccctgtggacctgttcgaggccaacgacctgtttgagagtgggaacatgacgcaggtgcaggtgtctcttctcgccctggcggggaaggccaagactaaggggctgcagagcggggtggacattggcgtcaagtactcggagaagcaggagcggaatttcgacgatgccaccatgaaggctggccagtgcgtcatcgggctgcagatgggcaccaacaaatgcgccagccagtcgggcatgactgcctacggcacgagaaggcatctctatgaccccaagaaccatatcctgccccccatggaccactcgaccatcagcctccagatgggcacgaacaagtgcgccagccaggtgggcatgacggctcccgggacccggcggcacatctatgataccaagctgggaaccgacaagtgtgacaactcctccatgtccctgcagatgggctacacgcagggcgccaaccagagcggccaggtcttcggcctgggccggcagatatatgaccccaagtactgcccgcaaggcacagtggccgatggggctccctcgggcaccggcgactgcccggacccgggggaggtccctgaatatcccccttactaccaggaggaggccggctactgaggctcccagcacgctctctccccacatcgtctccccatctgggtttttgggtttttctgtgttttcatctttttttttttttttcttaacccgttcagtgctgccagtcaaccaagggtctgtgagtgtcagcgtgggatcaggcagcagagcttttttcccctttgccttgatccttcgcaaggctgagccactgggctgtgggggaaggggtcaaggccatatcccaatacgtgtagggcgagggtccctgctggcacattcaggctgtgctgggaagaagagacctgggcttggaaggaaccggtccccgacggtttctggttgcctcgcctcttcccccttttgtcagctgagcagtttgtggtttctatgcccgcaagtttcaggaagtattcacaaaagaaaaatacattttttcccccaggggtggggcaaggacagtggagagagtgctaggaaatgagtcccctgggaaaggggaccgggccgtgatgttaaatatctccggctcccaagtgactggatttgcctaggaccttcagatcaacagacttcagaccctcagacctgccccggggccaggtggagaaagtgagggccgtacaaggaagtgaaattctgagttgttggggctaagcctgaccccctctccatgctccccgccccaactcactctggcctcagtagatttttttttcagttgtggttgttgcccaggctggagtgcagtggcgccatcttggctcactgcacctccaccttccgggctcaagcgattctccagcctcagcctcctgagtagctaggactgcaggtgctccaccacgcccggctaatttttgtatttttagtagagatggggtttccccatgttggccaggctggtctcgaactcctggcctcaggtgtgatccgcccgcctccgcctccccaagcgctgagattacaggtgtgagccaccgtgcccaggccctcagtaggttttaaggagtccccagccctcctcccttctgggcccgaccagcttatactgctccatcttccccggccacatgccccgccaagtactgcacagggaccccccacccaggggccctgctccgtgagataatgtgaaatacgactgtggaccaaacgcaataaaacctctgtttgtacgaaga

SEQ ID NO: 384112 - DNA, 3003 bp, Homo sapiens
  misc_feature (3003)..(3003): n is a, c, g, or t
cctcttgggctcaacggatcctcccccttcggcctcagcctcccaagtagctagaactccaggtgcaagctaccgcacccagtaagaatcctattctcttttggactgacaaactcctactcatccaacaaagccccagctccaatggccccttctctgaggaacctgccctggttccctggtccacctcccagctagtagagttccctgggaaggggttagacgcctctaagtggcagagaggggccctcattcctgccccaaaggtagccttctcccctcccctttctggcagaagagaagtctgagatggagaaagagtgagagccgcccaggagctctgagcagagagcccgcaggagtgccacgtcccggcggcctcggcccctccctgcctcagtttcccgtggcatcaaagggggcgaggggcccctccaggcctctggtgacgggggtgctgtgcccaggcgggggtccgggggcgaccgaggggtctcaggaagtccgcggccgcaggaattcggcgcctccaggccttataaggacatttgcgctccgggccaatcagcggcgggggcgtggcgcgcggagcccggcgcgtcccaaccccgcgccagcccggcggtcccgtcccgtcccgtcctgtgcggccccgtcccgccgcccgcccgccagccatgagctccacgcagttcaacaagggcccctcgtacgggctgtcggccgaggtcaagaaccggctcctgtccaaatatgacccccagaaggaggcagagctccgcacctggatcgagggactcaccggcctctccatcggccccgacttccagaagggcctgaaggatggaactatcttatgcacactcatgaacaagctacagccgggctccgtccccaagatcaaccgctccatgcagaactggcaccagctagaaaacctgtccaacttcatcaaggccatggtcagctacggcatgaaccctgtggacctgttcgaggccaacgacctgtttgagagtgggaacatgacgcaggtgcaggtgtctcttctcgccctggcggggaaggccaagactaaggggctgcagagcggggtggacattggcgtcaagtactcggagaagcaggagcggaatttcgacgatgccaccatgaaggctggccagtgcgtcatcgggctgcagatgggcaccaacaaatgcgccagccagtcgggcatgactgcctacggcacgagaaggcatctctatgaccccaagaaccatatcctgccccccatggaccactcgaccatcagcctccagatgggcacgaacaagtgcgccagccaggtgggcatgacggctcccgggacccggcggcacatctatgataccaagctgggaaccgacaagtgtgacaactcctccatgtccctgcagatgggctacacgcagggcgccaaccagagcggccaggtcttcggcctgggccggcagatatatgaccccaagtactgcccgcaaggcacagtggccgatggggctccctcgggcaccggcgactgcccggacccgggggaggtccctgaatatcccccttactaccaggaggaggccggctactgaggctcccagcacgctctctccccacatcgtctccccatctgggtttttgggtttttctgtgttttcatctttttttttttttttcttaacccgttcagtgctgccagtcaaccaagggtctgtgagtgtcagcgtgggatcaggcagcagagcttttttcccctttgccttgatccttcgcaaggctgagccactgggctgtgggggaaggggtcaaggccatatcccaatacgtgtagggcgagggtccctgctggcacattcaggctgtgctgggaagaagagacctgggcttggaaggaaccggtccccgacggtttctggttgcctcgcctcttcccccttttgtcagctgagcagtttgtggtttctatgcccgcaagtttcaggaagtattcacaaaagaaaaatacattttttcccccaggggtggggcaaggacagtggagagagtgctaggaaatgagtcccctgggaaaggggaccgggccgtgatgttaaatatctccggctcccaagtgactggatttgcctaggaccttcagatcaacagacttcagaccctcagacctgccccggggccaggtggagaaagtgagggccgtacaaggaagtgaaattctgagttgttggggctaagcctgaccccctctccatgctccccgccccaactcactctggcctcagtagatttttttttcagttgtggttgttgcccaggctggagtgcagtggcgccatcttggctcactgcacctccaccttccgggctcaagcgattctccagcctcagcctcctgagtagctaggactgcaggtgctccaccacgcccggctaatttttgtatttttagtagagatggggtttccccatgttggccaggctggtctcgaactcctggcctcaggtgtgatccgcccgcctccgcctccccaagcgctgagattacaggtgtgagccaccgtgcccaggccctcagtaggttttaaggagtccccagccctcctcccttctgggcccgaccagcttatactgctccatcttccccggccacatgccccgccaagtactgcacagggaccccccacccaggggccctgctccgtgagataatgtgaaatacgactgtggaccaaacgcaataaaacctctgtttgtacgaagaaagaaaaaaaaaaaagaaaaaccaaaacagacaaaaaaaaaaaaaaaagaacaagaagaagggagaaaaaaagccccgaggagagcaaacaaagagcggacaacaccggcggcgtcgacaagagagaggacacagaacccacagctcgcgagcacacaggtggacacacacggcgggcacacagtagggggggacaatcaagcgggacaccacgagggacagcgatcggn

SEQ ID NO: 384113 - DNA, 2696 bp, Homo sapiens
cctcttgggctcaacggatcctcccccttcggcctcagcctcccaagtagctagaactccaggtgcaagctaccgcacccagtaagaatcctattctcttttggactgacaaactcctactcatccaacaaagccccagctccaatggccccttctctgaggaacctgccctggttccctggtccacctcccagctagtagagttccctgggaaggggttagacgcctctaagtggcagagaggggccctcattcctgccccaaaggtagccttctcccctcccctttctggcagaagagaagtctgagatggagaaagagtgagagccgcccaggagctctgagcagagagcccgcaggagtgccacgtcccggcggcctcggcccctccctgcctcagtttcccgtggcatcaaagggggcgaggggcccctccaggcctctggtgacgggggtgctgtgcccaggcgggggtccgggggcgaccgaggggtctcaggaagtccgcggccgcaggaattcggcgcctccaggccttataaggacatttgcgctccgggccaatcagcggcgggggcgtggcgcgcggagcccggcgcgtcccaaccccgcgccagcccggcggtcccgtcccgtcccgtcctgtgcggccccgtcccgccgcccgcccgccagccatgagctccacgcagttcaacaagggcccctcgtacgggctgtcggccgaggtcaagaaccggctcctgtccaaatatgacccccagaaggaggcagagctccgcacctggatcgagggactcaccggcctctccatcggccccgacttccagaagggcctgaaggatggaactatcttatgcacactcatgaacaagctacagccgggctccgtccccaagatcaaccgctccatgcagaactggcaccagctagaaaacctgtccaacttcatcaaggccatggtcagctacggcatgaaccctgtggacctgttcgaggccaacgacctgtttgagagtgggaacatgacgcaggtgcaggtgtctcttctcgccctggcggggaaggccaagactaaggggctgcagagcggggtggacattggcgtcaagtactcggagaagcaggagcggaatttcgacgatgccaccatgaaggctggccagtgcgtcatcgggctgcagatgggcaccaacaaatgcgccagccagtcgggcatgactgcctacggcacgagaaggcatctctatgaccccaagaaccatatcctgccccccatggaccactcgaccatcagcctccagatgggcacgaacaagtgcgccagccaggtgggcatgacggctcccgggacccggcggcacatctatgataccaagctgggaaccgacaagtgtgacaactcctccatgtccctgcagatgggctacacgcagggcgccaaccagagcggccaggtcttcggcctgggccggcagatatatgaccccaagtactgcccgcaaggcacagtggccgatggggctccctcgggcaccggcgactgcccggacccgggggaggtccctgaatatcccccttactaccaggaggaggccggctactgaggctcccagcacgctctctccccacatcgtctccccatctgggtttttgggtttttctgtgttttcatctttttttttttttttcttaacccgttcagtgctgccagtcaaccaagggtctgtgagtgtcagcgtgggatcaggcagcagagcttttttcccctttgccttgatccttcgcaaggctgagccactgggctgtgggggaaggggtcaaggccatatcccaatacgtgtagggcgagggtccctgctggcacattcaggctgtgctgggaagaagagacctgggcttggaaggaaccggtccccgacggtttctggttgcctcgcctcttcccccttttgtcagctgagcagtttgtggtttctatgcccgcaagtttcaggaagtattcacaaaagaaaaatacattttttcccccaggggtggggcaaggacagtggagagagtgctaggaaatgagtcccctgggaaaggggaccgggccgtgatgttaaatatctccggctcccaagtgactggatttgcctaggaccttcagatcaacagacttcagaccctcagacctgccccggggccaggtggagaaagtgagggccgtacaaggaagtgaaattctgagttgttggggctaagcctgaccccctctccatgctccccgccccaactcactctggcctcagtagatttttttttcagttgtggttgttgcccaggctggagtgcagtggcgccatcttggctcactgcacctccaccttccgggctcaagcgattctccagcctcagcctcctgagtagctaggactgcaggtgctccaccacgcccggctaatttttgtatttttagtagagatggggtttccccatgttggccaggctggtctcgaactcctggcctcaggtgtgatccgcccgcctccgcctccccaagcgctgagattacaggtgtgtgcccagccgacatggttttatcttgatcaaaccactgaagacttcaaagagggtcaaacagttgggcagtattaccagatacaatattatcagctacattaaggtgtctcaaaattgtttttcttgtagac

SEQ ID NO: 384114 - DNA, 2689 bp, Homo sapiens
cctcttgggctcaacggatcctcccccttcggcctcagcctcccaagtagctagaactccaggtgcaagctaccgcacccagtaagaatcctattctcttttggactgacaaactcctactcatccaacaaagccccagctccaatggccccttctctgaggaacctgccctggttccctggtccacctcccagctagtagagttccctgggaaggggttagacgcctctaagtggcagagaggggccctcattcctgccccaaaggtagccttctcccctcccctttctggcagaagagaagtctgagatggagaaagagtgagagccgcccaggagctctgagcagagagcccgcaggagtgccacgtcccggcggcctcggcccctccctgcctcagtttcccgtggcatcaaagggggcgaggggcccctccaggcctctggtgacgggggtgctgtgcccaggcgggggtccgggggcgaccgaggggtctcaggaagtccgcggccgcaggaattcggcgcctccaggccttataaggacatttgcgctccgggccaatcagcggcgggggcgtggcgcgcggagcccggcgcgtcccaaccccgcgccagcccggcggtcccgtcccgtcccgtcctgtgcggccccgtcccgccgcccgcccgccagccatgagctccacgcagttcaacaagggcccctcgtacgggctgtcggccgaggtcaagaaccggctcctgtccaaatatgacccccagaaggaggcagagctccgcacctggatcgagggactcaccggcctctccatcggccccgacttccagaagggcctgaaggatggaactatcttatgcacactcatgaacaagctacagccgggctccgtccccaagatcaaccgctccatgcagaactggcaccagctagaaaacctgtccaacttcatcaaggccatggtcagctacggcatgaaccctgtggacctgttcgaggccaacgacctgtttgagagtgggaacatgacgcaggtgcaggtgtctcttctcgccctggcggggaaggccaagactaaggggctgcagagcggggtggacattggcgtcaagtactcggagaagcaggagcggaatttcgacgatgccaccatgaaggctggccagtgcgtcatcgggctgcagatgggcaccaacaaatgcgccagccagtcgggcatgactgcctacggcacgagaaggcatctctatgaccccaagaaccatatcctgccccccatggaccactcgaccatcagcctccagatgggcacgaacaagtgcgccagccaggtgggcatgacggctcccgggacccggcggcacatctatgataccaagctgggaaccgacaagtgtgacaactcctccatgtccctgcagatgggctacacgcagggcgccaaccagagcggccaggtcttcggcctgggccggcagatatatgaccccaagtactgcccgcaaggcacagtggccgatggggctccctcgggcaccggcgactgcccggacccgggggaggtccctgaatatcccccttactaccaggaggaggccggctactgaggctcccagcacgctctctccccacatcgtctccccatctgggtttttgggtttttctgtgttttcatctttttttttttttttcttaacccgttcagtgctgccagtcaaccaagggtctgtgagtgtcagcgtgggatcaggcagcagagcttttttcccctttgccttgatccttcgcaaggctgagccactgggctgtgggggaaggggtcaaggccatatcccaatacgtgtagggcgagggtccctgctggcacattcaggctgtgctgggaagaagagacctgggcttggaaggaaccggtccccgacggtttctggttgcctcgcctcttcccccttttgtcagctgagcagtttgtggtttctatgcccgcaagtttcaggaagtattcacaaaagaaaaatacattttttcccccaggggtggggcaaggacagtggagagagtgctaggaaatgagtcccctgggaaaggggaccgggccgtgatgttaaatatctccggctcccaagtgactggatttgcctaggaccttcagatcaacagacttcagaccctcagacctgccccggggccaggtggagaaagtgagggccgtacaaggaagtgaaattctgagttgttggggctaagcctgaccccctctccatgctccccgccccaactcactctggcctcagtagatttttttttcagttgtggttgttgcccaggctggagtgcagtggcgccatcttggctcactgcacctccaccttccgggctcaagcgatttttccccatgttggccaggctggtctcgaactcctggcctcaggtgtgatccgcccgcctccgcctccccaagcgctgagattacaggtgtgagccaccgtgcccaggccctcagtaggttttaaggagtccccagccctcctcccttctgggcccgaccagcttatactgctccatcttccccggccacatgccccgccaagtactgcacagggaccccccacccaggggccctgctccgtgagataatgtgaaatacgactgtggaccaaacgcaataaaacctctgtttgtacgaaga

SEQ ID NO: 384115 - DNA, 2037 bp, Homo sapiens
aaccgcaggttccgtgccctcatgaaacgcgacggcagagctccgcacctggatcgagggactcaccggcctctccatcggccccgacttccagaagggcctgaaggatggaactatcttatgcacactcatgaacaagctacagccgggctccgtccccaagatcaaccgctccatgcagaactggcaccagctagaaaacctgtccaacttcatcaaggccatggtcagctacggcatgaaccctgtggacctgttcgaggccaacgacctgtttgagagtgggaacatgacgcaggtgcaggtgtctcttctcgccctggcggggaaggccaagactaaggggctgcagagcggggtggacattggcgtcaagtactcggagaagcaggagcggaatttcgacgatgccaccatgaaggctggccagtgcgtcatcgggctgcagatgggcaccaacaaatgcgccagccagtcgggcatgactgcctacggcacgagaaggcatctctatgaccccaagaaccatatcctgccccccatggaccactcgaccatcagcctccagatgggcacgaacaagtgcgccagccaggtgggcatgacggctcccgggacccggcggcacatctatgataccaagctgggaaccgacaagtgtgacaactcctccatgtccctgcagatgggctacacgcagggcgccaaccagagcggccaggtcttcggcctgggccggcagatatatgaccccaagtactgcccgcaaggcacagtggccgatggggctccctcgggcaccggcgactgcccggacccgggggaggtccctgaatatcccccttactaccaggaggaggccggctactgaggctcccagcacgctctctccccacatcgtctccccatctgggtttttgggtttttctgtgttttcatctttttttttttttttcttaacccgttcagtgctgccagtcaaccaagggtctgtgagtgtcagcgtgggatcaggcagcagagcttttttcccctttgccttgatccttcgcaaggctgagccactgggctgtgggggaaggggtcaaggccatatcccaatacgtgtagggcgagggtccctgctggcacattcaggctgtgctgggaagaagagacctgggcttggaaggaaccggtccccgacggtttctggttgcctcgcctcttcccccttttgtcagctgagcagtttgtggtttctatgcccgcaagtttcaggaagtattcacaaaagaaaaatacattttttcccccaggggtggggcaaggacagtggagagagtgctaggaaatgagtcccctgggaaaggggaccgggccgtgatgttaaatatctccggctcccaagtgactggatttgcctaggaccttcagatcaacagacttcagaccctcagacctgccccggggccaggtggagaaagtgagggccgtacaaggaagtgaaattctgagttgttggggctaagcctgaccccctctccatgctccccgccccaactcactctggcctcagtagatttttttttcagttgtggttgttgcccaggctggagtgcagtggcgccatcttggctcactgcacctccaccttccgggctcaagcgattctccagcctcagcctcctgagtagctaggactgcaggtgctccaccacgcccggctaatttttgtatttttagtagagatggggtttccccatgttggccaggctggtctcgaactcctggcctcaggtgtgatccgcccgcctccgcctccccaagcgctgagattacaggtgtgagccaccgtgcccaggccctcagtaggttttaaggagtccccagccctcctcccttctgggcccgaccagcttatactgctccatcttccccggccacatgccccgccaagtactgcacagggaccccccacccaggggccctgctccgtgagataatgtgaaatacgactgtggaccaaacgcaataaaacctctgtttgtacgaaga

SEQ ID NO: 384116 - DNA, 1680 bp, Homo sapiens
cctcttgggctcaacggatcctcccccttcggcctcagcctcccaagtagctagaactccaggtgcaagctaccgcacccagtaagaatcctattctcttttggactgacaaactcctactcatccaacaaagccccagctccaatggccccttctctgaggaacctgccctggttccctggtccacctcccagctagtagagttccctgggaaggggttagacgcctctaagtggcagagaggggccctcattcctgccccaaaggtagccttctcccctcccctttctggcagaagagaagtctgagatggagaaagagtgagagccgcccaggagctctgagcagagagcccgcaggagtgccacgtcccggcggcctcggcccctccctgcctcagtttcccgtggcatcaaagggggcgaggggcccctccaggcctctggtgacgggggtgctgtgcccaggcgggggtccgggggcgaccgaggggtctcaggaagtccgcggccgcaggaattcggcgcctccaggccttataaggacatttgcgctccgggccaatcagcggcgggggcgtggcgcgcggagcccggcgcgtcccaaccccgcgccagcccggcggtcccgtcccgtcccgtcctgtgcggccccgtcccgccgcccgcccgccagccatgagctccacgcagttcaacaagggcccctcgtacgggctgtcggccgaggtcaagaaccggctcctgtccaaatatgacccccagaaggaggcagagctccgcacctggatcgagggactcaccggcctctccatcggccccgacttccagaagggcctgaaggatggaactatcttatgcacactcatgaacaagctacagccgggctccgtccccaagatcaaccgctccatgcagaactggcaccagctagaaaacctgtccaacttcatcaaggccatggtcagctacggcatgaaccctgtggacctgttcgaggccaacgacctgtttgagagtgggaacatgacgcaggtgcaggtgtctcttctcgccctggcggggaaggccaagactaaggggctgcagagcggggtggacattggcgtcaagtactcggagaagcaggagcggaatttcgacgatgccaccatgaaggctggccagtgcgtcatcgggctgcagatgggcaccaacaaatgcgccagccagtcgggcatgactgcctacggcacgagaaggcatctctatgaccccaagaaccatatcctgccccccatggaccactcgaccatcagcctccagatgggcacgaacaagtgcgccagccaggtgggcatgacggctcccgggacccggcggcacatctatgataccaagctgggaaccgacaagtgtgacaactcctccatgtccctgcagatgggctacacgcagggcgccaaccagagcggccaggtcttcggcctgggccggcagatatatgaccccaagtactgcccgcaaggcacagtggccgatggggctccctcgggcaccggcgactgcccggacccgggggaggtccctgaatatcccccttactaccaggaggaggccggctactgaggctcccagcacgctctctccccacatcgtctccccatctgggttttttatacgctttgcagggtaccgactc

SEQ ID NO: 384117 - DNA, 1804 bp, Homo sapiens
acggggctgaggccgtgtcagcacgaatggaccccaaacagaccaccctcctgtgtctgtggtgctctgtctgggccagaggattcaggcacaggaaggccaagactaaggggctgcagagcggggtggacattggcgtcaagtactcggagaagcaggagcggaatttcgacgatgccaccatgaaggctggccagtgcgtcatcgggctgcagatgggcaccaacaaatgcgccagccagtcgggcatgactgcctacggcacgagaaggcatctctatgaccccaagaaccatatcctgccccccatggaccactcgaccatcagcctccagatgggcacgaacaagtgcgccagccaggtgggcatgacggctcccgggacccggcggcacatctatgataccaagctgggaaccgacaagtgtgacaactcctccatgtccctgcagatgggctacacgcagggcgccaaccagagcggccaggtcttcggcctgggccggcagatatatgaccccaagtactgcccgcaaggcacagtggccgatggggctccctcgggcaccggcgactgcccggacccgggggaggtccctgaatatcccccttactaccaggaggaggccggctactgaggctcccagcacgctctctccccacatcgtctccccatctgggtttttgggtttttctgtgttttcatctttttttttttttttcttaacccgttcagtgctgccagtcaaccaagggtctgtgagtgtcagcgtgggatcaggcagcagagcttttttcccctttgccttgatccttcgcaaggctgagccactgggctgtgggggaaggggtcaaggccatatcccaatacgtgtagggcgagggtccctgctggcacattcaggctgtgctgggaagaagagacctgggcttggaaggaaccggtccccgacggtttctggttgcctcgcctcttcccccttttgtcagctgagcagtttgtggtttctatgcccgcaagtttcaggaagtattcacaaaagaaaaatacattttttcccccaggggtggggcaaggacagtggagagagtgctaggaaatgagtcccctgggaaaggggaccgggccgtgatgttaaatatctccggctcccaagtgactggatttgcctaggaccttcagatcaacagacttcagaccctcagacctgccccggggccaggtggagaaagtgagggccgtacaaggaagtgaaattctgagttgttggggctaagcctgaccccctctccatgctccccgccccaactcactctggcctcagtagatttttttttcagttgtggttgttgcccaggctggagtgcagtggcgccatcttggctcactgcacctccaccttccgggctcaagcgattctccagcctcagcctcctgagtagctaggactgcaggtgctccaccacgcccggctaatttttgtatttttagtagagatggggtttccccatgttggccaggctggtctcgaactcctggcctcaggtgtgatccgcccgcctccgcctccccaagcgctgagattacaggtgtgagccaccgtgcccaggccctcagtaggttttaaggagtccccagccctcctcccttctgggcccgaccagcttatactgctccatcttccccggccacatgccccgccaagtactgcacagggaccccccacccaggggccctgctccgtgagataatgtgaaatacgactgtggaccaaacgcaataaaacctctgtttgtacgaaga

SEQ ID NO: 384118 - DNA, 270 bp, Homo sapiens
cagatctacactgtagaaataaacagtaagactttggaggttgcacattggaaaagtgaaggaactactgatctctatatgccctgtgcttggcacatagaaagctggtgataattgtgcactgagtactaacgtcaggcccagcagagtccaaaaggactggggcagcattgctgcacttgaaggaaatggttcgtttttctcattcatacgaaagggctgtctctctcccagctgtgctttttgagggttgcatgtgcaccttgtaaa

SEQ ID NO: 384119 - DNA, 402 bp, Homo sapiens
cctaaaaaggagggaaattctcacacatattcagcatggatgaaccctgaagacattatgcaaagtgaaataagctagctacaaaaggacaaatatatatctccacttacatgaggcacccacttacataaggcacttacatgagtagtcaaactcgtagagacagaaagtagaatgataattaccaggggctggtggggaggaggaacggggactcagtgtttaaggtggtatgagtttcagtttgggacaatgaagaggttctggagatgactggtggtgatgggtgcacagtaatatacacacacttaatgccgctgaactgtatgcttaaaaactgctaaaatggtaaattttatgtaatgtgtattttaccacaataaaaagatgtaatttcactgc

SEQ ID NO: 384120 - DNA, 397 bp, Homo sapiens
cactgtgtgtgcttcaactcctggactcaagcttctcccaagatctcaggctgtttgcagtccctacactttgtccatacaactaaagtctaaggagagctgatagaggaagttttctctctctagggatttaaattagggatttaaatgtatcagaagactttaaagatgagaaaccgtttaagactccaagtaattaaataataaaataataaaagtattcctagcatgttgaaaggtgacattgggaacctgcttatttgctgctcagccatatgtctgagggattaacttattctgtgtgtctagcagctgccagacacccatggggatggctgtgggtccatgtgtatgcacatgtaagtgtgtgtgtgtgtgtgtgtgtgtgtgtgggtgt

SEQ ID NO: 384121 - DNA, 791 bp, Homo sapiens
tggtattggtattgtttttggaattagcaattgacatttggtgtttaattggtattaacatttacttaactttcagttaaacacaaatgtcaaatacaacaatttgtacaatactaaatacaatatcagtattgaagcaaaaatatatattccatttgccacctagtaactaggtatattcagcaatttgagtttagctaatgtcatcatttttaaacaatacatacataaataagggtgtattaagtcatattgcaaccttataccttaatttaaaaacttgattataaaattagtcatgcttgttttttaaaagtattttgaacaatgaaaaatgattttacttttaaaaaaatgcttcactttaattctttaagttaaaaaatagaatgtaacctgagatcctaaaattccttgtttattttaatttttaaaacaaattgagaggggacattagtacagattttgtcttcaaagtttcctttagaaaatgtcaacaacttaaatatttaaaaagtgattaactacttgcaaagagactaaaaacaatatcttaagtatgtgagtccccaaacatacatatttctgatttagacttttaaactgtcaataccagagagacaacgccactgatggggacctggcactagtccttccagttaattttttccttggagaatggttttgggcgacagagtggcgtccggcttcccaggttgttgcactgacaaactgcagtggtggcaaagtcaaggagtctgacaaaatctcattaatcattttaaattaaa

SEQ ID NO: 384122 - DNA, 551 bp, Homo sapiens
gttccccaggtgattctaatgcacacacctggttaacaaccatagttaaaaaaatgatgaggccaggcacagcagctcacgtttgtaattccagcactttgggaggctgaggcgggcgtgagccaccgggccaggtcagttactccttaagtatgcaaaagcactcaacaaaaaaacacctcaggggatcatgcctgctgggtggtctttaaaggaaatgggctactttcctatactggaaaaaaacacctgacagaaaaaaagacgctctagagtagctgaaaataaaatgcctggctaatgcagaacctgatgaagaaataggatgaagtgtaacattctactgaggtcatgatatcccagcataaggcagagttttaaatcttgtttctcaacagggggaggagtgggggccaaggaaggagcatcggaatcactagagacatttaaaatacagtcggccctccttatccatgggttctgcatccatggattcaacaaactatggatcaaaaacagtcagaaaaaaataaagaaagatataaataaaa

SEQ ID NO: 384123 - DNA, 271 bp, Homo sapiens
tctctgcgaaaaagaaacagaaatattagccaggcaaggtatcgcatgcctttagtcccagctacttgggaagctgagacgggggatcatttgagtccaagagtttgaggttacagtgagctatgattgcatcactgcactccagcctgagcgacagaccaagaccttgtctctaaaaaaaaccccaataagaaactgttatgatctgtgcagtatttactattgcatattgtcctacatgtacacagtactttcatatgcattagatcac

SEQ ID NO: 384124 - DNA, 434 bp, Homo sapiens
  misc_feature (39)..(39): n is a, c, g, or t
cagccatacccactcatttatatattgcctatggctaantttgaggcagagtatacagactgtatggcccgcaaagcctaaaatatgtactatctggttctttacagaagaagtttgccacgcaccttctggcttagaccgttaacatttgatataattattgatgtggttggatttaggtgtaccattttatttcttctgtttgtccctgtgattttgtttttgtttcactactttttgtttctgggtttattagtattccaaatagagtaatttagtattttattggctatctatctatatttttgaaaaaattcttgctctaggaattaacaatattcatacctaacttttcatggttgacccttgctgttcgagttctagattgtgcttccttcctttaaaattcactggcccttgttctggcaggcaag

SEQ ID NO: 384125 - DNA, 219 bp, Homo sapiens
ctcctattgtagtttggagctggttgtcctagtcagaacttgtatgggtctattttaagcaaccccccctaaggacatgaacaaggcatgagctctgctaagtaaaccctgttagcttatttagaattattgttgagacttaaacataactgttctctaatgtatgctaggttctccaattagtgccaacagcaagtgtgctctattaggccttaactg

SEQ ID NO: 384126 - DNA, 1344 bp, Homo sapiens
tttgagacggagtctcactctgtcaccaaggctgcagtgcagtggcacgatctgggctcactgcaacctctgcctcccaggttcaagtgattcttctgcctctgcctcctgagttgcggggactgcattcgagcgccaccacacccagctaagttttgtatttttagtagagacagggtttcaccatgttggccaggctggtctcgaactcctgacttcgtgatctgcctgcctcggcctcccaaagtgctggtattacaggtgtgaatcaccgcacccggccaagatccagtcattttaaagacagcagagtttgataaccaatctgattctttgtttatagactatgcttcaattaaaaatcattcacatgatcatttttaaacaattcatttgcattttatgcccttatatctaattgtggaaagaagaattctcataagtgtaaagaattttttcaaatattgcctcttaatgttgggaaggaggttggaatgcatatatattccttaatagaccagaacccaaggtcatgtcccagtccactcctctttttgtgctgtcagaaacataatatctcattagttactttggaatttcaaccttctctcttgcacctgttccacaatccgaaattctaataaaagccccacttctgttacttctgttaatatttgtggttattaactttctgataaactaatatattgcttttgttttatttactagcacttactctgctctagaattttgcctgggacctttcttattattaacaaagaatacatgtgaatatttattttaaaaatatatatcctaccttgttccaagaaaaatttaacatggcttcttaataaataaatgggttaattaataaaaacagcatagaaacataattatgataacttaaagtggtaccatgaaacacacttggagaactagctcttcagtgttcataaatttgcctttgcaatgcctctcacaaaaaaaaattagtagtatcctttctgtaatgttaatgataaagtctaagattcaattctaggtttgccgaaaatgaatcctcacatgcctattaaggaagaagtcacttttttcataaaatctcttccctacctttttaatttttgcaattttaaaacttccttattaatgtaaaatgtagaataaatcagagatcaatatttgagcaacatactatttcgtttttgtttatagaaaagtgaaaactaaaattgaatgaaagcttgactttagccaaataatcaagaaaagttttgtgtcacttttccgtaacagccatttttttttccctgtaatagccactttttctttctttttaag

SEQ ID NO: 384127 - DNA, 551 bp, Homo sapiens
ctctggcaaacttgatccctcccccccgaccctagaggaaaaccggcgcctatcgatgccactttaagttatcataattaataaaaacagcatagaaacataattatgataacttaaagtggtaccatgaaacacacttggagaactagctcttcagtgttcataaatttgcctttgcaatgcctctcacaaaaaaaaattagtagtatcctttctgtaatgttaatgataaagtctaagattcaattctaggtttgccgaaaatgaatcctcacatgcctattaaggaagaagtcacttttttcataaaatctcttccctacctttttaatttttgcaattttaaaacttccttattaatgtaaaatgtagaataaatcagagatcaatatttgagcaacatactatttcgtttttgtttatagaaaagtgaaaactaaaattgaatgaaagcttgactttagccaaataatcaagaaaagttttgtgtcacttttccgtaacagccatttttttttccctgtaatagccactttttctttctttttaag

SEQ ID NO: 384128 - DNA, 319 bp, Homo sapiens
tttccaattattattttgccaatatcctcaactcttttgcccacttttatcttccattcaaccctccctgcaaaatcctgatctaaaagcaacccaagtatttgcctcttcaacctcccagctgctgagtggttttgggaattacacaaccactaagcttggtgcagatgcactatggcctcaatagagtcccccagtgctgcccactttctccttccatatttctccacagcagctggtcaaaatacatttctccccaaatgtcttacacaacccccttctctcttatcatccttacctcacccccaccccagttctt

SEQ ID NO: 384129 - DNA, 413 bp, Homo sapiens
atgggattgggctggggataagcctgaaaattctcttcacaggactgaaaaatcacttaaaaacttcagatcaatttaagcatttaatgtttagaagtttttcacatcatcttatacttaaacatctacacattgtatttcttcctgacacagtactgacagtggtgttagtaagatacagttaatttatttcttaaatggatatttcttcctgtattaatgaaacaaaaaatagatagtaagtgtgtagtatagtacttggtatatggtaagtactcagtaaacaccgtctcttttctttatatgtaatgaagtttgttaagaattttaataagatttatctgaaattgggtaaccggagcacttaatctttcctgccattatcaagcacccagttagtccacagcagtgac

SEQ ID NO: 384130 - DNA, 436 bp, Homo sapiens
acgccgcgattttgcctttggttccccgcgaagtccgaggcctggctctggagcccgcctgcgccccccagtggactcgcgagagggtgccgcgggcgagaagggcgcaggaaccgaggactccaggggctggggacttcgggggcggctctgggaagcggaaagcagtcagcggagaggaccccattctgggactgctcaggctccccaagacttgacgcagccccccacgcttctggaggtggggagggcctctggacagatgggtgtcccctggtgcccctccactcttctcttcctctcttttttggggggagaaacctcggaatttctatgagacctcccccagggagggggtcagttgggcccccatccctccccttgccacatcgcagcccctgttggaataaaaaaaagaacaaaaccccagaactgg

SEQ ID NO: 384131 - DNA, 700 bp, Homo sapiens
gctaaatcttccgggcagctgtctacactttggctcaggtcttgttctgtcacccaggctggagtgcaggggcatgatcactgctcaccccaacgtcaacctcctggattcaactgatcctcccaattgaatgattgttctgaaataccctctgcaggactcctttgtgatattcatcaaatatttcttgctctccaccctccagacacatggtaccatctgctgacttcccacatcagaagaatgatcttcaacccaagacacaggcaaagagagcatctaactgcttaaaatgagagcaggaatggctgttggcttagatagatggcaccccagagtcctgaaagaacttgcagatgtgatcacaggaccatctgaaccggagaaaccggggggaatggagagacagcaaaagaccggagatgggaatatgtgagcaggagagaagggtcatgttggagcagccaggactcagagcctttccgcagactgagtctggatcctttccttcagcctccaggaatactcccggctccacacccagaatggtaatccaggcaagggctctggtgtgtggccacactgccacctattacctgcgggtccaaatgcagtgactcaacttctctgtgcctctctttccacatgtataaaatgaggataatgttgctattgtaagaattgcatcaattaataaaca

SEQ ID NO: 384132 - DNA, 349 bp, Homo sapiens
ctgctctctagaaatacaattaaacaagcagcccctgtctctttttctccactttcagtcttggggaagggattggaatatgtgagcaggagagaagggtcatgttggagcagccaggactcagagcctttccgcagactgagtctggatcctttccttcagcctccaggaatactcccggctccacacccagaatggtaatccaggcaagggctctggtgtgtggccacactgccacctattacctgcgggtccaaatgcagtgactcaacttctctgtgcctctctttccacatgtataaaatgaggataatgttgctattgtaagaattgcatcaattaataaaca

SEQ ID NO: 384133 - DNA, 400 bp, Homo sapiens
ggcaggtttccaggggatccggcggaaggggggtgtggcactgcttctgccccatgccctgcccatgacagcccctccctgcagcagggggatctttagaaactgtacaccctcaaagcttcgtccatcagcaccccaggctgacttgggttcagagaggagacgtctgagttccttggacttctaacttcctcaggatcctccacttcccttctctccttctcatttcccactcttttttagtaatcttttgggatgggtagttgcatttcctttactcagatagcagagaagggaagcttgcttcttccgcaaacttttccagcaggaaaaatggagtcttgatgataaaccccagatttggagaatataatatcttgggaaggaggagggttggagg

SEQ ID NO: 384134 - DNA, 355 bp, Homo sapiens
gggcccaaggagcttgttgggacgttcaggagaccccgaggtgggaggttttggacacaacctgcatctcctcagagcgccttcgactctggaggccgccgtgtgacggcctgacacagggctgcggtgaggaccgaccagagagggatttccttttcgtcctcccaactaccagggattgagcactgggggccaggcaagggagaacatactatttcatatcaaatcagattctccacgttacctactcaagtcataagcgtctgaagaaagtgctctgtaaattctcagcagaatatgcttttaacaattctttaaaaacaataaagtcataataaatcttgatggcctgaat

SEQ ID NO: 384135 - DNA, 280 bp, Homo sapiens
gggcccaaggagcttgttgggacgttcaggagaccccgaggtgggaggttttggacacaacctgcatctcctcagagcgccttcgactctggaggccgccgtgtgacggcctgacacagggctgcgggagaacatactatttcatatcaaatcagattctccacgttacctactcaagtcataagcgtctgaagaaagtgctctgtaaattctcagcagaatatgcttttaacaattctttaaaaacaataaagtcataataaatcttgatggcctgaat

SEQ ID NO: 384136 - DNA, 386 bp, Homo sapiens
  misc_feature (345)..(345): n is a, c, g, or t
gggcccaaggagcttgttgggacgttcaggagaccccgaggtgggaggttttggacacaacctgcatctcctcagagcgccttcgactctggaggccgccgtgtgacggcctgacacagggctgcggtgaggaccgaccagagagggatttccttttcgtcctcccaactaccagggattgagcactgggggccaggcaagggagaacatactatttcatatcaaatcagattctccacgttacctactcaagtcataagcgtctgaagaaagtgctctgtaaattctcagcagaatatgcttttaacaattctttaaaaacaataaagtcgatgcggccgaaanccccaacaaataaattatcatgattctgagacgactaaact

SEQ ID NO: 384137 - DNA, 385 bp, Homo sapiens
gggcccaaggagcttgttgggacgttcaggagaccccgaggtgggaggttttggacacaacctgcatctcctcagagcgccttcgactctggaggccgccgtgtgacggcctgacacagggctgcggtgaggaccgaccagagagggatttccttttcgtcctcccaactaccagggattgagcactgggggccaggcaagggagaacatactatttcatatcaaatcagattctccacgttacctactcaagtcataagcgtctgaagaaagtgctctgtaaattctcagcagaatatgcttttaacaattctttaaaaacaataaagtcggatgcggccgaacaaaatattaccttaaattaccagcatatcggctagcaaaa

SEQ ID NO: 384138 - DNA, 386 bp, Homo sapiens
aggcccccggcgccggcattccgggcgtcgagcacatcttgacggcgcggcgcggcccccacttccggaaattaagggccgcgcctcagggcctcgaaatcctccgcgccgcctgaaggcgagtcccagccaaactaggttcaaaggacccagtggaggggaagaatgccggcgaggccttttctcggcaactcccccgtcgagggtcctccgggactcccgccacggactgggagaacatactatttcatatcaaatcagattctccacgttacctactcaagtcataagcgtctgaagaaagtgctctgtaaattctcagcagaatatgcttttaacaattctttaaaaacaataaagtcataataaatcttgatggcctgaat

SEQ ID NO: 384139 - DNA, 427 bp, Homo sapiens
agtaattattccaaagtcacattgcctatatgtggcagaagcagtattcaaaatggtggcactaaacctatggtattttgatgaagccaccttcaaaatattcacaacccagaagagacaatctctgtctctcattcgctcaacttctctctgtctctgacttactcaatcacacacatacacacacatgcacctagaatataagggaagatgtaatacataaataaataaaaggggggcaaatagtcacttatttgatgattttgagtatgtagatttgaagggcttccttaaatgcctggacatctggctgagtacagtagttcatgcttgtaatcccagcactttgggaggccaaggcgggaggctcacttgagctcaggagtttgagaccagcctgggcagcatagcaagaccctgtctctag

SEQ ID NO: 384140 - DNA, 237 bp, Homo sapiens
tcagcccttcttctactaaagaagtagagtggtatgctctttttagagtagccacccacacatacctttctcacattcctccttaagaagcaggaatgaacagaaatcacaatccatgaaaaaagaggaacccacaagtaaactgttgtatgtgtatgcagcatcagcaggtgagggtgaaagagaagctagggctcctgaatctacctgtcttgggtactcaaacagaccagggtg

SEQ ID NO: 384141 - DNA, 5298 bp, Homo sapiens
cgcggcgccgcgagaaacgccctaaagagtgaggggagagcgcgggagggcgagagggagggagagcggccgggagatcgagagcgaacgaggcagccgccggcggagaggagggagcgggcgagggccgggcaggaggagcgggcgcggcgcgggcgaggctgggacccgagcgcgctcacttcgccgcaaagtgccaacttcccctggagtgccgggcgcgcaccgtccgggcgcgggggaaagaaaggcagcgggaatttgagatttttgggaagaaagtcggatttcccccgtccccttccccctgttactaatcctcattaaaaagaaaaacaacagtaactgcaaacttgctaccatcccgtacgtcccccactcctggcaccatgaaggcggccgtcgatctcaagccgactctcaccatcatcaagacggaaaaagtcgatctggagcttttcccctccccggatatggaatgtgcagatgtcccactattaactccaagcagcaaagaaatgatgtctcaagcattaaaagctactttcagtggtttcactaaagaacagcaacgactggggatcccaaaagacccccggcagtggacagaaacccatgttcgggactgggtgatgtgggctgtgaatgaattcagcctgaaaggtgtagacttccagaagttctgtatgaatggagcagccctctgcgccctgggtaaagactgctttctcgagctggccccagactttgttggggacatcttatgggaacatctagagatcctgcagaaagaggatgtgaaaccatatcaagttaatggagtcaacccagcctatccagaatcccgctatacctcggattacttcattagctatggtattgagcatgcccagtgtgttccaccatcggagttctcagagcccagcttcatcacagagtcctatcagacgctccatcccatcagctcggaagagctcctctccctcaagtatgagaatgactacccctcggtcattctccgagaccctctccagacagacaccttgcagaatgactactttgctatcaaacaagaagtcgtcaccccagacaacatgtgcatggggaggaccagtcgtggtaaactcgggggccaggactcttttgaaagcatagagagctacgatagttgtgatcgcctcacccagtcctggagcagccagtcatctttcaacagcctgcagcgtgttccctcctatgacagcttcgactcagaggactatccggctgccctgcccaaccacaagcccaagggcaccttcaaggactatgtgcgggaccgtgctgacctcaataaggacaagcctgtcattcctgctgctgccctagctggctacacaggcagtggaccaatccagctatggcagtttcttctggaattactcactgataaatcctgtcagtcttttatcagctggacaggagatggctgggaattcaaactttctgacccagatgaggtggccaggagatggggaaagaggaaaaacaaacctaagatgaattatgagaaactgagccgtggcctacgctactattacgacaaaaacatcatccacaagacagcggggaaacgctacgtgtaccgctttgtgtgtgacctgcagagcctgctggggtacacccctgaggagctgcacgccatgctggacgtcaagccagatgccgacgagtgatggcactgaaggggctggggaaaccctgctgagaccttccaaggacagccgtgttggttggactctgaattttgaattgttattctattttttattttccagaactcattttttaccttcaggggtgggagctaagtcagttgcagctgtaatcaattgtgcgcagttgggaaaggaaagccaggactgtggggtgggtgggaccgaattcttgagcaaattttcaggagagggagaagggccttctcagaagcttgaaggctctggcttaacagagaaagagactaatgtgtccaatcatttttaaaaatcatccatgaaaaagtgtcttgagttgtggacccattagcaagtgacattgtcacatcagaactcatgaaactgatgtaaggcaattaatttgcttctgtttttaggtctgggagggcaaaaaagaggtgggtgggatgaaacatgttttggggggggatgcactgaaaatctgagaactatttacctatcactctagttttgaagcaaagatggacttcagtggggaggggccaaaaccgttgttgtgttaaaatttattttattaaattttgtgccagtattttttttcttaaaaatcgtcttaagctctaaggtggtctcagtattgcaatatcatgtaagtttgtttttatttgccggctgaggattctgtcacaatgaaagaaaactgtttatatagaccccattggaaaagcaaaacgctctcactgagatcagggatcccaaattcatgggacttatataagaaggacaattaatgctgatttgggtacaggggaattatgtgtgtgaatgtcatctacaattaaaaaaaattagcacatccctttacttacttgttatcagtggattctcggggtttggacttaatgttgagctaagaagcattaagtctttgaactgaatgtattttgcatccctggttttggacgacagtaaacgtaggagcactgttgaagtcctggaagggagatcgaaggaggaagattgacttggttctttcttagtcctatatctgtagcatagatgacttggaataaaagctgtatgcatgggcattacccctcaggtcctaagaaataagtcctgaatgcatgtcgttccaaactaacactctgtaatttttcttttatgtcttattttccaagagtcctccattttttgcaccccctcaccgccaactctgttattcagtagagagaagtgtacggctttctgattggtgagtgaaaaagtaacttgagacacgacctaagttgaagagtttagacttgctgagttttagaagtgatggaaattaagagagcatttcaataaaatgtgacttggctgtctttggaagagaagtgcaaggctttcctttgaagaatttaaattagtccggtaggatgtcaggtgagactgtgtatgcaaaatgaatggcacaggtgatgccagggcctcttgcttgggtctgatgtcttggcacagggtaagtgaaggttaattccagaagagaggaatgacttgaaggcaaaggaaactaaggaaggaggttcagtgaggaaaataaggttgtccatgagatttgaatagatttttagttcccccaaggtttaaatacaaacatagtcaagcaaggtagtcatctttctgctggttgtgagggggaatctgaaaatggagttttagaggaaaagtcaacatctaactagtgagggaaagtgcctaatacaattagaatctccctcactctatagttgcccagttgaaaggataaggaggaggggtggcttttatggacttccatgagagaaggaaagaaatatttcaggtaagcttctcagggctggccctttttgggatttggatgagaaattggaagtactaactactttctagcatatctttaagaaaattgattgttatttactcccagatcctcttgcagacccagaattatcaggaacatagctctgtgattcatgagtgtccccatactgatgaattggagcatccatatggaaagcaaaggcagaattatcccagctgtattattttgatcttttggatgcaggtgccttaatgaagctctcaaaatattttaggagctgctcagggagtgttgggtggaactgtttggactacattgttttctcttagattatgtgatttttgttgggcactggcaaaaggtgtgtgtgtgaatgtgtgcatgtgtgtgaatgttgtgtgtgtgtgtgtgtgtttgtgtgtgtgtgtgtgtgtttgcagacatgcaaaactgcagctgaaataataccttagatttctaggtaagtctttccacatttcaataatgggtaagagtagaaccagggccgggtatcaattattgcttgctgtttgcaaccaggcataaaatcactttctcaaatcatccaccgttcctattaaatttatgccggaaactctccttctgtgagtataactcctgcagttcctatagcagataagatataagaaagtgcctcctagtgctcctccgcccgcttgtttgctaaaattccctttctctctaagtccaccattttcaagatttgtagatagtgtattagttaagacagctttgtcgatctggccagatgttttttctcctttgtccaaaggccagagaccatcccaggaagagtggtgggtggtttatacactggaaatgttgcgtttatgctttttaaaaacacacgttaacttcagaggaaggatgggcaaatctggtctagctgggtgaaacccttattttcccagagatgccttaacctttgttggttttggctttagggttcagagtcacttttgttcccttctccattctggagagggacttcccctacatagagccctgatttttgtggctgtggggattggaggtagcattcaaagatcagatgtgcttttcctcactttggagatgaacactctgggttttacagcattaacctgcctaaccttcatggtgagaaatacaccatctctcttctagtcatgctgtgcatgccgcttactctgttggggtctatataaatttgttgaactcttacctacattccaaagaagtttcaaggaaccataaatatatgtatacatatacatatataaaatatatatattaaaataaaattatcaggaatactgcctcagttattgaacttttttttttaagaatactttttttttaagctgagaagtatagggatgaaaaagatgttatattgtgtttgactattttccaacttgtattttcatataatttatattttttaaaagctgaaaatttagaagcaagatgaaaaaaaggaaaagcaggtgctttttaaaaatcagaactgaggtagcttagagatgtagcgatgtaagtgtcgatgtttttttaaaaaaaaatgcaaaaaaattcttatggcggagttttttgtttgtttattttagtagctgatgctggcacatcattttgctggagagttttttatatactgtagcctgatttcatattgtattttaaactgtgtgaaattaaaaacaaagaatttcattc

SEQ ID NO: 384142 - DNA, 5214 bp, Homo sapiens
  misc_feature (14)..(14): n is a, c, g, or t
gtgcatggtactgncccggaatttaggagggagcgggcgagggccgggcaggaggagcgggcgcggcgcgggcgaggctgggacccgagcgcgctcacttcgccgcaaagtgccaacttcccctggagtgccgggcgcgcaccgtccgggcgcgggggaaagaaaggcagcgggaatttgagatttttgggaagaaagtcggatttcccccgtccccttccccctgttactaatcctcattaaaaagaaaaacaacagtaactgcaaacttgctaccatcccgtacgtcccccactcctggcaccatgaaggcggccgtcgatctcaagccgactctcaccatcatcaagacggaaaaagtcgatctggagcttttcccctccccggatatggaatgtgcagatgtcccactattaactccaagcagcaaagaaatgatgtctcaagcattaaaagctactttcagtggtttcactaaagaacagcaacgactggggatcccaaaagacccccggcagtggacagaaacccatgttcgggactgggtgatgtgggctgtgaatgaattcagcctgaaaggtgtagacttccagaagttctgtatgaatggagcagccctctgcgccctgggtaaagactgctttctcgagctggccccagactttgttggggacatcttatgggaacatctagagatcctgcagaaagaggatgtgaaaccatatcaagttaatggagtcaacccagcctatccagaatcccgctatacctcggattacttcattagctatggtattgagcatgcccagtgtgttccaccatcggagttctcagagcccagcttcatcacagagtcctatcagacgctccatcccatcagctcggaagagctcctctccctcaagtatgagaatgactacccctcggtcattctccgagaccctctccagacagacaccttgcagaatgactactttgctatcaaacaagaagtcgtcaccccagacaacatgtgcatggggaggaccagtcgtggtaaactcgggggccaggactcttttgaaagcatagagagctacgatagttgtgatcgcctcacccagtcctggagcagccagtcatctttcaacagcctgcagcgtgttccctcctatgacagcttcgactcagaggactatccggctgccctgcccaaccacaagcccaagggcaccttcaaggactatgtgcgggaccgtgctgacctcaataaggacaagcctgtcattcctgctgctgccctagctggctacacaggcagtggaccaatccagctatggcagtttcttctggaattactcactgataaatcctgtcagtcttttatcagctggacaggagatggctgggaattcaaactttctgacccagatgaggtggccaggagatggggaaagaggaaaaacaaacctaagatgaattatgagaaactgagccgtggcctacgctactattacgacaaaaacatcatccacaagacagcggggaaacgctacgtgtaccgctttgtgtgtgacctgcagagcctgctggggtacacccctgaggagctgcacgccatgctggacgtcaagccagatgccgacgagtgatggcactgaaggggctggggaaaccctgctgagaccttccaaggacagccgtgttggttggactctgaattttgaattgttattctattttttattttccagaactcattttttaccttcaggggtgggagctaagtcagttgcagctgtaatcaattgtgcgcagttgggaaaggaaagccaggactgtggggtgggtgggaccgaattcttgagcaaattttcaggagagggagaagggccttctcagaagcttgaaggctctggcttaacagagaaagagactaatgtgtccaatcatttttaaaaatcatccatgaaaaagtgtcttgagttgtggacccattagcaagtgacattgtcacatcagaactcatgaaactgatgtaaggcaattaatttgcttctgtttttaggtctgggagggcaaaaaagaggtgggtgggatgaaacatgttttggggggggatgcactgaaaatctgagaactatttacctatcactctagttttgaagcaaagatggacttcagtggggaggggccaaaaccgttgttgtgttaaaatttattttattaaattttgtgccagtattttttttcttaaaaatcgtcttaagctctaaggtggtctcagtattgcaatatcatgtaagtttgtttttatttgccggctgaggattctgtcacaatgaaagaaaactgtttatatagaccccattggaaaagcaaaacgctctcactgagatcagggatcccaaattcatgggacttatataagaaggacaattaatgctgatttgggtacaggggaattatgtgtgtgaatgtcatctacaattaaaaaaaattagcacatccctttacttacttgttatcagtggattctcggggtttggacttaatgttgagctaagaagcattaagtctttgaactgaatgtattttgcatccctggttttggacgacagtaaacgtaggagcactgttgaagtcctggaagggagatcgaaggaggaagattgacttggttctttcttagtcctatatctgtagcatagatgacttggaataaaagctgtatgcatgggcattacccctcaggtcctaagaaataagtcctgaatgcatgtcgttccaaactaacactctgtaatttttcttttatgtcttattttccaagagtcctccattttttgcaccccctcaccgccaactctgttattcagtagagagaagtgtacggctttctgattggtgagtgaaaaagtaacttgagacacgacctaagttgaagagtttagacttgctgagttttagaagtgatggaaattaagagagcatttcaataaaatgtgacttggctgtctttggaagagaagtgcaaggctttcctttgaagaatttaaattagtccggtaggatgtcaggtgagactgtgtatgcaaaatgaatggcacaggtgatgccagggcctcttgcttgggtctgatgtcttggcacagggtaagtgaaggttaattccagaagagaggaatgacttgaaggcaaaggaaactaaggaaggaggttcagtgaggaaaataaggttgtccatgagatttgaatagatttttagttcccccaaggtttaaatacaaacatagtcaagcaaggtagtcatctttctgctggttgtgagggggaatctgaaaatggagttttagaggaaaagtcaacatctaactagtgagggaaagtgcctaatacaattagaatctccctcactctatagttgcccagttgaaaggataaggaggaggggtggcttttatggacttccatgagagaaggaaagaaatatttcaggtaagcttctcagggctggccctttttgggatttggatgagaaattggaagtactaactactttctagcatatctttaagaaaattgattgttatttactcccagatcctcttgcagacccagaattatcaggaacatagctctgtgattcatgagtgtccccatactgatgaattggagcatccatatggaaagcaaaggcagaattatcccagctgtattattttgatcttttggatgcaggtgccttaatgaagctctcaaaatattttaggagctgctcagggagtgttgggtggaactgtttggactacattgttttctcttagattatgtgatttttgttgggcactggcaaaaggtgtgtgtgtgaatgtgtgcatgtgtgtgaatgttgtgtgtgtgtgtgtgtgtttgtgtgtgtgtgtgtgtgtttgcagacatgcaaaactgcagctgaaataataccttagatttctaggtaagtctttccacatttcaataatgggtaagagtagaaccagggccgggtatcaattattgcttgctgtttgcaaccaggcataaaatcactttctcaaatcatccaccgttcctattaaatttatgccggaaactctccttctgtgagtataactcctgcagttcctatagcagataagatataagaaagtgcctcctagtgctcctccgcccgcttgtttgctaaaattccctttctctctaagtccaccattttcaagatttgtagatagtgtattagttaagacagctttgtcgatctggccagatgttttttctcctttgtccaaaggccagagaccatcccaggaagagtggtgggtggtttatacactggaaatgttgcgtttatgctttttaaaaacacacgttaacttcagaggaaggatgggcaaatctggtctagctgggtgaaacccttattttcccagagatgccttaacctttgttggttttggctttagggttcagagtcacttttgttcccttctccattctggagagggacttcccctacatagagccctgatttttgtggctgtggggattggaggtagcattcaaagatcagatgtgcttttcctcactttggagatgaacactctgggttttacagcattaacctgcctaaccttcatggtgagaaatacaccatctctcttctagtcatgctgtgcatgccgcttactctgttggggtctatataaatttgttgaactcttacctacattccaaagaagtttcaaggaaccataaatatatgtatacatatacatatataaaatatatatattaaaataaaattatcaggaatactgcctcagttattgaacttttttttttaagaatactttttttttaagctgagaagtatagggatgaaaaagatgttatattgtgtttgactattttccaacttgtattttcatataatttatattttttaaaagctgaaaatttagaagcaagatgaaaaaaaggaaaagcaggtgctttttaaaaatcagaactgaggtagcttagagatgtagcgatgtaagtgtcgatgtttttttaaaaaaaaatgcaaaaaaattcttatggcggagttttttgtttgtttattttagtagctgatgctggcacatcattttgctggagagttttttatatactgtagcctgatttcatattgtattttaaactgtgtgaaattaaaaacaaagaatttcattc

SEQ ID NO: 384143 - DNA, 4957 bp, Homo sapiens
tcagaggactatccggctgccctgcccaaccacaagcccaagggcaccttcaaggactatgtgcgggaccgtgctgacctcaataaggacaagcctgtcattcctgctgctgccctagctggccacacagatatggaatgtgcagatgtcccactattaactccaagcagcaaagaaatgatgtctcaagcattaaaagctactttcagtggtttcactaaagaacagcaacgactggggatcccaaaagacccccggcagtggacagaaacccatgttcgggactgggtgatgtgggctgtgaatgaattcagcctgaaaggtgtagacttccagaagttctgtatgaatggagcagccctctgcgccctgggtaaagactgctttctcgagctggccccagactttgttggggacatcttatgggaacatctagagatcctgcagaaagaggatgtgaaaccatatcaagttaatggagtcaacccagcctatccagaatcccgctatacctcggattacttcattagctatggtattgagcatgcccagtgtgttccaccatcggagttctcagagcccagcttcatcacagagtcctatcagacgctccatcccatcagctcggaagagctcctctccctcaagtatgagaatgactacccctcggtcattctccgagaccctctccagacagacaccttgcagaatgactactttgctatcaaacaagaagtcgtcaccccagacaacatgtgcatggggaggaccagtcgtggtaaactcgggggccaggactcttttgaaagcatagagagctacgatagttgtgatcgcctcacccagtcctggagcagccagtcatctttcaacagcctgcagcgtgttccctcctatgacagcttcgactcagaggactatccggctgccctgcccaaccacaagcccaagggcaccttcaaggactatgtgcgggaccgtgctgacctcaataaggacaagcctgtcattcctgctgctgccctagctggctacacaggcagtggaccaatccagctatggcagtttcttctggaattactcactgataaatcctgtcagtcttttatcagctggacaggagatggctgggaattcaaactttctgacccagatgaggtggccaggagatggggaaagaggaaaaacaaacctaagatgaattatgagaaactgagccgtggcctacgctactattacgacaaaaacatcatccacaagacagcggggaaacgctacgtgtaccgctttgtgtgtgacctgcagagcctgctggggtacacccctgaggagctgcacgccatgctggacgtcaagccagatgccgacgagtgatggcactgaaggggctggggaaaccctgctgagaccttccaaggacagccgtgttggttggactctgaattttgaattgttattctattttttattttccagaactcattttttaccttcaggggtgggagctaagtcagttgcagctgtaatcaattgtgcgcagttgggaaaggaaagccaggactgtggggtgggtgggaccgaattcttgagcaaattttcaggagagggagaagggccttctcagaagcttgaaggctctggcttaacagagaaagagactaatgtgtccaatcatttttaaaaatcatccatgaaaaagtgtcttgagttgtggacccattagcaagtgacattgtcacatcagaactcatgaaactgatgtaaggcaattaatttgcttctgtttttaggtctgggagggcaaaaaagaggtgggtgggatgaaacatgttttggggggggatgcactgaaaatctgagaactatttacctatcactctagttttgaagcaaagatggacttcagtggggaggggccaaaaccgttgttgtgttaaaatttattttattaaattttgtgccagtattttttttcttaaaaatcgtcttaagctctaaggtggtctcagtattgcaatatcatgtaagtttgtttttatttgccggctgaggattctgtcacaatgaaagaaaactgtttatatagaccccattggaaaagcaaaacgctctcactgagatcagggatcccaaattcatgggacttatataagaaggacaattaatgctgatttgggtacaggggaattatgtgtgtgaatgtcatctacaattaaaaaaaattagcacatccctttacttacttgttatcagtggattctcggggtttggacttaatgttgagctaagaagcattaagtctttgaactgaatgtattttgcatccctggttttggacgacagtaaacgtaggagcactgttgaagtcctggaagggagatcgaaggaggaagattgacttggttctttcttagtcctatatctgtagcatagatgacttggaataaaagctgtatgcatgggcattacccctcaggtcctaagaaataagtcctgaatgcatgtcgttccaaactaacactctgtaatttttcttttatgtcttattttccaagagtcctccattttttgcaccccctcaccgccaactctgttattcagtagagagaagtgtacggctttctgattggtgagtgaaaaagtaacttgagacacgacctaagttgaagagtttagacttgctgagttttagaagtgatggaaattaagagagcatttcaataaaatgtgacttggctgtctttggaagagaagtgcaaggctttcctttgaagaatttaaattagtccggtaggatgtcaggtgagactgtgtatgcaaaatgaatggcacaggtgatgccagggcctcttgcttgggtctgatgtcttggcacagggtaagtgaaggttaattccagaagagaggaatgacttgaaggcaaaggaaactaaggaaggaggttcagtgaggaaaataaggttgtccatgagatttgaatagatttttagttcccccaaggtttaaatacaaacatagtcaagcaaggtagtcatctttctgctggttgtgagggggaatctgaaaatggagttttagaggaaaagtcaacatctaactagtgagggaaagtgcctaatacaattagaatctccctcactctatagttgcccagttgaaaggataaggaggaggggtggcttttatggacttccatgagagaaggaaagaaatatttcaggtaagcttctcagggctggccctttttgggatttggatgagaaattggaagtactaactactttctagcatatctttaagaaaattgattgttatttactcccagatcctcttgcagacccagaattatcaggaacatagctctgtgattcatgagtgtccccatactgatgaattggagcatccatatggaaagcaaaggcagaattatcccagctgtattattttgatcttttggatgcaggtgccttaatgaagctctcaaaatattttaggagctgctcagggagtgttgggtggaactgtttggactacattgttttctcttagattatgtgatttttgttgggcactggcaaaaggtgtgtgtgtgaatgtgtgcatgtgtgtgaatgttgtgtgtgtgtgtgtgtgtttgtgtgtgtgtgtgtgtgtttgcagacatgcaaaactgcagctgaaataataccttagatttctaggtaagtctttccacatttcaataatgggtaagagtagaaccagggccgggtatcaattattgcttgctgtttgcaaccaggcataaaatcactttctcaaatcatccaccgttcctattaaatttatgccggaaactctccttctgtgagtataactcctgcagttcctatagcagataagatataagaaagtgcctcctagtgctcctccgcccgcttgtttgctaaaattccctttctctctaagtccaccattttcaagatttgtagatagtgtattagttaagacagctttgtcgatctggccagatgttttttctcctttgtccaaaggccagagaccatcccaggaagagtggtgggtggtttatacactggaaatgttgcgtttatgctttttaaaaacacacgttaacttcagaggaaggatgggcaaatctggtctagctgggtgaaacccttattttcccagagatgccttaacctttgttggttttggctttagggttcagagtcacttttgttcccttctccattctggagagggacttcccctacatagagccctgatttttgtggctgtggggattggaggtagcattcaaagatcagatgtgcttttcctcactttggagatgaacactctgggttttacagcattaacctgcctaaccttcatggtgagaaatacaccatctctcttctagtcatgctgtgcatgccgcttactctgttggggtctatataaatttgttgaactcttacctacattccaaagaagtttcaaggaaccataaatatatgtatacatatacatatataaaatatatatattaaaataaaattatcaggaatactgcctcagttattgaacttttttttttaagaatactttttttttaagctgagaagtatagggatgaaaaagatgttatattgtgtttgactattttccaacttgtattttcatataatttatattttttaaaagctgaaaatttagaagcaagatgaaaaaaaggaaaagcaggtgctttttaaaaatcagaactgaggtagcttagagatgtagcgatgtaagtgtcgatgtttttttaaaaaaaaatgcaaaaaaattcttatggcggagttttttgtttgtttattttagtagctgatgctggcacatcattttgctggagagttttttatatactgtagcctgatttcatattgtattttaaactgtgtgaaattaaaaacaaagaatttcattc

SEQ ID NO: 384144 - DNA, 5037 bp, Homo sapiens
cgcggcgccgcgagaaacgccctaaagagtgaggggagagcgcgggagggcgagagggagggagagcggccgggagatcgagagcgaacgaggcagccgccggcggagaggagggagcgggcgagggccgggcaggaggagcgggcgcggcgcgggcgaggctgggacccgagcgcgctcacttcgccgcaaagtgccaacttcccctggagtgccgggcgcgcaccgtccgggcgcgggggaaagaaaggcagcgggaatttgagatttttgggaagaaagtcggatttcccccgtccccttccccctgttactaatcctcattaaaaagaaaaacaacagtaactgcaaacttgctaccatcccgtacgtcccccactcctggcaccatgaaggcggccgtcgatctcaagccgactctcaccatcatcaagacggaaaaagtcgatctggagcttttcccctccccggatatggaatgtgcagatgtcccactattaactccaagcagcaaagaaatgatgtctcaagcattaaaagctactttcagtggtttcactaaagaacagcaacgactggggatcccaaaagacccccggcagtggacagaaacccatgttcgggactgggtgatgtgggctgtgaatgaattcagcctgaaaggtgtagacttccagaagttctgtatgaatggagcagccctctgcgccctgggtaaagactgctttctcgagctggccccagactttgttggggacatcttatgggaacatctagagatcctgcagaaagaggatgtgaaaccatatcaagttaatggagtcaacccagcctatccagaatcccgctatacctcggattacttcattagctatggtattgagcatgcccagtgtgttccaccatcggagttctcagagcccagcttcatcacagagtcctatcagacgctccatcccatcagctcggaagagctcctctccctcaagtatgagaatgactacccctcggtcattctccgagaccctctccagacagacaccttgcagaatgactactttgctatcaaacaagaagtcgtcaccccagacaacatgtgcatggggaggaccagtcgtggcagtggaccaatccagctatggcagtttcttctggaattactcactgataaatcctgtcagtcttttatcagctggacaggagatggctgggaattcaaactttctgacccagatgaggtggccaggagatggggaaagaggaaaaacaaacctaagatgaattatgagaaactgagccgtggcctacgctactattacgacaaaaacatcatccacaagacagcggggaaacgctacgtgtaccgctttgtgtgtgacctgcagagcctgctggggtacacccctgaggagctgcacgccatgctggacgtcaagccagatgccgacgagtgatggcactgaaggggctggggaaaccctgctgagaccttccaaggacagccgtgttggttggactctgaattttgaattgttattctattttttattttccagaactcattttttaccttcaggggtgggagctaagtcagttgcagctgtaatcaattgtgcgcagttgggaaaggaaagccaggactgtggggtgggtgggaccgaattcttgagcaaattttcaggagagggagaagggccttctcagaagcttgaaggctctggcttaacagagaaagagactaatgtgtccaatcatttttaaaaatcatccatgaaaaagtgtcttgagttgtggacccattagcaagtgacattgtcacatcagaactcatgaaactgatgtaaggcaattaatttgcttctgtttttaggtctgggagggcaaaaaagaggtgggtgggatgaaacatgttttggggggggatgcactgaaaatctgagaactatttacctatcactctagttttgaagcaaagatggacttcagtggggaggggccaaaaccgttgttgtgttaaaatttattttattaaattttgtgccagtattttttttcttaaaaatcgtcttaagctctaaggtggtctcagtattgcaatatcatgtaagtttgtttttatttgccggctgaggattctgtcacaatgaaagaaaactgtttatatagaccccattggaaaagcaaaacgctctcactgagatcagggatcccaaattcatgggacttatataagaaggacaattaatgctgatttgggtacaggggaattatgtgtgtgaatgtcatctacaattaaaaaaaattagcacatccctttacttacttgttatcagtggattctcggggtttggacttaatgttgagctaagaagcattaagtctttgaactgaatgtattttgcatccctggttttggacgacagtaaacgtaggagcactgttgaagtcctggaagggagatcgaaggaggaagattgacttggttctttcttagtcctatatctgtagcatagatgacttggaataaaagctgtatgcatgggcattacccctcaggtcctaagaaataagtcctgaatgcatgtcgttccaaactaacactctgtaatttttcttttatgtcttattttccaagagtcctccattttttgcaccccctcaccgccaactctgttattcagtagagagaagtgtacggctttctgattggtgagtgaaaaagtaacttgagacacgacctaagttgaagagtttagacttgctgagttttagaagtgatggaaattaagagagcatttcaataaaatgtgacttggctgtctttggaagagaagtgcaaggctttcctttgaagaatttaaattagtccggtaggatgtcaggtgagactgtgtatgcaaaatgaatggcacaggtgatgccagggcctcttgcttgggtctgatgtcttggcacagggtaagtgaaggttaattccagaagagaggaatgacttgaaggcaaaggaaactaaggaaggaggttcagtgaggaaaataaggttgtccatgagatttgaatagatttttagttcccccaaggtttaaatacaaacatagtcaagcaaggtagtcatctttctgctggttgtgagggggaatctgaaaatggagttttagaggaaaagtcaacatctaactagtgagggaaagtgcctaatacaattagaatctccctcactctatagttgcccagttgaaaggataaggaggaggggtggcttttatggacttccatgagagaaggaaagaaatatttcaggtaagcttctcagggctggccctttttgggatttggatgagaaattggaagtactaactactttctagcatatctttaagaaaattgattgttatttactcccagatcctcttgcagacccagaattatcaggaacatagctctgtgattcatgagtgtccccatactgatgaattggagcatccatatggaaagcaaaggcagaattatcccagctgtattattttgatcttttggatgcaggtgccttaatgaagctctcaaaatattttaggagctgctcagggagtgttgggtggaactgtttggactacattgttttctcttagattatgtgatttttgttgggcactggcaaaaggtgtgtgtgtgaatgtgtgcatgtgtgtgaatgttgtgtgtgtgtgtgtgtgtttgtgtgtgtgtgtgtgtgtttgcagacatgcaaaactgcagctgaaataataccttagatttctaggtaagtctttccacatttcaataatgggtaagagtagaaccagggccgggtatcaattattgcttgctgtttgcaaccaggcataaaatcactttctcaaatcatccaccgttcctattaaatttatgccggaaactctccttctgtgagtataactcctgcagttcctatagcagataagatataagaaagtgcctcctagtgctcctccgcccgcttgtttgctaaaattccctttctctctaagtccaccattttcaagatttgtagatagtgtattagttaagacagctttgtcgatctggccagatgttttttctcctttgtccaaaggccagagaccatcccaggaagagtggtgggtggtttatacactggaaatgttgcgtttatgctttttaaaaacacacgttaacttcagaggaaggatgggcaaatctggtctagctgggtgaaacccttattttcccagagatgccttaacctttgttggttttggctttagggttcagagtcacttttgttcccttctccattctggagagggacttcccctacatagagccctgatttttgtggctgtggggattggaggtagcattcaaagatcagatgtgcttttcctcactttggagatgaacactctgggttttacagcattaacctgcctaaccttcatggtgagaaatacaccatctctcttctagtcatgctgtgcatgccgcttactctgttggggtctatataaatttgttgaactcttacctacattccaaagaagtttcaaggaaccataaatatatgtatacatatacatatataaaatatatatattaaaataaaattatcaggaatactgcctcagttattgaacttttttttttaagaatactttttttttaagctgagaagtatagggatgaaaaagatgttatattgtgtttgactattttccaacttgtattttcatataatttatattttttaaaagctgaaaatttagaagcaagatgaaaaaaaggaaaagcaggtgctttttaaaaatcagaactgaggtagcttagagatgtagcgatgtaagtgtcgatgtttttttaaaaaaaaatgcaaaaaaattcttatggcggagttttttgtttgtttattttagtagctgatgctggcacatcattttgctggagagttttttatatactgtagcctgatttcatattgtattttaaactgtgtgaaattaaaaacaaagaatttcattc

SEQ ID NO: 384145 - DNA, 4241 bp, Homo sapiens
tgccttagaatatcccagaggataggcacagtgttctctttctagaatttgtttagcaataaaaatgaaccgatccttaagttaatcaaaataaagcacttgacacattttcttccatgcttttgttttatagggaggcctttgtcttttctatctgttcgagctcataacacttcctccgacatgtgcactgtctgttgccttcattttctcctggctggatgggctgagagaagagggatgtgggagtgccgtgtgtggggattagctgcgtagagtgctgaatatctggtgtaatgattcacaatggcttgtgtttctaggcagtggaccaatccagctatggcagtttcttctggaattactcactgataaatcctgtcagtcttttatcagctggacaggagatggctgggaattcaaactttctgacccagatgaggtggccaggagatggggaaagaggaaaaacaaacctaagatgaattatgagaaactgagccgtggcctacgctactattacgacaaaaacatcatccacaagacagcggggaaacgctacgtgtaccgctttgtgtgtgacctgcagagcctgctggggtacacccctgaggagctgcacgccatgctggacgtcaagccagatgccgacgagtgatggcactgaaggggctggggaaaccctgctgagaccttccaaggacagccgtgttggttggactctgaattttgaattgttattctattttttattttccagaactcattttttaccttcaggggtgggagctaagtcagttgcagctgtaatcaattgtgcgcagttgggaaaggaaagccaggactgtggggtgggtgggaccgaattcttgagcaaattttcaggagagggagaagggccttctcagaagcttgaaggctctggcttaacagagaaagagactaatgtgtccaatcatttttaaaaatcatccatgaaaaagtgtcttgagttgtggacccattagcaagtgacattgtcacatcagaactcatgaaactgatgtaaggcaattaatttgcttctgtttttaggtctgggagggcaaaaaagaggtgggtgggatgaaacatgttttggggggggatgcactgaaaatctgagaactatttacctatcactctagttttgaagcaaagatggacttcagtggggaggggccaaaaccgttgttgtgttaaaatttattttattaaattttgtgccagtattttttttcttaaaaatcgtcttaagctctaaggtggtctcagtattgcaatatcatgtaagtttgtttttatttgccggctgaggattctgtcacaatgaaagaaaactgtttatatagaccccattggaaaagcaaaacgctctcactgagatcagggatcccaaattcatgggacttatataagaaggacaattaatgctgatttgggtacaggggaattatgtgtgtgaatgtcatctacaattaaaaaaaattagcacatccctttacttacttgttatcagtggattctcggggtttggacttaatgttgagctaagaagcattaagtctttgaactgaatgtattttgcatccctggttttggacgacagtaaacgtaggagcactgttgaagtcctggaagggagatcgaaggaggaagattgacttggttctttcttagtcctatatctgtagcatagatgacttggaataaaagctgtatgcatgggcattacccctcaggtcctaagaaataagtcctgaatgcatgtcgttccaaactaacactctgtaatttttcttttatgtcttattttccaagagtcctccattttttgcaccccctcaccgccaactctgttattcagtagagagaagtgtacggctttctgattggtgagtgaaaaagtaacttgagacacgacctaagttgaagagtttagacttgctgagttttagaagtgatggaaattaagagagcatttcaataaaatgtgacttggctgtctttggaagagaagtgcaaggctttcctttgaagaatttaaattagtccggtaggatgtcaggtgagactgtgtatgcaaaatgaatggcacaggtgatgccagggcctcttgcttgggtctgatgtcttggcacagggtaagtgaaggttaattccagaagagaggaatgacttgaaggcaaaggaaactaaggaaggaggttcagtgaggaaaataaggttgtccatgagatttgaatagatttttagttcccccaaggtttaaatacaaacatagtcaagcaaggtagtcatctttctgctggttgtgagggggaatctgaaaatggagttttagaggaaaagtcaacatctaactagtgagggaaagtgcctaatacaattagaatctccctcactctatagttgcccagttgaaaggataaggaggaggggtggcttttatggacttccatgagagaaggaaagaaatatttcaggtaagcttctcagggctggccctttttgggatttggatgagaaattggaagtactaactactttctagcatatctttaagaaaattgattgttatttactcccagatcctcttgcagacccagaattatcaggaacatagctctgtgattcatgagtgtccccatactgatgaattggagcatccatatggaaagcaaaggcagaattatcccagctgtattattttgatcttttggatgcaggtgccttaatgaagctctcaaaatattttaggagctgctcagggagtgttgggtggaactgtttggactacattgttttctcttagattatgtgatttttgttgggcactggcaaaaggtgtgtgtgtgaatgtgtgcatgtgtgtgaatgttgtgtgtgtgtgtgtgtgtttgtgtgtgtgtgtgtgtgtttgcagacatgcaaaactgcagctgaaataataccttagatttctaggtaagtctttccacatttcaataatgggtaagagtagaaccagggccgggtatcaattattgcttgctgtttgcaaccaggcataaaatcactttctcaaatcatccaccgttcctattaaatttatgccggaaactctccttctgtgagtataactcctgcagttcctatagcagataagatataagaaagtgcctcctagtgctcctccgcccgcttgtttgctaaaattccctttctctctaagtccaccattttcaagatttgtagatagtgtattagttaagacagctttgtcgatctggccagatgttttttctcctttgtccaaaggccagagaccatcccaggaagagtggtgggtggtttatacactggaaatgttgcgtttatgctttttaaaaacacacgttaacttcagaggaaggatgggcaaatctggtctagctgggtgaaacccttattttcccagagatgccttaacctttgttggttttggctttagggttcagagtcacttttgttcccttctccattctggagagggacttcccctacatagagccctgatttttgtggctgtggggattggaggtagcattcaaagatcagatgtgcttttcctcactttggagatgaacactctgggttttacagcattaacctgcctaaccttcatggtgagaaatacaccatctctcttctagtcatgctgtgcatgccgcttactctgttggggtctatataaatttgttgaactcttacctacattccaaagaagtttcaaggaaccataaatatatgtatacatatacatatataaaatatatatattaaaataaaattatcaggaatactgcctcagttattgaacttttttttttaagaatactttttttttaagctgagaagtatagggatgaaaaagatgttatattgtgtttgactattttccaacttgtattttcatataatttatattttttaaaagctgaaaatttagaagcaagatgaaaaaaaggaaaagcaggtgctttttaaaaatcagaactgaggtagcttagagatgtagcgatgtaagtgtcgatgtttttttaaaaaaaaatgcaaaaaaattcttatggcggagttttttgtttgtttattttagtagctgatgctggcacatcattttgctggagagttttttatatactgtagcctgatttcatattgtattttaaactgtgtgaaattaaaaacaaagaatttcattc

SEQ ID NO: 384146 - DNA, 3062 bp, Homo sapiens
atcccctcaatcttatacttcccaaaaccgttgttgtgttaaaatttattttattaaattttgtgccagtattttttttcttaaaaatcgtcttaagctctaaggtggtctcagtattgcaatatcatgtaagtttgtttttatttgccggctgaggattctgtcacaatgaaagaaaactgtttatatagaccccattggaaaagcaaaacgctctcactgagatcagggatcccaaattcatgggacttatataagaaggacaattaatgctgatttgggtacaggggaattatgtgtgtgaatgtcatctacaattaaaaaaaattagcacatccctttacttacttgttatcagtggattctcggggtttggacttaatgttgagctaagaagcattaagtctttgaactgaatgtattttgcatccctggttttggacgacagtaaacgtaggagcactgttgaagtcctggaagggagatcgaaggaggaagattgacttggttctttcttagtcctatatctgtagcatagatgacttggaataaaagctgtatgcatgggcattacccctcaggtcctaagaaataagtcctgaatgcatgtcgttccaaactaacactctgtaatttttcttttatgtcttattttccaagagtcctccattttttgcaccccctcaccgccaactctgttattcagtagagagaagtgtacggctttctgattggtgagtgaaaaagtaacttgagacacgacctaagttgaagagtttagacttgctgagttttagaagtgatggaaattaagagagcatttcaataaaatgtgacttggctgtctttggaagagaagtgcaaggctttcctttgaagaatttaaattagtccggtaggatgtcaggtgagactgtgtatgcaaaatgaatggcacaggtgatgccagggcctcttgcttgggtctgatgtcttggcacagggtaagtgaaggttaattccagaagagaggaatgacttgaaggcaaaggaaactaaggaaggaggttcagtgaggaaaataaggttgtccatgagatttgaatagatttttagttcccccaaggtttaaatacaaacatagtcaagcaaggtagtcatctttctgctggttgtgagggggaatctgaaaatggagttttagaggaaaagtcaacatctaactagtgagggaaagtgcctaatacaattagaatctccctcactctatagttgcccagttgaaaggataaggaggaggggtggcttttatggacttccatgagagaaggaaagaaatatttcaggtaagcttctcagggctggccctttttgggatttggatgagaaattggaagtactaactactttctagcatatctttaagaaaattgattgttatttactcccagatcctcttgcagacccagaattatcaggaacatagctctgtgattcatgagtgtccccatactgatgaattggagcatccatatggaaagcaaaggcagaattatcccagctgtattattttgatcttttggatgcaggtgccttaatgaagctctcaaaatattttaggagctgctcagggagtgttgggtggaactgtttggactacattgttttctcttagattatgtgatttttgttgggcactggcaaaaggtgtgtgtgtgaatgtgtgcatgtgtgtgaatgttgtgtgtgtgtgtgtgtgtttgtgtgtgtgtgtgtgtgtttgcagacatgcaaaactgcagctgaaataataccttagatttctaggtaagtctttccacatttcaataatgggtaagagtagaaccagggccgggtatcaattattgcttgctgtttgcaaccaggcataaaatcactttctcaaatcatccaccgttcctattaaatttatgccggaaactctccttctgtgagtataactcctgcagttcctatagcagataagatataagaaagtgcctcctagtgctcctccgcccgcttgtttgctaaaattccctttctctctaagtccaccattttcaagatttgtagatagtgtattagttaagacagctttgtcgatctggccagatgttttttctcctttgtccaaaggccagagaccatcccaggaagagtggtgggtggtttatacactggaaatgttgcgtttatgctttttaaaaacacacgttaacttcagaggaaggatgggcaaatctggtctagctgggtgaaacccttattttcccagagatgccttaacctttgttggttttggctttagggttcagagtcacttttgttcccttctccattctggagagggacttcccctacatagagccctgatttttgtggctgtggggattggaggtagcattcaaagatcagatgtgcttttcctcactttggagatgaacactctgggttttacagcattaacctgcctaaccttcatggtgagaaatacaccatctctcttctagtcatgctgtgcatgccgcttactctgttggggtctatataaatttgttgaactcttacctacattccaaagaagtttcaaggaaccataaatatatgtatacatatacatatataaaatatatatattaaaataaaattatcaggaatactgcctcagttattgaacttttttttttaagaatactttttttttaagctgagaagtatagggatgaaaaagatgttatattgtgtttgactattttccaacttgtattttcatataatttatattttttaaaagctgaaaatttagaagcaagatgaaaaaaaggaaaagcaggtgctttttaaaaatcagaactgaggtagcttagagatgtagcgatgtaagtgtcgatgtttttttaaaaaaaaatgcaaaaaaattcttatggcggagttttttgtttgtttattttagtagctgatgctggcacatcattttgctggagagttttttatatactgtagcctgatttcatattgtattttaaactgtgtgaaattaaaaacaaagaatttcattc

SEQ ID NO: 384147 - DNA, 1978 bp, Homo sapiens
  misc_feature (20)..(20): n is a, c, g, or t
tctgctgtccccccgggtantgcgagatcgttgacccggcgtcggtaagtagtcatctttctgctggttgtgagggggaatctgaaaatggagttttagaggaaaagtcaacatctaactagtgagggaaagtgcctaatacaattagaatctccctcactctatagttgcccagttgaaaggataaggaggaggggtggcttttatggacttccatgagagaaggaaagaaatatttcaggtaagcttctcagggctggccctttttgggatttggatgagaaattggaagtactaactactttctagcatatctttaagaaaattgattgttatttactcccagatcctcttgcagacccagaattatcaggaacatagctctgtgattcatgagtgtccccatactgatgaattggagcatccatatggaaagcaaaggcagaattatcccagctgtattattttgatcttttggatgcaggtgccttaatgaagctctcaaaatattttaggagctgctcagggagtgttgggtggaactgtttggactacattgttttctcttagattatgtgatttttgttgggcactggcaaaaggtgtgtgtgtgaatgtgtgcatgtgtgtgaatgttgtgtgtgtgtgtgtgtgtttgtgtgtgtgtgtgtgtgtttgcagacatgcaaaactgcagctgaaataataccttagatttctaggtaagtctttccacatttcaataatgggtaagagtagaaccagggccgggtatcaattattgcttgctgtttgcaaccaggcataaaatcactttctcaaatcatccaccgttcctattaaatttatgccggaaactctccttctgtgagtataactcctgcagttcctatagcagataagatataagaaagtgcctcctagtgctcctccgcccgcttgtttgctaaaattccctttctctctaagtccaccattttcaagatttgtagatagtgtattagttaagacagctttgtcgatctggccagatgttttttctcctttgtccaaaggccagagaccatcccaggaagagtggtgggtggtttatacactggaaatgttgcgtttatgctttttaaaaacacacgttaacttcagaggaaggatgggcaaatctggtctagctgggtgaaacccttattttcccagagatgccttaacctttgttggttttggctttagggttcagagtcacttttgttcccttctccattctggagagggacttcccctacatagagccctgatttttgtggctgtggggattggaggtagcattcaaagatcagatgtgcttttcctcactttggagatgaacactctgggttttacagcattaacctgcctaaccttcatggtgagaaatacaccatctctcttctagtcatgctgtgcatgccgcttactctgttggggtctatataaatttgttgaactcttacctacattccaaagaagtttcaaggaaccataaatatatgtatacatatacatatataaaatatatatattaaaataaaattatcaggaatactgcctcagttattgaacttttttttttaagaatactttttttttaagctgagaagtatagggatgaaaaagatgttatattgtgtttgactattttccaacttgtattttcatataatttatattttttaaaagctgaaaatttagaagcaagatgaaaaaaaggaaaagcaggtgctttttaaaaatcagaactgaggtagcttagagatgtagcgatgtaagtgtcgatgtttttttaaaaaaaaatgcaaaaaaattcttatggcggagttttttgtttgtttattttagtagctgatgctggcacatcattttgctggagagttttttatatactgtagcctgatttcatattgtattttaaactgtgtgaaattaaaaacaaagaatttcattc

SEQ ID NO: 384148 - DNA, 3622 bp, Homo sapiens
cgcggcgccgcgagaaacgccctaaagagtgaggggagagcgcgggagggcgagagggagggagagcggccgggagatcgagagcgaacgaggcagccgccggcggagaggagggagcgggcgagggccgggcaggaggagcgggcgcggcgcgggcgaggctgggacccgagcgcgctcacttcgccgcaaagtgccaacttcccctggagtgccgggcgcgcaccgtccgggcgcgggggaaagaaaggcagcgggaatttgagatttttgggaagaaagtcggatttcccccgtccccttccccctgttactaatcctcattaaaaagaaaaacaacagtaactgcaaacttgctaccatcccgtacgtcccccactcctggcaccatgaaggcggccgtcgatctcaagccgactctcaccatcatcaagacggaaaaagtcgatctggagcttttcccctccccggatatggaatgtgcagatgtcccactattaactccaagcagcaaagaaatgatgtctcaagcattaaaagctactttcagtggtttcactaaagaacagcaacgactggggatcccaaaagacccccggcagtggacagaaacccatgttcgggactgggtgatgtgggctgtgaatgaattcagcctgaaaggtgtagacttccagaagttctgtatgaatggagcagccctctgcgccctgggtaaagactgctttctcgagctggccccagactttgttggggacatcttatgggaacatctagagatcctgcagaaagaggatgtgaaaccatatcaagttaatggagtcaacccagcctatccagaatcccgctatacctcggattacttcattagctatggtattgagcatgcccagtgtgttccaccatcggagttctcagagcccagcttcatcacagagtcctatcagacgctccatcccatcagctcggaagagctcctctccctcaagtatgagaatgactacccctcggtcattctccgagaccctctccagacagacaccttgcagaatgactactttgctatcaaacaagaagtcgtcaccccagacaacatgtgcatggggaggaccagtcgtggtaaactcgggggccaggactcttttgaaagcatagagagctacgatagttgtgatcgcctcacccagtcctggagcagccagtcatctttcaacagcctgcagcgtgttccctcctatgacagcttcgactcagaggactatccggctgccctgcccaaccacaagcccaagggcaccttcaaggactatgtgcgggaccgtgctgacctcaataaggacaagcctgtcattcctgctgctgccctagctggctacacaggcagtggaccaatccagctatggcagtttcttctggaattactcactgataaatcctgtcagtcttttatcagctggacaggagatggctgggaattcaaactttctgacccagatgaggtggccaggagatggggaaagaggaaaaacaaacctaagatgaattatgagaaactgagccgtggcctacgctactattacgacaaaaacatcatccacaagacagcggggaaacgctacgtgtaccgctttgtgtgtgacctgcagagcctgctggggtacacccctgaggagctgcacgccatgctggacgtcaagccagatgccgacgagtgatggcactgaaggggctggggaaaccctgctgagaccttccaaggacagccgtgttggttggactctgaattttgaattgttattctattttttattttccagaactcattttttaccttcaggggtgggagctaagtcagttgcagctgtaatcaattgtgcgcagttgggaaaggaaagccaggactgtggggtgggtgggaccgaattcttgagcaaattttcaggagagggagaagggccttctcagaagcttgaaggctctggcttaacagagaaagagactaatgtgtccaatcatttttaaaaatcatccatgaaaaagtgtcttgagttgtggacccattagcaagtgacattgtcacatcagaactcatgaaactgatgtaaggcaattaatttgcttctgtttttaggtctgggagggcaaaaaagaggtgggtgggatgaaacatgttttggggggggatgcactgaaaatctgagaactatttacctatcactctagttttgaagcaaagatggacttcagtggggaggggccaaaaccgttgttgtgttaaaatttattttattaaattttgtgccagtattttttttcttaaaaatcgtcttaagctctaaggtggtctcagtattgcaatatcatgtaagtttgtttttatttgccggctgaggattctgtcacaatgaaagaaaactgtttatatagaccccattggaaaagcaaaacgctctcactgagatcagggatcccaaattcatgggacttatataagaaggacaattaatgctgatttgggtacaggggaattatgtgtgtgaatgtcatctacaattaaaaaaaattagcacatccctttacttacttgttatcagtggattctcggggtttggacttaatgttgagctaagaagcattaagtctttgaactgaatgtattttgcatccctggttttggacgacagtaaacgtaggagcactgttgaagtcctggaagggagatcgaaggaggaagattgacttggttctttcttagtcctatatctgtagcatagatgacttggaataaaagctgtatgcatgggcattacccctcaggtcctaagaaataagtcctgaatgcatgtcgttccaaactaacactctgtaatttttcttttatgtcttattttccaagagtcctccattttttgcaccccctcaccgccaactctgttattcagtagagagaagtgtacggctttctgattggtgagtgaaaaagtaacttgagacacgacctaagttgaagagtttagacttgctgagttttagaagtgatggaaattaagagagcatttcaataaaatgtgacttggctgtctttggaagagaagtgcaaggctttcctttgaagaatttaaattagtccggtaggatgtcaggtgagactgtgtatgcaaaatgaatggcacaggtgatgccagggcctcttgcttgggtctgatgtcttggcacagggtaagtgaaggttaattccagaagagaggaatgacttgaaggcaaaggaaactaaggaaggaggttcagtgaggaaaataaggttgtccatgagatttgaatagatttttagttcccccaaggtttaaatacaaacatagtcaagcaaggtagtcatctttctgctggttgtgagggggaatctgaaaatggagttttagaggaaaagtcaacatctaactagtgagggaaagtgcctaatacaattagaatctccctcactctatagttgcccagttgaaaggataaggaggaggggtggcttttatggacttccatgagagaaggaaagaaaaaaaaaaaagaagaccgtttacctagaagaagctatgtcaagaggctgaattatttttatttttaaaaa

SEQ ID NO: 384149 - DNA, 3229 bp, Homo sapiens
cgcggcgccgcgagaaacgccctaaagagtgaggggagagcgcgggagggcgagagggagggagagcggccgggagatcgagagcgaacgaggcagccgccggcggagaggagggagcgggcgagggccgggcaggaggagcgggcgcggcgcgggcgaggctgggacccgagcgcgctcacttcgccgcaaagtgccaacttcccctggagtgccgggcgcgcaccgtccgggcgcgggggaaagaaaggcagcgggaatttgagatttttgggaagaaagtcggatttcccccgtccccttccccctgttactaatcctcattaaaaagaaaaacaacagtaactgcaaacttgctaccatcccgtacgtcccccactcctggcaccatgaaggcggccgtcgatctcaagccgactctcaccatcatcaagacggaaaaagtcgatctggagcttttcccctccccggatatggaatgtgcagatgtcccactattaactccaagcagcaaagaaatgatgtctcaagcattaaaagctactttcagtggtttcactaaagaacagcaacgactggggatcccaaaagacccccggcagtggacagaaacccatgttcgggactgggtgatgtgggctgtgaatgaattcagcctgaaaggtgtagacttccagaagttctgtatgaatggagcagccctctgcgccctgggtaaagactgctttctcgagctggccccagactttgttggggacatcttatgggaacatctagagatcctgcagaaagaggatgtgaaaccatatcaagttaatggagtcaacccagcctatccagaatcccgctatacctcggattacttcattagctatggtattgagcatgcccagtgtgttccaccatcggagttctcagagcccagcttcatcacagagtcctatcagacgctccatcccatcagctcggaagagctcctctccctcaagtatgagaatgactacccctcggtcattctccgagaccctctccagacagacaccttgcagaatgactactttgctatcaaacaagaagtcgtcaccccagacaacatgtgcatggggaggaccagtcgtggtaaactcgggggccaggactcttttgaaagcatagagagctacgatagttgtgatcgcctcacccagtcctggagcagccagtcatctttcaacagcctgcagcgtgttccctcctatgacagcttcgactcagaggactatccggctgccctgcccaaccacaagcccaagggcaccttcaaggactatgtgcgggaccgtgctgacctcaataaggacaagcctgtcattcctgctgctgccctagctggctacacaggcagtggaccaatccagctatggcagtttcttctggaattactcactgataaatcctgtcagtcttttatcagctggacaggagatggctgggaattcaaactttctgacccagatgaggtggccaggagatggggaaagaggaaaaacaaacctaagatgaattatgagaaactgagccgtggcctacgctactattacgacaaaaacatcatccacaagacagcggggaaacgctacgtgtaccgctttgtgtgtgacctgcagagcctgctggggtacacccctgaggagctgcacgccatgctggacgtcaagccagatgccgacgagtgatggcactgaaggggctggggaaaccctgctgagaccttccaaggacagccgtgttggttggactctgaattttgaattgttattctattttttattttccagaactcattttttaccttcaggggtgggagctaagtcagttgcagctgtaatcaattgtgcgcagttgggaaaggaaagccaggactgtggggtgggtgggaccgaattcttgagcaaattttcaggagagggagaagggccttctcagaagcttgaaggctctggcttaacagagaaagagactaatgtgtccaatcatttttaaaaatcatccatgaaaaagtgtcttgagttgtggacccattagcaagtgacattgtcacatcagaactcatgaaactgatgtaaggcaattaatttgcttctgtttttaggtctgggagggcaaaaaagaggtgggtgggatgaaacatgttttggggggggatgcactgaaaatctgagaactatttacctatcactctagttttgaagcaaagatggacttcagtggggaggggccaaaaccgttgttgtgttaaaatttattttattaaattttgtgccagtattttttttcttaaaaatcgtcttaagctctaaggtggtctcagtattgcaatatcatgtaagtttgtttttatttgccggctgaggattctgtcacaatgaaagaaaactgtttatatagaccccattggaaaagcaaaacgctctcactgagatcagggatcccaaattcatgggacttatataagaaggacaattaatgctgatttgggtacaggggaattatgtgtgtgaatgtcatctacaattaaaaaaaattagcacatccctttacttacttgttatcagtggattctcggggtttggacttaatgttgagctaagaagcattaagtctttgaactgaatgtattttgcatccctggttttggacgacagtaaacgtaggagcactgttgaagtcctggaagggagatcgaaggaggaagattgacttggttctttcttagtcctatatctgtagcatagatgacttggaataaaagctgtatgcatgggcattacccctcaggtcctaagaaataagtcctgaatgcatgtcgttccaaactaacactctgtaatttttcttttatgtcttattttccaagagtcctccattttttgcaccccctcaccgccaactctgttattcagtagagagaagtgtacggctttctgattggtgagtgaaaaagtaacttgagacacgacctaagtcgcccttagttacctgttcctaactgtccttcctgccaaactactcaccccaccactctggctcatatccctgctctctttgaaatagccagtcgggtttagcttagattgtgcggtctggctccagccaatggagacaggacacagtagcagggacaagctgcgtaagggataaaaattgcttccctcggccaggcacgtgggtcatgcctgtaatcccagca

SEQ ID NO: 384150 - DNA, 230 bp, Homo sapiens
cccactattaactccaagcagcaaagaaatgatgtctcaagcattaaaagctactttcagtggtttcactaaagaacagcaacgactggggatcccaaaaggtatggttttgtagttggaaaaagagtggttggggtcagaccctttgggaagacacattttctcacctggagtgtgtgaggcagacgttacactaaccacattggagtcagcagctatgggccatggct

SEQ ID NO: 384151 - DNA, 5236 bp, Homo sapiens
ttgcgtgtactggtcctcggagttatgcatggcagccgccggcggaaggagggagcgggcgagggccgggcaggaggagcgggcgcggcgcgggcgaggctgggacccgagcgcgctcacttcgccgcaaagtgccaacttcccctggagtgccgggcgcgcaccgtccgggcgcgggggaaagaaaggcagcgggaatttgagatttttgggaagaaagtcggatttcccccgtccccttccccctgttactaatcctcattaaaaagaaaaacaacagtaactgcaaacttgctaccatcccgtacgtcccccactcctggcaccatgaaggcggccgtcgatctcaagccgactctcaccatcatcaagacggaaaaagtcgatctggagcttttcccctccccggatatggaatgtgcagatgtcccactattaactccaagcagcaaagaaatgatgtctcaagcattaaaagctactttcagtggtttcactaaagaacagcaacgactggggatcccaaaagacccccggcagtggacagaaacccatgttcgggactgggtgatgtgggctgtgaatgaattcagcctgaaaggtgtagacttccagaagttctgtatgaatggagcagccctctgcgccctgggtaaagactgctttctcgagctggccccagactttgttggggacatcttatgggaacatctagagatcctgcagaaagaggatgtgaaaccatatcaagttaatggagtcaacccagcctatccagaatcccgctatacctcggattacttcattagctatggtattgagcatgcccagtgtgttccaccatcggagttctcagagcccagcttcatcacagagtcctatcagacgctccatcccatcagctcggaagagctcctctccctcaagtatgagaatgactacccctcggtcattctccgagaccctctccagacagacaccttgcagaatgactactttgctatcaaacaagaagtcgtcaccccagacaacatgtgcatggggaggaccagtcgtggtaaactcgggggccaggactcttttgaaagcatagagagctacgatagttgtgatcgcctcacccagtcctggagcagccagtcatctttcaacagcctgcagcgtgttccctcctatgacagcttcgactcagaggactatccggctgccctgcccaaccacaagcccaagggcaccttcaaggactatgtgcgggaccgtgctgacctcaataaggacaagcctgtcattcctgctgctgccctagctggctacacaggcagtggaccaatccagctatggcagtttcttctggaattactcactgataaatcctgtcagtcttttatcagctggacaggagatggctgggaattcaaactttctgacccagatgaggtggccaggagatggggaaagaggaaaaacaaacctaagatgaattatgagaaactgagccgtggcctacgctactattacgacaaaaacatcatccacaagacagcggggaaacgctacgtgtaccgctttgtgtgtgacctgcagagcctgctggggtacacccctgaggagctgcacgccatgctggacgtcaagccagatgccgacgagtgatggcactgaaggggctggggaaaccctgctgagaccttccaaggacagccgtgttggttggactctgaattttgaattgttattctattttttattttccagaactcattttttaccttcaggggtgggagctaagtcagttgcagctgtaatcaattgtgcgcagttgggaaaggaaagccaggactgtggggtgggtgggaccgaattcttgagcaaattttcaggagagggagaagggccttctcagaagcttgaaggctctggcttaacagagaaagagactaatgtgtccaatcatttttaaaaatcatccatgaaaaagtgtcttgagttgtggacccattagcaagtgacattgtcacatcagaactcatgaaactgatgtaaggcaattaatttgcttctgtttttaggtctgggagggcaaaaaagaggtgggtgggatgaaacatgttttggggggggatgcactgaaaatctgagaactatttacctatcactctagttttgaagcaaagatggacttcagtggggaggggccaaaaccgttgttgtgttaaaatttattttattaaattttgtgccagtattttttttcttaaaaatcgtcttaagctctaaggtggtctcagtattgcaatatcatgtaagtttgtttttatttgccggctgaggattctgtcacaatgaaagaaaactgtttatatagaccccattggaaaagcaaaacgctctcactgagatcagggatcccaaattcatgggacttatataagaaggacaattaatgctgatttgggtacaggggaattatgtgtgtgaatgtcatctacaattaaaaaaaattagcacatccctttacttacttgttatcagtggattctcggggtttggacttaatgttgagctaagaagcattaagtctttgaactgaatgtattttgcatccctggttttggacgacagtaaacgtaggagcactgttgaagtcctggaagggagatcgaaggaggaagattgacttggttctttcttagtcctatatctgtagcatagatgacttggaataaaagctgtatgcatgggcattacccctcaggtcctaagaaataagtcctgaatgcatgtcgttccaaactaacactctgtaatttttcttttatgtcttattttccaagagtcctccattttttgcaccccctcaccgccaactctgttattcagtagagagaagtgtacggctttctgattggtgagtgaaaaagtaacttgagacacgacctaagttgaagagtttagacttgctgagttttagaagtgatggaaattaagagagcatttcaataaaatgtgacttggctgtctttggaagagaagtgcaaggctttcctttgaagaatttaaattagtccggtaggatgtcaggtgagactgtgtatgcaaaatgaatggcacaggtgatgccagggcctcttgcttgggtctgatgtcttggcacagggtaagtgaaggttaattccagaagagaggaatgacttgaaggcaaaggaaactaaggaaggaggttcagtgaggaaaataaggttgtccatgagatttgaatagatttttagttcccccaaggtttaaatacaaacatagtcaagcaaggtagtcatctttctgctggttgtgagggggaatctgaaaatggagttttagaggaaaagtcaacatctaactagtgagggaaagtgcctaatacaattagaatctccctcactctatagttgcccagttgaaaggataaggaggaggggtggcttttatggacttccatgagagaaggaaagaaatatttcaggtaagcttctcagggctggccctttttgggatttggatgagaaattggaagtactaactactttctagcatatctttaagaaaattgattgttatttactcccagatcctcttgcagacccagaattatcaggaacatagctctgtgattcatgagtgtccccatactgatgaattggagcatccatatggaaagcaaaggcagaattatcccagctgtattattttgatcttttggatgcaggtgccttaatgaagctctcaaaatattttaggagctgctcagggagtgttgggtggaactgtttggactacattgttttctcttagattatgtgatttttgttgggcactggcaaaaggtgtgtgtgtgaatgtgtgcatgtgtgtgaatgttgtgtgtgtgtgtgtgtgtttgtgtgtgtgtgtgtgtgtttgcagacatgcaaaactgcagctgaaataataccttagatttctaggtaagtctttccacatttcaataatgggtaagagtagaaccagggccgggtatcaattattgcttgctgtttgcaaccaggcataaaatcactttctcaaatcatccaccgttcctattaaatttatgccggaaactctccttctgtgagtataactcctgcagttcctatagcagataagatataagaaagtgcctcctagtgctcctccgcccgcttgtttgctaaaattccctttctctctaagtccaccattttcaagatttgtagatagtgtattagttaagacagctttgtcgatctggccagatgttttttctcctttgtccaaaggccagagaccatcccaggaagagtggtgggtggtttatacactggaaatgttgcgtttatgctttttaaaaacacacgttaacttcagaggaaggatgggcaaatctggtctagctgggtgaaacccttattttcccagagatgccttaacctttgttggttttggctttagggttcagagtcacttttgttcccttctccattctggagagggacttcccctacatagagccctgatttttgtggctgtggggattggaggtagcattcaaagatcagatgtgcttttcctcactttggagatgaacactctgggttttacagcattaacctgcctaaccttcatggtgagaaatacaccatctctcttctagtcatgctgtgcatgccgcttactctgttggggtctatataaatttgttgaactcttacctacattccaaagaagtttcaaggaaccataaatatatgtatacatatacatatataaaatatatatattaaaataaaattatcaggaatactgcctcagttattgaacttttttttttaagaatactttttttttaagctgagaagtatagggatgaaaaagatgttatattgtgtttgactattttccaacttgtattttcatataatttatattttttaaaagctgaaaatttagaagcaagatgaaaaaaaggaaaagcaggtgctttttaaaaatcagaactgaggtagcttagagatgtagcgatgtaagtgtcgatgtttttttaaaaaaaaatgcaaaaaaattcttatggcggagttttttgtttgtttattttagtagctgatgctggcacatcattttgctggagagttttttatatactgtagcctgatttcatattgtattttaaactgtgtgaaattaaaaacaaagaatttcattc

SEQ ID NO: 384152 - DNA, 4325 bp, Homo sapiens
acgtagaggatcccgatggcgggcgtcgtccccctcggtcattctccgagaccctctccagacagacaccttgcagaatgactactttgctatcaaacaagaagtcgtcaccccagacaacatgtgcatggggaggaccagtcgtggtaaactcgggggccaggactcttttgaaagcatagagagctacgatagttgtgatcgcctcacccagtcctggagcagccagtcatctttcaacagcctgcagcgtgttccctcctatgacagcttcgactcagaggactatccggctgccctgcccaaccacaagcccaagggcaccttcaaggactatgtgcgggaccgtgctgacctcaataaggacaagcctgtcattcctgctgctgccctagctggctacacaggcagtggaccaatccagctatggcagtttcttctggaattactcactgataaatcctgtcagtcttttatcagctggacaggagatggctgggaattcaaactttctgacccagatgaggtggccaggagatggggaaagaggaaaaacaaacctaagatgaattatgagaaactgagccgtggcctacgctactattacgacaaaaacatcatccacaagacagcggggaaacgctacgtgtaccgctttgtgtgtgacctgcagagcctgctggggtacacccctgaggagctgcacgccatgctggacgtcaagccagatgccgacgagtgatggcactgaaggggctggggaaaccctgctgagaccttccaaggacagccgtgttggttggactctgaattttgaattgttattctattttttattttccagaactcattttttaccttcaggggtgggagctaagtcagttgcagctgtaatcaattgtgcgcagttgggaaaggaaagccaggactgtggggtgggtgggaccgaattcttgagcaaattttcaggagagggagaagggccttctcagaagcttgaaggctctggcttaacagagaaagagactaatgtgtccaatcatttttaaaaatcatccatgaaaaagtgtcttgagttgtggacccattagcaagtgacattgtcacatcagaactcatgaaactgatgtaaggcaattaatttgcttctgtttttaggtctgggagggcaaaaaagaggtgggtgggatgaaacatgttttggggggggatgcactgaaaatctgagaactatttacctatcactctagttttgaagcaaagatggacttcagtggggaggggccaaaaccgttgttgtgttaaaatttattttattaaattttgtgccagtattttttttcttaaaaatcgtcttaagctctaaggtggtctcagtattgcaatatcatgtaagtttgtttttatttgccggctgaggattctgtcacaatgaaagaaaactgtttatatagaccccattggaaaagcaaaacgctctcactgagatcagggatcccaaattcatgggacttatataagaaggacaattaatgctgatttgggtacaggggaattatgtgtgtgaatgtcatctacaattaaaaaaaattagcacatccctttacttacttgttatcagtggattctcggggtttggacttaatgttgagctaagaagcattaagtctttgaactgaatgtattttgcatccctggttttggacgacagtaaacgtaggagcactgttgaagtcctggaagggagatcgaaggaggaagattgacttggttctttcttagtcctatatctgtagcatagatgacttggaataaaagctgtatgcatgggcattacccctcaggtcctaagaaataagtcctgaatgcatgtcgttccaaactaacactctgtaatttttcttttatgtcttattttccaagagtcctccattttttgcaccccctcaccgccaactctgttattcagtagagagaagtgtacggctttctgattggtgagtgaaaaagtaacttgagacacgacctaagttgaagagtttagacttgctgagttttagaagtgatggaaattaagagagcatttcaataaaatgtgacttggctgtctttggaagagaagtgcaaggctttcctttgaagaatttaaattagtccggtaggatgtcaggtgagactgtgtatgcaaaatgaatggcacaggtgatgccagggcctcttgcttgggtctgatgtcttggcacagggtaagtgaaggttaattccagaagagaggaatgacttgaaggcaaaggaaactaaggaaggaggttcagtgaggaaaataaggttgtccatgagatttgaatagatttttagttcccccaaggtttaaatacaaacatagtcaagcaaggtagtcatctttctgctggttgtgagggggaatctgaaaatggagttttagaggaaaagtcaacatctaactagtgagggaaagtgcctaatacaattagaatctccctcactctatagttgcccagttgaaaggataaggaggaggggtggcttttatggacttccatgagagaaggaaagaaatatttcaggtaagcttctcagggctggccctttttgggatttggatgagaaattggaagtactaactactttctagcatatctttaagaaaattgattgttatttactcccagatcctcttgcagacccagaattatcaggaacatagctctgtgattcatgagtgtccccatactgatgaattggagcatccatatggaaagcaaaggcagaattatcccagctgtattattttgatcttttggatgcaggtgccttaatgaagctctcaaaatattttaggagctgctcagggagtgttgggtggaactgtttggactacattgttttctcttagattatgtgatttttgttgggcactggcaaaaggtgtgtgtgtgaatgtgtgcatgtgtgtgaatgttgtgtgtgtgtgtgtgtgtttgtgtgtgtgtgtgtgtgtttgcagacatgcaaaactgcagctgaaataataccttagatttctaggtaagtctttccacatttcaataatgggtaagagtagaaccagggccgggtatcaattattgcttgctgtttgcaaccaggcataaaatcactttctcaaatcatccaccgttcctattaaatttatgccggaaactctccttctgtgagtataactcctgcagttcctatagcagataagatataagaaagtgcctcctagtgctcctccgcccgcttgtttgctaaaattccctttctctctaagtccaccattttcaagatttgtagatagtgtattagttaagacagctttgtcgatctggccagatgttttttctcctttgtccaaaggccagagaccatcccaggaagagtggtgggtggtttatacactggaaatgttgcgtttatgctttttaaaaacacacgttaacttcagaggaaggatgggcaaatctggtctagctgggtgaaacccttattttcccagagatgccttaacctttgttggttttggctttagggttcagagtcacttttgttcccttctccattctggagagggacttcccctacatagagccctgatttttgtggctgtggggattggaggtagcattcaaagatcagatgtgcttttcctcactttggagatgaacactctgggttttacagcattaacctgcctaaccttcatggtgagaaatacaccatctctcttctagtcatgctgtgcatgccgcttactctgttggggtctatataaatttgttgaactcttacctacattccaaagaagtttcaaggaaccataaatatatgtatacatatacatatataaaatatatatattaaaataaaattatcaggaatactgcctcagttattgaacttttttttttaagaatactttttttttaagctgagaagtatagggatgaaaaagatgttatattgtgtttgactattttccaacttgtattttcatataatttatattttttaaaagctgaaaatttagaagcaagatgaaaaaaaggaaaagcaggtgctttttaaaaatcagaactgaggtagcttagagatgtagcgatgtaagtgtcgatgtttttttaaaaaaaaatgcaaaaaaattcttatggcggagttttttgtttgtttattttagtagctgatgctggcacatcattttgctggagagttttttatatactgtagcctgatttcatattgtattttaaactgtgtgaaattaaaaacaaagaatttcattc

SEQ ID NO: 384153 - DNA, 3998 bp, Homo sapiens
cgcggcgccgcgagaaacgccctaaagagtgaggggagagcgcgggagggcgagagggagggagagcggccgggagatcgagagcgaacgaggcagccgccggcggagaggagggagcgggcgagggccgggcaggaggagcgggcgcggcgcgggcgaggctgggacccgagcgcgctcacttcgccgcaaagtgccaacttcccctggagtgccgggcgcgcaccgtccgggcgcgggggaaagaaaggcagcgggaatttgagatttttgggaagaaagtcggatttcccccgtccccttccccctgttactaatcctcattaaaaagaaaaacaacagtaactgcaaacttgctaccatcccgtacgtcccccactcctggcaccatgaaggcggccgtcgatctcaagccgactctcaccatcatcaagacggaaaaagtcgatctggagcttttcccctccccggatatggaatgtgcagatgtcccactattaactccaagcagcaaagaaatgatgtctcaagcattaaaagctactttcagtggtttcactaaagaacagcaacgactggggatcccaaaagacccccggcagtggacagaaacccatgttcgggactgggtgatgtgggctgtgaatgaattcagcctgaaaggtgtagacttccagaagttctgtatgaatggagcagccctctgcgccctgggtaaagactgctttctcgagctggccccagactttgttggggacatcttatgggaacatctagagatcctgcagaaagaggatgtgaaaccatatcaagttaatggagtcaacccagcctatccagaatcccgctatacctcggattacttcattagctatggtattgagcatgcccagtgtgttccaccatcggagttctcagagcccagcttcatcacagagtcctatcagacgctccatcccatcagctcggaagagctcctctccctcaagtatgagaatgactacccctcggtcattctccgagaccctctccagacagacaccttgcagaatgactactttgctatcaaacaagaagtcgtcaccccagacaacatgtgcatggggaggaccagtcgtggtaaactcgggggccaggactcttttgaaagcatagagagctacgatagttgtgatcgcctcacccagtcctggagcagccagtcatctttcaacagcctgcagcgtgttccctcctatgacagcttcgactcagaggactatccggctgccctgcccaaccacaagcccaagggcaccttcaaggactatgtgcgggaccgtgctgacctcaataaggacaagcctgtcattcctgctgctgccctagctggctacacaggcagtggaccaatccagctatggcagtttcttctggaattactcactgataaatcctgtcagtcttttatcagctggacaggagatggctgggaattcaaactttctgacccagatgaggtggccaggagatggggaaagaggaaaaacaaacctaagatgaattatgagaaactgagccgtggcctacgctactattacgacaaaaacatcatccacaagacagcggggaaacgctacgtgtaccgctttgtgtgtgacctgcagagcctgctggggtacacccctgaggagctgcacgccatgctggacgtcaagccagatgccgacgagtgatggcactgaaggggctggggaaaccctgctgagaccttccaaggacagccgtgttggttggactctgaattttgaattgttattctattttttattttccagaactcattttttaccttcaggggtgggagctaagtcagttgcagctgtaatcaattgtgcgcagttgggaaaggaaagccaggactgtggggtgggtgggaccgaattcttgagcaaattttcaggagagggagaagggccttctcagaagcttgaaggctctggcttaacagagaaagagactaatgtgtccaatcatttttaaaaatcatccatgaaaaagtgtcttgagttgtggacccattagcaagtgacattgtcacatcagaactcatgaaactgatgtaaggcaattaatttgcttctgtttttaggtctgggagggcaaaaaagaggtgggtgggatgaaacatgttttggggggggatgcactgaaaatctgagaactatttacctatcactctagttttgaagcaaagatggacttcagtggggaggggccaaaaccgttgttgtgttaaaatttattttattaaattttgtgccagtattttttttcttaaaaatcgtcttaagctctaaggtggtctcagtattgcaatatcatgtaagtttgtttttatttgccggctgaggattctgtcacaatgaaagaaaactgtttatatagaccccattggaaaagcaaaacgctctcactgagatcagggatcccaaattcatgggacttatataagaaggacaattaatgctgatttgggtacaggggaattatgtgtgtgaatgtcatctacaattaaaaaaaattagcacatccctttacttacttgttatcagtggattctcggggtttggacttaatgttgagctaagaagcattaagtctttgaactgaatgtattttgcatccctggttttggacgacagtaaacgtaggagcactgttgaagtcctggaagggagatcgaaggaggaagattgacttggttctttcttagtcctatatctgtagcatagatgacttggaataaaagctgtatgcatgggcattacccctcaggtcctaagaaataagtcctgaatgcatgtcgttccaaactaacactctgtaatttttcttttatgtcttattttccaagagtcctccattttttgcaccccctcaccgccaactctgttattcagtagagagaagtgtacggctttctgattggtgagtgaaaaagtaacttgagacacgacctaagttgaagagtttagacttgctgagttttagaagtgatggaaattaagagagcatttcaataaaatgtgacttggctgtctttggaagagaagtgcaaggctttcctttgaagaatttaaattagtccggtaggatgtcaggtgagactgtgtatgcaaaatgaatggcacaggtgatgccagggcctcttgcttgggtctgatgtcttggcacagggtaagtgaaggttaattccagaagagaggaatgacttgaaggcaaaggaaactaaggaaggaggttcagtgaggaaaataaggttgtccatgagatttgaatagatttttagttcccccaaggtttaaatacaaacatagtcaagcaaggtagtcatctttctgctggttgtgagggggaatctgaaaatggagttttagaggaaaagtcaacatctaactagtgagggaaagtgcctaatacaattagaatctccctcactctatagttgcccagttgaaaggataaggaggaggggtggcttttatggacttccatgagagaaggaaagaaatatttcaggtaagcttctcagggctggccctttttgggatttggatgagaaattggaagtactaactactttctagcatatctttaagaaaattgattgttatttactcccagatcctcttgcagacccagaattatcaggaacatagctctgtgattcatgagtgtccccatactgatgaattggagcatccatatggaaagcaaaggcagaattatcccagctgtattattttgatcttttggatgcaggtgccttaatgaagctctcaaaatattttaggagctgctcagggagtgttgggtggaactgtttggactacattgttttctcttagattatgtgatttttgttgggcactggcaaaaggtgtgtgtgtgaatgtgtgcatgtgtgtgtgcgtgtggtcgacgcggccgcgaatttagtagtagtaggcggccgc

SEQ ID NO: 384154 - DNA, 434 bp, Homo sapiens
ccttgtcaagggctaaagctgtttagtagtggacaaggttaaaaatgcaagcttttctgatttaaagtattttcccttattctctaaggagcttgtcccacatcatagggccctgtagatggtgaaaactgcttattttaggtacaaatctctcctctctttacttgcaaaccctttgtttccaggctatggtattgagcatgcccagtgtgttccaccatcggagttctcagagcccagcttcatcacagagtcctatcagacgctccatcccatcagctcggaagagctcctctccctcaagtatgagaatgactacccctcggtcattctccgagaccctctccagacagacaccttgcagaatgactactttgctatcaaacaagaagtcgtcaccccagacaacatgtgcatggggaggaccagtcgtg

SEQ ID NO: 384155 - DNA, 273 bp, Homo sapiens
ttttagatcagctattacagagtatgtgttctaaatgttctaaagtaggtctttattaccaagtgactgtacaatattgcaattgccattaagaatgatattgacattaatgtatagttttattgctaataattcttttattttcaaattttctgtttagaaaaatatcatttgaaaaaatacagtttacttaaatatttcccgattatttgcagagggtctaaagagagtacttaccggtaatcagtggctctttattgcctttattttgga

SEQ ID NO: 384156 - DNA, 404 bp, Homo sapiens
gagccactgtgcacagccagttcgaaggttttgattcacatttccctgatggttaatgatattgaacatattttcatgtacctattggccatttgtccacctcctttgaggaaatgtcttcttaagattctctgccctttttaaaaattgggttattgctgatccataagggttctttgtgtattctcgttatcagtccattatcacgtgcgtattttgcaagcattttctcccattttgtatgttgtcttttcactttcttgatggtgtcattttaagcacaaaaattagccaggcatggtggcgggtgcctgtaatcccagctactcgggaggctgaggcatgagaatcgcttgaacccaggagtcagaggttgtagtgagccgagatcgccccacggcact

SEQ ID NO: 384157 - DNA, 410 bp, Homo sapiens
cagatagatataccgctgatcaaaataaaacagtggcagcaagaatgatgttctgtccatgtaagaaatcaatgaaatataattaagaacgaactgtatctcattgactcaaaacattgcatctgcctttctgtcccatctgttttctaaacaaaaatcttcccgtgctgcgtggttgtttttatttgtatcctagaaccatcctctcgagttccacaccgttgtattttctacacctaagcttggtgtgttctgcacaggaaatgtttcttggatgttttatcctcataccaagtgggaatttaaaatttaagagattacccacactctttgcctttctgtacatgtgatgaagaaagagtgggtgtaacccagcactctaaaatgtgtttgacctgtaaaaaaaaaaa

SEQ ID NO: 384158 - DNA, 395 bp, Homo sapiens
tgaagcagtgaggctgggaggactggggtcaaataagtacagccaggattatgtttgggggtttgatcctaaaacattatagttgagggctcctagcacttccttttagaacactggaaatagccttttttattattttctgtctctgttaaaatgggaggagggggattatcatgtgttccagttcaccaaagattattcttcccccaaatcagcaatagccagtagagggttcagcagcatagaatctgttttccctttttaaaaattttcaagccagacacagtggctcacacctgtaatcctagcatttgagaggctgaggtgggcagatcacctgaggtcaggagttcaagaccagtctggccaacatggtgaaacctcatctctactaa

SEQ ID NO: 384159 - DNA, 1045 bp, Homo sapiens
atgcagaagtggttctcatctttttttgcagcttaagatctgccttggtatttgaagagatataaactagatcaatttctttcacaggatcaactaaacagtgtaccacaatgaattctgaacttgactattatgaaaagtttgaagaagtccatgggattctaatgtataaagattttgtcaaatattgggataatgtggaagcgttccaggcaagaccagatgatcttgtcattgccacctaccctaaatctggtacaacctgggttagtgaaattgtgtatatgatctataaagagggtgatgtggaaaagtgcaaagaagatgtaatttttaatcgaatacctttcctggaatgcagaaaagaaaacctcatgaatggagtaaaacaattagatgagatgaattctcctagaattgtgaagactcatttgccacctgaacttcttcctgcctcattttgggaaaaggattgtaagataatctatctttgccggaatgcaaaggatgtggctgtttccttttattatttctttctaatggtggctggtcatccaaatcctggatcctttccagagtttgtggagaaattcatgcaaggacaggttccttatggttcctggtataaacatgtaaaatcttggtgggaaaagggaaagagtccacgtgtactatttcttttctacgaagacctgaaagaggatatcagaaaagaggtgataaaattgatacatttcctggaaaggaagccatcagaggagcttgtggacaggattatacatcatacttcgttccaagagatgaagaacaatccatccacaaattacacaacactgccagacgaaattatgaaccagaaattgtcgcccttcatgagaaagggaattacaggagactggaaaaatcactttacagtagccctgaatgaaaaatttgataaacattatgagcagcaaatgaaggaatctacactgaagtttcgaactgagatctaagaaggtctttctttacttaacatatctgatattaaagatttcttttcatt

SEQ ID NO: 384160 - DNA, 1738 bp, Homo sapiens
atgcagaagtggttctcatctttttttgcagcttaagatctgccttggtatttgaagagatataaactagatcaatttctttcacaggatcaactaaacagtgtaccacaatgaattctgaacttgactattatgaaaagtttgaagaagtccatgggattctaatgtataaagattttgtcaaatattgggataatgtggaagcgttccaggcaagaccagatgatcttgtcattgccacctaccctaaatctggtacaacctgggttagtgaaattgtgtatatgatctataaagagggtgatgtggaaaagtgcaaagaagatgtaatttttaatcgaatacctttcctggaatgcagaaaagaaaacctcatgaatggagtaaaacaattagatgagatgaattctcctagaattgtgaagactcatttgccacctgaacttcttcctgcctcattttgggaaaaggattgtaagataatctatctttgccggaatgcaaaggatgtggctgtttccttttattatttctttctaatggtggctggtcatccaaatcctggatcctttccagagtttgtggagaaattcatgcaaggacaggttccttatggttcctggtataaacatgtaaaatcttggtgggaaaagggaaagagtccacgtgtactatttcttttctacgaagacctgaaagaggatatcagaaaagaggtgataaaattgatacatttcctggaaaggaagccatcagaggagcttgtggacaggattatacatcatacttcgttccaagagatgaagaacaatccatccacaaattacacaacactgccagacgaaattatgaaccagaaattgtcgcccttcatgagaaagggaattacaggagactggaaaaatcactttacagtagccctgaatgaaaaatttgataaacattatgagcagcaaatgaaggaatctacactgaagtttcgaactgagatctaagaaggtctttctttacttaacatatctgatattaaagatttcttttcattattctccactttttcttattttagattgctagaaaagacataatcatggattatgttgacattttctttttaaatttttgtttaactttttttttttttttttgagacagagtctcactctgttgcctaggctggaggacagtggcacaatcatggctgattgcagccttgacctccttgactcaattgatcctcccatctcagcctcccaagtagctaggactacagacatgtgcaaccatgtttggctaatttttttaatgtttttttgtagagatgaggtcttattatattgtccaggctggtcttgaattcctgggctcaagcttcccaagtagctgcaacaacaggcacacaccaccatgctcaactaattttatttctattttttgtatagacaggggcttgctatagtgtccaggctggtctgaaacccttgagctcaagtgatcttcccacaccagcctcccattgagctgtacatgcatatgagaaataagaaacttttttttcctactatcatctcttaaattttgttttctttttcttttgcttcctcttcttcttttctattttttataaatatcatgcacaactataacctatgggaatgatgtagtaacacagattattcatcttgttagagttgtattaaaaataaacaagcatttcaaattaaatttgtgattgatt

SEQ ID NO: 384161 - DNA, 1611 bp, Homo sapiens
atgcagaagtggttctcatctttttttgcagcttaagatctgccttggtatttgaagagatataaactagatcaatttctttcacaggatcaactaaacagtgtaccacaatgaattctgaacttgactattatgaaaagtttgaagaagtccatgggattctaatgtataaagattttgtcaaatattgggataatgtggaagcgttccaggcaagaccagatgatcttgtcattgccacctaccctaaatctggtacaacctgggttagtgaaattgtgtatatgatctataaagagggtgatgtggaaaagtgcaaagaagatgtaatttttaatcgaatacctttcctggaatgcagaaaagaaaacctcatgaatggagtaaaacaattagatgagatgaattctcctagaattgtgaagactcatttgccacctgaacttcttcctgcctcattttgggaaaaggattgtaagataatctatctttgccggaatgcaaaggatgtggctgtttccttttattatttctttctaatggtggctggtcatccaaatcctggatcctttccagagtttgtggagaaattcatgcaaggacaggttccttatggttcctggtataaacatgtaaaatcttggtgggaaaagggaaagagtccacgtgtactatttcttttctacgaagacctgaaagaggaattacaggagactggaaaaatcactttacagtagccctgaatgaaaaatttgataaacattatgagcagcaaatgaaggaatctacactgaagtttcgaactgagatctaagaaggtctttctttacttaacatatctgatattaaagatttcttttcattattctccactttttcttattttagattgctagaaaagacataatcatggattatgttgacattttctttttaaatttttgtttaactttttttttttttttttgagacagagtctcactctgttgcctaggctggaggacagtggcacaatcatggctgattgcagccttgacctccttgactcaattgatcctcccatctcagcctcccaagtagctaggactacagacatgtgcaaccatgtttggctaatttttttaatgtttttttgtagagatgaggtcttattatattgtccaggctggtcttgaattcctgggctcaagcttcccaagtagctgcaacaacaggcacacaccaccatgctcaactaattttatttctattttttgtatagacaggggcttgctatagtgtccaggctggtctgaaacccttgagctcaagtgatcttcccacaccagcctcccaaaatactgggattacaggcttgagcctccatgcctggcccaggtaacatgtttattgagctgtacatgcatatgagaaataagaaacttttttttcctactatcatctcttaaattttgttttctttttcttttgcttcctcttcttcttttctattttttataaatatcatgcacaactataacctatgggaatgatgtagtaacacagattattcatcttgttagagttgtattaaaaataaacaagcatttcaaattaaatttgtgattgatt

SEQ ID NO: 384162 - DNA, 223 bp, Homo sapiens
ctggatcctttccagagtttgtggagaaattcatgcaaggacagggtaggaacagcttctttacactgaattttttttcaaggttttataagacaaatgccatctccaagtaaaagtttttaactgttctggtacgttttcttccctgattcatagttaaaacacagaaatctaaaggcgcctggaggtttagagcaagcatactgtgtccagatgtagaagg

SEQ ID NO: 384163 - DNA, 1792 bp, Homo sapiens
atgcagaagtggttctcatctttttttgcagcttaagatctgccttggtatttgaagagatataaactagatcaatttctttcacaggatcaactaaacagtgtaccacaatgaattctgaacttgactattatgaaaagtttgaagaagtccatgggattctaatgtataaagattttgtcaaatattgggataatgtggaagcgttccaggcaagaccagatgatcttgtcattgccacctaccctaaatctggtacaacctgggttagtgaaattgtgtatatgatctataaagagggtgatgtggaaaagtgcaaagaagatgtaatttttaatcgaatacctttcctggaatgcagaaaagaaaacctcatgaatggagtaaaacaattagatgagatgaattctcctagaattgtgaagactcatttgccacctgaacttcttcctgcctcattttgggaaaaggattgtaagataatctatctttgccggaatgcaaaggatgtggctgtttccttttattatttctttctaatggtggctggtcatccaaatcctggatcctttccagagtttgtggagaaattcatgcaaggacaggttccttatggttcctggtataaacatgtaaaatcttggtgggaaaagggaaagagtccacgtgtactatttcttttctacgaagacctgaaagaggatatcagaaaagaggtgataaaattgatacatttcctggaaaggaagccatcagaggagcttgtggacaggattatacatcatacttcgttccaagagatgaagaacaatccatccacaaattacacaacactgccagacgaaattatgaaccagaaattgtcgcccttcatgagaaagggaattacaggagactggaaaaatcactttacagtagccctgaatgaaaaatttgataaacattatgagcagcaaatgaaggaatctacactgaagtttcgaactgagatctaagaaggtctttctttacttaacatatctgatattaaagatttcttttcattattctccactttttcttattttagattgctagaaaagacataatcatggattatgttgacattttctttttaaatttttgtttaactttttttttttttttttgagacagagtctcactctgttgcctaggctggaggacagtggcacaatcatggctgattgcagccttgacctccttgactcaattgatcctcccatctcagcctcccaagtagctaggactacagacatgtgcaaccatgtttggctaatttttttaatgtttttttgtagagatgaggtcttattatattgtccaggctggtcttgaattcctgggctcaagcttcccaagtagctgcaacaacaggcacacaccaccatgctcaactaattttatttctattttttgtatagacaggggcttgctatagtgtccaggctggtctgaaacccttgagctcaagtgatcttcccacaccagcctcccaaaatactgggattacaggcttgagcctccatgcctggcccaggtaacatgtttattgagctgtacatgcatatgagaaataagaaacttttttttcctactatcatctcttaaattttgttttctttttcttttgcttcctcttcttcttttctattttttataaatatcatgcacaactataacctatgggaatgatgtagtaacacagattattcatcttgttagagttgtattaaaaataaacaagcatttcaaattaaatttgtgattgatt

SEQ ID NO: 384164 - DNA, 342 bp, Homo sapiens
ggaccgagcggggtccccaggagaggggtggcggggagctcgatctccacgcggggaccagattttcggcctcaaaatagaagaatagggctttgtgtggtcacagctatctctttgtaaatatttggccaactaagctgagtggctaagttctcctgctgcccggagcttcttggaacatgtttccttttcgcaaggggtttccctggcttccaggagggccaggaagaaattcgaattggccaccgctttctctaaaatcactccgctcaagttatcacccctctgggctcccgaagaccggctggctggaggctggagatagtctcaatgctcgaaatg

SEQ ID NO: 384165 - DNA, 167 bp, Homo sapiens
cgccactaaagaacaaacaccacgtgctccccacaactattaaaataaaataaacattaaaaaataggtctagagtgaggtcaactactgaggcctgggaaggaagtgagggggcaggtggggcccatctcaggcctctgggggccgaagggagccagggactaaag

SEQ ID NO: 384166 - DNA, 272 bp, Homo sapiens
aattccctattttacttgtacgtgtgtgtgtatttacttctatacaatttatcatgttaggcttgtgcgtctataaccacagtcaagatgcagaacaattccattgccacaaggatcctttgtgttgcccttttaaaaatcacaacccttccttcctcaccctcctcccacgtgcccatccgtcttcatggccttcactaatctgttttccatgtctacattttggcttttcaaaaatgttctatacatggaatcatgctgttgaaggacat

SEQ ID NO: 384167 - DNA, 464 bp, Homo sapiens
cagcctcccgagtagctgggactacaggcatgtgccaccatgcccggctaatttttgtactcagtagagatggggtttcaccatgttggccaggctggtctcgaactcctgacctcaagtgatctgcccacctcaccctccaaaagtgctgggattacaggtgtgagccactgcacctgccgtggtttagggttttaacgtgggctttcatttccaagtgttcctgtatgaattacaacccagtctccccatgatagggagtgtgagtccccgtagaaccagaacaaccgtcgtccttaccaagcactacacattagcttattgctggctgtgtgaccggaggagttccctgaccctctctgtgcctgttttcttatttttaaacaggaataaaaatacaggccagagagtccgtgaaatgcttacacgcatgctagaagctggctgtttttactgggggctct

SEQ ID NO: 384168 - DNA, 486 bp, Homo sapiens
tcgggaggctgaggcaggagaatggcgtgaacccgggaggtggagcttgcagtgagccaagatagcgccactgcactccaccctgggcgagagcgaggctccgtctcaaaaaaaaaaaaaaacttttaaaaactgggtgttttcattttctacactggtcagtcgtgtttaaaaaatggttaaactagacaaaagagccgtgccttcaggaaaattggtgatctgtatgttaccacaactgaatttattttccttccttaaagacccagattgatcactatgttggcatcgcccgagatcagaccaagtcaattgttgaaaagtaagtacatttagagaccacatcatcatgaggtatgcttccttccccccaattatctttagtcccttgtacaaaatgcagatgccaaggaaagtaattttcattttgataaaaaccttagttaatagtttcattttactaaaaattattatagctgcttctat

SEQ ID NO: 384169 - DNA, 3962 bp, Homo sapiens
  misc_feature (33)..(33): n is a, c, g, or t
agcggatgggagcgggcgttcccgccctctagntgcgctcggctgagtcagtcagtctgtcggagtctgtcctcggagcaggcggagtaaagggacttgagcgagccagttgccggattattctatttcccctccctctctcccgccccgtatctcttttcacccttctcccaccctcgctcgcgtagccatggcggagccgtcggcggccactcagtcccattccatctcctcgtcgtccttcggagccgagccgtccgcgcccggcggcggcgggagcccaggagcctgccccgccctggggacgaagagctgcagctcctcctgtgcggtgcacgatctgattttctggagagatgtgaagaagactgggtttgtctttggcaccacgctgatcatgctgctttccctggcagctttcagtgtcatcagtgtggtttcttacctcatcctggctcttctctctgtcaccatcagcttcaggatctacaagtccgtcatccaagctgtacagaagtcagaagaaggccatccattcaaagcctacctggacgtagacattactctgtcctcagaagctttccataattacatgaatgctgccatggtgcacatcaacagggccctgaaactcattattcgtctctttctggtagaagatctggttgactccttgaagctggctgtcttcatgtggctgatgacctatgttggtgctgtttttaacggaatcacccttctaattcttgctgaactgctcattttcagtgtcccgattgtctatgagaagtacaagacccagattgatcactatgttggcatcgcccgagatcagaccaagtcaattgttgaaaagatccaagcaaaactccctggaatcgccaaaaaaaaggcagaataagtacatggaaaccagaaatgcaacagttactaaaacaccatttaatagttataacgtcgttacttgtactatgaaggaaaatactcagtgtcagcttgagcctgcattccaagctttttttttaatttggtgttttctcccatcctttccctttaaccctcagtatcaagcacaaaaattgatggactgataaaagaactatcttagaactcagaagaagaaagaatcaaattcataggataagtcaataccttaatggtggtagagcctttacctgtagcttgaaaggggaaagattggaggtaagagagaaaatgaaagaacacctctgggtccttctgtccagttttcagcactagtcttactcagctatccattatagttttgcccttaagaagtcatgattaacttatgaaaaaattatttggggacaggagtgtgataccttccttggtttttttttgcagccctcaaatcctatcttcctgccccacaatgtgagcagctacccctgatactccttttctttaatgatttaactatcaacttgataaataacttataggtgatagtgataattcctgattccaagaatgccatctgataaaaaagaatagaaatggaaagtgggactgagagggagtcagcaggcatgctgcggtggcggtcactccctctgccactatccccagggaaggaaaggctccgccatttgggaaagtggtttctacgtcactggacaccggttctgagcattagtttgagaactcgttcccgaatgtgctttcctccctctcccctgcccacctcaagtttaataaataaggttgtacttttcttactataaaataaatgtctgtaactgctgtgcactgctgtaaacttgttagagaaaaaaataacctgcatgtgggctcctcagttattgagtttttgtgatcctatctcagtctgggggggaacattctcaagaggtgaaatacagaaagcctttttttcttgatcttttcccgagattcaaatctccgattcccatttgggggcaagtttttttcttcaccttcaatatgagaattcagcgaacttgaaagaaaaatcatctgtgagttccttcaggttctcactcatagtcatgatccttcagagggaatatgcactggcgagtttaaagtaagggctatgatatttgatggtcccaaagtacggcagctgcaaaaagtagtggaaggaaattgtctacgtgtcttggaaaaattagttaggaatttggatgggtaaaaggtacccttgccttactccatcttattttcttagccccctttgagtgttttaactggtttcatgtcctagtaggaagtgcattctccatcctcatcctctgccctcccaggaagtcagtgattgtctttttgggcttcccctccaaaggaccttctgcagtggaagtgccacatccagttcttttcttttgttgctgctgtgtttagataattgaagagatctttgtgccacacaggattttttttttttttaagaaaaacctatagatgaaaaattactaatgaaactgtgtgtacgtgtctgtgcgtgcaacataaaaatacagtagcacctaaggagcttgaatcttggttcctgtaaaatttcaaattgatgtggtattaataaaaaaaaaaaaaaaaaactcgctcgtgccgaattcggcacgaggaacaacctgtgtgcatgctttttgagtatattaatcagggggatctccatgagttcctcatcatgagatccccacactctgatgttggctgcagcagtgatgaagatgggactgtgaaatccagcctggaccacggagattttctgcacattgcaattcagattgcagctggcatggaatacctgtctagtcacttctttgtccacaaggaccttgcagctcgcaatattttaatcggagagcaacttcatgtaaagatttcagacttggggctttccagagaaatttactccgctgattactacagggtccagagtaagtccttgctgcccattcgctggatgccccctgaagccatcatgtatggcaaattctcttctgattcagatatctggtcctttggggttgtcttgtgggagattttcagttttggactccagccatattatggattcagtaaccaggaagtgattgagatggtgagaaaacggcagctcttaccatgctctgaagactgcccacccagaatgtacagcctcatgacagagtgctggaatgagattccttctaggagaccaagatttaaagatattcacgtccggcttcggtcctgggagggactctcaagtcacacaagctctactactccttcagggggaaatgccaccacacagacaacctccctcagtgccagcccagtgagtaatctcagtaaccccagatatcctaattacatgttcccgagccagggtattacaccacagggccagattgctggtttcattggcccgccaatacctcagaaccagcgattcattcccatcaatggatacccaatacctcctggatatgcagcgtttccagctgcccactaccagccaacaggtcctcccagagtgattcagcactgcccacctcccaagagtcggtccccaagcagtgccagtgggtcgactagcactggccatgtgactagcttgccctcatcaggatccaatcaggaagcaaatattcctttactaccacacatgtcaattccaaatcatcctggtggaatgggtatcaccgtttttggcaacaaatctcaaaaaccctacaaaattgactcaaagcaagcatctttactaggagacgccaatattcatggacacaccgaatctatgatttctgcagaactgtaaaatgcacaacttttgtaaatgtggtatacaggacaaactagacggccgtagaaaagatttatattcaaatgtttttattaaagtaaggttctcatttagcagacatcgcaacaagtaccttctgtgaagtttcactgtgtcttaccaagcaggacagacactcggccag

SEQ ID NO: 384170 - DNA, 3904 bp, Homo sapiens
  misc_feature (33)..(33): n is a, c, g, or t
agcggatgggagcgggcgttcccgccctctagntgcgctcggctgagtcagtcagtctgtcggagtctgtcctcggagcaggcggagtaaagggacttgagcgagccagttgccggattattctatttcccctccctctctcccgccccgtatctcttttcacccttctcccaccctcgctcgcgtagccatggcggagccgtcggcggccactcagtcccattccatctcctcgtcgtccttcggagccgagccgtccgcgcccggcggcggcgggagcccaggagcctgccccgccctggggacgaagagctgcagctcctcctgtgcggtgcacgatctgattttctggagagatgtgaagaagactgggtttgtctttggcaccacgctgatcatgctgctttccctggcagctttcagtgtcatcagtgtggtttcttacctcatcctggctcttctctctgtcaccatcagcttcaggatctacaagtccgtcatccaagctgtacagaagtcagaagaaggccatccattcaaagcctacctggacgtagacattactctgtcctcagaagctttccataattacatgaatgctgccatggtgcacatcaacagggccctgaaactcattattcgtctctttctggtagaagatctggttgactccttgaagctggctgtcttcatgtggctgatgacctatgttggtgctgtttttaacggaatcacccttctaattcttgctgaactgctcattttcagtgtcccgattgtctatgagaagtacaagacccagattgatcactatgttggcatcgcccgagatcagaccaagtcaattgttgaaaagatccaagcaaaactccctggaatcgccaaaaaaaaggcagaataagtacatggaaaccagaaatgcaacagttactaaaacaccatttaatagttataacgtcgttacttgtactatgaaggaaaatactcagtgtcagcttgagcctgcattccaagctttttttttaatttggtgttttctcccatcctttccctttaaccctcagtatcaagcacaaaaattgatggactgataaaagaactatcttagaactcagaagaagaaagaatcaaattcataggataagtcaataccttaatggtggtagagcctttacctgtagcttgaaaggggaaagattggaggtaagagagaaaatgaaagaacacctctgggtccttctgtccagttttcagcactagtcttactcagctatccattatagttttgcccttaagaagtcatgattaacttatgaaaaaattatttggggacaggagtgtgataccttccttggtttttttttgcagccctcaaatcctatcttcctgccccacaatgtgagcagctacccctgatactccttttctttaatgatttaactatcaacttgataaataacttataggtgatagtgataattcctgattccaagaatgccatctgataaaaaagaatagaaatggaaagtgggactgagagggagtcagcaggcatgctgcggtggcggtcactccctctgccactatccccagggaaggaaaggctccgccatttgggaaagtggtttctacgtcactggacaccggttctgagcattagtttgagaactcgttcccgaatgtgctttcctccctctcccctgcccacctcaagtttaataaataaggttgtacttttcttactataaaataaatgtctgtaactgctgtgcactgctgtaaacttgttagagaaaaaaataacctgcatgtgggctcctcagttattgagtttttgtgatcctatctcagtctgggggggaacattctcaagaggtgaaatacagaaagcctttttttcttgatcttttcccgagattcaaatctccgattcccatttgggggcaagtttttttcttcaccttcaatatgagaattcagcgaacttgaaagaaaaatcatctgtgagttccttcaggttctcactcatagtcatgatccttcagagggaatatgcactggcgagtttaaagtaagggctatgatatttgatggtcccaaagtacggcagctgcaaaaagtagtggaaggaaattgtctacgtgtcttggaaaaattagttaggaatttggatgggtaaaaggtacccttgccttactccatcttattttcttagccccctttgagtgttttaactggtttcatgtcctagtaggaagtgcattctccatcctcatcctctgccctcccaggaagtcagtgattgtctttttgggcttcccctccaaaggaccttctgcagtggaagtgccacatccagttcttttcttttttttaagaaaaacctatagatgaaaaattactaatgaaactgtgtgtacgtgtctgtgcgtgcaacataaaaatacagtagcacctaaggagcttgaatcttggttcctgtaaaatttcaaattgatgtggtattaataaaaaaaaaaaaaaaaaactcgctcgtgccgaattcggcacgaggaacaacctgtgtgcatgctttttgagtatattaatcagggggatctccatgagttcctcatcatgagatccccacactctgatgttggctgcagcagtgatgaagatgggactgtgaaatccagcctggaccacggagattttctgcacattgcaattcagattgcagctggcatggaatacctgtctagtcacttctttgtccacaaggaccttgcagctcgcaatattttaatcggagagcaacttcatgtaaagatttcagacttggggctttccagagaaatttactccgctgattactacagggtccagagtaagtccttgctgcccattcgctggatgccccctgaagccatcatgtatggcaaattctcttctgattcagatatctggtcctttggggttgtcttgtgggagattttcagttttggactccagccatattatggattcagtaaccaggaagtgattgagatggtgagaaaacggcagctcttaccatgctctgaagactgcccacccagaatgtacagcctcatgacagagtgctggaatgagattccttctaggagaccaagatttaaagatattcacgtccggcttcggtcctgggagggactctcaagtcacacaagctctactactccttcagggggaaatgccaccacacagacaacctccctcagtgccagcccagtgagtaatctcagtaaccccagatatcctaattacatgttcccgagccagggtattacaccacagggccagattgctggtttcattggcccgccaatacctcagaaccagcgattcattcccatcaatggatacccaatacctcctggatatgcagcgtttccagctgcccactaccagccaacaggtcctcccagagtgattcagcactgcccacctcccaagagtcggtccccaagcagtgccagtgggtcgactagcactggccatgtgactagcttgccctcatcaggatccaatcaggaagcaaatattcctttactaccacacatgtcaattccaaatcatcctggtggaatgggtatcaccgtttttggcaacaaatctcaaaaaccctacaaaattgactcaaagcaagcatctttactaggagacgccaatattcatggacacaccgaatctatgatttctgcagaactgtaaaatgcacaacttttgtaaatgtggtatacaggacaaactagacggccgtagaaaagatttatattcaaatgtttttattaaagtaaggttctcatttagcagacatcgcaacaagtaccttctgtgaagtttcactgtgtcttaccaagcaggacagacactcggccag

SEQ ID NO: 384171 - DNA, 3908 bp, Homo sapiens
  misc_feature (33)..(33): n is a, c, g, or t
agcggatgggagcgggcgttcccgccctctagntgcgctcggctgagtcagtcagtctgtcggagtctgtcctcggagcaggcggagtaaagggacttgagcgagccagttgccggattattctatttcccctccctctctcccgccccgtatctcttttcacccttctcccaccctcgctcgcgtagccatggcggagccgtcggcggccactcagtcccattccatctcctcgtcgtccttcggagccgagccgtccgcgcccggcggcggcgggagcccaggagcctgccccgccctggggacgaagagctgcagctcctcctgtgcggtgcacgatctgattttctggagagatgtgaagaagactgggtttgtctttggcaccacgctgatcatgctgctttccctggcagctttcagtgtcatcagtgtggtttcttacctcatcctggctcttctctctgtcaccatcagcttcaggatctacaagtccgtcatccaagctgtacagaagtcagaagaaggccatccattcaaagcctacctggacgtagacattactctgtcctcagaagctttccataattacatgaatgctgccatggtgcacatcaacagggccctgaaactcattattcgtctctttctggtagaagatctggttgactccttgaagctggctgtcttcatgtggctgatgacctatgttggtgctgtttttaacggaatcacccttctaattcttgctgaactgctcattttcagtgtcccgattgtctatgagaagtacaagacccagattgatcactatgttggcatcgcccgagatcagaccaagtcaattgttgaaaagatccaagcaaaactccctggaatcgccaaaaaaaaggcagaataagtacatggaaaccagaaatgcaacagttactaaaacaccatttaatagttataacgtcgttacttgtactatgaaggaaaatactcagtgtcagcttgagcctgcattccaagctttttttttaatttggtgttttctcccatcctttccctttaaccctcagtatcaagcacaaaaattgatggactgataaaagaactatcttagaactcagaagaagaaagaatcaaattcataggataagtcaataccttaatggtggtagagcctttacctgtagcttgaaaggggaaagattggaggtaagagagaaaatgaaagaacacctctgggtccttctgtccagttttcagcactagtcttactcagctatccattatagttttgcccttaagaagtcatgattaacttatgaaaaaattatttggggacaggagtgtgataccttccttggtttttttttgcagccctcaaatcctatcttcctgccccacaatgtgagcagctacccctgatactccttttctttaatgatttaactatcaacttgataaataacttataggtgatagtgataattcctgattccaagaatgccatctgataatggcggtcactccctctgccactatccccagggaaggaaaggctccgccatttgggaaagtggtttctacgtcactggacaccggttctgagcattagtttgagaactcgttcccgaatgtgctttcctccctctcccctgcccacctcaagtttaataaataaggttgtacttttcttactataaaataaatgtctgtaactgctgtgcactgctgtaaacttgttagagaaaaaaataacctgcatgtgggctcctcagttattgagtttttgtgatcctatctcagtctgggggggaacattctcaagaggtgaaatacagaaagcctttttttcttgatcttttcccgagattcaaatctccgattcccatttgggggcaagtttttttcttcaccttcaatatgagaattcagcgaacttgaaagaaaaatcatctgtgagttccttcaggttctcactcatagtcatgatccttcagagggaatatgcactggcgagtttaaagtaagggctatgatatttgatggtcccaaagtacggcagctgcaaaaagtagtggaaggaaattgtctacgtgtcttggaaaaattagttaggaatttggatgggtaaaaggtacccttgccttactccatcttattttcttagccccctttgagtgttttaactggtttcatgtcctagtaggaagtgcattctccatcctcatcctctgccctcccaggaagtcagtgattgtctttttgggcttcccctccaaaggaccttctgcagtggaagtgccacatccagttcttttcttttgttgctgctgtgtttagataattgaagagatctttgtgccacacaggattttttttttttttaagaaaaacctatagatgaaaaattactaatgaaactgtgtgtacgtgtctgtgcgtgcaacataaaaatacagtagcacctaaggagcttgaatcttggttcctgtaaaatttcaaattgatgtggtattaataaaaaaaaaaaaaaaaaactcgctcgtgccgaattcggcacgaggaacaacctgtgtgcatgctttttgagtatattaatcagggggatctccatgagttcctcatcatgagatccccacactctgatgttggctgcagcagtgatgaagatgggactgtgaaatccagcctggaccacggagattttctgcacattgcaattcagattgcagctggcatggaatacctgtctagtcacttctttgtccacaaggaccttgcagctcgcaatattttaatcggagagcaacttcatgtaaagatttcagacttggggctttccagagaaatttactccgctgattactacagggtccagagtaagtccttgctgcccattcgctggatgccccctgaagccatcatgtatggcaaattctcttctgattcagatatctggtcctttggggttgtcttgtgggagattttcagttttggactccagccatattatggattcagtaaccaggaagtgattgagatggtgagaaaacggcagctcttaccatgctctgaagactgcccacccagaatgtacagcctcatgacagagtgctggaatgagattccttctaggagaccaagatttaaagatattcacgtccggcttcggtcctgggagggactctcaagtcacacaagctctactactccttcagggggaaatgccaccacacagacaacctccctcagtgccagcccagtgagtaatctcagtaaccccagatatcctaattacatgttcccgagccagggtattacaccacagggccagattgctggtttcattggcccgccaatacctcagaaccagcgattcattcccatcaatggatacccaatacctcctggatatgcagcgtttccagctgcccactaccagccaacaggtcctcccagagtgattcagcactgcccacctcccaagagtcggtccccaagcagtgccagtgggtcgactagcactggccatgtgactagcttgccctcatcaggatccaatcaggaagcaaatattcctttactaccacacatgtcaattccaaatcatcctggtggaatgggtatcaccgtttttggcaacaaatctcaaaaaccctacaaaattgactcaaagcaagcatctttactaggagacgccaatattcatggacacaccgaatctatgatttctgcagaactgtaaaatgcacaacttttgtaaatgtggtatacaggacaaactagacggccgtagaaaagatttatattcaaatgtttttattaaagtaaggttctcatttagcagacatcgcaacaagtaccttctgtgaagtttcactgtgtcttaccaagcaggacagacactcggccag

SEQ ID NO: 384172 - DNA, 1986 bp, Homo sapiens
  misc_feature (33)..(33): n is a, c, g, or t
agcggatgggagcgggcgttcccgccctctagntgcgctcggctgagtcagtcagtctgtcggagtctgtcctcggagcaggcggagtaaagggacttgagcgagccagttgccggattattctatttcccctccctctctcccgccccgtatctcttttcacccttctcccaccctcgctcgcgtagccatggcggagccgtcggcggccactcagtcccattccatctcctcgtcgtccttcggagccgagccgtccgcgcccggcggcggcgggagcccaggagcctgccccgccctggggacgaagagctgcagctcctcctgtgcggtgcacgatctgattttctggagagatgtgaagaagactgggtttgtctttggcaccacgctgatcatgctgctttccctggcagctttcagtgtcatcagtgtggtttcttacctcatcctggctcttctctctgtcaccatcagcttcaggatctacaagtccgtcatccaagctgtacagaagtcagaagaaggccatccattcaaagcctacctggacgtagacattactctgtcctcagaagctttccataattacatgaatgctgccatggtgcacatcaacagggccctgaaactcattattcgtctctttctggtagaagatctggttgactccttgaagctggctgtcttcatgtggctgatgacctatgttggtgctgtttttaacggaatcacccttctaattcttgctgaactgctcattttcagtgtcccgattgtctatgagaagtacaagacccagattgatcactatgttggcatcgcccgagatcagaccaagtcaattgttgaaaagatccaagcaaaactccctggaatcgccaaaaaaaaggcagaataagtacatggaaaccagaaatgcaacagttactaaaacaccatttaatagttataacgtcgttacttgtactatgaaggaaaatactcagtgtcagcttgagcctgcattccaagctttttttttaatttggtgttttctcccatcctttccctttaaccctcagtatcaagcacaaaaattgatggactgataaaagaactatcttagaactcagaagaagaaagaatcaaattcataggataagtcaataccttaatggtggtagagcctttacctgtagcttgaaaggggaaagattggaggtaagagagaaaatgaaagaacacctctgggtccttctgtccagttttcagcactagtcttactcagctatccattatagttttgcccttaagaagtcatgattaacttatgaaaaaattatttggggacaggagtgtgataccttccttggtttttttttgcagccctcaaatcctatcttcctgccccacaatgtgagcagctacccctgatactccttttctttaatgatttaactatcaacttgataaataacttataggtgatagtgataattcctgattccaagaatgccatctgataaaaaagaatagaaatggaaagtgggactgagagggagtcagcaggcatgctgcggtggcggtcactccctctgccactatccccagggaaggaaaggctccgccatttgggaaagtggtttctacgtcactggacaccggttctgagcattagtttgagaactcgttcccgaatgtgctttcctccctctcccctgcccacctcaagtttaataaataaggttgtacttttcttactataaaataaatgtctgtaactgctgtgcactgctgtaaacttgttagagaaaaaaataacctgcatgtgggctcctccacagtaacgaccttccatagtttttcccttgccgcccgcctcgcccaatcgattttaaacttgggcaagcttatccttccgcccgaattcaagctaatttgcccaattcccctaaaggaggcccattcaaatcaatggccggcggttaacacgcccggatttta

SEQ ID NO: 384173 - DNA, 1749 bp, Homo sapiens
  misc_feature (33)..(33): n is a, c, g, or t
agcggatgggagcgggcgttcccgccctctagntgcgctcggctgagtcagtcagtctgtcggagtctgtcctcggagcaggcggagtaaagggacttgagcgagccagttgccggattattctatttcccctccctctctcccgccccgtatctcttttcacccttctcccaccctcgctcgcgtagccatggcggagccgtcggcggccactcagtcccattccatctcctcgtcgtccttcggagccgagccgtccgcgcccggcggcggcgggagcccaggagcctgccccgccctggggacgaagagctgcagctcctcctgtgcggtgcacgatctgattttctggagagatgtgaagaagactgggtttgtctttggcaccacgctgatcatgctgctttccctggcagctttcagtgtcatcagtgtggtttcttacctcatcctggctcttctctctgtcaccatcagcttcaggatctacaagtccgtcatccaagctgtacagaagtcagaagaaggccatccattcaaagcctacctggacgtagacattactctgtcctcagaagctttccataattacatgaatgctgccatggtgcacatcaacagggccctgaaactcattattcgtctctttctggtagaagatctggttgactccttgaagctggctgtcttcatgtggctgatgacctatgttggtgctgtttttaacggaatcacccttctaattcttgctgaactgctcattttcagtgtcccgattgtctatgagaagtacaagacccagattgatcactatgttggcatcgcccgagatcagaccaagtcaattgttgaaaagatccaagcaaaactccctggaatcgccaaaaaaaaggcagaataagtacatggaaaccagaaatgcaacagttactaaaacaccatttaatagttataacgtcgttacttgtactatgaaggaaaatactcagtgtcagcttgagcctgcattccaagctttttttttaatttggtgttttctcccatcctttccctttaaccctcagtatcaagcacaaaaattgatggactgataaaagaactatcttagaactcagaagaagaaagaatcaaattcataggataagtcaataccttaatggtggtagagcctttacctgtagcttgaaaggggaaagattggaggtaagagagaaaatgaaagaacacctctgggtccttctgtccagttttcagcactagtcttactcagctatccattatagttttgcccttaagaagtcatgattaacttatgaaaaaattatttggggacaggagtgtgataccttccttggtttttttttgcagccctcaaatcctatcttcctgccccacaatgtgagcagctacccctgatactccttttctttaatgatttaactatcaacttgataaataacttataggtgatagtgataattcctgattccaagaatgccatctgataaaaaagaatagaaatggaaagtgggactgagagggagtcagcaggcatgctgcggtggcggtcactccctctgccactatccccagggaaggaaaggctccgccatttgggaaagtggtttctacgtcactggacaccggttctgagcattagtttgagaactcgttcccgaatgtgctttcctccctctcccctgcccacctcaagtttaataaataaggttgtacttttcttactataaa

SEQ ID NO: 384174 - DNA, 1776 bp, Homo sapiens
  misc_feature (33)..(33): n is a, c, g, or t
agcggatgggagcgggcgttcccgccctctagntgcgctcggctgagtcagtcagtctgtcggagtctgtcctcggagcaggcggagtaaagggacttgagcgagccagttgccggattattctatttcccctccctctctcccgccccgtatctcttttcacccttctcccaccctcgctcgcgtagccatggcggagccgtcggcggccactcagtcccattccatctcctcgtcgtccttcggagccgagccgtccgcgcccggcggcggcgggagcccaggagcctgccccgccctggggacgaagagctgcagctcctcctgtgcggtgcacgatctgattttctggagagatgtgaagaagactgggtttgtctttggcaccacgctgatcatgctgctttccctggcagctttcagtgtcatcagtgtggtttcttacctcatcctggctcttctctctgtcaccatcagcttcaggatctacaagtccgtcatccaagctgtacagaagtcagaagaaggccatccattcaaagcctacctggacgtagacattactctgtcctcagaagctttccataattacatgaatgctgccatggtgcacatcaacagggccctgaaactcattattcgtctctttctggtagaagatctggttgactccttgaagctggctgtcttcatgtggctgatgacctatgttggtgctgtttttaacggaatcacccttctaattcttgctgaactgctcattttcagtgtcccgattgtctatgagaagtacaagacccagattgatcactatgttggcatcgcccgagatcagaccaagtcaattgttgaaaagatccaagcaaaactccctggaatcgccaaaaaaaaggcagaataagtacatggaaaccagaaatgcaacagttactaaaacaccatttaatagttataacgtcgttacttgtactatgaaggaaaatactcagtgtcagcttgagcctgcattccaagctttttttttaatttggtgttttctcccatcctttccctttaaccctcagtatcaagcacaaaaattgatggactgataaaagaactatcttagaactcagaagaagaaagaatcaaattcataggataagtcaataccttaatggtggtagagcctttacctgtagcttgaaaggggaaagattggaggtaagagagaaaatgaaagaacacctctgggtccttctgtccagttttcagcactagtcttactcagctatccattatagttttgcccttaagaagtcatgattaacttatgaaaaaattatttggggacaggagtgtgataccttccttggtttttttttgcagccctcaaatcctatcttcctgccccacaatgtgagcagctacccctgatactccttttctttaatgatttaactatcaacttgataaataacttataggtgatagtgataattcctgattccaagaatgccatctgataaaaaagaatagaaatggaaagtgggactgagagggagtcagcaggcatgctgcggtggcggtcactccctctgccactatccccagggaaggaaaggctccgccatttgggaaagtggtttctacgtcactggacaccggttctgagcattagtttgagaactcgttcccgaatgtgctttcctccctctcccctgcccacctcaagtttaataaataaggttgtacttttcttactataaatagtcgtgcgggtgtgggggggggggg

SEQ ID NO: 384175 - DNA, 1488 bp, Homo sapiens
  misc_feature (33)..(33): n is a, c, g, or t
agcggatgggagcgggcgttcccgccctctagntgcgctcggctgagtcagtcagtctgtcggagtctgtcctcggagcaggcggagtaaagggacttgagcgagccagttgccggattattctatttcccctccctctctcccgccccgtatctcttttcacccttctcccaccctcgctcgcgtagccatggcggagccgtcggcggccactcagtcccattccatctcctcgtcgtccttcggagccgagccgtccgcgcccggcggcggcgggagcccaggagcctgccccgccctggggacgaagagctgcagctcctcctgtgcggtgcacgatctgattttctggagagatgtgaagaagactgggtttgtctttggcaccacgctgatcatgctgctttccctggcagctttcagtgtcatcagtgtggtttcttacctcatcctggctcttctctctgtcaccatcagcttcaggatctacaagtccgtcatccaagctgtacagaagtcagaagaaggccatccattcaaagcctacctggacgtagacattactctgtcctcagaagctttccataattacatgaatgctgccatggtgcacatcaacagggccctgaaactcattattcgtctctttctggtagaagatctggttgactccttgaagctggctgtcttcatgtggctgatgacctatgttggtgctgtttttaacggaatcacccttctaattcttgctgaactgctcattttcagtgtcccgattgtctatgagaagtacaagacccagattgatcactatgttggcatcgcccgagatcagaccaagtcaattgttgaaaagatccaagcaaaactccctggaatcgccaaaaaaaaggcagaataagtacatggaaaccagaaatgcaacagttactaaaacaccatttaatagttataacgtcgttacttgtactatgaaggaaaatactcagtgtcagcttgagcctgcattccaagctttttttttaatttggtgttttctcccatcctttccctttaaccctcagtatcaagcacaaaaattgatggactgataaaagaactatcttagaactcagaagaagaaagaatcaaattcataggataagtcaataccttaatggtggtagagcctttacctgtagcttgaaaggggaaagattggaggtaagagagaaaatgaaagaacacctctgggtccttctgtccagttttcagcactagtcttactcagctatccattatagttttgcccttaagaagtcatgattaacttatgaaaaaattatttggggacaggagtgtgataccttccttggtttttttttgcagccctcaaatcctatcttcctgccccacaatgtgagcagctacccctgatactccttttctttaatgatttaactatcaacttgataaataacttatcattaaaaaaaaagttggcggccg

SEQ ID NO: 384176 - DNA, 1430 bp, Homo sapiens
  misc_feature (33)..(33): n is a, c, g, or t
agcggatgggagcgggcgttcccgccctctagntgcgctcggctgagtcagtcagtctgtcggagtctgtcctcggagcaggcggagtaaagggacttgagcgagccagttgccggattattctatttcccctccctctctcccgccccgtatctcttttcacccttctcccaccctcgctcgcgtagccatggcggagccgtcggcggccactcagtcccattccatctcctcgtcgtccttcggagccgagccgtccgcgcccggcggcggcgggagcccaggagcctgccccgccctggggacgaagagctgcagctcctcctgtgcggtgcacgatctgattttctggagagatgtgaagaagactgggtttgtctttggcaccacgctgatcatgctgctttccctggcagctttcagtgtcatcagtgtggtttcttacctcatcctggctcttctctctgtcaccatcagcttcaggatctacaagtccgtcatccaagctgtacagaagtcagaagaaggccatccattcaaagcctacctggacgtagacattactctgtcctcagaagctttccataattacatgaatgctgccatggtgcacatcaacagggccctgaaactcattattcgtctctttctggtagaagatctggttgactccttgaagctggctgtcttcatgtggctgatgacctatgttggtgctgtttttaacggaatcacccttctaattcttgctgaactgctcattttcagtgtcccgattgtctatgagaagtacaagacccagattgatcactatgttggcatcgcccgagatcagaccaagtcaattgttgaaaagatccaagcaaaactccctggaatcgccaaaaaaaaggcagaataagtacatggaaaccagaaatgcaacagttactaaaacaccatttaatagttataacgtcgttacttgtactatgaaggaaaatactcagtgtcagcttgagcctgcattccaagctttttttttaatttggtgttttctcccatcctttccctttaaccctcagtatcaagcacaaaaattgatggactgataaaagaactatcttagaactcagaagaagaaagaatcaaattcataggataagtcaataccttaatggtggtagagcctttacctgtagcttgaaaggggaaagattggaggtaagagagaaaatgaaagaacacctctgggtccttctgtccagttttcagcactagtcttactcagctatccattatagttttgcccttaagaagtcatgattaacttatgaaaaaattatttggggacaggagtgtgataccttccttggtttttttttgcagccctcaaatcctatcttcctgccccacaatgtgagcacacattatggagggggatcctctag

SEQ ID NO: 384177 - DNA, 1362 bp, Homo sapiens
  misc_feature (33)..(33): n is a, c, g, or t
  misc_feature (1302)..(1302): n is a, c, g, or t
  misc_feature (1320)..(1320): n is a, c, g, or t
  misc_feature (1337)..(1337): n is a, c, g, or t
agcggatgggagcgggcgttcccgccctctagntgcgctcggctgagtcagtcagtctgtcggagtctgtcctcggagcaggcggagtaaagggacttgagcgagccagttgccggattattctatttcccctccctctctcccgccccgtatctcttttcacccttctcccaccctcgctcgcgtagccatggcggagccgtcggcggccactcagtcccattccatctcctcgtcgtccttcggagccgagccgtccgcgcccggcggcggcgggagcccaggagcctgccccgccctggggacgaagagctgcagctcctcctgtgcggtgcacgatctgattttctggagagatgtgaagaagactgggtttgtctttggcaccacgctgatcatgctgctttccctggcagctttcagtgtcatcagtgtggtttcttacctcatcctggctcttctctctgtcaccatcagcttcaggatctacaagtccgtcatccaagctgtacagaagtcagaagaaggccatccattcaaagcctacctggacgtagacattactctgtcctcagaagctttccataattacatgaatgctgccatggtgcacatcaacagggccctgaaactcattattcgtctctttctggtagaagatctggttgactccttgaagctggctgtcttcatgtggctgatgacctatgttggtgctgtttttaacggaatcacccttctaattcttgctgaactgctcattttcagtgtcccgattgtctatgagaagtacaagacccagattgatcactatgttggcatcgcccgagatcagaccaagtcaattgttgaaaagatccaagcaaaactccctggaatcgccaaaaaaaaggcagaataagtacatggaaaccagaaatgcaacagttactaaaacaccatttaatagttataacgtcgttacttgtactatgaaggaaaatactcagtgtcagcttgagcctgcattccaagctttttttttaatttggtgttttctcccatcctttccctttaaccctcagtatcaagcacaaaaattgatggactgataaaagaactatcttagaactcagaagaagaaagaatcaaattcataggataagtcaataccttaatggtggtagagcctttacctgtagcttgaaaggggaaagattggaggtaagagagaaaatgaaagaacacctctgggtccttctgtccagttttcagcactagtcttactcagctatccattatagttttgacttatcctatgantttgattctttcttcttntgagttctaagatagtncttttatcagtccatcaatttttgg

SEQ ID NO: 384178 - DNA, 3205 bp, Homo sapiens
agtccaggactgtcctctagcatcacagttaaaataaaaacctagagcaaatgctaatgttttcactttctttctttttcccctccttttctcaataggatccaagcaaaactccctggaatcgccaaaaaaaaggcagaataagtacatggaaaccagaaatgcaacagttactaaaacaccatttaatagttataacgtcgttacttgtactatgaaggaaaatactcagtgtcagcttgagcctgcattccaagctttttttttaatttggtgttttctcccatcctttccctttaaccctcagtatcaagcacaaaaattgatggactgataaaagaactatcttagaactcagaagaagaaagaatcaaattcataggataagtcaataccttaatggtggtagagcctttacctgtagcttgaaaggggaaagattggaggtaagagagaaaatgaaagaacacctctgggtccttctgtccagttttcagcactagtcttactcagctatccattatagttttgcccttaagaagtcatgattaacttatgaaaaaattatttggggacaggagtgtgataccttccttggtttttttttgcagccctcaaatcctatcttcctgccccacaatgtgagcagctacccctgatactccttttctttaatgatttaactatcaacttgataaataacttataggtgatagtgataattcctgattccaagaatgccatctgataaaaaagaatagaaatggaaagtgggactgagagggagtcagcaggcatgctgcggtggcggtcactccctctgccactatccccagggaaggaaaggctccgccatttgggaaagtggtttctacgtcactggacaccggttctgagcattagtttgagaactcgttcccgaatgtgctttcctccctctcccctgcccacctcaagtttaataaataaggttgtacttttcttactataaaataaatgtctgtaactgctgtgcactgctgtaaacttgttagagaaaaaaataacctgcatgtgggctcctcagttattgagtttttgtgatcctatctcagtctgggggggaacattctcaagaggtgaaatacagaaagcctttttttcttgatcttttcccgagattcaaatctccgattcccatttgggggcaagtttttttcttcaccttcaatatgagaattcagcgaacttgaaagaaaaatcatctgtgagttccttcaggttctcactcatagtcatgatccttcagagggaatatgcactggcgagtttaaagtaagggctatgatatttgatggtcccaaagtacggcagctgcaaaaagtagtggaaggaaattgtctacgtgtcttggaaaaattagttaggaatttggatgggtaaaaggtacccttgccttactccatcttattttcttagccccctttgagtgttttaactggtttcatgtcctagtaggaagtgcattctccatcctcatcctctgccctcccaggaagtcagtgattgtctttttgggcttcccctccaaaggaccttctgcagtggaagtgccacatccagttcttttcttttgttgctgctgtgtttagataattgaagagatctttgtgccacacaggattttttttttttttaagaaaaacctatagatgaaaaattactaatgaaactgtgtgtacgtgtctgtgcgtgcaacataaaaatacagtagcacctaaggagcttgaatcttggttcctgtaaaatttcaaattgatgtggtattaataaaaaaaaaaaaaaaaaactcgctcgtgccgaattcggcacgaggaacaacctgtgtgcatgctttttgagtatattaatcagggggatctccatgagttcctcatcatgagatccccacactctgatgttggctgcagcagtgatgaagatgggactgtgaaatccagcctggaccacggagattttctgcacattgcaattcagattgcagctggcatggaatacctgtctagtcacttctttgtccacaaggaccttgcagctcgcaatattttaatcggagagcaacttcatgtaaagatttcagacttggggctttccagagaaatttactccgctgattactacagggtccagagtaagtccttgctgcccattcgctggatgccccctgaagccatcatgtatggcaaattctcttctgattcagatatctggtcctttggggttgtcttgtgggagattttcagttttggactccagccatattatggattcagtaaccaggaagtgattgagatggtgagaaaacggcagctcttaccatgctctgaagactgcccacccagaatgtacagcctcatgacagagtgctggaatgagattccttctaggagaccaagatttaaagatattcacgtccggcttcggtcctgggagggactctcaagtcacacaagctctactactccttcagggggaaatgccaccacacagacaacctccctcagtgccagcccagtgagtaatctcagtaaccccagatatcctaattacatgttcccgagccagggtattacaccacagggccagattgctggtttcattggcccgccaatacctcagaaccagcgattcattcccatcaatggatacccaatacctcctggatatgcagcgtttccagctgcccactaccagccaacaggtcctcccagagtgattcagcactgcccacctcccaagagtcggtccccaagcagtgccagtgggtcgactagcactggccatgtgactagcttgccctcatcaggatccaatcaggaagcaaatattcctttactaccacacatgtcaattccaaatcatcctggtggaatgggtatcaccgtttttggcaacaaatctcaaaaaccctacaaaattgactcaaagcaagcatctttactaggagacgccaatattcatggacacaccgaatctatgatttctgcagaactgtaaaatgcacaacttttgtaaatgtggtatacaggacaaactagacggccgtagaaaagatttatattcaaatgtttttattaaagtaaggttctcatttagcagacatcgcaacaagtaccttctgtgaagtttcactgtgtcttaccaagcaggacagacactcggccag

SEQ ID NO: 384179 - DNA, 253 bp, Homo sapiens
tgtacagaagtcagaagaaggccatccattcaagtgagttgaagtcttaaaagcaacattctacattttagtggaagggttcactgaagctgataggtctaaaactcagacctgactaaaaatcaagaattatggggcctaatgcagctgattggtggcatgaagcatcccctagagaccttgaaatcaccttaagaagtggccaagttagaagccaagaactttttgacaaattagaggctcatacttgaag

SEQ ID NO: 384180 - DNA, 436 bp, Homo sapiens
ctagatttggtttacgtatggggatcttatttacagaaaccattttggtaatttggaaattgttatttgtggtacaaagaaggtagcctgtatacctgaagaggttttttttgttttgttttaacactaccttaaattagctgtcttaattgggagtgctaaccaggatttctcattttgaggaatgcctgtgttttcctgtattttttgaggaaaaatgtatatgttactctgagtcttaagatgtgactgtctctcatatacacttgccatgtcccatgattctgtcttacagctgaactgctcattttcagtgtcccgattgtctatgagaagtacaaggtaagcatttatctgttccaaatcaaatgtgccagttgatgtatgactagttgtagttcatttctgagacattgaatgttcagagcagtctttt

SEQ ID NO: 384181 - DNA, 301 bp, Homo sapiens
gtctttttgggcttcccctccaaaggaccttctgcagtggaagtgccacatccagttcttttcttttgttgctgctgtgtttagataattgaagagatctttgtgccacacaggattttttttttttttaagaaaaacctatagatgaaaaattactaatgaaactgtgtgtacgtgtctgtgcgtgcaacataaaaatacagtagcacctaaggagcttgaatcttggttcctgtaaaatttcaaattgatgtggtattaataaaaaaaaaaaaaacacaaacaatgactgtggcatcat

SEQ ID NO: 384182 - DNA, 2623 bp, Homo sapiens
  misc_feature (33)..(33): n is a, c, g, or t
agcggatgggagcgggcgttcccgccctctagntgcgctcggctgagtcagtcagtctgtcggagtctgtcctcggagcaggcggagtaaagggacttgagcgagccagttgccggattattctatttcccctccctctctcccgccccgtatctcttttcacccttctcccaccctcgctcgcgtagccatggcggagccgtcggcggccactcagtcccattccatctcctcgtcgtccttcggagccgagccgtccgcgcccggcggcggcgggagcccaggagcctgccccgccctggggacgaagagctgcagctcctcctgtgcggtgcacgatctgattttctggagagatgtgaagaagactgggtttgtctttggcaccacgctgatcatgctgctttccctggcagctttcagtgtcatcagtgtggtttcttacctcatcctggctcttctctctgtcaccatcagcttcaggatctacaagtccgtcatccaagctgtacagaagtcagaagaaggccatccattcaaagcctacctggacgtagacattactctgtcctcagaagctttccataattacatgaatgctgccatggtgcacatcaacagggccctgaaactcattattcgtctctttctggtagaagatctggttgactccttgaagctggctgtcttcatgtggctgatgacctatgttggtgctgtttttaacggaatcacccttctaattcttgctgaactgctcattttcagtgtcccgattgtctatgagaagtacaagacccagattgatcactatgttggcatcgcccgagatcagaccaagtcaattgttgaaaagatccaagcaaaactccctggaatcgccaaaaaaaaggcagaataagtacatggaaaccagaaatgcaacagttactaaaacaccatttaatagttataacgtcgttacttgtactatgaaggaaaatactcagtgtcagcttgagcctgcattccaagctttttttttaatttggtgttttctcccatcctttccctttaaccctcagtatcaagcacaaaaattgatggactgataaaagaactatcttagaactcagaagaagaaagaatcaaattcataggataagtcaataccttaatggtggtagagcctttacctgtagcttgaaaggggaaagattggaggtaagagagaaaatgaaagaacacctctgggtccttctgtccagttttcagcactagtcttactcagctatccattatagttttgcccttaagaagtcatgattaacttatgaaaaaattatttggggacaggagtgtgataccttccttggtttttttttgcagccctcaaatcctatcttcctgccccacaatgtgagcagctacccctgatactccttttctttaatgatttaactatcaacttgataaataacttataggtgatagtgataattcctgattccaagaatgccatctgataaaaaagaatagaaatggaaagtgggactgagagggagtcagcaggcatgctgcggtggcggtcactccctctgccactatccccagggaaggaaaggctccgccatttgggaaagtggtttctacgtcactggacaccggttctgagcattagtttgagaactcgttcccgaatgtgctttcctccctctcccctgcccacctcaagtttaataaataaggttgtacttttcttactataaaataaatgtctgtaactgctgtgcactgctgtaaacttgttagagaaaaaaataacctgcatgtgggctcctcagttattgagtttttgtgatcctatctcagtctgggggggaacattctcaagaggtgaaatacagaaagcctttttttcttgatcttttcccgagattcaaatctccgattcccatttgggggcaagtttttttcttcaccttcaatatgagaattcagcgaacttgaaagaaaaatcatctgtgagttccttcaggttctcactcatagtcatgatccttcagagggaatatgcactggcgagtttaaagtaagggctatgatatttgatggtcccaaagtacggcagctgcaaaaagtagtggaaggaaattgtctacgtgtcttggaaaaattagttaggaatttggatgggtaaaaggtacccttgccttactccatcttattttcttagccccctttgagtgttttaactggtttcatgtcctagtaggaagtgcattctccatcctcatcctctgccctcccaggaagtcagtgattgtctttttgggcttcccctccaaaggaccttctgcagtggaagtgccacatccagttcttttcttttgttgctgctgtgtttagataattgaagagatctttgtgccacacaggattttttttttttttaagaaaaacctatagatgaaaaattactaatgaaactgtgtgtacgtgtctgtgcgtgcaacataaaaatacagtagcacctaaggagcttgaaatcggggtcccggggtacaactttcaacatggatcgtggctatcactgaggcaacaacaacaacagaaacagaaaacagaaaacacacagacacac

SEQ ID NO: 384183 - DNA, 3908 bp, Homo sapiens
  misc_feature (33)..(33): n is a, c, g, or t
agcggatgggagcgggcgttcccgccctctagntgcgctcggctgagtcagtcagtctgtcggagtctgtcctcggagcaggcggagtaaagggacttgagcgagccagttgccggattattctatttcccctccctctctcccgccccgtatctcttttcacccttctcccaccctcgctcgcgtagccatggcggagccgtcggcggccactcagtcccattccatctcctcgtcgtccttcggagccgagccgtccgcgcccggcggcggcgggagcccaggagcctgccccgccctggggacgaagagctgcagctcctcctgtgcggtgcacgatctgattttctggagagatgtgaagaagactgggtttgtctttggcaccacgctgatcatgctgctttccctggcagctttcagtgtcatcagtgtggtttcttacctcatcctggctcttctctctgtcaccatcagcttcaggatctacaagtccgtcatccaagctgtacagaagtcagaagaaggccatccattcaaagcctacctggacgtagacattactctgtcctcagaagctttccataattacatgaatgctgccatggtgcacatcaacagggccctgaaactcattattcgtctctttctggtagaagatctggttgactccttgaagctggctgtcttcatgtggctgatgacctatgttggtgctgtttttaacggaatcacccttctaattcttgctgaactgctcattttcagtgtcccgattgtctatgagaagtacaagacccagattgatcactatgttggcatcgcccgagatcagaccaagtcaattgttgaaaagatccaagcaaaactccctggaatcgccaaaaaaaaggcagaataagtacatggaaaccagaaatgcaacagttactaaaacaccatttaatagttataacgtcgttacttgtactatgaaggaaaatactcagtgtcagcttgagcctgcattccaagctttttttttaatttggtgttttctcccatcctttccctttaaccctcagtatcaagcacaaaaattgatggactgataaaagaactatcttagaactcagaagaagaaagaatcaaattcataggataagtcaataccttaatggtggtagagcctttacctgtagcttgaaaggggaaagattggaggtaagagagaaaatgaaagaacacctctgggtccttctgtccagttttcagcactagtcttactcagctatccattatagttttgcccttaagaagtcatgattaacttatgaaaaaattatttggggacaggagtgtgataccttccttggtttttttttgcagccctcaaatcctatcttcctgccccacaatgtgagcagctacccctgatactccttttctttaatgatttaactatcaacttgataaataacttataggtgatagtgataattcctgattccaagaatgccatctgataaaaaagaatagaaatggaaagtgggactgagagggagtcagcaggcatgctgcggtggcggtcactccctctgccactatccccagggaaggaaaggctccgccatttgggaaagtggtttctacgtcactggacaccggttctgagcattagtttgagaactcgttcccgaatgtgctttcctccctctcccctgcccacctcaagtttaataaataaggttgtacttttcttactataaaataaatgtctgtaactgctgtgcactgctgtaaacttgttagagaaaaaaataacctgcatgtgggctcctcagttattgagtttttgtgatcctatctcagtctgggggggaacattctcaagaggtgaaatacagaaagcctttttttcttgatcttttcccgagattcaaatctccgattcccatttgggggcaagtttttttcttcaccttcaatatgagaattcagcgaacttgaaagaaaaatcatctgtgagttccttcaggttctcactcatagtcatgatccttcagagggaatatgcactggcgagtttaaagtaagggctatgatatttgatggtcccaaagtacggcagctgcaaaaagtagtggaaggaaattgtctacgtgtcttggaaaaatcttagccccctttgagtgttttaactggtttcatgtcctagtaggaagtgcattctccatcctcatcctctgccctcccaggaagtcagtgattgtctttttgggcttcccctccaaaggaccttctgcagtggaagtgccacatccagttcttttcttttgttgctgctgtgtttagataattgaagagatctttgtgccacacaggattttttttttttttaagaaaaacctatagatgaaaaattactaatgaaactgtgtgtacgtgtctgtgcgtgcaacataaaaatacagtagcacctaaggagcttgaatcttggttcctgtaaaatttcaaattgatgtggtattaataaaaaaaaaaaaaaaaaactcgctcgtgccgaattcggcacgaggaacaacctgtgtgcatgctttttgagtatattaatcagggggatctccatgagttcctcatcatgagatccccacactctgatgttggctgcagcagtgatgaagatgggactgtgaaatccagcctggaccacggagattttctgcacattgcaattcagattgcagctggcatggaatacctgtctagtcacttctttgtccacaaggaccttgcagctcgcaatattttaatcggagagcaacttcatgtaaagatttcagacttggggctttccagagaaatttactccgctgattactacagggtccagagtaagtccttgctgcccattcgctggatgccccctgaagccatcatgtatggcaaattctcttctgattcagatatctggtcctttggggttgtcttgtgggagattttcagttttggactccagccatattatggattcagtaaccaggaagtgattgagatggtgagaaaacggcagctcttaccatgctctgaagactgcccacccagaatgtacagcctcatgacagagtgctggaatgagattccttctaggagaccaagatttaaagatattcacgtccggcttcggtcctgggagggactctcaagtcacacaagctctactactccttcagggggaaatgccaccacacagacaacctccctcagtgccagcccagtgagtaatctcagtaaccccagatatcctaattacatgttcccgagccagggtattacaccacagggccagattgctggtttcattggcccgccaatacctcagaaccagcgattcattcccatcaatggatacccaatacctcctggatatgcagcgtttccagctgcccactaccagccaacaggtcctcccagagtgattcagcactgcccacctcccaagagtcggtccccaagcagtgccagtgggtcgactagcactggccatgtgactagcttgccctcatcaggatccaatcaggaagcaaatattcctttactaccacacatgtcaattccaaatcatcctggtggaatgggtatcaccgtttttggcaacaaatctcaaaaaccctacaaaattgactcaaagcaagcatctttactaggagacgccaatattcatggacacaccgaatctatgatttctgcagaactgtaaaatgcacaacttttgtaaatgtggtatacaggacaaactagacggccgtagaaaagatttatattcaaatgtttttattaaagtaaggttctcatttagcagacatcgcaacaagtaccttctgtgaagtttcactgtgtcttaccaagcaggacagacactcggccag

SEQ ID NO: 384184 - DNA, 3903 bp, Homo sapiens
  misc_feature (33)..(33): n is a, c, g, or t
agcggatgggagcgggcgttcccgccctctagntgcgctcggctgagtcagtcagtctgtcggagtctgtcctcggagcaggcggagtaaagggacttgagcgagccagttgccggattattctatttcccctccctctctcccgccccgtatctcttttcacccttctcccaccctcgctcgcgtagccatggcggagccgtcggcggccactcagtcccattccatctcctcgtcgtccttcggagccgagccgtccgcgcccggcggcggcgggagcccaggagcctgccccgccctggggacgaagagctgcagctcctcctgtgcggtgcacgatctgattttctggagagatgtgaagaagactgggtttgtctttggcaccacgctgatcatgctgctttccctggcagctttcagtgtcatcagtgtggtttcttacctcatcctggctcttctctctgtcaccatcagcttcaggatctacaagtccgtcatccaagctgtacagaagtcagaagaaggccatccattcaaagcctacctggacgtagacattactctgtcctcagaagctttccataattacatgaatgctgccatggtgcacatcaacagggccctgaaactcattattcgtctctttctggtagaagatctggttgactccttgaagctggctgtcttcatgtggctgatgacctatgttggtgctgtttttaacggaatcacccttctaattcttgctgaactgctcattttcagtgtcccgattgtctatgagaagtacaaggatccaagcaaaactccctggaatcgccaaaaaaaaggcagaataagtacatggaaaccagaaatgcaacagttactaaaacaccatttaatagttataacgtcgttacttgtactatgaaggaaaatactcagtgtcagcttgagcctgcattccaagctttttttttaatttggtgttttctcccatcctttccctttaaccctcagtatcaagcacaaaaattgatggactgataaaagaactatcttagaactcagaagaagaaagaatcaaattcataggataagtcaataccttaatggtggtagagcctttacctgtagcttgaaaggggaaagattggaggtaagagagaaaatgaaagaacacctctgggtccttctgtccagttttcagcactagtcttactcagctatccattatagttttgcccttaagaagtcatgattaacttatgaaaaaattatttggggacaggagtgtgataccttccttggtttttttttgcagccctcaaatcctatcttcctgccccacaatgtgagcagctacccctgatactccttttctttaatgatttaactatcaacttgataaataacttataggtgatagtgataattcctgattccaagaatgccatctgataaaaaagaatagaaatggaaagtgggactgagagggagtcagcaggcatgctgcggtggcggtcactccctctgccactatccccagggaaggaaaggctccgccatttgggaaagtggtttctacgtcactggacaccggttctgagcattagtttgagaactcgttcccgaatgtgctttcctccctctcccctgcccacctcaagtttaataaataaggttgtacttttcttactataaaataaatgtctgtaactgctgtgcactgctgtaaacttgttagagaaaaaaataacctgcatgtgggctcctcagttattgagtttttgtgatcctatctcagtctgggggggaacattctcaagaggtgaaatacagaaagcctttttttcttgatcttttcccgagattcaaatctccgattcccatttgggggcaagtttttttcttcaccttcaatatgagaattcagcgaacttgaaagaaaaatcatctgtgagttccttcaggttctcactcatagtcatgatccttcagagggaatatgcactggcgagtttaaagtaagggctatgatatttgatggtcccaaagtacggcagctgcaaaaagtagtggaaggaaattgtctacgtgtcttggaaaaattagttaggaatttggatgggtaaaaggtacccttgccttactccatcttattttcttagccccctttgagtgttttaactggtttcatgtcctagtaggaagtgcattctccatcctcatcctctgccctcccaggaagtcagtgattgtctttttgggcttcccctccaaaggaccttctgcagtggaagtgccacatccagttcttttcttttgttgctgctgtgtttagataattgaagagatctttgtgccacacaggattttttttttttttaagaaaaacctatagatgaaaaattactaatgaaactgtgtgtacgtgtctgtgcgtgcaacataaaaatacagtagcacctaaggagcttgaatcttggttcctgtaaaatttcaaattgatgtggtattaataaaaaaaaaaaaaaaaaactcgctcgtgccgaattcggcacgaggaacaacctgtgtgcatgctttttgagtatattaatcagggggatctccatgagttcctcatcatgagatccccacactctgatgttggctgcagcagtgatgaagatgggactgtgaaatccagcctggaccacggagattttctgcacattgcaattcagattgcagctggcatggaatacctgtctagtcacttctttgtccacaaggaccttgcagctcgcaatattttaatcggagagcaacttcatgtaaagatttcagacttggggctttccagagaaatttactccgctgattactacagggtccagagtaagtccttgctgcccattcgctggatgccccctgaagccatcatgtatggcaaattctcttctgattcagatatctggtcctttggggttgtcttgtgggagattttcagttttggactccagccatattatggattcagtaaccaggaagtgattgagatggtgagaaaacggcagctcttaccatgctctgaagactgcccacccagaatgtacagcctcatgacagagtgctggaatgagattccttctaggagaccaagatttaaagatattcacgtccggcttcggtcctgggagggactctcaagtcacacaagctctactactccttcagggggaaatgccaccacacagacaacctccctcagtgccagcccagtgagtaatctcagtaaccccagatatcctaattacatgttcccgagccagggtattacaccacagggccagattgctggtttcattggcccgccaatacctcagaaccagcgattcattcccatcaatggatacccaatacctcctggatatgcagcgtttccagctgcccactaccagccaacaggtcctcccagagtgattcagcactgcccacctcccaagagtcggtccccaagcagtgccagtgggtcgactagcactggccatgtgactagcttgccctcatcaggatccaatcaggaagcaaatattcctttactaccacacatgtcaattccaaatcatcctggtggaatgggtatcaccgtttttggcaacaaatctcaaaaaccctacaaaattgactcaaagcaagcatctttactaggagacgccaatattcatggacacaccgaatctatgatttctgcagaactgtaaaatgcacaacttttgtaaatgtggtatacaggacaaactagacggccgtagaaaagatttatattcaaatgtttttattaaagtaaggttctcatttagcagacatcgcaacaagtaccttctgtgaagtttcactgtgtcttaccaagcaggacagacactcggccag

SEQ ID NO: 384185 - DNA, 4019 bp, Homo sapiens
  misc_feature (33)..(33): n is a, c, g, or t
agcggatgggagcgggcgttcccgccctctagntgcgctcggctgagtcagtcagtctgtcggagtctgtcctcggagcaggcggagtaaagggacttgagcgagccagttgccggattattctatttcccctccctctctcccgccccgtatctcttttcacccttctcccaccctcgctcgcgtagccatggcggagccgtcggcggccactcagtcccattccatctcctcgtcgtccttcggagccgagccgtccgcgcccggcggcggcgggagcccaggagcctgccccgccctggggacgaagagctgcagctcctcctgtgcggattcctttgtttcttcctcttcctctcagcctgtatctctattttcgacctcacaagtgcacgatctgattttctggagagatgtgaagaagactgggtttgtctttggcaccacgctgatcatgctgctttccctggcagctttcagtgtcatcagtgtggtttcttacctcatcctggctcttctctctgtcaccatcagcttcaggatctacaagtccgtcatccaagctgtacagaagtcagaagaaggccatccattcaaagcctacctggacgtagacattactctgtcctcagaagctttccataattacatgaatgctgccatggtgcacatcaacagggccctgaaactcattattcgtctctttctggtagaagatctggttgactccttgaagctggctgtcttcatgtggctgatgacctatgttggtgctgtttttaacggaatcacccttctaattcttgctgaactgctcattttcagtgtcccgattgtctatgagaagtacaagacccagattgatcactatgttggcatcgcccgagatcagaccaagtcaattgttgaaaagatccaagcaaaactccctggaatcgccaaaaaaaaggcagaataagtacatggaaaccagaaatgcaacagttactaaaacaccatttaatagttataacgtcgttacttgtactatgaaggaaaatactcagtgtcagcttgagcctgcattccaagctttttttttaatttggtgttttctcccatcctttccctttaaccctcagtatcaagcacaaaaattgatggactgataaaagaactatcttagaactcagaagaagaaagaatcaaattcataggataagtcaataccttaatggtggtagagcctttacctgtagcttgaaaggggaaagattggaggtaagagagaaaatgaaagaacacctctgggtccttctgtccagttttcagcactagtcttactcagctatccattatagttttgcccttaagaagtcatgattaacttatgaaaaaattatttggggacaggagtgtgataccttccttggtttttttttgcagccctcaaatcctatcttcctgccccacaatgtgagcagctacccctgatactccttttctttaatgatttaactatcaacttgataaataacttataggtgatagtgataattcctgattccaagaatgccatctgataaaaaagaatagaaatggaaagtgggactgagagggagtcagcaggcatgctgcggtggcggtcactccctctgccactatccccagggaaggaaaggctccgccatttgggaaagtggtttctacgtcactggacaccggttctgagcattagtttgagaactcgttcccgaatgtgctttcctccctctcccctgcccacctcaagtttaataaataaggttgtacttttcttactataaaataaatgtctgtaactgctgtgcactgctgtaaacttgttagagaaaaaaataacctgcatgtgggctcctcagttattgagtttttgtgatcctatctcagtctgggggggaacattctcaagaggtgaaatacagaaagcctttttttcttgatcttttcccgagattcaaatctccgattcccatttgggggcaagtttttttcttcaccttcaatatgagaattcagcgaacttgaaagaaaaatcatctgtgagttccttcaggttctcactcatagtcatgatccttcagagggaatatgcactggcgagtttaaagtaagggctatgatatttgatggtcccaaagtacggcagctgcaaaaagtagtggaaggaaattgtctacgtgtcttggaaaaattagttaggaatttggatgggtaaaaggtacccttgccttactccatcttattttcttagccccctttgagtgttttaactggtttcatgtcctagtaggaagtgcattctccatcctcatcctctgccctcccaggaagtcagtgattgtctttttgggcttcccctccaaaggaccttctgcagtggaagtgccacatccagttcttttcttttgttgctgctgtgtttagataattgaagagatctttgtgccacacaggattttttttttttttaagaaaaacctatagatgaaaaattactaatgaaactgtgtgtacgtgtctgtgcgtgcaacataaaaatacagtagcacctaaggagcttgaatcttggttcctgtaaaatttcaaattgatgtggtattaataaaaaaaaaaaaaaaaaactcgctcgtgccgaattcggcacgaggaacaacctgtgtgcatgctttttgagtatattaatcagggggatctccatgagttcctcatcatgagatccccacactctgatgttggctgcagcagtgatgaagatgggactgtgaaatccagcctggaccacggagattttctgcacattgcaattcagattgcagctggcatggaatacctgtctagtcacttctttgtccacaaggaccttgcagctcgcaatattttaatcggagagcaacttcatgtaaagatttcagacttggggctttccagagaaatttactccgctgattactacagggtccagagtaagtccttgctgcccattcgctggatgccccctgaagccatcatgtatggcaaattctcttctgattcagatatctggtcctttggggttgtcttgtgggagattttcagttttggactccagccatattatggattcagtaaccaggaagtgattgagatggtgagaaaacggcagctcttaccatgctctgaagactgcccacccagaatgtacagcctcatgacagagtgctggaatgagattccttctaggagaccaagatttaaagatattcacgtccggcttcggtcctgggagggactctcaagtcacacaagctctactactccttcagggggaaatgccaccacacagacaacctccctcagtgccagcccagtgagtaatctcagtaaccccagatatcctaattacatgttcccgagccagggtattacaccacagggccagattgctggtttcattggcccgccaatacctcagaaccagcgattcattcccatcaatggatacccaatacctcctggatatgcagcgtttccagctgcccactaccagccaacaggtcctcccagagtgattcagcactgcccacctcccaagagtcggtccccaagcagtgccagtgggtcgactagcactggccatgtgactagcttgccctcatcaggatccaatcaggaagcaaatattcctttactaccacacatgtcaattccaaatcatcctggtggaatgggtatcaccgtttttggcaacaaatctcaaaaaccctacaaaattgactcaaagcaagcatctttactaggagacgccaatattcatggacacaccgaatctatgatttctgcagaactgtaaaatgcacaacttttgtaaatgtggtatacaggacaaactagacggccgtagaaaagatttatattcaaatgtttttattaaagtaaggttctcatttagcagacatcgcaacaagtaccttctgtgaagtttcactgtgtcttaccaagcaggacagacactcggccag

SEQ ID NO: 384186 - DNA, 3823 bp, Homo sapiens
  misc_feature (33)..(33): n is a, c, g, or t
agcggatgggagcgggcgttcccgccctctagntgcgctcggctgagtcagtcagtctgtcggagtctgtcctcggagcaggcggagtaaagggacttgagcgagccagttgccggattattctatttcccctccctctctcccgccccgtatctcttttcacccttctcccaccctcgctcgcgtagccatggcggagccgtcggcggccactcagtcccattccatctcctcgtcgtccttcggagccgagccgtccgcgcccggcggcggcgggagcccaggagcctgccccgccctggggacgaagagctgcagctcctcctgtgcggtgcacgatctgattttctggagagatgtgaagaagactgggtttgtctttggcaccacgctgatcatgctgctttccctggcagctttcagtgtcatcagtgtggtttcttacctcatcctggctcttctctctgtcaccatcagcttcaggatctacaagtccgtcatccaagctgtacagaagtcagaagaaggccatccattcaactggctgtcttcatgtggctgatgacctatgttggtgctgtttttaacggaatcacccttctaattcttgctgaactgctcattttcagtgtcccgattgtctatgagaagtacaagacccagattgatcactatgttggcatcgcccgagatcagaccaagtcaattgttgaaaagatccaagcaaaactccctggaatcgccaaaaaaaaggcagaataagtacatggaaaccagaaatgcaacagttactaaaacaccatttaatagttataacgtcgttacttgtactatgaaggaaaatactcagtgtcagcttgagcctgcattccaagctttttttttaatttggtgttttctcccatcctttccctttaaccctcagtatcaagcacaaaaattgatggactgataaaagaactatcttagaactcagaagaagaaagaatcaaattcataggataagtcaataccttaatggtggtagagcctttacctgtagcttgaaaggggaaagattggaggtaagagagaaaatgaaagaacacctctgggtccttctgtccagttttcagcactagtcttactcagctatccattatagttttgcccttaagaagtcatgattaacttatgaaaaaattatttggggacaggagtgtgataccttccttggtttttttttgcagccctcaaatcctatcttcctgccccacaatgtgagcagctacccctgatactccttttctttaatgatttaactatcaacttgataaataacttataggtgatagtgataattcctgattccaagaatgccatctgataaaaaagaatagaaatggaaagtgggactgagagggagtcagcaggcatgctgcggtggcggtcactccctctgccactatccccagggaaggaaaggctccgccatttgggaaagtggtttctacgtcactggacaccggttctgagcattagtttgagaactcgttcccgaatgtgctttcctccctctcccctgcccacctcaagtttaataaataaggttgtacttttcttactataaaataaatgtctgtaactgctgtgcactgctgtaaacttgttagagaaaaaaataacctgcatgtgggctcctcagttattgagtttttgtgatcctatctcagtctgggggggaacattctcaagaggtgaaatacagaaagcctttttttcttgatcttttcccgagattcaaatctccgattcccatttgggggcaagtttttttcttcaccttcaatatgagaattcagcgaacttgaaagaaaaatcatctgtgagttccttcaggttctcactcatagtcatgatccttcagagggaatatgcactggcgagtttaaagtaagggctatgatatttgatggtcccaaagtacggcagctgcaaaaagtagtggaaggaaattgtctacgtgtcttggaaaaattagttaggaatttggatgggtaaaaggtacccttgccttactccatcttattttcttagccccctttgagtgttttaactggtttcatgtcctagtaggaagtgcattctccatcctcatcctctgccctcccaggaagtcagtgattgtctttttgggcttcccctccaaaggaccttctgcagtggaagtgccacatccagttcttttcttttgttgctgctgtgtttagataattgaagagatctttgtgccacacaggattttttttttttttaagaaaaacctatagatgaaaaattactaatgaaactgtgtgtacgtgtctgtgcgtgcaacataaaaatacagtagcacctaaggagcttgaatcttggttcctgtaaaatttcaaattgatgtggtattaataaaaaaaaaaaaaaaaaactcgctcgtgccgaattcggcacgaggaacaacctgtgtgcatgctttttgagtatattaatcagggggatctccatgagttcctcatcatgagatccccacactctgatgttggctgcagcagtgatgaagatgggactgtgaaatccagcctggaccacggagattttctgcacattgcaattcagattgcagctggcatggaatacctgtctagtcacttctttgtccacaaggaccttgcagctcgcaatattttaatcggagagcaacttcatgtaaagatttcagacttggggctttccagagaaatttactccgctgattactacagggtccagagtaagtccttgctgcccattcgctggatgccccctgaagccatcatgtatggcaaattctcttctgattcagatatctggtcctttggggttgtcttgtgggagattttcagttttggactccagccatattatggattcagtaaccaggaagtgattgagatggtgagaaaacggcagctcttaccatgctctgaagactgcccacccagaatgtacagcctcatgacagagtgctggaatgagattccttctaggagaccaagatttaaagatattcacgtccggcttcggtcctgggagggactctcaagtcacacaagctctactactccttcagggggaaatgccaccacacagacaacctccctcagtgccagcccagtgagtaatctcagtaaccccagatatcctaattacatgttcccgagccagggtattacaccacagggccagattgctggtttcattggcccgccaatacctcagaaccagcgattcattcccatcaatggatacccaatacctcctggatatgcagcgtttccagctgcccactaccagccaacaggtcctcccagagtgattcagcactgcccacctcccaagagtcggtccccaagcagtgccagtgggtcgactagcactggccatgtgactagcttgccctcatcaggatccaatcaggaagcaaatattcctttactaccacacatgtcaattccaaatcatcctggtggaatgggtatcaccgtttttggcaacaaatctcaaaaaccctacaaaattgactcaaagcaagcatctttactaggagacgccaatattcatggacacaccgaatctatgatttctgcagaactgtaaaatgcacaacttttgtaaatgtggtatacaggacaaactagacggccgtagaaaagatttatattcaaatgtttttattaaagtaaggttctcatttagcagacatcgcaacaagtaccttctgtgaagtttcactgtgtcttaccaagcaggacagacactcggccag

SEQ ID NO: 384187 - DNA, 721 bp, Homo sapiens
  misc_feature (33)..(33): n is a, c, g, or t
agcggatgggagcgggcgttcccgccctctagntgcgctcggctgagtcagtcagtctgtcggagtctgtcctcggagcaggcggagtaaagggacttgagcgagccagttgccggattattctatttcccctccctctctcccgccccgtatctcttttcacccttctcccaccctcgctcgcgtagccatggcggagccgtcggcggccactcagtcccattccatctcctcgtcgtccttcggagccgagccgtccgcgcccggcggcggcgggagcccaggagcctgccccgccctggggacgaagagctgcagctcctcctgtgcggtgcacgatctgattttctggagagatgtgaagaagactgggtttgtctttggcaccacgctgatcatgctgctttccctggcagctttcagtgtcatcagtgtggtttcttacctcatcctggctcttctctctgtcaccatcagcttcaggatctacaagtccgtcatccaagctgtacagaagtcagaagaaggccatccattcaaagcctacctggacgtagacattactctgtcctcagaagctttccataattacatgaatgctgccatggtgcacatcaacagggccctgaaactcattattcgtctctttctggtagaagatctggttgactccttgaagcataagaaacaagttgatacatcaagggaccatgtacgagaa

SEQ ID NO: 384188 - DNA, 502 bp, Homo sapiens
aagtcttactttcattacaggtagaaatagcttatatcatttgaaattttatctctcttagttttgtaatttcctattaccttacttaggtcattttaaaaagtctacttgtttaaccattttggaattgttgatttaaaggggctataatccataaacaaaataatttttgttttataaaactattgtcttataagattttaatacatttaagagggtttcatgtcgcctgggaatatagttcaagattttaaaacctcttttgaacaaagggtactatcgaatgtgaaagttgatgaaaaacagactaaaagttttgaatgactgctcactaaaattttattgcttaatgtatttgtagccttatgtctttttggaaaatataataacattattatgaaggtaatgtttaatcatttctcaatactttccagatagaatttttgtagaacttttagcttaagtttctttttttaacataataaattctgctttgattgtc

SEQ ID NO: 384189 - DNA, 338 bp, Homo sapiens
ggtggcacatgactatagtcccagctacttgggaggatgaggtgagaggatcacttgagctggggaagtagaggttgcagtgagctgagatctcactactgtactccagcctggatgacagagtgaaaccctgtctcaaaaataaataaagaaagaaagaatataaatattttgtatcaattttcagcttttacagtcaatgaacttaagtcttaattttggttacagaattaaatattaatattaacaatcaaggcaatgtaaaagtaaagtacagttgactgaagctgggacacagacgaaaagagagtgaatgaaaagaaggatactaatattct

SEQ ID NO: 384190 - DNA, 238 bp, Homo sapiens
aaaacagcggcccctgccctcttaatagtaaaaaaaaaacaaaaaaaaacaaaaaaacaaaaacgtagtttatcactgacttacctctgtaaccataaagtaagccctctgacctttgttgctttctttggactgtattctgctgactgagtgaactatattgggcattttccaaaaatagttgagcaattggaaactaggtaatttagacatgggtacattagtactctgtagttct

SEQ ID NO: 384191 - DNA, 430 bp, Homo sapiens
cctgggttcaagcgattctcctgcctcagcctcccaagtagctgggattacaggtgcctgccaccacgcccagctaatttttgtatttttcatagagacagggtttcaccatgttggccaggctggtttcgaactcccgatctcaagtgatctgccagcctcggcctcccaaagtgctgggattacaggcatgagccactgtgcccagccccagtttgagttaattttcatatgaacgtgtaggtctacggccatttttgaacccatgagtctgctctagcatggcttgttgggaaagcggctcttctggcattgacggctcttggtcccttgtgggaggccaggtggccgtgatcatgggggtctgcacgcccctttacctccactctctctcttccctggggtgacactctctttttcaattttctat

SEQ ID NO: 384192 - DNA, 531 bp, Homo sapiens
atctagtaagaaaggaaaaaggaaagtggtatattcttaaagtaatgacagattgttggaagagatgatacaaactttttaaaaaaaaatgccttttaacaaatattaaaacctgcaaaatggcacttgtggtgattattctggagaataaacagattacataagattttgtcaggtgacaaatgtacattaattctgcatttgttaattctagtgcttgagatgttatatatagagagagaagtcataaatggtattttttagaaaattctatttactgtattatttgagaattttatttggaatataatgccctcatctaatttctgagaaaaatattaaagtctgttgatagaataaggccaatatggggcctgagtattttcagcgtcatttaatgttaaagttctatccataaaccaaagtcatttaacataaattttggataactattagcatacagtttaagattttatttctctgctatacaagttaatgtgggagtctaaaatgcaaaaaaaaaaaaaaatt

SEQ ID NO: 384193 - DNA, 295 bp, Homo sapiens
gatgtgaagaaaaataaaaggaattcagaaagaatcatgtatctaatatccaggagataatgtagttgcattgattgtgttgtaaagaagaatatatctagcattagtaatggcaatggcaataatgatgacaataatacagattgcattgagccatatatacattatctcattccagtataaaagaagtgcccccagcaacttcttggacgccaaggaggtttccaaattatttattttacaaactcttactttattcccttttttttccttcttctttttttttttcccccaa

SEQ ID NO: 384194 - DNA, 513 bp, Homo sapiens
gggcggggggcggggcttctccatgaggccaaaggtgagcaggcctctgggtgtttcagaagaactgccctggcaacatgcaagtacagttctagcagagacgccaaatcaactgtcaaaaccgagccactgccaccccacaaagccaggaaaagcttctaactgacaatcttgggtaagtcggccctcagcctctgcatctcccaccacagaccaaggctcccagatccccccagcccatgcactccatgtggtcccctctgtgtgcctggatacatcgggactcttgggtgtcactggggattcctgccctgccacatggggtaagctactggtaattactcagctgtgggagctcctggtcatcagccttcaaacacagaaactcaggtatttttcccagcagaccctgaccagcctctgtatttctccataacgctggtcggctgggcacagcgatcttggcaacagattttgcgaaataaacttggtcagtggatcccagtcaacaaa

SEQ ID NO: 384195 - DNA, 346 bp, Homo sapiens
ctccaaaacacctttaaaaattatttgtgactaaatggatatataaatcaaatcatgtcacatctctgctcaaaaatctgcattggctctccgcttctctcagataaaagccaaagtccttacaattggcctacagagctctaacaccatctggctcctcaaaacttcgtctctttctactctcccatcactacctacatacctgcttctttactgtttaccaaacatgccagatacagtcctgctttaagggctttgcactgactggccggcccctctgcttgaaatttgttttctccacatggctgcagttgttaactcctttatctcctccacgtctttgctc

SEQ ID NO: 384196 - DNA, 671 bp, Homo sapiens
atacgttaacagaaaaatgatttaggatatagcttgaatgcttaaatatgtgcacctttacaaacctctcagtgtattcttggagttcttgaaatgttgttttaatatttgttgccagtaatgttctttcttcacagccgctccaggaattctgaagttctgggcctttctcagaagactgtaatgtacctgaagtttctgaaatattgcaaacccacagagtttaggctggtgctgccaaaaagaaaagcaacatagagtttaagtatccagtagtgatttgtaaacttgtttttcatttgaagctgaatatatacgtagtcatgtttatgttgagaactaaggatattctttagcaagagaaaatattttccccttatccccactgctgtggaggtttctgtacctcgcttggatgcctgtaaggatcccgggagccttgccgcactgccttgtgggtggcttggcgctcgtgattgcttcctgtgaacgcctcccaaggacgagcccagtgtagttgtgtggcgtgaactctgcccgtgtgttctcaaattccccagcttgggaaatagcccttggtgtgggttttatctctggtttgtgttctccgtggtggaattgaccgaaagctctatgttttcgttaataaagggcaacttagccaagtttaa

SEQ ID NO: 384197 - DNA, 1705 bp, Homo sapiens
ctccggggccggccgcctgggagcccgagcctagtgcctcccacgcccggcggccgcgagccggggtccgcgagggcggagtggggcgcggcagccaggaacccgactacgaatcccagggtgcgggcgggcggagcgaggagggacgctgggcctgcccggtgcgcacgggggcggggaccggcaaggcgggaccatttcccggcataggctccggtgcccctgcccggctcccgccgggaagttctaggccgccgcacagaaagccctgccctccacgccgggtctctggagcgccctgggttgcccggccggtccctgccgctgacttgttgacactgcgagcactcagtccctcccgcgcgcctcctccccgcccgccccgccgctcctcctccctgtaacatgccatagtgcgcctgcgaccacacggccggggcgctagcgttcgccttcagccaccatggggaatgggatgaacaagatcctgcccggcctgtacatcggcaacttcaaagatgccagagacgcggaacaattgagcaagaacaaggtgacacatattctgtctgtccacgatagtgccaggcctatgttggagggagttaaatacctgtgcatcccagcagcggattcaccatctcaaaacctgacaagacatttcaaagaaagtattaaattcattcacgagtgccggctccgcggtgagagctgccttgtacactgcctggccggggtctccaggagcgtgacactggtgatcgcatacatcatgaccgtcactgactttggctgggaggatgccctgcacaccgtgcgtgctgggagatcctgtgccaaccccaacgtgggcttccagagacagctccaggagtttgagaagcatgaggtccatcagtatcggcagtggctgaaggaagaatatggagagagccctttgcaggatgcagaagaagccaaaaacattctgggtaaatataaggagcaagggcgcacagagccccagcccggcgccaggcggtggagcagttttccggcactggctccgctgacctacgataattatacgacggagacctaacgcaagcgacctgctgccttccttcccactgcttgtcttcagtgtgcccggctgggcaggggtgcggtggtggtggccgatgaggacaggaaagggagatagccagggcgaggtggggcgagggctccttcccccaagcaacaccgcccagccctgctccaggcccctgcactccgcccacccctaccctggctgcacctgagcttgctgcccctggggatgttgcccagtggctgtgcactgctctgtgcacgtgcgtgtgtgtgagtgcacttgtgtgtgggtgactaagtggatgcatgtgtgtgcctgtgtgagtgagggtatgtgcacctaagtgtgtacatgtgtgtatgttgtgaaagtgtctgtgcacatgaatgtttgtgtgtgtgtgaactctttcttactgctggaagtcacagaattcatattgctgcccgggttggtgtggccacctttccctttgtccaagactccacatggaaggcatttgagctcgacctccgaaaagctacccagcaaagagcagtctgtgcctctgagcagaccgtgagaactcaggggacgagtggctaagagcatggcctctcccagaacccacccagggtggtgtggtggggg

SEQ ID NO: 384198 - DNA, 1997 bp, Homo sapiens
ctccggggccggccgcctgggagcccgagcctagtgcctcccacgcccggcggccgcgagccggggtccgcgagggcggagtggggcgcggcagccaggaacccgactacgaatcccagggtgcgggcgggcggagcgaggagggacgctgggcctgcccggtgcgcacgggggcggggaccggcaaggcgggaccatttcccggcataggctccggtgcccctgcccggctcccgccgggaagttctaggccgccgcacagaaagccctgccctccacgccgggtctctggagcgccctgggttgcccggccggtccctgccgctgacttgttgacactgcgagcactcagtccctcccgcgcgcctcctccccgcccgccccgccgctcctcctccctgtaacatgccatagtgcgcctgcgaccacacggccggggcgctagcgttcgccttcagccaccatggggaatgggatgaacaagatcctgcccggcctgtacatcggcaacttcaaagatgccagagacgcggaacaattgagcaagaacaaggtgacacatattctgtctgtccacgatagtgccaggcctatgttggagggagttaaatacctgtgcatcccagcagcggattcaccatctcaaaacctgacaagacatttcaaagaaagtattaaattcattcacgagtgccggctccgcggtgagagctgccttgtacactgcctggccggggtctccaggagcgtgacactggtgatcgcatacatcatgaccgtcactgactttggctgggaggatgccctgcacaccgtgcgtgctgggagatcctgtgccaaccccaacgtgggcttccagagacagctccaggagtttgagaagcatgaggtccatcagcttgcatgtaccgggggacatcagagatgcaggcaggtgcccctgaacggtgcccacagtctttccgtacacagccagcatcatggcgtttggagttgaaaggcccacagaggacatcggctcccagggcgcccagctgcaccccttcagaagtcgtcacgatccctcgtgcacctgttgaagccacaggcgctaccctttgtcattctccttgtgcctggtactccctactagtttgtttctctccctttgggtgacgtaccatttccttggtctggcctattttcatgtcctaggccagcaccttgaaggagcagttccttctcttgcttgaccctggctggccaaccacagagctctgatttcccactgctgtttgtttccctggctatgtgtggcaccatctctgtggtgaagtcacaggtgcaagcccacgtggatgcagacgtgcacatgtgtgtgacgtttcgggtttgtttccatcctctccagtatcggcagtggctgaaggaagaatatggagagagccctttgcaggatgcagaagaagccaaaaacattctggccgctccaggaattctgaagttctgggcctttctcagaagactgtaatgtacctgaagtttctgaaatattgcaaacccacagagtttaggctggtgctgccaaaaagaaaagcaacatagagtttaagtatccagtagtgatttgtaaacttgtttttcatttgaagctgaatatatacgtagtcatgtttatgttgagaactaaggatattctttagcaagagaaaatattttccccttatccccactgctgtggaggtttctgtacctcgcttggatgcctgtaaggatcccgggagccttgccgcactgccttgtgggtggcttggcgctcgtgattgcttcctgtgaacgcctcccaaggacgagcccagtgtagttgtgtggcgtgaactctgcccgtgtgttctcaaattccccagcttgggaaatagcccttggtgtgggttttatctctggtttgtgttctccgtggtggaattgaccgaaagctctatgttttcgttaataaagggcaacttagccaagtttaa

SEQ ID NO: 384199 - DNA, 930 bp, Homo sapiens
actctccagtgaagctacgacagtaagacttctgtttcagctgaaaaaggaagtcaggaccgtagctcatgaaaaggacaagacatttcaaagaaagtattaaattcattcacgagtgccggctccgcggtgagagctgccttgtacactgcctggccggggtctccaggagcgtgacactggtgatcgcatacatcatgaccgtcactgactttggctgggaggatgccctgcacaccgtgcgtgctgggagatcctgtgccaaccccaacgtgggcttccagagacagctccaggagtttgagaagcatgaggtccatcagtatcggcagtggctgaaggaagaatatggagagagccctttgcaggatgcagaagaagccaaaaacattctggccgctccaggaattctgaagttctgggcctttctcagaagactgtaatgtacctgaagtttctgaaatattgcaaacccacagagtttaggctggtgctgccaaaaagaaaagcaacatagagtttaagtatccagtagtgatttgtaaacttgtttttcatttgaagctgaatatatacgtagtcatgtttatgttgagaactaaggatattctttagcaagagaaaatattttccccttatccccactgctgtggaggtttctgtacctcgcttggatgcctgtaaggatcccgggagccttgccgcactgccttgtgggtggcttggcgctcgtgattgcttcctgtgaacgcctcccaaggacgagcccagtgtagttgtgtggcgtgaactctgcccgtgtgttctcaaattccccagcttgggaaatagcccttggtgtgggttttatctctggtttgtgttctccgtggtggaattgaccgaaagctctatgttttcgttaataaagggcaacttagccaagtttaa

SEQ ID NO: 384200 - DNA, 1980 bp, Homo sapiens
ctccggggccggccgcctgggagcccgagcctagtgcctcccacgcccggcggccgcgagccggggtccgcgagggcggagtggggcgcggcagccaggaacccgactacgaatcccagggtgcgggcgggcggagcgaggagggacgctgggcctgcccggtgcgcacgggggcggggaccggcaaggcgggaccatttcccggcataggctccggtgcccctgcccggctcccgccgggaagttctaggccgccgcacagaaagccctgccctccacgccgggtctctggagcgccctgggttgcccggccggtccctgccgctgacttgttgacactgcgagcactcagtccctcccgcgcgcctcctccccgcccgccccgccgctcctcctccctgtaacatgccatagtgcgcctgcgaccacacggccggggcgctagcgttcgccttcagccaccatggggaatgggatgaacaagatcctgcccggcctgtacatcggcaacttcaaagatgccagagacgcggaacaattgagcaagaacaaggtgacacatattctgtctgtccacgatagtgccaggcctatgttggagggagttaaatacctgtgcatcccagcagcggattcaccatctcaaaacctgacaagacatttcaaagaaagtattaaattcattcacgagtgccggctccgcggtgagagctgccttgtacactgcctggccggggtctccaggagcgtgacactggtgatcgcatacatcatgaccgtcactgactttggctgggaggatgccctgcacaccgtgcgtgctgggagatcctgtgccaaccccaacgtgggcttccagagacagctccaggagtttgagaagcatgaggtccatcagtatcggcagtggctgaaggaagaatatggagagagccctttgcaggatgcagaagaagccaaaaacattctggccgctccaggaattctgaagttctgggcctttctcagaagactgtaatgtacctgaagtttctgaaatattgcaaacccacagagtttaggctggtgctgccaaaaagaaaagcaacatagagtttaagtatccagtagtgatttgtaaacttgtttttcatttgaagctgaatatatacgtagtcatgtttatgttgagaactaaggatattctttagcaagagaaaatattttccccttatccccactgctgtggaggtttctgtacctcgcttggatgcctgtaaggatcccgggagccttgccgcactgccttgtgggtggcttggcgctcgtgattgcttcctgtgaacgcctcccaaggacgagcccagtgtagttgtgtggcgtgaactctgcccgtgtgttctcaaattccccagcttgggaaatagcccttggtgtgggttttatctctggtttgtgttctccgtggtggaattgaccgaaagctctatgttttcgttaataaagggcaacttagccaagtttaaaaaaaaaaaaaaaaaacaaaaaaaaaaaaaaaaaaaaaaaaaaaaaaaaaaaaaaaacaaaaaaaaggggggggggcgccaaaaaaaatccccccgggggggccccacaaattacgcccccccctttttttgtaaaaaggggggccccaaagaggggagcgccttaaaaaaacagcaaggccgacgggcgcgcgctataacaaaacaagcggtctgagtgagggagagaaacactgcgctcatcgcggagggcaacaccttgtgagaagagaaacccccaacatctcgggggggggggacaaaatgttgtcgggcacaactctcccacgaggagaaattatagaccgcgctactgggggcgacaaacatctaaactactcacgcggtttacttgtgttttcaacccaacagcacgatatatattcttccgcataaaaaactttggcatcgaggtagtactataggaaactttcac

SEQ ID NO: 384201 - DNA, 406 bp, Homo sapiens
gtgtccatcccccttcgtgtgtccatcccccttcgtgtgtccatcccccttcgtgtgtccatcccccttcgtgtgtccatcccccttcgtgtgtccatcccccttcgtgtgtccatccccctgctgtggaggtttctgtacctcgcttggatgcctgtaaggatcccgggagccttgccgcactgccttgtgggtggcttggcgctcgtgattgcttcctgtgaacgcctcccaaggacgagcccagtgtagttgtgtggcgtgaactctgcccgtgtgttctcaaattccccagcttgggaaatagcccttggtgtgggttttatctctggtttgtgttctccgtggtggaattgaccgaaagctctatgttttcgttaataaagggcaacttagccaagtttaa

SEQ ID NO: 384202 - DNA, 1505 bp, Homo sapiens
ctccggggccggccgcctgggagcccgagcctagtgcctcccacgcccggcggccgcgagccggggtccgcgagggcggagtggggcgcggcagccaggaacccgactacgaatcccagggtgcgggcgggcggagcgaggagggacgctgggcctgcccggtgcgcacgggggcggggaccggcaaggcgggaccatttcccggcataggctccggtgcccctgcccggctcccgccgggaagttctaggccgccgcacagaaagccctgccctccacgccgggtctctggagcgccctgggttgcccggccggtccctgccgctgacttgttgacactgcgagcactcagtccctcccgcgcgcctcctccccgcccgccccgccgctcctcctccctgtaacatgccatagtgcgcctgcgaccacacggccggggcgctagcgttcgccttcagccaccatggggaatgggatgaacaagatcctgcccggcctgtacatcggcaacttcaaagatgccagagacgcggaacaattgagcaagaacaaggtgacacatattctgtctgtccacgatagtgccaggcctatgttggagggagttaaatacctgtgcatcccagcagcggattcaccatctcaaaacctgacaagacatttcaaagaaagtattaaattcattcacgagtgccggctccgcggtgagagctgccttgtacactgcctggccggggtctccaggagcgtgacactggtgatcgcatacatcatgaccgtcactgactttggctgggaggatgccctgcacaccgtgcgtgctgggagatcctgtgccaaccccaacgtgggcttccagagacagctccaggagtttgagaagcatgaggtccatcagtatcggcagtggctgaaggaagaatatggagagagccctttgcaggatgcagaagaagccaaaaacattctggccgctccaggaattctgaagttctgggcctttctcagaagactgtaatgtacctgaagtttctgaaatattgcaaacccacagagtttaggctggtgctgccaaaaagaaaagcaacatagagtttaagtatccagtagtgatttgtaaacttgtttttcatttgaagctgaatatatacgtagtcatgtttatgttgagaactaaggatattctttagcaagagaaaatattttccccttatccccactgctgtggaggtttctgtacctcgcttggatgcctgtaaggatcccgggagccttgccgcactgccttgtgggtggcttggcgctcgtgattgcttcctgtgaacgcctcccaaggacgagcccagtgtagttgtgtggcgtgaactctgcccgtgtgttctcaaattccccagcttgggaaatagcccttggtgtgggttttatctctggtttgtgttctccgtggtggaattgaccgaaagctctatgttttcgttaataaagggcaacttagccaagtttaa

SEQ ID NO: 384203 - DNA, 460 bp, Homo sapiens
ccaccatgggaatgcatgaactatatctgccggctgtacatcggcaacttcaaagatgccagagacgcggaacaattgagcaagaacaaggtgacacatattctgtctgtccacgatagtgccaggcctatgttggaggacaagacatttcaaagaaagtattaaattcattcacgagtgccggctccgcggtgagagctgccttgtacactgcctggccggggtctccaggagcgtgacactggtgatcgcatacatcatgaccgtcactgactttggctgggaggatgccctgcacaccgtgcgtgctgggagatcctgtgccaaccccaacgtgggcttccagagacagctccaggagtttgagaagcatgaggtccatcagtatcggcagttggctgaaggaaggctatgtccaaactgggtcttcggcaggttacaggagaacgcgtcaacatcg

SEQ ID NO: 384204 - DNA, 1577 bp, Homo sapiens
agcgggtgtgtgggcccgcgggggcgcgcgtggctggggggcagtgagggtcgcctcggcggcgagcagcacagcgggaacatggcgcccggaactggcgagcgcgcctagctggcgggaccgttagctcgaggcggacgcggcccggacccggtggatgtggagcagtcgccgctgccggcgcccaagccgaccccagggccgacccccgcaaggagctgaaggaggtgggagccccagtcgccgcgggcgtcggcgccgtcaaagaagatggccacggagacagcagtgtggtcagagtggtggagctggtcatcggcgagagctgctccatgtctgtctgctgagtgctagagcctgtggcccactggcttgcctcactgtggttgatggtggcggtgacagagactgcagcacgaccagagtggcttttctggctttgcccacccagctgctccatgccaggaggaggaggagacacctagagcctgcgaacaccacgacttgcctcactgcgggtgggtggcagcgacagagactgcagtgcgccagagcgatcctgcccggcatgtacatcggcaacttcaaagatgccagagacgcggaacaattgagcaagaacaaggtgacacatattctgtctgtccacgatagtgccaggcctatgttggagggagttaaatacctgtgcatcccagcagcggattcaccatctcaaaacctgacaagacatttcaaagaaagtattaaattcattcacgagtgccggctccgcggtgagagctgccttgtacactgcctggccggggtctccaggagcgtgacactggtgatcgcatacatcatgaccgtcactgactttggctgggaggatgccctgcacaccgtgcgtgctgggagatcctgtgccaaccccaacgtgggcttccagagacagctccaggagtttgagaagcatgaggtccatcagtatcggcagtggctgaaggaagaatatggagagagccctttgcaggatgcagaagaagccaaaaacattctggccgctccaggaattctgaagttctgggcctttctcagaagactgtaatgtacctgaagtttctgaaatattgcaaacccacagagtttaggctggtgctgccaaaaagaaaagcaacatagagtttaagtatccagtagtgatttgtaaacttgtttttcatttgaagctgaatatatacgtagtcatgtttatgttgagaactaaggatattctttagcaagagaaaatattttccccttatccccactgctgtggaggtttctgtacctcgcttggatgcctgtaaggatcccgggagccttgccgcactgccttgtgggtggcttggcgctcgtgattgcttcctgtgaacgcctcccaaggacgagcccagtgtagttgtgtggcgtgaactctgcccgtgtgttctcaaattccccagcttgggaaatagcccttggtgtgggttttatctctggtttgtgttctccgtggtggaattgaccgaaagctctatgttttcgttaataaagggcaacttagccaagtttaa

SEQ ID NO: 384205 - DNA, 1568 bp, Homo sapiens
ctccggggccggccgcctgggagcccgagcctagtgcctcccacgcccggcggccgcgagccggggtccgcgagggcggagtggggcgcggcagccaggaacccgactacgaatcccagggtgcgggcgggcggagcgaggagggacgctgggcctgcccggtgcgcacgggggcggggaccggcaaggcgggaccatttcccggcataggctccggtgcccctgcccggctcccgccgggaagttctaggccgccgcacagaaagccctgccctccacgccgggtctctggagcgccctgggttgcccggccggtccctgccgctgacttgttgacactgcgagcactcagtccctcccgcgcgcctcctccccgcccgccccgccgctcctcctccctgtaacatgccatagtgcgcctgcgaccacacggccggggcgctagcgttcgccttcagccaccatggggaatgggatgaacaagatcctgcccggcctgtacatcggcaacttcaaagatgccagagacgcggaacaattgagcaagaacaaggtgacacatattctgtctgtccacgatagtgccaggcctatgttggagggagttaaatacctgtgcatcccagcagcggattcaccatctcaaaacctgacaagacatttcaaagaaagtattaaattcattcacgagtgccggctccgcggtgagagctgccttgtacactgcctggccggggtctccaggagcgtgacactggtgatcgcatacatcatgaccgtcactgactttggctgggaggatgccctgcacaccgtgcgtgctgggagatcctgtgccaaccccaacgtgggcttccagagacagctccaggagtttgagaagcatgaggtccatcagtatcggcagtggctgaaggaagaatatggagagagccctttgcaggatgcagaagaagccaaaaacattctggccgctccaggaattctgaagttctgggcctttctcagaagactgtaatgtacctgaagtttctgaaatattgcaaacccacagagtttaggctggtgctgccaaaaagaaaagcaacatagagtttaagtatccagtagtgatttgtaaacttgtttttcatttgaagctgaatatatacgtagtcatgtttatgttgagaactaaggatattctttagcaagagaaaatattttccccttatccccactgctgtggaggtttctgtacctcgcttggatgcctgtaaggatcccgggagccttgccgcactgccttgtgggtggcttggcgctcgtgattgcttcctgtgaacgcctcccaaggacgagcccagtgtagttgtgtggcgtgaactctgcccgtgtgttctcaaattccccagcttgggaaatagcccttggtgtgggttttatctctggtttgtgttctccgtggtggaattgaccgaaagctctatgttttcgttaataaagggcaacttagccaagtttaaaaaaaaacgcagcaacaacacacacacaacaaaaacgcacaaaagaaaaaaaaagggggggcc

SEQ ID NO: 384206 - DNA, 293 bp, Homo sapiens
ttcccaggagctgggagacctcacatcctggcggagcctctagttctggctgcacagacctgactagcctggcctggccgcagtagctggccctgagtagtgacccgctcgcccgctgccctcggaagcctcacttggctgacaaacaggaaggtggcagggctgcctgcgtgcccttgccgcccccacagccctgtgtctggccccaaccctcatctctactcgcggctgcggtgaacttggatggtgctactctcaccacaaaccacagtccgtcacaaattgccgtgtgg

SEQ ID NO: 384207 - DNA, 420 bp, Homo sapiens
gaacctgtggggatattaagatttaagtcaggatgattggttcttgttaccagcatcaaaggatcttctcatatcacaaaataatgagattatcccccaacattggtcagcatggcataaaatacatgatctgtgataggagatgcttttctgatccgcttttatgaaaagtaaatgtccttcctgcctgcattttcaactttagtatgtgtgcctgcctttttctttttaaaatgtggtaagcttcacccaccagcctttagtaccggctgtataaggagcaactaacaccaagacatacatgcttatgccccatccactttattttaaagcactcttcaatttgtcaatactttaattctctaagcagtgttatagtggctgaccacttttgaaattatctttgttttgtttggtact

SEQ ID NO: 384208 - DNA, 328 bp, Homo sapiens
cagaaacatgtcagggagtttctaggaaggaggccagaaatcatgcagttagcaagggagatccagctgtgcccacctcagcctgagagttttattcacttcttctgcagggatcattttcagccgttcaaaaagtttcctactgtttcacctcgatggggactttacttgcttttctgtgcaggttctctattagttaacatgttcctctaccccatttaacttttgaagtgtggggcctctgaatgagaaaatggattgcgtcttccaatatcaaaatggagtcctactcatgataagtagtttaacacttttctgagagtattga

SEQ ID NO: 384209 - DNA, 323 bp, Homo sapiens
ttctcttgaccctaattccctaaattgtacttttaatggattatatgtgaaatcatatctgtgtctggatacagacatcccagggaaacaaggggaaatccatcatctctactctcctccactctgcagcaagctgaggaatgctcccatcagaacagcaagtgggcacaggcagtgtcctccctgcacacccagccacctccttccatgcatgcattccagctcagctcagcagctaaatgcattatgtgcagaagcacagaccacttttctcagagtaggaaaaaaaaaaagtcgacgcggccgcgaatttagtagtagta

SEQ ID NO: 384210 - DNA, 882 bp, Homo sapiens
ttggatgacaagggctcgagcctcagcgcctgtcctgattctgcaaagtctatgaagagtagtgtttcaaacggacattgccagcaggagagatgaggcttgttctgtttgggaaagacctgttcataacgccaagcctgccatcccaaagcacatagtcagggggctgaactctcaaatcctcagtgtctattttcatagcaacccttctttgatacttactgcccctcaaatatattttatatcttattcacttatataagcagaaaagcccagaccaaaatgtaactgaatttttatgtttttaaatacaaaatttaaaatgtatgaacccaaactgtcgattggaactatgcttttaactcttagtgcggagtgcatccctctggagccacacatcatgactttaattggttaatggacgtaagattgacttacaaaactataaatggcattttctttaaaattccctcttaatccttctgattccatcaaggagcaagtctccgttgttactagtatatttccatcatacactgctctccccctttaaaaagaaataaccgatctcaaattcagtcttctgcagaaaatatatctggttagtcttcagttacgttatattgattctgttgtatttcgttttatggttacctatgtgtaattggtctccctgagtttcatttatgactgtaattaaaacatttttaaataaatgtaattaaaactaatgaatctgtttaaaaatgttaggcatgtgatattgcaggtagggcatggacatggcgaaaaaattttgaaaatcatttgagaatgatggaacttggtggggatattccctagcagtgacagcatctactgcagtccttcctatattccacg

SEQ ID NO: 384211 - DNA, 464 bp, Homo sapiens
tttttttattttgagatggagtttcactcttgttgcccaggctggagtgcaatggtgcagtctcggctcaccacaaccttcacctctcgggttcaagtgattcctgtgcctcagcctcccgagtagctgggattacaggcatgtgccaccacgcctggctaattctgtaattttagtagagatggggtttctccatgttggtcaggctggtctcgaactcctgacctcaggggatccgccctcttcccggagtgcacggattacaggcatgagccactgcagccgaccaaaactgatataatttttgtgtatggtatgaggtaaaagttgaagttcatttttttttctatgtgactattcagttgttttcgtaccatttcttggaaaaaagaaaaaaactatctttctccttttgaaagtccttagtatcctttaagatcagctttccttatgtattcacatta

SEQ ID NO: 384212 - DNA, 988 bp, Homo sapiens
aaatgacagagagggagtggccagaggggaacataagagaagagagggttttttgccggcaaaggagatttgagctcatttataggcatgggggaagacaatcagtaggtgcataagtgagttgagaatctatactagcaatacaggaaaccatgttaggatcactgtctcaacaaaaatgatcacagccttccaaaaatgcaacttgactttaaaaaggctttcttttatcacttgcaagaatattgctgtgacacctaataaaaatttaattaaggcttagatgatatcacgttttatgtaacctgaagtccttaaatccatgaaatcactcaaatagaatcaagtttgttggaaagagaatctcatcttaagaagtggcagcaggaaaaatgagtaagttccattttattttatcagtgaagtctggggctacgaaatggttctaacagcataaagaaataacagctgcattcaagaccaggatatgtaaaataatttgtttagtttcagccactttttaaagtcaattttacaccctgaaagaaaggcaatcctgactccattgttctttcgccaataaggagatcgggaattacaataataaatagaagaaagaatgttgtttttcctcactgtaattaattttatggctcttgcgaagatgaatttttgtggtgattaaaatagtcccttgcacatattaggtactcagtaagcatttgtgaaatagggactttctagcctttatttgtgtttaaggaatcagggaataagttcaaaattgcctttcaagaaatttttggaactctcttctcactaagaaactgtaaagtcttataaaagagacggacgcattcacccgtgtctgttcactgaccaaagtccacagtttgtcaaggttgacagttgggcagaagctctggttcctctttaagtgtaatgcttcataccactttcccaaagtagcctgatgtccgtcgatgat

SEQ ID NO: 384213 - DNA, 556 bp, Homo sapiens
gtgtacaaaatacacctctaacatgaaacactcatggaaaacatgaatagagcatgtgccaggttggtgctgggcacactgaggcaaagggtacaatgcttgtctttaaagaatttactggctagctgggaacacatggaaggaggcaagcaggtaaaatgcagtgtgagcagcaacagaagtcagtgagggaacactgggtgggaaggacagccaaggcttcctttaagggtgtcttctgggctgaatcttgaggataaggatgagtttatcaggtgaacaaactggggaaaggcattccaagcatgcaaaacagcttatcagttcaggagagagtctcagctgggactatcaatctggtggccaggctcctctccaggagacagtgactacagtcatagtcagaagtagctaccactagtgacttggggttaatggtggcactggcatggttagtacaagcagctaggctccagtcttggctctgccactgtatgtcctgggtaagccagtgcactactctgtgactcactttccttgtctttgaaacgggagg

SEQ ID NO: 384214 - DNA, 480 bp, Homo sapiens
acagttttgagtatatggctgattggttttggtcagctactcaaaactgtgaagagaaaaggggatagaactgagggatgcctcccagtagtttctctcttatttctttcagtcttcagaaggggtcagggataggctgagaaaaaaggtccccggaaatggtggtccatttggttttttttaaaccaaaaggcggcatctccaggttcaaccaagagctggttacattgctataagtcagggagagtatgaccccaggacaattctgaattgttcagtaaattttccttttcctttcctttcacgggtgacggcatataaatcagaccaagaccgaagtttaaattatgtctctttcctcagtctagcttgggaacaggggcctgctgtaccctggcttcatctgtaggagatcagggcccaatgaatcttaaggttacagggagttgaggggcattgaggttcagttggcagaggaca

SEQ ID NO: 384215 - DNA, 440 bp, Homo sapiens
cagatctgcattgtaagaaaaatgagaagaattccttcaggaagaagaaaaatgataccagatggatatgtggatccacataaaggaacgaagagcacaggaaatagtaactatactgtcttgctctgtcacccaggctggagtgtggtggtgcgatcttggctcactgctagactggttggatccagaggactcggcaatgaagcatggacccctgttgaaaggaaaaatttcaattgcacaagaagaaaatatgctgaaatagactacagaatatttagatcttggccactgagtgaaaatatgctggaatagactacagaatgtttagacccaccactctcctaccgtaaaatacaacccggttctggttggattggccttcacctgcctaacctattttccttggtcttttcacactctgtgatttaatatttatt

SEQ ID NO: 384216 - DNA, 705 bp, Homo sapiens
tggatgtgcagtgtgtagttttatttgtttttatttccataacacaagagaggaagcgaagggccagggcatggcatcccctgcacggttcgaaggctttcaaccgtcccgggtttgttttgaaggcaattttggggccgcgccaagggaaaccctgcaggctgtcagtcccagcatgaacagcttaaaataaaaatctcccgtctggttgctgctcggagaggctccaagaaatgcaaaacaaacccgcctggaaaatgctgccctgagaaccagagcgagggcttgaaagatgccttcaacacagactcttctaggaatccagccagctttgggacggccgtttcacaaaaccaaaaaacaccaagtaacatttctaaccggagaattgccggttttagcaagaaaaaggggcttcacctaaaagggagggtcacaaaacacgaagggggttccccctggcgcctgcctcttcctttctgagcagatccgtccgagactgtggagcggaatcgccaccctggcaggagggggcgcagcagccggtctgggtgggcgctcactgtttgcccgcctgtctgccaggcttcttctctggctggcctctgcctgtgcccgggatcccacctcggccccggccaccaaacacacctcggccagcgccgcccatgccgcggcctttctgctgcttctgctgctgcaggc

SEQ ID NO: 384217 - DNA, 769 bp, Homo sapiens
tggatgtgcagtgtgtagttttatttgtttttatttccataacacaagagaggaagcgaagggccagggcatggcatcccctgcacggttcgaaggctttcaaccgtcccgggtttgttttgaaggcaattttggggccgcgccaagggaaaccctgcaggctgtcagtcccagcatgaacagcttaaaataaaaatctcccgtctggttgctgctcggagaggctccaagaaatgcaaaacaaacccgcctggaaaatgctgccctgagaaccagagcgagggcttgaaagatgccttcaacacagactcttctaggaatccagccagctttgggacggccgtttcacaaaaccaaaaaacaccaagtaacatttctaaccggagaattgccggttttagcaagaaaaaggggcttcacctaaaagggagggtcacaaaacacgaagggggttccccctggcgcctgcctcttcctttctgagcagatccgtccgagactgtggagcggaatcgccaccctggcaggagggggcgcagcagccggtctgggtgggcgctcactgtttgcccgcctgtctgccaggcttcttctctggctggcctctgcctgtgcccgggatcccacctcggccccggccaccaaacacacctagaggacagagagagggcgctgcagcagagccaggtacgtccactggagaggggagacccacctcggccagcgccgcccatgccgcggcctttctgctgcttctgctgctgcaggc

SEQ ID NO: 384218 - DNA, 715 bp, Homo sapiens
tggatgtgcagtgtgtagttttatttgtttttatttccataacacaagagaggaagcgaagggccagggcatggcatcccctgcacggttcgaaggctttcaaccgtcccgggtttgttttgaaggcaattttggggccgcgccaagggaaaccctgcaggctgtcagtcccagcatgaacagcttaaaataaaaatctcccgtctggttgctgctcggagaggctccaagaaatgcaaaacaaacccgcctggaaaatgctgccctgagaaccagagcgagggcttgaaagatgccttcaacacagactcttctaggaatccagccagctttgggacggcctttagcaagaaaaaggggcttcacctaaaagggagggtcacaaaacacgaagggggttccccctggcgcctgcctcttcctttctgagcagatccgtccgagactgtggagcggaatcgccaccctggcaggagggggcgcagcagccggtctgggtgggcgctcactgtttgcccgcctgtctgccaggcttcttctctggctggcctctgcctgtgcccgggatcccacctcggccccggccaccaaacacacctagaggacagagagagggcgctgcagcagagccaggtacgtccactggagaggggagacccacctcggccagcgccgcccatgccgcggcctttctgctgcttctgctgctgcaggc

SEQ ID NO: 384219 - DNA, 470 bp, Homo sapiens
cagagaggtgaggaagggcaggggctacagatggcccctgggcctaacaaatggaattttatgccaattcatcatctccggtgggggcgggcgaccttggctctggatagagccacgccaggttccaagtggagttgccagcggcctggacagatgggcaccaccataccctctcagaggggaaactgaggcttggggaggtgacttgatgtgccctgaggaccgccaggaggcgcagtgagaggagggctgagtcccaggtctcggggctcctctgcctgggcctcggctcatggccaaggaccaggaggggggcccgggagggttgggaggctccgaggcagcgctgcaagggcaaccccaagaaggagggatgccacgtgtggctgtcttcccgccccaggtacgtccactggagaggggagacccacctcggccagcgccgcccatgccgcggcctttctgctgct

SEQ ID NO: 384220 - DNA, 442 bp, Homo sapiens
gaaaggtagtgtgctgtgtttagggagtgccctagatgatcaaagagaaaaagttgatttgcagcttgactatatcagggaagccttcttgagagaggtgacatttgagcaaggtcttcaagaatagctctaatttgaaggatgttagaacaaatctagagatctaatgaacaacaagatcaatacatttggtgtaatagaacaaatctagaaggctaatgtatagcatgaggactataggaaataaggttgaactgtatttgggattcatgctaaataaccagattttaaatacttttggcacaaaaccaaaagaaaatggatgacttaagataatggatatgttaatttatttcactataataaactgtttgctatctatatgtttcccataacatcatgtctaccttaaatatacacaataaaatttacctgaaaaaag

SEQ ID NO: 384221 - DNA, 688 bp, Homo sapiens
taagtaactacaaaattattgaaaagagtcctaacaaggatagctccctgatgtgccaccataccagggcctcactgggctcatcacgcgacccgatcacaagggaagcaccaggcgtgcttaggacactgagtagaatttggcagcagcatagaaaatggaggaggatcggctcgtctcattgacaaatgatatctgtccacatgaatgtccagaagtcggttttaaagagtctgaacacttaatccatttttatacagactttttttgttttgttttcctaatcatttgattcagtgcctgattgaatcaagctgattgttggatcgtttgagagttgttcattgaagtagtctatttacgccttgctttgaatttatatatttaaccagaatcacagaatttttaaactggaagggacctcagaggttcttctgggcaaaccttcatttcttctgaaaaagttaagtgactttgcataactaatacagctattgcatgacaaagctgaaactgtaacctcgtctctaggcttcacttttttaatctctgtgatatcttggtgcaataggagctttttgattcaatattttaattttggagagtcatatgaattaataattcaaatcggatgtggagactagtgatcaagtagacttaggcaattacaggccataataggtgggaa

SEQ ID NO: 384222 - DNA, 3754 bp, Homo sapiens
  misc_feature (253)..(253): n is a, c, g, or t
  misc_feature (471)..(471): n is a, c, g, or t
  misc_feature (494)..(494): n is a, c, g, or t
  misc_feature (605)..(605): n is a, c, g, or t
  misc_feature (845)..(845): n is a, c, g, or t
  misc_feature (1373)..(1374): n is a, c, g, or t
  misc_feature (1381)..(1381): n is a, c, g, or t
  misc_feature (1417)..(1417): n is a, c, g, or t
  misc_feature (1521)..(1521): n is a, c, g, or t
  misc_feature (2963)..(2963): n is a, c, g, or t
ttggttgctggtccacttacaaacacttttcatatttgtatgtctttccaatggttatcctgttttgttcatttcaggcatatggccctgatcagattaactgacatgatgtatatgcaaagccttttgagttcttcagaaaaataaattatcttattcaagactgattgcttataaggaacttattatagctaatatagtaggcacaattttttttgtaattctcctagatgagtcagaacttagttttgangtaggtaaaaattttatggtcacaaatctcaggtgtgagaaaatctctttccttgatactctatataaatagaggatataaatatttcaagtctggaagtagtgagagaagctggtaattctggacatatagtgacagtcaaaaaggagctcaggtacaggactggtctaagctgctcaagattcaggagacagccagtacacagagaagctgagganataataagatatatctaaaacanttatctaaccttctgtggtaacaagctccttaaaggggctggatgatgttgtgttcactttttatcaccagcaaaggctaagataatgtatatagtaaatatttagtaacnatttattaaataaataaatatttaagacagaataaacaagtataataaatgaaccaataagaatgcaccatctaagtcaaaatagccacttttatccttaacattgtacctgctttggctgctgcagaagcaaacttgttggcattagacaaatcaagctggtgatttaataaattccaatgtaagtcttaccagtattgatgaataactatccagcactcaccatgaaagttaaagaancaacacagaaaaagttcctaagtggtcccaatttgaaatgatcagataacctataaaagaacatattcatattatactaacataaacacatataaatgcacttacagcagttacacagtattctcttcaataactagtttccttatgcattaatgtgtaataacagcaactacaatatttagataattataaaaaccaaggcaataatttaaaaactgattaaccgttttactctaacttaagcatggattggatcagtaagattgattaataaatttgaatgcagtcagttggattgattctaatttaaagttttaatttgttgtagaataattttaagtgaatatatttgtccagtgttcgagtgctcaacagtgtgtttgaaaaggaaaacaaagaatgttttgagaatgtgttaattccttaagacaatggattttaattggatctgttgttttcatttttcttcattatcattatacatctgtatgttggacagaacactaacactaaatagtttttagaaannttttttnaagttatttaaatcataatatcatgactgacttttnaattcaaaattaggctgtgactatccttcttcacttaggaagagtgttgtgaaagccagaccatctgctgaggtgctacagttacatgtggccctcagaatgcntttggcctgctctgttttagcactctgttggattaccaatacacaaaacaagttaaccttgatctttcacattaagtatctcagggacaaaatttgacatacgtctaaacctgtgacgtttccatctaaagaaggcagaaataaaacaggactttagattcggttacaataaaatatcagatgcaccagagacacaaggcttgaagctctgtcctgggaaaatatggcaaacagtgcctctcctgaacagaatcaaaatcactgttcagccatcaacaacagcatcccactgatgcagggcaacctccccactctgaccttgtctggaaagatccgagtgacggttactttcttcctttttctgctctctgcgacctttaatgcttctttcttgttgaaacttcagaagtggacacagaagaaagagaaagggaaaaagctctcaagaatgaagctgctcttaaaacatctgaccttagccaacctgttggagactctgattgtcatgccactggatgggatgtggaacattacagtccaatggtatgctggagagttactctgcaaagttctcagttatctaaagcttttctccatgtatgccccagccttcatgatggtggtgatcagcctggaccgctccctggctatcacgaggcccctagctttgaaaagcaacagcaaagtcggacagtccatggttggcctggcctggatcctcagtagtgtctttgcaggaccacagctgcctcttcatcatccctcttttcatcatgctgatctgcaatgcaaaaatcatcttcaccctgacacgggtccttcatcaggacccccacgaactacaactgaatcagtccaagaacaatataccaagagcacggctgaagactctaaaaatgacggttgcatttgccacttcatttactgtctgctggactccctactatgtcctaggaatttggtattggtttgatcctgaaatgttaaacaggttgtcagacccagtaaatcacttcttctttctctttgcctttttaaacccatgctttgatccacttatctatggatatttttctctgtgattgatagactacacaagaagtcatatgaagaagggtaaggtaatgaatctctccatctgggaatgattaacacaaatgttggagcatgtttacatacaaacaaagtaggatttacacttaagttatcattcttttagaaactcagtcttcagagcctcaattattaaggaaaagtcttcaggaaaaatactaaaatattttctcttcctcataagcttctaaattaatctctgccttttctgacctcatataacacattatgtaggtttcttatcactttctctttgcataataatgtactaatatttaaaataccttcagcctaaggcacaaggatgccaaaaaaacaaaggtgagaanccacaacacaggtctaaactcagcatgctttggtgagtttttctccaaaaggggcatattagcaattagagttgtatgctatataatacatagagcacagagccctttgcccataatatcaactttccctcctatagttaaaaagaaaaaaaaatgaatctatttttctctttggcttcaaaagcattctgacatttggaggagtcagtaaccaatcccaccaaccactccagcaacctgacaagactatgagtagttctccttcatcctatttatgtggtacaggttgtgaagtatctctatataaagggaaattttagaggggttaggatttggacaggggtttagaacattcctctaagctatctagtctgtggagtttgtggcaattaattgccataaaataacatgtttccaaatgcaactaagaaaatactcatagtgagtacgctctatgcatagtatgacttctatttaatgtgaagaattttttgtctctctcctgatcttactaaatccatatttcataaatgaactgagaataattaacaaaattaagcaaatgcacaagcaaaagatgcttgatacacaaaaggaactctggagagaaaactacagcttcagtctgtacagatcaaagaagacagaacatgtcaggggaaggaggaaagatcttgatgcagggtttcttaacctgcagtctatgcacaacactatatttccatgtaatgtttttatttcagccctatttgtattattttgtgcatttaaaaaacacaatcttaaggccg

SEQ ID NO: 384223 - DNA, 3882 bp, Homo sapiens
  misc_feature (253)..(253): n is a, c, g, or t
  misc_feature (471)..(471): n is a, c, g, or t
  misc_feature (494)..(494): n is a, c, g, or t
  misc_feature (605)..(605): n is a, c, g, or t
  misc_feature (845)..(845): n is a, c, g, or t
  misc_feature (1373)..(1374): n is a, c, g, or t
  misc_feature (1381)..(1381): n is a, c, g, or t
  misc_feature (1417)..(1417): n is a, c, g, or t
  misc_feature (1521)..(1521): n is a, c, g, or t
  misc_feature (3091)..(3091): n is a, c, g, or t
ttggttgctggtccacttacaaacacttttcatatttgtatgtctttccaatggttatcctgttttgttcatttcaggcatatggccctgatcagattaactgacatgatgtatatgcaaagccttttgagttcttcagaaaaataaattatcttattcaagactgattgcttataaggaacttattatagctaatatagtaggcacaattttttttgtaattctcctagatgagtcagaacttagttttgangtaggtaaaaattttatggtcacaaatctcaggtgtgagaaaatctctttccttgatactctatataaatagaggatataaatatttcaagtctggaagtagtgagagaagctggtaattctggacatatagtgacagtcaaaaaggagctcaggtacaggactggtctaagctgctcaagattcaggagacagccagtacacagagaagctgagganataataagatatatctaaaacanttatctaaccttctgtggtaacaagctccttaaaggggctggatgatgttgtgttcactttttatcaccagcaaaggctaagataatgtatatagtaaatatttagtaacnatttattaaataaataaatatttaagacagaataaacaagtataataaatgaaccaataagaatgcaccatctaagtcaaaatagccacttttatccttaacattgtacctgctttggctgctgcagaagcaaacttgttggcattagacaaatcaagctggtgatttaataaattccaatgtaagtcttaccagtattgatgaataactatccagcactcaccatgaaagttaaagaancaacacagaaaaagttcctaagtggtcccaatttgaaatgatcagataacctataaaagaacatattcatattatactaacataaacacatataaatgcacttacagcagttacacagtattctcttcaataactagtttccttatgcattaatgtgtaataacagcaactacaatatttagataattataaaaaccaaggcaataatttaaaaactgattaaccgttttactctaacttaagcatggattggatcagtaagattgattaataaatttgaatgcagtcagttggattgattctaatttaaagttttaatttgttgtagaataattttaagtgaatatatttgtccagtgttcgagtgctcaacagtgtgtttgaaaaggaaaacaaagaatgttttgagaatgtgttaattccttaagacaatggattttaattggatctgttgttttcatttttcttcattatcattatacatctgtatgttggacagaacactaacactaaatagtttttagaaannttttttnaagttatttaaatcataatatcatgactgacttttnaattcaaaattaggctgtgactatccttcttcacttaggaagagtgttgtgaaagccagaccatctgctgaggtgctacagttacatgtggccctcagaatgcntttggcctgctctgttttagcactctgttggattaccaatacacaaaacaagttaaccttgatctttcacattaagtatctcagggacaaaatttgacatacgtctaaacctgtgacgtttccatctaaagaaggcagaaataaaacaggactttagattcggttacaataaaatatcagatgcaccagagacacaaggcttgaagctctgtcctgggaaaatatggcaaacagtgcctctcctgaacagaatcaaaatcactgttcagccatcaacaacagcatcccactgatgcagggcaacctccccactctgaccttgtctggaaagatccgagtgacggttactttcttcctttttctgctctctgcgacctttaatgcttctttcttgttgaaacttcagaagtggacacagaagaaagagaaagggaaaaagctctcaagaatgaagctgctcttaaaacatctgaccttagccaacctgttggagactctgattgtcatgccactggatgggatgtggaacattacagtccaatggtatgctggagagttactctgcaaagttctcagttatctaaagcttttctccatgtatgccccagccttcatgatggtggtgatcagcctggaccgctccctggctatcacgaggcccctagctttgaaaagcaacagcaaagtcggacagtccatggttggcctggcctggatcctcagtagtgtctttgcaggaccacagttatacatcttcaggatgattcatctagcagacagctctggacagacaaaagttttctctcaatgtgtaacacactgcagtttttcacaatggtggcatcaagcattttataactttttcaccttcagctgcctcttcatcatccctcttttcatcatgctgatctgcaatgcaaaaatcatcttcaccctgacacgggtccttcatcaggacccccacgaactacaactgaatcagtccaagaacaatataccaagagcacggctgaagactctaaaaatgacggttgcatttgccacttcatttactgtctgctggactccctactatgtcctaggaatttggtattggtttgatcctgaaatgttaaacaggttgtcagacccagtaaatcacttcttctttctctttgcctttttaaacccatgctttgatccacttatctatggatatttttctctgtgattgatagactacacaagaagtcatatgaagaagggtaaggtaatgaatctctccatctgggaatgattaacacaaatgttggagcatgtttacatacaaacaaagtaggatttacacttaagttatcattcttttagaaactcagtcttcagagcctcaattattaaggaaaagtcttcaggaaaaatactaaaatattttctcttcctcataagcttctaaattaatctctgccttttctgacctcatataacacattatgtaggtttcttatcactttctctttgcataataatgtactaatatttaaaataccttcagcctaaggcacaaggatgccaaaaaaacaaaggtgagaanccacaacacaggtctaaactcagcatgctttggtgagtttttctccaaaaggggcatattagcaattagagttgtatgctatataatacatagagcacagagccctttgcccataatatcaactttccctcctatagttaaaaagaaaaaaaaatgaatctatttttctctttggcttcaaaagcattctgacatttggaggagtcagtaaccaatcccaccaaccactccagcaacctgacaagactatgagtagttctccttcatcctatttatgtggtacaggttgtgaagtatctctatataaagggaaattttagaggggttaggatttggacaggggtttagaacattcctctaagctatctagtctgtggagtttgtggcaattaattgccataaaataacatgtttccaaatgcaactaagaaaatactcatagtgagtacgctctatgcatagtatgacttctatttaatgtgaagaattttttgtctctctcctgatcttactaaatccatatttcataaatgaactgagaataattaacaaaattaagcaaatgcacaagcaaaagatgcttgatacacaaaaggaactctggagagaaaactacagcttcagtctgtacagatcaaagaagacagaacatgtcaggggaaggaggaaagatcttgatgcagggtttcttaacctgcagtctatgcacaacactatatttccatgtaatgtttttatttcagccctatttgtattattttgtgcatttaaaaaacacaatcttaaggccg

SEQ ID NO: 384224 - DNA, 1471 bp, Homo sapiens
tcgggcgcgggcgcggggcgcggggctgggcccgggcggagcggcggctgctccggacatgtcgggccctcgcgccggcttctaccggcaggagctgaacaagaccgtgtgggaggtgccgcagcggctgcaggggctgcgcccggtgggctccggcgcctacggctccgtctgttcggcctacgacgcccggctgcgccagaaggtggcggtgaagaagctgtcgcgccccttccagtcgctgatccacgcgcgcagaacgtaccgggagctgcggctgctcaagcacctgaagcacgagaacgtcatcgggcttctggacgtcttcacgccggccacgtccatcgaggacttcagcgaagtgtacttggtgaccaccctgatgggcgccgacctgaacaacatcgtcaagtgccaggcgctgagcgacgagcacgttcaattcctggtttaccagctgctgcgcgggctgaagtacatccactcggccgggatcatccaccgggacctgaagcccagcaacgtggctgtgaacgaggactgtgagctcaggatcctggatttcgggctggcgcgccaggcggacgaggagatgaccggctatgtggccacgcgctggtaccgggcacctgagatcatgctcaactggatgcattacaaccaaacagtggatatctggtccgtgggctgcatcatggctgagctgctccagggcaaggccctcttcccgggaagcgactacattgaccagctgaagcgcatcatggaagtggtgggcacacccagccctgaggttctggcaaaaatctcctcggaacacgcccggacatatatccagtccctgccccccatgccccagaaggacctgagcagcatcttccgtggagccaaccccctggccatagacctccttggaaggatgctggtgctggacagtgaccagagggtcagtgcagctgaggcactggcccacgcctacttcagccagtaccacgaccccgaggatgagccagaggccgagccatatgatgagagcgttgaggccaaggagcgcacgctggaggagtggaaggagctcacttaccaggaagtcctcagcttcaagcccccagagccaccgaagccacctggcagcctggagattgagcagtgaggtgctgcccagcagcccctgagagcctgtggaggggcttgggcctgcacccttccacagctggcctggtttcctcgagaggcacctcccacactcctatggtcacagacttctggcctaggacccctcgccttcaggagaatctacacgcatgatggagctgatccagtaacctcggagacgggaccctgcccagagctgagttgggggtgtggctctgccctggaaagggggtgacctcttgcctcgaggggcccagggaagcctgggtgtcaagtgcctgcaccaggggtgcacaataaagggggttctctctca

SEQ ID NO: 384225 - DNA, 2388 bp, Homo sapiens
tcgggcgcgggcgcggggcgcggggctgggcccgggcggagcggcggctgctccggacatgtcgggccctcgcgccggcttctaccggcaggagctgaacaagaccgtgtgggaggtgccgcagcggctgcaggggctgcgcccggtgggctccggcgcctacggctccgtctgttcggcctacgacgcccggctgcgccagaaggtggcggtgaagaagctgtcgcgccccttccagtcgctgatccacgcgcgcagaacgtaccgggagctgcggctgctcaagcacctgaagcacgagaacgtcatcgggcttctggacgtcttcacgccggccacgtccatcgaggacttcagcgaagtgtacttggtgaccaccctgatgggcgccgacctgaacaacatcgtcaagtgccaggcgctgagcgacgagcacgttcaattcctggtttaccagctgctgcgcgggctgaagtacatccactcggccgggatcatccaccgggacctgaagcccagcaacgtggctgtgaacgaggactgtgagctcaggatcctggatttcgggctggcgcgccaggcggacgaggagatgaccggctatgtggccacgcgctggtaccgggcacctgagatcatgctcaactggatgcattacaaccaaacagtggatatctggtccgtgggctgcatcatggctgagctgctccagggcaaggccctcttcccgggaagcgactacattgaccagctgaagcgcatcatggaagtggtgggcacacccagccctgaggttctggcaaaaatctcctcggaacacgcccggacatatatccagtccctgccccccatgccccagaaggacctgagcagcatcttccgtggagccaaccccctggccatagacctccttggaaggatgctggtgctggacagtgaccagagggtcagtgcagctgaggcactggcccacgcctacttcagccagtaccacgaccccgaggatgagccagaggccgagccatatgatgagagcgttgaggccaaggagcgcacgctggaggagtggaaggagctcacttaccaggaagtcctcagcttcaagcccccagagccaccgaagccacctggcagcctggagattgagcagtgaggtgctgcccagcagcccctgagagcctgtggaggggcttgggcctgcacccttccacagctggcctggtttcctcgagaggcacctcccacactcctatggtcacagacttctggcctaggacccctcgccttcaggagaatctacacgcatgtatgcatgcacaaacatgtgtgtacatgtgcttgccatgtgtaggagtctgggcacaagtgtccctgggcctaccttggtcctcctgtcctcttctggctactgcactctccactgggacctgactgtggggtcctagatgccaaaggggttcccctgcggagttcccctgtctgtcccaggccgacccaagggagtgtcagccttgggctctcttctgtcccagggctttctggaggacgcgctggggccgggaccccgggagactcaaagggagaggtctcagtggttagagctgctcagcctggaggtagggggctgtcttggtcactgctgagacccacaggtctaagaggagaggcagagccagtgtgccaccaggctgggcagggacaaccaccaggtgtcaaatgagaaaagctgcctggagtcttgtgttcacccgtgggtgtgtgtgggcacgtgtggatgagcgtgcactccccgtgttcatatgtcagggcacatgtgatgtggtgcgtgtgaatctgtgggcgcccaaggccagcagccatatctggcaagaagctggagccggggtgggtgtgctgttgccttccctctcctcggttcctgatgccttgaggggtgtttcagactggcggctccagtgggccaaagggcaaccacatgagcatgggcaggggctttctccttggatgtgggacccacagcagcttcctgaggctgggggtgggtgggtgggtggtttggccttgaggacgctagggcaggcagcacacctggatgtggacttggactcggacacttctgccctgcaccctggcccgctctctacctctgcccaccgttgtggccctgcagccggagatctgaggtgctctggtctgtgggtcagtcctctttccttgtcccaggatggagctgatccagtaacctcggagacgggaccctgcccagagctgagttgggggtgtggctctgccctggaaagggggtgacctcttgcctcgaggggcccagggaagcctgggtgtcaagtgcctgcaccaggggtgcacaataaagggggttctctctca

SEQ ID NO: 384226 - DNA, 1235 bp, Homo sapiens
tcgggcgcgggcgcggggcgcggggctgggcccgggcggagcggcggctgctccggacatgtcgggccctcgcgccggcttctaccggcaggagctgaacaagaccgtgtgggaggtgccgcagcggctgcaggggctgcgcccggtgggctccggcgcctacggctccgtctgttcggcctacgacgcccggctgcgccagaaggtggcggtgaagaagctgtcgcgccccttccagtcgctgatccacgcgcgcagaacgtaccgggagctgcggctgctcaagcacctgaagcacgagaacgtcatcgggcttctggacgtcttcacgccggccacgtccatcgaggacttcagcgaagtgtacttggtgaccaccctgatgggcgccgacctgaacaacatcgtcaagtgccaggcgctgagcgacgagcacgttcaattcctggtttaccagctgctgcgcgggctgaagtacatccactcggccgggatcatccaccgggacctgaagcccagcaacgtggctgtgaacgaggactgtgagctcaggatcctggatttcgggctggcgcgccaggcggacgaggagatgaccggctatgtggccacgcgctggtaccgggcacctgagatcatgctcaactggatgcattacaaccaaacagtggatatctggtccgtgggctgcatcatggctgagctgctccagggcaaggccctcttcccgggaagcgactacattgaccagctgaagcgcatcatggaagtggtgggcacacccagccctgaggttctggcaaaaatctcctcggaacacgcccggacatatatccagtccctgccccccatgccccagaaggacctgagcagcatcttccgtggagccaaccccctggccatagacctccttggaaggatgctggtgctggacagtgaccagagggtcagtgcagctgaggcactggcccacgcctacttcagccagtaccacgaccccgaggatgagccagaggccgagccatatgatgagagcgttgaggccaaggagcgcacgctggaggagtggaaggagctcacttaccaggaagtcctcagcttcaagcccccagaagctgagttgggggtgtggctctgccctggaaagggggtgacctcttgcctcgaggggcccagggaagcctgggtgtcaagtgcctgcaccaggggtgcacaataaagggggttctctctca

SEQ ID NO: 384227 - DNA, 844 bp, Homo sapiens
gttcgtcgcccggccctgacgccccccgccacctaggtcatcgggcttctggacgtcttcacgccggccacgtccatcgaggacttcagcgaagtgtacttggtgaccaccctgatgggcgccgacctgaacaacatcgtcaagtgccaggcgctgagcgacgagcacgttcaattcctggtttaccagctgctgcgcgggctgaagtacatccactcggccgggatcatccaccgggacctgaagcccagcaacgtggctgtgaacgaggactgtgagctcaggatcctggatttcgggctggcgcgccaggcggacgaggagatgaccggctatgtggccacgcgctggtaccgggcacctgagatcatgctcaactggatgcattacaaccaaacagtggatatctggtccgtgggctgcatcatggctgagctgctccagggcaaggccctcttcccgggaagcgactacattgaccagctgaagcgcatcatggaagtggtgggcacacccagccctgaggttctggcaaaaatctcctcggaacacgtgagttggtgcccgccagccagcagctccctctcctggctgagcccccaggctctctgggggagagggtggtgtggaaatgcggggaccatatggggaacatgggatgtggtgggatagagcctagggcaggtgcccaatccctgcaggggaaacaggagaagggggaagacattcctgacaccagggacagtgagtgcaaagccatgaccccagcaagcagtgcctggccagggcagtgggggtgggctgggggcccagcaagcagtgcctggccagggcagtgggggtg

SEQ ID NO: 384228 - DNA, 727 bp, Homo sapiens
tcgggcgcgggcgcggggcgcggggctgggcccgggcggagcggcggctgctccggacatgtcgggccctcgcgccggcttctaccggcaggagctgaacaagaccgtgtgggaggtgccgcagcggctgcaggggctgcgcccggtgggctccggcgcctacggctccgtctgttcggcctacgacgcccggctgcgccagaaggtggcggtgaagaagctgtcgcgccccttccagtcgctgatccacgcgcgcagaacgtaccgggagctgcggctgctcaagcacctgaagcacgagaacgtcatcgggcttctggacgtcttcacgccggccacgtccatcgaggacttcagcgaagtgtacttggtgaccaccctgatgggcgccgacctgaacaacatcgtcaagtgccaggcgctgagcgacgagcacgttcaattcctggtttaccagctgctgcgcgggctgaagtacatccactcggccgggatcatccaccgggacctgaagcccagcaacgtggctgtgaacgaggactgtgagctcaggatcctggatttcgggctggcgcgccaggcggacgaggagatgaccggctatgtggccacgcgctggtaccgggcacctgagatcatgctcaactggatgcattacaaccaaacagtggatatctgtcgtgggctgcatcatgccgagcgtgtccgagcagaccggaccgagctc

SEQ ID NO: 384229 - DNA, 674 bp, Homo sapiens
cagttatgagtaatgagattcaatcagtaattaaaagtctccaatcaaaataaagcctaggacctaatggcatcatagccaaattgtaccagacacttaaagaagaaccaataccagtccttttcaaactcttccagaaagttgaagaggagggaattcttcaaaatttattttatgaggccagcagtaccttgataccaaagccagacaaagatacaacaagagaagaagactacatctcccttcatctgaatggtaagaagaaaaagaagactgcagaccaatctcactgatgaacatggatgcaaaaatcttcaacaaaatactaagaaaccatattccgtagtatattaaaaggatcattcaccatgattaagtgggatttgcccttgggatgtgatggaaatgaataaatgtgagtcaccatgtaacagaataaaggacaaaaatcacatgatcatctaaatagatggagaaaatgcatttgacaaaattcaacatcctttcatgatgaaaactctcaatatattagatatggaaggaatgttcctcaacacaataaaggccatatatgacaagctcatagctaacattgtactcagtggtaagaagttgaaggcttttcctataagacctagaacaagacaaggatgcccgctcttaccacttctgtt

SEQ ID NO: 384230 - DNA, 507 bp, Homo sapiens
aattcttttatcgtcttttagataatttttacatccacaaatcagaaaaggaatgagaatcaaacaaagtaatacatgtggaagaactcagagaacagtgtcattctatagcaacaatcaacacagagcctctgctaagtgtcaggccacattctgagcacagcggagacaggactgagcaaagccaccacagagttcacattataaaaatgaaacaaatgaatgacaagtgtcacacggggtaacaggcacgataggggagacagaatgaggagagcatgtttaacagtaagaggttcgggaaggaagccggcccagacctgagtgaaattagccatgcctgtgcccgggggaagcaggtgccagcaggaggaacaccgagcccagcctcctgaggtggagggcatggggcatggtaacaggctgcacaggagctctgctctggagcacgcgatccgggcacaaccaagagcattggtggcaccacttgaacacttgcagccagct

SEQ ID NO: 384231 - DNA, 422 bp, Homo sapiens
agcccgggacaccgcgggaacacgcccggcctcagcccggaacaccggaagaacacgcccggcctcagcccgggacaccgcgggaacacgcccggcctcagcccgggacacctgcgggaatacgcccagcctcagttttgaaatattgcatcagttcttctgctcctacatcatggagctcttcctcatcaatagatttaattaatttaaatatttatttacaatagcctcttttatcttgacctgttctgcacaaggcagtcctggatactgtgctgagggtttcactccgcgatagccggtgccctacccgagtctctgcacagcggctacatccccgtctcaaaccagtgctctggcgtctgtgtttaccctccctgagcttactgtataaaaaagactgcttttgagagacatcaaga

SEQ ID NO: 384232 - DNA, 321 bp, Homo sapiens
cattggtgagttccgggaaacaaagatatatactatcaatctccacctagtagtcaggaaaacaggtaatttcagtgcatgttaaaggttttttggcttattgcgcctgagccatttgaattgtaagttgcctccagtcacttttagaaataagcatagttcgtaggtacatattgcacatttggatatgttactaaattgcctggacagatctctcttaatcaaactttatataaatgtgctgtgaaataagtgaaacagctattattcctgtattttcactctcctttggtttgaaattccacaggcaaaaagagcatt

SEQ ID NO: 384233 - DNA, 2280 bp, Homo sapiens
tagatggtggcatcacagactttatctacacactttcgggtctgaccactacctcccacaatacctagccattttggaaggggaaaacatgcggtggtctagctgtatagctcagggcttaatttcagcttctgagattgtgatgtcatatttcactctcaaaacataggctgaaagcacgaattactcaaaaagtaagcaaaccaatacctggtgaatctatggacagtcatacacatacatcaggggaaaatgtgtgtgtacaacccaaatttacagtatgattgtcattctttgactttgttttgtatagcctgactctgttgaacatgaaattattagtactctaggttttggacagcttgagttcatttgaattccttccttaggaataagtttttatatacactgctaaatgtgtgatgagaatcataaaacactaaccagctgaggtagctgtgattcactttccccccaccctaacttgagataaaatgaaggactaggcaagtatttcatgttgtgtgagtggacttcggttccttcagtattgtctaggttattgagtctttctttgcctaatagtggattcccactcttaagataacttttattagtgataaatcagtttagggtatattctgtatgacaggcataaaatgttaagggtgaatgctggccttttccaagaaaaggccaccttaacttgtatgaggaaaaaatcctaactattctcttttttgtatctttttttccgtaactgttttgattgtatattttaaagaaaccacttaatttgtgatgcacgtaatatttgtgtgaacctgagaatatgtcacaataggaaaaagcagaaattatacttaggggacatgttaggggggtaaaaatatttaagcctcgaatgttttactgtcatctccactaactatttttacagaaaaagctaaaaactctgttgtaattattgtaagtttacttatttatacttttaaattaggcttttcatacttaaatttttttgacatttgcttttaatatttgtttcttaatgtggaaattgtgtattttaataatcaaattattaggataatagatatatttttaaacattcacctcattaacaaatagatctttgaatttttattaggttttttggctccagacaactgtttagctttaatgatatttctaaattcccagtgacttattaataaaaacaggaaaaatatttaggtaatgtcataaaatttattttacctttctcattttctgagaaaataaatgaaaaaaaccctagatattgctttattaccaacagtgtgtaggtttttgtacatatggaaatttgacacaaaaaaatagggaatttgtatagagaagtttccctcttataaaaggactcccatttgattgttcgaaactataaaatgcacttttactttaccatatctgaaatgacaaaatatcgccctttggaaaacctgactctttgcacgtgtaattcccagagtctacctcagttaaccaggcttagttttaggcaggaatgaattgaattaaattcagttcatcatctatgcagatttgtttcttttaagcacatccttccctcctgctgttgccctcctcccattaacttttctttttaatcttgaaattgtttaaaatattccatctttctttctctagcaaagtgtttgtattccaaataaggcctctgtgaaatgtctgaattacttttcccgtctttgttatggtcagcttcattatttggatgtattgcattcaaagcagcagttccaaacataacacacatctattttcttagagttttgtaaatacaaactaacctgatgacattaaaaattgtggatcctacatgttcctatgttcattctctaaaaacctgagtaactttatgaaaacacacaaacctggaaaaacatcacatttttgtcacatttttactgacaaatgtatattcatatgatggtacggcagcagggagtggcccccagttaacatggctgtgagtggacacagtgtctcgcaggatcactgcatgttatgatggcttgtaagtgcgttgttaagacttttgtttcagtgtttgtctcccagtatttgaacctaatttaaagaaaaagacgtttccaagttgtatttattaaatgtgtttttccttaccttttgtgctgctactttgctaatctcattagcttagctgtgtttgtgcataggttatatttggtaataaatttatagagtgttggttgt

SEQ ID NO: 384234 - DNA, 2419 bp, Homo sapiens
tagatggtggcatcacagactttatctacacactttcgggtctgaccactacctcccacaatacctagccattttggaaggggaaaacatgcggtggtctagctgtatagctcagggcttaatttcagcttctgagattgtgatgtcatatttcactctcaaaacataggctgaaagcacgaattactcaaaaagtaagcaaaccaatacctggtgaatctatggacagtcatacacatacatcaggggaaaatgtgtgtgtacaacccaaatttacagtatgattgtcattctttgactttgttttgtatagcctgactctgttgaacatgaaattattagtactctaggttttggacagcttgagttcatttgaattccttccttaggaataagtttttatatacactgctaaatgtgtgatgagaatcataaaacactaaccagctgaggtagctgtgattcactttccccccaccctaacttgagataaaatgaaggactaggcaagtatttcatgttgtgtgagtggacttcggttccttcagtattgtctaggttattgagtctttctttgcctaatagtggattcccactcttaagataacttttattagtgataaatcagtttagggtatattctgtatgacaggcataaaatgttaagggtgaatgctggccttttccaagaaaaggccaccttaacttgtatgaggaaaaaatcctaactattctcttttttgtatctttttttccgtaactgttttgattgtatattttaaagaaaccacttaatttgtgatgcacgtaatatttgtgtgaacctgagaatatgtcacaataggaaaaagcagaaattatacttaggggacatgttaggggggtaaaaatatttaagcctcgaatgttttactgtcatctccactaactatttttacagaaaaagctaaaaactctgttgtaattattgtaagtttacttatttatacttttaaattaggcttttcatacttaaatttttttgacatttgcttttaatatttgtttcttaatgtggaaattgtgtattttaataatcaaattattaggataatagatatatttttaaacattcacctcattaacaaatagatctttgaatttttattaggttttttggctccagacaactgtttagctttaatgatatttctaaattcccagtgacttattaataaaaacaggaaaaatatttaggtaatgtcataaaatttattttacctttctcattttctgagaaaataaatgaaaaaaaccctagatattgctttattaccaacagtgtgtaggtttttgtacatatggaaatttgacacaaaaaaatagggaatttgtatagagaagtttccctcttataaaaggactcccatttgattgttcgaaactataaaatgcacttttactttaccatatctgaaatgacaaaatatcgccctttggaaaacctgactctttgcacgtgtaattcccagagtctacctcagttaaccaggcttagttttaggcaggaatgaattgaattaaattcagttcatcatctatgcagatttgtttcttttaagcacatccttccctcctgctgttgccctcctcccattaacttttctttttaatcttgaaattgtttaaaatattccatctttctttctctagcaaagtgtttgtattccaaataaggcctctgtgaaatgtctgaattacttttcccgtctttgttatggtcagcttcattatttggatgtattgcattcaaagcagcagttccaaacataacacacatctattttcttagagttttgtaaatacaaactaacctgatgacattaaaaattgtggatcctacatgttcctatgttcattctctaaaaacctgagtaactttatgaaaacacacaaacctggaaaaacatcacatttttgtcacatttttactgacaaatgtatattcatatgatggtacggcagcagggagtggcccccagttaacatggctgtgagtggacacagtgtctcgcaggatcactgcatgttatgatggcttgtaagtgcgttgttaagacttttgtttcagtgtttgtctcccagtatttgaacctaatttaaagaaaaagacgtttccaagttgtatttattaaatgtgtttttccttaccttttgtgctgctactttgctaatctcattagcttagctgtgtttgtgcataggttatatttggtaataaatttatagagtgttggttgtcatcgctttctttgtggttcattttgacctatagtcacgggtgcacttcttgccaccagtgggagcaacaaacccctcactagtaagggatggctttccccagatttttgttctcataaaatcacatattataaacctg

SEQ ID NO: 384235 - DNA, 292 bp, Homo sapiens
ttggaacacattcattttgacgaaaataaattaatcatttctatcctaagttggatactggattacctaaatctggctggctataatcattgtgagatggcaattacaacgaaggctttgctgctgctcctctgtaaactgcacataacccttactctaagttccatcaagatttgtgaagttggtagagaaactgcaggcaatgacaagatcctaggtgtaactaggtatttaggaactctgattttcctacatttctcaggccaacaatcgcaaccattgctcaatgcta

SEQ ID NO: 384236 - DNA, 299 bp, Homo sapiens
ctacttcaaagttggaagttatcttaagaggattgtggtcagagaaaacaatttaatatgtgcagctgtggaaaggtttatttctacatcattctttgaagtgacttttcatttagattaaatgtctgttcttctaagttaatttcaatcattttcagtaccaacatttcttgtgcatgtgcaaagccatgctgaactgttggctccattaacaatagaagaactttgcaaacagttaaataattccaattgtatatcaaagtcatcagatgtttcaaatagaaaattgatcaagctca

SEQ ID NO: 384237 - DNA, 1721 bp, Homo sapiens
gcaggctcagcgcatcccagccagtgtctcctgcagctcagcagctgccttcaccatggacagcataagcacagccatcttactcctgctcctggctctcgtctgtctgctcctgaccctaagctcaagagataagggaaagctgcctccgggacccagacccctctcaatcctgggaaacctgctgctgctttgctcccaagacatgctgacttctctcactaagctgagcaaggagtatggctccatgtacacagtgcacctgggacccaggcgggtggtggtcctcagcgggtaccaagctgtgaaggaggccctggtggaccagggagaggagtttagtggccgcggtgactaccctgcctttttcaactttaccaagggcaatggcatcgccttctccagtggggatcgatggaaggtcctgagacagttctctatccagattctacggaatttcgggatggggaagagaagcattgaggagcgaatcctagaggagggcagcttcctgctggcggacgtgcggaaaactgaaggcgagccctttgaccccacgtttgtgctgagtcgctcagtgtccaacattatctgttccgtgctcttcggcagccgcttcgactatgatgatgagcgtctgctcaccattatccgccttatcaatgacaacttccaaatcatgagcagcccctggggcgagttgtacgacatcctagaccccagattcccgagcctcctggactgggtgcctgggccgcaccaacgcatcttccagaacttcaagtgcctgagagacctcatcgcccacagcgtccacgaccaccaggcctcgctagaccccagatctccccgggacttcatccagtgcttcctcaccaagatggcagaggagaaggaggacccactgagccacttccacatggataccctgctgatgaccacacataacctgctctttggcggcaccaagacggtgagcaccacgctgcaccacgccttcctggcactcatgaagtacccaaaagttcaagcccgcgtgcaggaggagatcgacctcgtggtgggacgcgcgcggctgccggcgctgaaggaccgcgcggccatgccttacacagacgcggtgatccacgaggtgcagcgctttgcagacatcatccccatgaacttgccgcaccgcgtcactagggacacggcctttcgcggcttcctgatacccaagggcaccgatgtcatcaccctccttaacaccgtccactacgaccccagccagttcctgacgccccaggagttcaaccccgagcattttttggatgccaatcagtccttcaagaagagtccagccttcatgcccttctcagctggtgagggcaggaatcagagtctttctggcccaatttctacctacattcctcaccctaattccacttgccaaatcctctcactccttccttccacccattctcagctttggatgcacagagacattcattcctcctctcaactctgctcctataggcaagtagtgactaaaatcctcgtgaagcaaggtggggaggttgattaataatttaacttgggactgggcatggtgactcacacctgtaatcccagcactttgggaggctgaggtgggtggatcgcctgaggtcaggagttcgagaccagcctgaccaatatggtgaaaccctgtctctacttaaaatacaaaaattagctgggtg

SEQ ID NO: 384238 - DNA, 1837 bp, Homo sapiens
gcaggctcagcgcatcccagccagtgtctcctgcagctcagcagctgccttcaccatggacagcataagcacagccatcttactcctgctcctggctctcgtctgtctgctcctgaccctaagctcaagagataagggaaagctgcctccgggacccagacccctctcaatcctgggaaacctgctgctgctttgctcccaagacatgctgacttctctcactaagctgagcaaggagtatggctccatgtacacagtgcacctgggacccaggcgggtggtggtcctcagcgggtaccaagctgtgaaggaggccctggtggaccagggagaggagtttagtggccgcggtgactaccctgcctttttcaactttaccaagggcaatggcatcgccttctccagtggggatcgatggaaggtcctgagacagttctctatccagattctacggaatttcgggatggggaagagaagcattgaggagcgaatcctagaggagggcagcttcctgctggcggacgtgcggaaaactgaaggcgagccctttgaccccacgtttgtgctgagtcgctcagtgtccaacattatctgttccgtgctcttcggcagccgcttcgactatgatgatgagcgtctgctcaccattatccgccttatcaatgacaacttccaaatcatgagcagcccctggggcgagttgtacgacatcctagaccccagattcccgagcctcctggactgggtgcctgggccgcaccaacgcatcttccagaacttcaagtgcctgagagacctcatcgcccacagcgtccacgaccaccaggcctcgctagaccccagatctccccgggacttcatccagtgcttcctcaccaagatggcagaggagaaggaggacccactgagccacttccacatggataccctgctgatgaccacacataacctgctctttggcggcaccaagacggtgagcaccacgctgcaccacgccttcctggcactcatgaagtacccaaaagttcaagcccgcgtgcaggaggagatcgacctcgtggtgggacgcgcgcggctgccggcgctgaaggaccgcgcggccatgccttacacagacgcggtgatccacgaggtgcagcgctttgcagacatcatccccatgaacttgccgcaccgcgtcactagggacacggcctttcgcggcttcctgatacccaagggcaccgatgtcatcaccctccttaacaccgtccactacgaccccagccagttcctgacgccccaggagttcaaccccgagcattttttggatgccaatcagtccttcaagaagagtccagccttcatgcccttctcagctgggcgccgtctgtgcctgggagagctgctggcgcgcatggagctctttctgtacctcaccgccatcctgcagagcttttcgctgcagccgctgggtgcgcccgaggacatcgacctgaccccactcagctcaggtcttggcaatttgccgcggcctttccagctgtgcctgcgcccgcgctaacgccccggcccttccagattcgcctgtgagcgatgaggcccacccatgtgggttgctacgtccccttcttggtccacagtctgccctcatccctctggcagtcacgctgtcttccctgcatgctgtgcctgccgcgtgcccttcccccatccctccaatctgtgccccgtctgcagggcagaggcagatgtggcatgtctttttgtacccacagagcttgttctatggcacgcccttttctaggctttttgtatcatttcttagtacattgtaatagattcaaaccagtcttgg

SEQ ID NO: 384239 - DNA, 231 bp, Homo sapiens
gcttcctaaggacaactgctccctcagtctggcagcaccaaggacaaggaccactcccctttgcctaagtaccttgagaggaagacaggccaaggtccctccgcggtaccattctgcacatgttccacagtcctcccgccacctccctgtcacccatccctggaacctagctgtactttgaaaatatagcaactggagaaataaaaaggaaaaacatggccgggcgcagtg

SEQ ID NO: 384240 - DNA, 360 bp, Homo sapiens
actaagtgttaataattatctgtgtgtggtaaaatcaagaatgaccttagtggccttaatatttaattttccacagtcacaaaaaaagaaacttacttaaaattgaaaacaactttgctaaagaatataatataggtacgtcacgtaaggccttcttttagaaaagccatgaaatgacctataacattgtcctatttataacacttacctcataaccaaaaatcattttaactttgaagactttatttcctcctttacaattaaatattcaaaaggtttagtcttaatttttaaaaagcaagttttccagcatactccacataaaaactgtgaacgtataagcatttgggtttttcgagg

SEQ ID NO: 384241 - DNA, 271 bp, Homo sapiens
aaatgtcgtggtttgggaaacaacacccgaagactcgaaaacaaaagaattgctatttggtagagggtgtggggctcaacaaacaacccttaatgctgctgatgttctgaaataagtaatatgacatagtagcaagtaggagacaaaatatcacctttcttactgaaaagtaggagacaaaagcttaaagtgttggaaaagaatacttgcagtaaaaaccaaatgggctagatgacttagcccaagaattagatggaattacctgctctgt

SEQ ID NO: 384242 - DNA, 301 bp, Homo sapiens
ccatatacagcactctgtttttgagttatttatgatacagtttctacttatttgagccttttttaatgttaacataagttttattcttttccataaggtcttactcttttttgtatgtttattctgatgtatttttaaacttctttgatattgtaaatggtgtcctttaaaattttgcattttctaactgtgtgctagaatgcagaaatgcagttgatttcatatattgattttgggactgacttaaactctgactattctaatgatttagcaataaattctagataacattatatatgaa

SEQ ID NO: 384243 - DNA, 428 bp, Homo sapiens
agtagggatgtgtgtttagatgcaggttctccccctcgcacactctgggaacttttaatttttcacctatctcatggagtaggcctgctgcttctttcaaaggctctgtgaattctttcagttttcctgacaagttcctgtggtaattcatggaaaaaaaattaacagtatgaatctccacccactattctgtcctttcaagtgggagaaggacactaacactacctcctatccactatcttgaaaaaaaacagaatgggtttttttaatgatccaagaatatgctgtctacaagaaagtcatcttatccataaagacacacatagactgataaaagtaaaggtatggaaaaagatattccacacaaacagaaaccaaaagtgaacagaagtagctatacttatatcaaataaaacaagttataaata

SEQ ID NO: 384244 - DNA, 504 bp, Homo sapiens
  misc_feature (16)..(16): n is a, c, g, or t
tcacgctcgcccgatncactggttgatacacagtacaccaccccaacaacaaaaacacacaaaaacagacaaggaataaatttcagtaaaaacttcctaataattaaaaccctcctacagtgtgagagtattcagacaggtttgtcagggacagtggggaggcagtttgtgtatcagaatccgtatgtggaatcccaagttcggttgcctgctgctcaacacgtgatgctgcagcaactcttggaccttgttcagaagggatttgaatagcctgttctctctaggggtcctcatgctgcagctgtgcccatggctccccaagcctggctctaactgtgttgttttgagcagggttaataagcacgaactcgtctacacattgtagtgtgtataattcctgagctccaccaccacaccttgaattatcaggaactgaccttttacttcctgtggacctagtgatgccgtcgcatgagtaggccctttccttgggctattaaaatc

SEQ ID NO: 384245 - DNA, 1762 bp, Homo sapiens
  misc_feature (168)..(168): n is a, c, g, or t
aggtgagcggttgctcgtcgtcggggcggccggcagcggcggctccagggcccagcatgcgcgggggaccccgcggccaccatgtatgtgggctatgtgctggacaaggattcgcccgtgtaccccggcccagccaggccagccagcctcggcctgggcccggcaagnctacggccccccggccccgcccccggcgcccccgcagtaccccgacttctccagctactctcacgtggagccggcccccgcgcccccgacggcctggggggcgcccttccctgcgcccaaggacgactgggccgccgcctacggcccgggccccgcggcccctgccgccagcccagcttcgctggcattcgggccccctccagactttagcccggtgccggcgccccctgggcccggcccgggcctcctggcgcagcccctcgggggcccgggcacaccgtcctcgcccggagcgcagaggccgacgccctacgagtggatgcggcgcagcgtggcggccggaggcggcggtggcagcggtaagactcggaccaaggacaagtaccgcgtggtctacaccgaccaccaacgcctggagctggagaaggagtttcattacagccgttacatcacaatccggcggaaatcagagctggctgccaatctggggctcactgaacggcaggtgaagatctggttccaaaaccggcgggcaaaggagcgcaaagtgaacaagaagaaacagcagcagcaacagcccccacagccgccgatggcccacgacatcacggccaccccagccgggccatccctggggggcctgtgtcccagcaacaccagcctcctggccacctcctctccaatgcctgtgaaagaggagtttctgccatagccccatgcccagcctgtgcgccgggggacctggggactcgggtgctgggagtgtggctcctgtgggcccaggaggtctggtccgagtctcagccctgaccttctgggacatggtggacagtcacctatccaccctctgcatccccttggcccattctgtgcagtaagcctgttggataaagaccttccagctcctgtgttctagacctctgggggataagggagtccagggtggatgatctcaatctcccgtgggcatctcaagccccaaatggttgggggaggggcctagacaaggctccaggccccacctcctcctccatacgttcagaggtgcagctggaggctgctgtggggaccacactgatcctggagaaaagggatggagctgaaaaagatggaatgcttgcagagcatgacctgaggagggaggaacgtggtcaactcacacctgcctcttcctgcagcctcacctctacctgcccccatcataagggcactgagcccttcccaggctggatactaagcacaaagcccatagcactgggctctgatggctgctccactgggttacagaatcacagccctcatgatcattctcagtgagggctctggattgagagggaggccctgggaggagagaagggggcagagtcttccctaccaggtttctacacccccgccaggctgcccatcagggcccagggagcccccagaggactttattcggaccaagcagagctcacagctggacaggtgttgtatatagagtggaatctcttggatgcagcttcaagaataaatttttcttctcttttcaaaaatgtataaaaatcattatacatagcattaaagaaacatttttgagaagtacaaaacatcc

SEQ ID NO: 384246 - DNA, 1236 bp, Homo sapiens
  misc_feature (168)..(168): n is a, c, g, or t
aggtgagcggttgctcgtcgtcggggcggccggcagcggcggctccagggcccagcatgcgcgggggaccccgcggccaccatgtatgtgggctatgtgctggacaaggattcgcccgtgtaccccggcccagccaggccagccagcctcggcctgggcccggcaagnctacggccccccggccccgcccccggcgcccccgcagtaccccgacttctccagctactctcacgtggagccggcccccgcgcccccgacggcctggggggcgcccttccctgcgcccaaggacgactgggccgccgcctacggcccgggccccgcggcccctgccgccagcccagcttcgctggcattcgggccccctccagactttagcccggtgccggcgccccctgggcccggcccgggcctcctggcgcagcccctcgggggcccgggcacaccgtcctcgcccggagcgcagaggccgacgccctacgagtggatgcggcgcagcgtggcggccggaggcggcggtggcagcggtaagactcggaccaaggacaagtaccgcgtggtctacaccgaccaccaacgcctggagctggagaaggagtttcattacagccgttacatcacaatccggcggaaatcagagctggctgccaatctggggctcactgaacggcaggtgaagatctggttccaaaaccggcgggcaaaggagcgcaaagtgaacaagaagaaacagcagcagcaacagcccccacagccgccgatggcccacgacatcacggccaccccagccgggccatccctggggggcctgtgtcccagcaacaccagcctcctggccacctcctctccaatgcctgtgaaagaggagtttctgccatagccccatgcccagcctgtgcgccgggggacctggggactcgggtgctgggagtgtggctcctgtgggcccaggaggtctggtccgagtctcagccctgaccttctgggacatggtggacagtcacctatccaccctctgcatccccttggcccattctgtgcagtaagcctgttggataaagaccttccaaggactttattcggaccaagcagagctcacagctggacaggtgttgtatatagagtggaatctcttggatgcagcttcaagaataaatttttcttctcttttcaaaaatgtataaaaatcattatacatagcattaaagaaacatttttgagaagtacaaaacatcc

SEQ ID NO: 384247 - DNA, 447 bp, Homo sapiens
tctgcaacagtactctctcctaattttttgggcactccaattcagtttcctttgatgagttctctcattcttctagtagctcgggcagaagccctgaagtcatccctggcttctttctttctcttatggacaatgttcaattcatcagaacccctgtttttttctcccttaaaaatacatctagaataagaacaattttaccagcactgctgctagctacttccttggtccagacaccatcctctctggcctggagggttacacttgcctcctgcctggtctcctggatcccccttcttgtgcccataagctgttctcaacacacagccaaagtggtccacttgaagcccaagtcggctctccgaacatctcctcagagccctcccctggcttctcatctcactcagaatagaagtcaaagtcagatttaaaacttaaaaaaaaaaa

SEQ ID NO: 384248 - DNA, 182 bp, Homo sapiens
ccgcagcatccaccagaactacaggggcgtcctggcatgttgcagagaggctgatttaaggctggggtccatccctgtttttccctagttagaacctgaccctcctcctcaaggacagggtcctgacaagctctgagatcctgatgagctgatcacagtgtctcccagctcctccgtatttc

SEQ ID NO: 384249 - DNA, 3041 bp, Homo sapiens
  misc_feature (16)..(16): n is a, c, g, or t
  misc_feature (100)..(100): n is a, c, g, or t
  misc_feature (180)..(180): n is a, c, g, or t
  misc_feature (253)..(253): n is a, c, g, or t
  misc_feature (267)..(267): n is a, c, g, or t
  misc_feature (271)..(271): n is a, c, g, or t
  misc_feature (275)..(275): n is a, c, g, or t
  misc_feature (277)..(277): n is a, c, g, or t
  misc_feature (303)..(303): n is a, c, g, or t
  misc_feature (309)..(309): n is a, c, g, or t
  misc_feature (312)..(312): n is a, c, g, or t
  misc_feature (340)..(340): n is a, c, g, or t
  misc_feature (345)..(345): n is a, c, g, or t
  misc_feature (348)..(348): n is a, c, g, or t
  misc_feature (367)..(367): n is a, c, g, or t
  misc_feature (373)..(373): n is a, c, g, or t
gtggccgccgcgggcnccgcccggcgtgtcctgctgctgctgctgctgggggtcctgtccgccgggctgcggccaggcgccctggccaccgagcactacncgccgctctccctgctcaagcaggagctgcagcaccggcagcagcaggaggccccggcgggcggcggcggctgcagcccncagtccggggactggggggaccagtactctgccgagtgcggcgagtcatcctttttgaacttccatgactcanactgcgaacccaanggancaanancctgtgactccttgctttccctcaanactganaanattctgagccaggccaagtctattgcanaacanaanaaattcccgtttgccactnataatnacaacacaaatgaagagttagctattgcttatgtcttgattggcagtggtctgtatgatgaagcaatacggcatttttcaacaatgcttcagattctgtccctctgggacgaattaatgaagcagtgaatgacctcactaaagctatccaactgcagccctcagcacggctgtacagacatcggggaaccctgtacttcatatcagaggactatgcaacagcccatgagactttcagcagtccttagaactgaacaaaaaccagcctatagctatgctatacaaaggtttaactttctttcacagaggacttctgaaggaagctattgaatccttcaaagaagctttgaagcagaaagttgactttattgatgcatataaaagtctagggcaggcatatagagaactgggcaattttgaagcagccactgagagctttcaaaaggcactgttgctcaaccaaaatcatgtgcaaaccctccagctccggggaatgatgctctaccaccacggcagcttacaggaagcccttaagaactttaagcggtgtctgcagctagagccatataatgaagtgtgccagtatatgaaagggctcagccatgttgccatgggacagttttatgaagggataaaagcacaaacaaaagttatgctgaatgatcctctcccaggccagaaggctagccctgagtatcttaaagtaaagtatctccgagagtattctcgatatcttcatgcacaccttgataccccccttacggaatataacattgatgtggatctgcctggaagctttaaggaccactgggctaaaaatttgcctttcctcatagaagactacgaagagcagccagggttgcaaccccacataaaagatgtgttacatcagaattttgagagttataagcctgaagtacaggagctgatttgtgtggctgatcgtttgggatccctgatgcaatatgaaacacctggtttcctgccaaacaagagaatacacagagctatgggtttggccgcattggaggtcatgcaagccgtgcagcgtacatggaccaactcgaaagttcgaatgaatgggaagacacggttgatgcagtggagagacatgtttgacattgcagttaaatggagaaggattgctgacccagaccagcccgtgctgtggttagatcaaatgccagcacgaagtcttagcagaggttttaacaaccacattaatttaatcaggggtcaggtgatcaacatgagatacctagaatattttgagaaaatacttcattttattaaagacagaattcttgtttatcatggagctaataatcctaaaggattgctggaagttcgggaagccctggaaaaggtacacaaagtagaagaccttcttccgattatgaagcagtttaatactaaaacgaaggatgggttcaccgtgaacacaaaagttcccagccttaaagaccaagggaaggaatatgatggattcacaatcacgattacaggagacaaagttggcaatatattattttctgtggaaactcaaaccacggaagaaaggacacaattatatcatgctgaaatagatgcactttataaagatttgacagcaaaaggaaaagtattgattctttcatcagaatttggggaggctgatgctgtctgcaacttaatcttatccttagtttattacttttataatttaatgccactctctcgaggatccagtgtaattgcttactcggtcatcgtgggagcactgatggcaagtggaaaagaagtagcaggaaaaattcccaaagggaagttagtcgactttgaagctatgacagcccctggttcagaggcctttagcaaagtcgccaaaagctggatgaacttgaaaagtatttcaccttcttataagactcttccatcagtttcagaaacgtttccaacgttaagatcgatgattgaggtgctaaacacagactcttctccacgttgtcttaagaaactctagttctgctgctgtatttatacaagtaaagggccggacctcttgcttcttaagttattttttaaaacatggaattataaagaaattaggtcctctattacttttgataccaatttttataggaattgaatacttgaaatcattttctttacttttctgaaccataatgaaaatcatgaaagaggctttcggggggaaaaagctacttgacttggagggaaagcgtatgtattagccggcagcctgttggttcccacttataaagtcatataactccttccttacagtaaaaaaaattttcctcaacaactaaaatataatactgaagatgaacaaaaacaaaaccaaataggagtgtttgtattcctttagagatctggatatttttcaaagacttgctttttacgcacattgtgatagagcatcttttgttgactcacgtaacctccatgtgtgggtcctttgttttattagaaccatggaagaaggttcctgggccatcagtatgtgttgcagagctcacagccaggaacacttattttgaacaatgcagacagtacttgccagagtcccaaatgctgaattattgaaccatgtttttttttcctttgttgaaaaaaataaaccagggtgatttctataaatcaccagtttttggcattggaaaaag

SEQ ID NO: 384250 - DNA, 2448 bp, Homo sapiens
gagagctgtgcagtgattagacaggaaccccgaaaccaaagactcttaaaagctgaagagaaatcagactttgaagaactgtggcgtccaagcatgctgaagctattgaatccttcaaagaagctttgaagcagaaagttgactttattgatgcatataaaagtctagggcaggcatatagagaactgggcaattttgaagcagccactgagagctttcaaaaggcactgttgctcaaccaaaatcatgtgcaaaccctccagctccggggaatgatgctctaccaccacggcagcttacaggaagcccttaagaactttaagcggtgtctgcagctagagccatataatgaagtgtgccagtatatgaaagggctcagccatgttgccatgggacagttttatgaagggataaaagcacaaacaaaagttatgctgaatgatcctctcccaggccagaaggctagccctgagtatcttaaagtaaagtatctccgagagtattctcgatatcttcatgcacaccttgataccccccttacggaatataacattgatgtggatctgcctggaagctttaaggaccactgggctaaaaatttgcctttcctcatagaagactacgaagagcagccagggttgcaaccccacataaaagatgtgttacatcagaattttgagagttataagcctgaagtacaggagctgatttgtgtggctgatcgtttgggatccctgatgcaatatgaaacacctggtttcctgccaaacaagagaatacacagagctatgggtttggccgcattggaggtcatgcaagccgtgcagcgtacatggaccaactcgaaagttcgaatgaatgggaagacacggttgatgcagtggagagacatgtttgacattgcagttaaatggagaaggattgctgacccagaccagcccgtgctgtggttagatcaaatgccagcacgaagtcttagcagaggttttaacaaccacattaatttaatcaggggtcaggtgatcaacatgagatacctagaatattttgagaaaatacttcattttattaaagacagaattcttgtttatcatggagctaataatcctaaaggattgctggaagttcgggaagccctggaaaaggtacacaaagtagaagaccttcttccgattatgaagcagtttaatactaaaacgaaggatgggttcaccgtgaacacaaaagttcccagccttaaagaccaagggaaggaatatgatggattcacaatcacgattacaggagacaaagttggcaatatattattttctgtggaaactcaaaccacggaagaaaggacacaattatatcatgctgaaatagatgcactttataaagatttgacagcaaaaggaaaagtattgattctttcatcagaatttggggaggctgatgctgtctgcaacttaatcttatccttagtttattacttttataatttaatgccactctctcgaggatccagtgtaattgcttactcggtcatcgtgggagcactgatggcaagtggaaaagaagtagcaggaaaaattcccaaagggaagttagtcgactttgaagctatgacagcccctggttcagaggcctttagcaaagtcgccaaaagctggatgaacttgaaaagtatttcaccttcttataagactcttccatcagtttcagaaacgtttccaacgttaagatcgatgattgaggtgctaaacacagactcttctccacgttgtcttaagaaactctagttctgctgctgtatttatacaagtaaagggccggacctcttgcttcttaagttattttttaaaacatggaattataaagaaattaggtcctctattacttttgataccaatttttataggaattgaatacttgaaatcattttctttacttttctgaaccataatgaaaatcatgaaagaggctttcggggggaaaaagctacttgacttggagggaaagcgtatgtattagccggcagcctgttggttcccacttataaagtcatataactccttccttacagtaaaaaaaattttcctcaacaactaaaatataatactgaagatgaacaaaaacaaaaccaaataggagtgtttgtattcctttagagatctggatatttttcaaagacttgctttttacgcacattgtgatagagcatcttttgttgactcacgtaacctccatgtgtgggtcctttgttttattagaaccatggaagaaggttcctgggccatcagtatgtgttgcagagctcacagccaggaacacttattttgaacaatgcagacagtacttgccagagtcccaaatgctgaattattgaaccatgtttttttttcctttgttgaaaaaaataaaccagggtgatttctataaatcaccagtttttggcattggaaaaag

SEQ ID NO: 384251 - DNA, 1188 bp, Homo sapiens
gggcggacggattacagcgagggaaagggggttatatagtgatttccgtgttgtgaaaggcagaaccgacggaagaaaggacacaattatatcatgctgaaatagatgcactttataaagatttgacagcaaaaggaaaagtattgattctttcatcagaatttggggaggctgatgctgtctgcaacttaatcttatccttagtttattacttttataatttaatgccactctctcgaggatccagtgtaattgcttactcggtcatcgtgggagcactgatggcaagtggaaaagaagtagcaggaaaaattcccaaagggaagttagtcgactttgaagctatgacagcccctggttcagaggcctttagcaaagtcgccaaaagctggatgaacttgaaaagtatttcaccttcttataagactcttccatcagtttcagaaacgtttccaacgttaagatcgatgattgaggtgctaaacacagactcttctccacgttgtcttaagaaactctagttctgctgctgtatttatacaagtaaagggccggacctcttgcttcttaagttattttttaaaacatggaattataaagaaattaggtcctctattacttttgataccaatttttataggaattgaatacttgaaatcattttctttacttttctgaaccataatgaaaatcatgaaagaggctttcggggggaaaaagctacttgacttggagggaaagcgtatgtattagccggcagcctgttggttcccacttataaagtcatataactccttccttacagtaaaaaaaattttcctcaacaactaaaatataatactgaagatgaacaaaaacaaaaccaaataggagtgtttgtattcctttagagatctggatatttttcaaagacttgctttttacgcacattgtgatagagcatcttttgttgactcacgtaacctccatgtgtgggtcctttgttttattagaaccatggaagaaggttcctgggccatcagtatgtgttgcagagctcacagccaggaacacttattttgaacaatgcagacagtacttgccagagtcccaaatgctgaattattgaaccatgtttttttttcctttgttgaaaaaaataaaccagggtgatttctataaatcaccagtttttggcattggaaaaag

SEQ ID NO: 384252 - DNA, 2796 bp, Homo sapiens
  misc_feature (16)..(16): n is a, c, g, or t
  misc_feature (100)..(100): n is a, c, g, or t
  misc_feature (180)..(180): n is a, c, g, or t
  misc_feature (253)..(253): n is a, c, g, or t
  misc_feature (267)..(267): n is a, c, g, or t
  misc_feature (271)..(271): n is a, c, g, or t
  misc_feature (275)..(275): n is a, c, g, or t
  misc_feature (277)..(277): n is a, c, g, or t
  misc_feature (303)..(303): n is a, c, g, or t
  misc_feature (309)..(309): n is a, c, g, or t
  misc_feature (312)..(312): n is a, c, g, or t
  misc_feature (340)..(340): n is a, c, g, or t
  misc_feature (345)..(345): n is a, c, g, or t
  misc_feature (348)..(348): n is a, c, g, or t
  misc_feature (367)..(367): n is a, c, g, or t
  misc_feature (373)..(373): n is a, c, g, or t
gtggccgccgcgggcnccgcccggcgtgtcctgctgctgctgctgctgggggtcctgtccgccgggctgcggccaggcgccctggccaccgagcactacncgccgctctccctgctcaagcaggagctgcagcaccggcagcagcaggaggccccggcgggcggcggcggctgcagcccncagtccggggactggggggaccagtactctgccgagtgcggcgagtcatcctttttgaacttccatgactcanactgcgaacccaanggancaanancctgtgactccttgctttccctcaanactganaanattctgagccaggccaagtctattgcanaacanaanaaattcccgtttgccactnataatnacaacacaaatgaagagttagctattgcttatgtcttgattggcagtggtctgtatgatgaagcaatacggcatttttcaacaatgcttcaggaggagcctgatctggttagtgcaatttatggccgagggatagcctatggaaagaagggactacatgacattaagaatgctgagcttgctctgttcgaactgagccgagtaattaccttggaaccagatcgtccagaggtatttgagcagcgagcagaaattctgtccctctgggacgaattaatgaagcagtgaatgacctcactaaagctatccaactgcagccctcagcacggctgtacagacatcggggaaccctgtacttcatatcagaggactatgcaacagcccatgagactttcagcagtccttagaactgaacaaaaaccagcctatagctatgctatacaaaggtttaactttctttcacagaggacttctgaaggaagctattgaatccttcaaagaagctttgaagcagaaagttgactttattgatgcatataaaagtctagggcaggcatatagagaactgggcaattttgaagcagccactgagagctttcaaaaggcactgttgctcaaccaaaatcatgtgcaaaccctccagctccggggaatgatgctctaccaccacggcagcttacaggaagcccttaagaactttaagcggtgtctgcagctagagccatataatgaagtgtgccagtatatgaaagggctcagccatgttgccatgggacagttttatgaagggataaaagcacaaacaaaagttatgctgaatgatcctctcccaggccagaaggctagccctgagtatcttaaagtaaagtatctccgagagtattctcgatatcttcatgcacaccttgataccccccttacggaatataacattgatgtggatctgcctggaagctttaaggaccactgggctaaaaatttgcctttcctcatagaagactacgaagagcagccagggttgcaaccccacataaaagatgtgttacatcagaattttgagagttataagcctgaagtacaggagctgatttgtgtggctgatcgtttgggatccctgatgcaatatgaaacacctggtttcctgccaaacaagagaatacacagagctatgggtttggccgcattggaggtcatgcaagccgtgcagcgtacatggaccaactcgaaagttcgaatgaatgggaagacacggttgatgcagtggagagacatgtttgacattgcagttaaatggagaaggattgctgacccagaccagcccgtgctgtggttagatcaaatgccagcacgaagtcttagcagaggttttaacaaccacattaatttaatcaggggtcaggtgatcaacatgagatacctagaatattttgagaaaatacttcattttattaaagacagaattcttgtttatcatggagctaataatcctaaaggattgctggaagttcgggaagccctggaaaaggtacacaaagtagaagaccttcttccgattatgaagcagtttaatactaaaacgaaggatgggttcaccgtgaacacaaaagttcccagccttaaagaccaagggaaggaatatgatggattcacaatcacgattacaggagacaaagttggcaatatattattttctgtggaaactcaaaccacggaagaaaggacacaattatatcatgctgaaatagatgcactttataaagatttgacagcaaaaggaaaagtattgattctttcatcagaatttggggaggctgatgctgtctgcaacttaatcttatccttagtttattacttttataatttaatgccactctctcgaggatccagtgtaattgcttactcggtcatcgtgggagcactgatggcaagtggaaaagaagtagcaggaaaaattcccaaagggaagttagtcgactttgaagctatgacagcccctggttcagaggcctttagcaaagtcgccaaaagctggatgaacttgaaaagattttattgcagccaggaattatccctgacggacactgtgtgtgaggagtctagcagaccatgatcgttcctggctcttgtttccagaagcactggagaggactgtgtgaatttgaagtgtgtgaaattaaactcatagatgcctcagtagttaatgaagaataagtaagcctcactgttcaactttagttatttttgccccttctcctggttttttacatcccaaccacccccagttttgcctttcacgtctatttgacatagcaaccactctattgctgggtaatttatgttctgtttaaaacagaaatatttgtgcctgtagtctaccattgctcaatttgtaatttagctttgcaatgaaagcttctaacagtt

SEQ ID NO: 384253 - DNA, 1431 bp, Homo sapiens
  misc_feature (16)..(16): n is a, c, g, or t
  misc_feature (100)..(100): n is a, c, g, or t
  misc_feature (180)..(180): n is a, c, g, or t
  misc_feature (253)..(253): n is a, c, g, or t
  misc_feature (267)..(267): n is a, c, g, or t
  misc_feature (271)..(271): n is a, c, g, or t
  misc_feature (275)..(275): n is a, c, g, or t
  misc_feature (277)..(277): n is a, c, g, or t
  misc_feature (303)..(303): n is a, c, g, or t
  misc_feature (309)..(309): n is a, c, g, or t
  misc_feature (312)..(312): n is a, c, g, or t
  misc_feature (340)..(340): n is a, c, g, or t
  misc_feature (345)..(345): n is a, c, g, or t
  misc_feature (348)..(348): n is a, c, g, or t
  misc_feature (367)..(367): n is a, c, g, or t
  misc_feature (373)..(373): n is a, c, g, or t
gtggccgccgcgggcnccgcccggcgtgtcctgctgctgctgctgctgggggtcctgtccgccgggctgcggccaggcgccctggccaccgagcactacncgccgctctccctgctcaagcaggagctgcagcaccggcagcagcaggaggccccggcgggcggcggcggctgcagcccncagtccggggactggggggaccagtactctgccgagtgcggcgagtcatcctttttgaacttccatgactcanactgcgaacccaanggancaanancctgtgactccttgctttccctcaanactganaanattctgagccaggccaagtctattgcanaacanaanaaattcccgtttgccactnataatnacaacacaaatgaagagttagctattgcttatgtcttgattggcagtggtctgtatgatgaagcaatacggcatttttcaacaatgcttcaggaggagcctgatctggttagtgcaatttatggccgagggatagcctatggaaagaagggactacatgacattaagaatgctgagcttgctctgttcgaactgagccgagtaattaccttggaaccagatcgtccagaggtatttgagcagcgagcagaaattctgtccctctgggacgaattaatgaagcagtgaatgacctcactaaagctatccaactgcagccctcagcacggctgtacagacatcggggaaccctgtacttcatatcagaggactatgcaacagcccatgagactttcagcagtccttagaactgaacaaaaaccagcctatagctatgctatacaaaggtttaactttctttcacagaggacttctgaaggaagctattgaatccttcaaagaagctttgaagcagaaagttgactttattgatgcatataaaagtctagggcaggcatataggtgagtaaaataataacagttggggtaggagggaggctgaagagtggggagacaagatagcttcacataatatttaaaagaaatagtatttcttaaccaaaggagatgggtattttgaattgtgcaagtatgtatagacttgttgatattttctctgaaatgcagaaaaataaattgtaccagaggatgtcatgatgcacagtattctctcttaacttcagcgtgtgtattggtctagaaaacgttcatccttcaagggttgttttgaatagtggcattgtaagctattggggtgtagacgctgctgctactttcttagacagtaactaaggtaaatttcctatgatctctttgaagagtcctagaatgaagggatggaaaagttgtgattataatgtacatctgctgagaatgagaagttgtaactagaacttggcttcctgacgccatgcattgccctgatgattagagccattgtgacttttggcttaaaaaaaa

SEQ ID NO: 384254 - DNA, 3200 bp, Homo sapiens
  misc_feature (16)..(16): n is a, c, g, or t
  misc_feature (100)..(100): n is a, c, g, or t
  misc_feature (180)..(180): n is a, c, g, or t
  misc_feature (253)..(253): n is a, c, g, or t
  misc_feature (267)..(267): n is a, c, g, or t
  misc_feature (271)..(271): n is a, c, g, or t
  misc_feature (275)..(275): n is a, c, g, or t
  misc_feature (277)..(277): n is a, c, g, or t
  misc_feature (303)..(303): n is a, c, g, or t
  misc_feature (309)..(309): n is a, c, g, or t
  misc_feature (312)..(312): n is a, c, g, or t
  misc_feature (340)..(340): n is a, c, g, or t
  misc_feature (345)..(345): n is a, c, g, or t
  misc_feature (348)..(348): n is a, c, g, or t
  misc_feature (367)..(367): n is a, c, g, or t
  misc_feature (373)..(373): n is a, c, g, or t
gtggccgccgcgggcnccgcccggcgtgtcctgctgctgctgctgctgggggtcctgtccgccgggctgcggccaggcgccctggccaccgagcactacncgccgctctccctgctcaagcaggagctgcagcaccggcagcagcaggaggccccggcgggcggcggcggctgcagcccncagtccggggactggggggaccagtactctgccgagtgcggcgagtcatcctttttgaacttccatgactcanactgcgaacccaanggancaanancctgtgactccttgctttccctcaanactganaanattctgagccaggccaagtctattgcanaacanaanaaattcccgtttgccactnataatnacaacacaaatgaagagttagctattgcttatgtcttgattggcagtggtctgtatgatgaagcaatacggcatttttcaacaatgcttcaggaggagcctgatctggttagtgcaatttatggccgagggatagcctatggaaagaagggactacatgacattaagaatgctgagcttgctctgttcgaactgagccgagtaattaccttggaaccagatcgtccagaggtatttgagcagcgagcagaaattctgtccctctgggacgaattaatgaagcagtgaatgacctcactaaagctatccaactgcagccctcagcacggctgtacagacatcggggaaccctgtacttcatatcagaggactatgcaacagcccatgagactttcagcagtccttagaactgaacaaaaaccagcctatagctatgctatacaaaggtttaactttctttcacagaggacttctgaaggaagctattgaatccttcaaagaagctttgaagcagaaagttgactttattgatgcatataaaagtctagggcaggcatatagagaactgggcaattttgaagcagccactgagagctttcaaaaggcactgttgctcaaccaaaatcatgtgcaaaccctccagctccggggaatgatgctctaccaccacggcagcttacaggaagcccttaagaactttaagcggtgtctgcagctagagccatataatgaagtgtgccagtatatgaaagggctcagccatgttgccatgggacagttttatgaagggataaaagcacaaacaaaagttatgctgaatgatcctctcccaggccagaaggctagccctgagtatcttaaagtaaagtatctccgagagtattctcgatatcttcatgcacaccttgataccccccttacggaatataacattgatgtggatctgcctggaagctttaaggaccactgggctaaaaatttgcctttcctcatagaagactacgaagagcagccagggttgcaaccccacataaaagatgtgttacatcagaattttgagagttataagcctgaagtacaggagctgatttgtgtggctgatcgtttgggatccctgatgcaatatgaaacacctggtttcctgccaaacaagagaatacacagagctatgggtttggccgcattggaggtcatgcaagccgtgcagcgtacatggaccaactcgaaagttcgaatgaatgggaagacacggttgatgcagtggagagacatgtttgacattgcagttaaatggagaaggattgctgacccagaccagcccgtgctgtggttagatcaaatgccagcacgaagtcttagcagaggttttaacaaccacattaatttaatcaggggtcaggtgatcaacatgagatacctagaatattttgagaaaatacttcattttattaaagacagaattcttgtttatcatggagctaataatcctaaaggattgctggaagttcgggaagccctggaaaaggtacacaaagtagaagaccttcttccgattatgaagcagtttaatactaaaacgaaggatgggttcaccgtgaacacaaaagttcccagccttaaagaccaagggaaggaatatgatggattcacaatcacgattacaggagacaaagttggcaatatattattttctgtggaaactcaaaccacggaagaaaggacacaattatatcatgctgaaatagatgcactttataaagatttgacagcaaaaggaaaagtattgattctttcatcagaatttggggaggctgatgctgtctgcaacttaatcttatccttagtttattacttttataatttaatgccactctctcgaggatccagtgtaattgcttactcggtcatcgtgggagcactgatggcaagtggaaaagaagtagcaggaaaaattcccaaagggaagttagtcgactttgaagctatgacagcccctggttcagaggcctttagcaaagtcgccaaaagctggatgaacttgaaaagtatttcaccttcttataagactcttccatcagtttcagaaacgtttccaacgttaagatcgatgattgaggtgctaaacacagactcttctccacgttgtcttaagaaactctagttctgctgctgtatttatacaagtaaagggccggacctcttgcttcttaagttattttttaaaacatggaattataaagaaattaggtcctctattacttttgataccaatttttataggaattgaatacttgaaatcattttctttacttttctgaaccataatgaaaatcatgaaagaggctttcggggggaaaaagctacttgacttggagggaaagcgtatgtattagccggcagcctgttggttcccacttataaagtcatataactccttccttacagtaaaaaaaattttcctcaacaactaaaatataatactgaagatgaacaaaaacaaaaccaaataggagtgtttgtattcctttagagatctggatatttttcaaagacttgctttttacgcacattgtgatagagcatcttttgttgactcacgtaacctccatgtgtgggtcctttgttttattagaaccatggaagaaggttcctgggccatcagtatgtgttgcagagctcacagccaggaacacttattttgaacaatgcagacagtacttgccagagtcccaaatgctgaattattgaaccatgtttttttttcctttgttgaaaaaaataaaccagggtgatttctataaatcaccagtttttggcattggaaaaag

SEQ ID NO: 384255 - DNA, 3183 bp, Homo sapiens
  misc_feature (16)..(16): n is a, c, g, or t
  misc_feature (100)..(100): n is a, c, g, or t
  misc_feature (180)..(180): n is a, c, g, or t
  misc_feature (253)..(253): n is a, c, g, or t
  misc_feature (267)..(267): n is a, c, g, or t
  misc_feature (271)..(271): n is a, c, g, or t
  misc_feature (275)..(275): n is a, c, g, or t
  misc_feature (277)..(277): n is a, c, g, or t
  misc_feature (303)..(303): n is a, c, g, or t
  misc_feature (309)..(309): n is a, c, g, or t
  misc_feature (312)..(312): n is a, c, g, or t
  misc_feature (340)..(340): n is a, c, g, or t
  misc_feature (345)..(345): n is a, c, g, or t
  misc_feature (348)..(348): n is a, c, g, or t
  misc_feature (367)..(367): n is a, c, g, or t
  misc_feature (373)..(373): n is a, c, g, or t
gtggccgccgcgggcnccgcccggcgtgtcctgctgctgctgctgctgggggtcctgtccgccgggctgcggccaggcgccctggccaccgagcactacncgccgctctccctgctcaagcaggagctgcagcaccggcagcagcaggaggccccggcgggcggcggcggctgcagcccncagtccggggactggggggaccagtactctgccgagtgcggcgagtcatcctttttgaacttccatgactcanactgcgaacccaanggancaanancctgtgactccttgctttccctcaanactganaanattctgagccaggccaagtctattgcanaacanaanaaattcccgtttgccactnataatnacaacacaaatgaagagttagctattgcttatgtcttgattggcagtggtctgtatgatgaagcaatacggcatttttcaacaatgcttcaggaggagcctgatctggttagtgcaatttatggccgagggatagcctatggaaagaagggactacatgacattaagaatgctgagcttgctctgttcgaactgagccgagtaattaccttggaaccagatcgtccagaggtatttgagcagcgagcagaaattctgtccctctgggacgaattaatgaagcagtgaatgacctcactaaagctatccaactgcagccctcagcacggctgtacagacatcggggaaccctgtacttcatatcagaggactatgcaacagcccatgagactttcagcagtccttagaactgaacaaaaaccagcctatagctatgctatacaaaggtttaactttctttcacagaggacttctgaaggaagctattgaatccttcaaagaagctttgaagcagaaagttgactttattgatgcatataaaagtctagggcaggcatatagagaactgggcaattttgaagcagccactgagagctttcaaaaggcactgttgctcaaccaaaatcatgtgcaaaccctccagctccggggaatgatgctctaccaccacggcagcttacaggaagcccttaagaactttaagcggtgtctgcagctagagccatataatgaagtgtgccagtatatgaaagggctcagccatgttgccatgggacagttttatgaagggataaaagcacaaacaaaagttatgctgaatgatcctctcccaggccagaaggctagccctgagtatcttaaagtaaagtatctccgagagtattctcgatatcttcatgcacaccttgataccccccttacggaatataacattgatgtggatctgcctggaagctttaaggaccactgggctaaaaatttgcctttcctcatagaagactacgaagagcagccagggttgcaaccccacataaaagatgtgttacatcagaattttgagagttataagcctgaagtacaggagctgatttgtgtggctgatcgtttgggatccctgatgcaatatgaaacacctggtttcctgccaaacaagagaatacacagagctatgggtttggccgcattggaggtcatgcaagccgtgcagcgtacatggaccaactcgaaagttcgaatgaatgggaagacacggttgatgcagtggagagacatgtttgacattgcagttaaatggagaaggattgctgacccagaccagcccgtgctgtggttagatcaaatgccagcacgaagtcttagcagaggttttaacaaccacattaatttaatcaggggtcaggtgatcaacatgagatacctagaatattttgagaaaatacttcattttattaaagacagaattcttgtttatcatggagctaataatcctaaaggattgctggaagttcgggaagccctggaaaaggtacacaaagtagaagaccttcttccgattatgaagcagtttaatactaaaacgaaggatgggttcaccgtgaacacaaaagttcccagccttaaagaccaagggaaggaatatgatggattcacaatcacgattacaggagacaaagttggcaatatattattttctgtggaaactcaaaccacggaagaaaggacacaattatatcatgctgaaatagatgcactttataaagatttgacagcaaaaggaaaagtattgattctttcatcagaatttggggaggctgatgctgtctgcaacttaatcttatccttagtttattacttttataatttaatgccactctctcgaggatccagtgtaattgcttactcggtcatcgtgggagcactgatggcaagtggaaaagaagtagcaggaaaaattcccaaagggaagttagtcgactttgaagctatgacagcccctggttcagaggcctttagcaaagtcgccaaaagctggatgaacttgaaaagtatttcaccttcttataagactcttccatcagtttcagaaacgtttccaacgttaagatcgatgattgaggtgctaaacacagactcttctccacgttgtcttaagaaactctagttctgctgctgtatttatacaagtaaagggccggacctcttgcttcttaagttattttttaaaacatggaattataaagaaattaggtcctctattacttttgataccaatttttataggaattgaatacttgaaatcattttctttacttttctgaaccataatgaaaatcatgaaagaggctttcggggggaaaaagctacttgacttggagggaaagcgtatgtattagccggcagcctgttggttcccacttataaagtcatataactccttccttacagtaaaaaaaattttcctcaacaactaaaatataatactgaagatgaacaaaaacaaaaccaaataggagtgtttgtattcctttagagatctggatatttttcaaagacttcacccctcccacccctcaattggcgtgcccgggtcaccagcagcagcagcggcgttccgtcgctcccaagatttgggtgaaggggagaacgttccttgttatccctacccccccggggccctcaagcttattttcttgttgaagaaacacaaaaccctcgagattcatgttctgtatgttggagaaaaaaaaattatttaatgttcccccaaaaaagacagtatattttgtgctttgtaaagtgttaattaaaatg

SEQ ID NO: 384256 - DNA, 2145 bp, Homo sapiens
  misc_feature (16)..(16): n is a, c, g, or t
  misc_feature (100)..(100): n is a, c, g, or t
  misc_feature (180)..(180): n is a, c, g, or t
  misc_feature (253)..(253): n is a, c, g, or t
  misc_feature (267)..(267): n is a, c, g, or t
  misc_feature (271)..(271): n is a, c, g, or t
  misc_feature (275)..(275): n is a, c, g, or t
  misc_feature (277)..(277): n is a, c, g, or t
  misc_feature (303)..(303): n is a, c, g, or t
  misc_feature (309)..(309): n is a, c, g, or t
  misc_feature (312)..(312): n is a, c, g, or t
  misc_feature (340)..(340): n is a, c, g, or t
  misc_feature (345)..(345): n is a, c, g, or t
  misc_feature (348)..(348): n is a, c, g, or t
  misc_feature (367)..(367): n is a, c, g, or t
  misc_feature (373)..(373): n is a, c, g, or t
gtggccgccgcgggcnccgcccggcgtgtcctgctgctgctgctgctgggggtcctgtccgccgggctgcggccaggcgccctggccaccgagcactacncgccgctctccctgctcaagcaggagctgcagcaccggcagcagcaggaggccccggcgggcggcggcggctgcagcccncagtccggggactggggggaccagtactctgccgagtgcggcgagtcatcctttttgaacttccatgactcanactgcgaacccaanggancaanancctgtgactccttgctttccctcaanactganaanattctgagccaggccaagtctattgcanaacanaanaaattcccgtttgccactnataatnacaacacaaatgaagagttagctattgcttatgtcttgattggcagtggtctgtatgatgaagcaatacggcatttttcaacaatgcttcaggaggagcctgatctggttagtgcaatttatggccgagggatagcctatggaaagaagggactacatgacattaagaatgctgagcttgctctgttcgaactgagccgagtaattaccttggaaccagatcgtccagaggtatttgagcagcgagcagaaattctgtccctctgggacgaattaatgaagcagtgaatgacctcactaaagctatccaactgcagccctcagcacggctgtacagacatcggggaaccctgtacttcatatcagaggactatgcaacagcccatgagactttcagcagtccttagaactgaacaaaaaccagcctatagctatgctatacaaaggtttaactttctttcacagaggacttctgaaggaagctattgaatccttcaaagaagctttgaagcagaaagttgactttattgatgcatataaaagtctagggcaggcatatagagaactgggcaattttgaagcagccactgagagctttcaaaaggcactgttgctcaaccaaaatcatgtgcaaaccctccagctccggggaatgatgctctaccaccacggcagcttacaggaagcccttaagaactttaagcggtgtctgcagctagagccatataatgaagtgtgccagtatatgaaagggctcagccatgttgccatgggacagttttatgaagggataaaagcacaaacaaaagttatgctgaatgatcctctcccaggccagaaggctagccctgagtatcttaaagtaaagtatctccgagagtattctcgatatcttcatgcacaccttgataccccccttacggaatataacattgatgtggatctgcctggaagctttaaggaccactgggctaaaaatttgcctttcctcatagaagactacgaagagcagccagggttgcaaccccacataaaagatgtgttacatcagaattttgagagttataagcctgaagtacaggagctgatttgtgtggctgatcgtttgggatccctgatgcaatatgaaacacctggtttcctgccaaacaagagaatacacagagctatgggtttggccgcattggaggtcatgcaagccgtgcagcgtacatggaccaactcgaaagttcgaatgaatgggaagacacggttgatgcagtggagagacatgtttgacattgcagttaaatggagaaggattgctgacccagaccagcccgtgctgtggttagatcaaatgccagcacgaagtcttagcagaggttttaacaaccacattaatttaatcaggggtcaggtgatcaacatgagatacctagaatattttgagaaaatacttcattttattaaagacagaattcttgtttatcatggagctaataatcctaaaggattgctggaagttcgggaagccctggaaaaggtacacaaagtagaagaccttcttccgattatgaaggtaactttagcatcagaatggcagtccatgtttttagaggaaaagaaaaccaacagcacttttttaaaaagaactcagaattattaaatgctatttgaaatcactcgtatgaacacattctgaataataaccaaaataaaagaacctacaggcatcagactcaaacagaaaaaacaacttgtgaggaagcagttaatatagaaaaaagaaaa

SEQ ID NO: 384257 - DNA, 3623 bp, Homo sapiens
gcctagcgcggggaaggaccggaactccgggcgggcggcttgttgataatatggcggctggagctgcctgggcatcccgaggaggcggtggggcccactcccggaagaagggtcccttttcgcgctagtgcagcggcccctctggacccggaagtccgggccggttgctgaatgaggggagccgggccctccccgcgccagtccccccgcaccctccgtcccgacccgggccccgccatgtccttcttccggcggaaagtgaaaggcaaagaacaagagaagacctcagatgtgaagtccattaaagcttcaatatccgtacattccccacaaaaaagcactaaaaatcatgccttgctggaggctgcaggaccaagtcatgttgcaatcaatgccatttctgccaacatggactccttttcaagtagcaggacagccacacttaagaagcagccaagccacatggaggccgctcattttggtgacctgggcagatcttgtctggactaccagactcaagagaccaaatcaagcctttctaagacccttgaacaagtcttgcacgacactattgtcctcccttacttcattcaattcatggaacttcggcgaatggagcatttggtgaaattttggttagaggctgaaagttttcattcaacaacttggtcgcgaataagagcacacagtctaaacacagtgaagcagagctcactggctgagcctgtctctccatctaaaaagcatgaaactacagcgtcttttttaactgattctcttgataagagattggaggattctggctcagcacagttgtttatgactcattcagaaggaattgacctgaataatagaactaacagcactcagaatcacttgctgctttcccaggaatgtgacagtgcccattctctccgtcttgaaatggccagagcaggaactcaccaagtttccatggaaacccaagaatcttcctctacacttacagtagccagtagaaatagtcccgcttctccactaaaagaattgtcaggaaaactaatgaaaagtatagaacaagatgcagtgaatacttttaccaaatatatatctccagatgctgctaaaccaataccaattacagaagcaatgagaaatgacatcatagcaaggatttgtggagaagatggacaggtggatcccaactgtttcgttttggcacagtccatagtctttagtgcaatggagcaagagcactttagtgagtttctgcgaagtcaccatttctgtaaataccagattgaagtgctgaccagtggaactgtttacctggctgacattctcttctgtgagtcagccctcttttatttctctgagtacatggaaaaagaggatgcagtgaatatcttacaattctggttggcagcagataacttccagtctcagcttgctgccaaaaaggggcaatatgatggacaggaggcacagaatgatgccatgattttatatgacaagtacttctccctccaagccacacatcctcttggatttgatgatgttgtacgattagaaattgaatccaatatctgcagggaaggtgggccactccccaactgtttcacaactccattacgtcaggcctggacaaccatggagaaggtctttttgcctggctttctgtccagcaatctttattataaatatttgaatgatctcatccattcggttcgaggagatgaatttctgggcgggaacgtgtcgctgactgctcctggctctgttggccctcctgatgagtctcacccagggagttctgacagctctgcgtctcagtccagtgtgaaaaaagccagtattaaaatactgaaaaattttgatgaagcgataattgtggatgcggcaagtctggatccagaatctttatatcaacggacatatgccgggaagatgacatttggaagagtcagtgacttggggcaattcatccgagaatctgagcctgaacctgatgtaaggaaatcaaaaggatccatgttctcacaagctatgaagaaatgggtgcaaggaaatactgatgaggcccaggaagagctagcttggaagattgctaaaatgatagtcagtgacattatgcagcaggctcagtatgatcaaccgttagagaaatctacaaagttatgactcaaaacttgagataaaggaaatctgcttgtgaaaaataagagaacttttttcccttggttggattcttcaacacagccaatgaaaacagcactatatttctgatctgtcactgttgtttccaggagagaatgggagacaatcctagacttccaccataatgcagttacctgtaggcataattgatgcacatgatgttcacacagtgagagtcttaaagatacaaaatggtattgtttacattactagaaaattattagttttccaatggcaataacccatttatgagagtgttttagcctactggaatagacagggaccacatcctctgggaagcagataagcatagaactgatacttgatgcacactcgtagtggtaactcatccctaatcagcattgtaaagcaggtgccagaggtggtttgctttgtccttccaaagcaggtgagtcagccccaccgagagccaggcagctttgagtggcagcgtggtgctagcagcttcagcggaacagggtgagagttaattatgcagtcttcttgacagcggcattaatttggaaggaaactgacaagtcatgggtcaagtttcagtgacttcctccttcctctgatggcagtatatagttttcacattttaattcctcctcctgagatgcactatacttaaaaccattctctcccctgctaacagaagggtgtgaatctggtttactttgagcattaggatttgcccctttggaattctgcactccagttacttaactttcccttcagaatacatgtggaaagaaagaaagaaatagcgatgactccacttttgcccctgtggcaccttgaacaaagcagttcttcccaaattatactttttttttttttaaataaggtgagcaggatgactggggagagagaaacatttgactttgactgcctcccccattctttgctgtgagctggaaagtgtgcagttggtcgtctttcttctcctttctttaggatagtaagagactcactcactgcacttctgctcagttggcttctgcatcgggatcacacagccatcagcaggactgcccagttggtgagcacactccattgaccacgtggcgccagcgcttcctcaatgcacatgattgagaggaaagaaagttctcttagatgttactgcttttgctcagactttgcaaaaaaaaatatatatatatatatgtataaatatataattattaatcacttttgtccttgagaaagtcttgaatgaacagagaatttattccattgcaatatttgattgtatagaggcacactgtttcatcgacagaagaagcaaaaaggctttgtgtaagtttttggtactatgtaccacctctgttattcttttaaagctgaagtattcatgtacttaaaccatattatatttaattgtgtttgattttaaaatatatatatatgaattctattta

SEQ ID NO: 384258 - DNA, 3960 bp, Homo sapiens
  misc_feature (3956)..(3956): n is a, c, g, or t
gcctagcgcggggaaggaccggaactccgggcgggcggcttgttgataatatggcggctggagctgcctgggcatcccgaggaggcggtggggcccactcccggaagaagggtcccttttcgcgctagtgcagcggcccctctggacccggaagtccgggccggttgctgaatgaggggagccgggccctccccgcgccagtccccccgcaccctccgtcccgacccgggccccgccatgtccttcttccggcggaaagtgaaaggcaaagaacaagagaagacctcagatgtgaagtccattaaagcttcaatatccgtacattccccacaaaaaagcactaaaaatcatgccttgctggaggctgcaggaccaagtcatgttgcaatcaatgccatttctgccaacatggactccttttcaagtagcaggacagccacacttaagaagcagccaagccacatggaggccgctcattttggtgacctgggcagatcttgtctggactaccagactcaagagaccaaatcaagcctttctaagacccttgaacaagtcttgcacgacactattgtcctcccttacttcattcaattcatggaacttcggcgaatggagcatttggtgaaattttggttagaggctgaaagttttcattcaacaacttggtcgcgaataagagcacacagtctaaacacagtgaagcagagctcactggctgagcctgtctctccatctaaaaagcatgaaactacagcgtcttttttaactgattctcttgataagagattggaggattctggctcagcacagttgtttatgactcattcagaaggaattgacctgaataatagaactaacagcactcagaatcacttgctgctttcccaggaatgtgacagtgcccattctctccgtcttgaaatggccagagcaggaactcaccaagtttccatggaaacccaagaatcttcctctacacttacagtagccagtagaaatagtcccgcttctccactaaaagaattgtcaggaaaactaatgaaaagtatagaacaagatgcagtgaatacttttaccaaatatatatctccagatgctgctaaaccaataccaattacagaagcaatgagaaatgacatcatagcaaggatttgtggagaagatggacaggtggatcccaactgtttcgttttggcacagtccatagtctttagtgcaatggagcaagagcactttagtgagtttctgcgaagtcaccatttctgtaaataccagattgaagtgctgaccagtggaactgtttacctggctgacattctcttctgtgagtcagccctcttttatttctctgagtacatggaaaaagaggatgcagtgaatatcttacaattctggttggcagcagataacttccagtctcagcttgctgccaaaaaggggcaatatgatggacaggaggcacagaatgatgccatgattttatatgacaagtacttctccctccaagccacacatcctcttggatttgatgatgttgtacgattagaaattgaatccaatatctgcagggaaggtgggccactccccaactgtttcacaactccattacgtcaggcctggacaaccatggagaaggtctttttgcctggctttctgtccagcaatctttattataaatatttgaatgatctcatccattcggttcgaggagatgaatttctgggcgggaacgtgtcgctgactgctcctggctctgttggccctcctgatgagtctcacccagggagttctgacagctctgcgtctcagtccagtgtgaaaaaagccagtattaaaatactgaaaaattttgatgaagcgataattgtggatgcggcaagtctggatccagaatctttatatcaacggacatatgccgggaagatgacatttggaagagtcagtgacttggggcaattcatccgagaatctgagcctgaacctgatgtaaggaaatcaaaaggatccatgttctcacaagctatgaagaaatgggtgcaaggaaatactgatgaggcccaggaagagctagcttggaagattgctaaaatgatagtcagtgacattatgcagcaggctcagtatgatcaaccgttagagaaatctacaaagttatgactcaaaacttgagataaaggaaatctgcttgtgaaaaataagagaacttttttcccttggttggattcttcaacacagccaatgaaaacagcactatatttctgatctgtcactgttgtttccaggagagaatgggagacaatcctagacttccaccataatgcagttacctgtaggcataattgatgcacatgatgttcacacagtgagagtcttaaagatacaaaatggtattgtttacattactagaaaattattagttttccaatggcaataacccatttatgagagtgttttagcctactggaatagacagggaccacatcctctgggaagcagataagcatagaactgatacttgatgcacactcgtagtggtaactcatccctaatcagcattgtaaagcaggtgccagaggtggtttgctttgtccttccaaagcaggtgagtcagccccaccgagagccaggcagctttgagtggcagcgtggtgctagcagcttcagcggaacagggtgagagttaattatgcagtcttcttgacagcggcattaatttggaaggaaactgacaagtcatgggtcaagtttcagtgacttcctccttcctctgatggcagtatatagttttcacattttaattcctcctcctgagatgcactatacttaaaaccattctctcccctgctaacagaagggtgtgaatctggtttactttgagcattaggatttgcccctttggaattctgcactccagttacttaactttcccttcagaatacatgtggaaagaaagaaagaaatagcgatgactccacttttgcccctgtggcaccttgaacaaagcagttcttcccaaattatactttttttttttttaaataaggtgagcaggatgactggggagagagaaacatttgactttgactgcctcccccattctttgctgtgagctggaaagtgtgcagttggtcgtctttcttctcctttctttaggatagtaagagactcactcactgcacttctgctcagttggcttctgcatcgggatcacacagccatcagcaggactgcccagttggtgagcacactccattgaccacgtggcgccagcgcttcctcaatgcacatgattgagaggaaagaaagttctcttagatgttactgcttttgctcagactttgcaaaaaaaaatatatatatatatatgtataaatatataattattaatcacttttgtccttgagaaagtcttgaatgaacagagaatttattccattgcaatatttgattgtatagaggcacactgtttcatcgacagaagaagcaaaaaggctttgtgtaagtttttggtactatgtaccacctctgttattcttttaaagctgaagtattcatgtacttaaaccatattatatttaattgtgtttgattttaaaatatatatatatgaattctatttaaaattgtgtcaactttctgctttcagggcatttatggctcttctgttgaaatatattgatctttccaaatattttcatttgctttctaaaaacccagaacatgagccactactggactttgccttgtgtttgaagtgtatggcataaacccaaggtttttattagtcatctatgctgtgattaattcattttgttcttttaacaaaatatttccatccacttcacattgcttcaatctttaacagaaaagcaatataaaggttatagaataaaatgtggttttgggccaaagaccaatccaccacatgcgcaccaactccacgcacaaagcgngcgg

SEQ ID NO: 384259 - DNA, 3986 bp, Homo sapiens
gaactcctgacctcaggtgatccacccaccttggcctcccaaagtactgcgattgcaggcatgagccaccatgcctggcctgaggaatatttttctaggttccccccaccccaagcatttattctgcaattttagttttgttcctaaagcaagcaaggtttaaggatttaaaaataatccgtattttagaatgctttctggctttgttactttttatccacagtagaagttctcagagaatgatctccctcttttaatttaactttttggcacagtattttgagaattataaataatattagaatgttttctggctgggtgtggtggctcatgcctgtaatcctggctacttgggaggctgaggcaggagaatcacttgaacatgggaggcagaggttgcagtgagccgaggtcatgccactgcactccagcctgggtgacagagcaagactctgtctgggaaaaaaaaaaaaaaaaaaaagagtgttttctttcctattttccaccacttgattaagttacttttcctcttaagtattttttgctgagtatgctgacttaagagtaatgttacaaaatttaatttttaaagttctctgaaagcccctttatgagagttttaggctatcaaattgtgtttaattcttaacaattttttgaaaaattatagcttcaatatccgtacattccccacaaaaaagcactaaaaatcatgccttgctggaggctgcaggaccaagtcatgttgcaatcaatgccatttctgccaacatggactccttttcaagtagcaggacagccacacttaagaagcagccaagccacatggaggccgctcattttggtgacctgggcagatcttgtctggactaccagactcaagagaccaaatcaagcctttctaagacccttgaacaagtcttgcacgacactattgtcctcccttacttcattcaattcatggaacttcggcgaatggagcatttggtgaaattttggttagaggctgaaagttttcattcaacaacttggtcgcgaataagagcacacagtctaaacacagtgaagcagagctcactggctgagcctgtctctccatctaaaaagcatgaaactacagcgtcttttttaactgattctcttgataagagattggaggattctggctcagcacagttgtttatgactcattcagaaggaattgacctgaataatagaactaacagcactcagaatcacttgctgctttcccaggaatgtgacagtgcccattctctccgtcttgaaatggccagagcaggaactcaccaagtttccatggaaacccaagaatcttcctctacacttacagtagccagtagaaatagtcccgcttctccactaaaagaattgtcaggaaaactaatgaaaagtatagaacaagatgcagtgaatacttttaccaaatatatatctccagatgctgctaaaccaataccaattacagaagcaatgagaaatgacatcatagcaaggatttgtggagaagatggacaggtggatcccaactgtttcgttttggcacagtccatagtctttagtgcaatggagcaagagcactttagtgagtttctgcgaagtcaccatttctgtaaataccagattgaagtgctgaccagtggaactgtttacctggctgacattctcttctgtgagtcagccctcttttatttctctgagtacatggaaaaagaggatgcagtgaatatcttacaattctggttggcagcagataacttccagtctcagcttgctgccaaaaaggggcaatatgatggacaggaggcacagaatgatgccatgattttatatgacaagtacttctccctccaagccacacatcctcttggatttgatgatgttgtacgattagaaattgaatccaatatctgcagggaaggtgggccactccccaactgtttcacaactccattacgtcaggcctggacaaccatggagaaggtctttttgcctggctttctgtccagcaatctttattataaatatttgaatgatctcatccattcggttcgaggagatgaatttctgggcgggaacgtgtcgctgactgctcctggctctgttggccctcctgatgagtctcacccagggagttctgacagctctgcgtctcagtccagtgtgaaaaaagccagtattaaaatactgaaaaattttgatgaagcgataattgtggatgcggcaagtctggatccagaatctttatatcaacggacatatgccgggaagatgacatttggaagagtcagtgacttggggcaattcatccgagaatctgagcctgaacctgatgtaaggaaatcaaaaggatccatgttctcacaagctatgaagaaatgggtgcaaggaaatactgatgaggcccaggaagagctagcttggaagattgctaaaatgatagtcagtgacattatgcagcaggctcagtatgatcaaccgttagagaaatctacaaagttatgactcaaaacttgagataaaggaaatctgcttgtgaaaaataagagaacttttttcccttggttggattcttcaacacagccaatgaaaacagcactatatttctgatctgtcactgttgtttccaggagagaatgggagacaatcctagacttccaccataatgcagttacctgtaggcataattgatgcacatgatgttcacacagtgagagtcttaaagatacaaaatggtattgtttacattactagaaaattattagttttccaatggcaataacccatttatgagagtgttttagcctactggaatagacagggaccacatcctctgggaagcagataagcatagaactgatacttgatgcacactcgtagtggtaactcatccctaatcagcattgtaaagcaggtgccagaggtggtttgctttgtccttccaaagcaggtgagtcagccccaccgagagccaggcagctttgagtggcagcgtggtgctagcagcttcagcggaacagggtgagagttaattatgcagtcttcttgacagcggcattaatttggaaggaaactgacaagtcatgggtcaagtttcagtgacttcctccttcctctgatggcagtatatagttttcacattttaattcctcctcctgagatgcactatacttaaaaccattctctcccctgctaacagaagggtgtgaatctggtttactttgagcattaggatttgcccctttggaattctgcactccagttacttaactttcccttcagaatacatgtggaaagaaagaaagaaatagcgatgactccacttttgcccctgtggcaccttgaacaaagcagttcttcccaaattatactttttttttttttaaataaggtgagcaggatgactggggagagagaaacatttgactttgactgcctcccccattctttgctgtgagctggaaagtgtgcagttggtcgtctttcttctcctttctttaggatagtaagagactcactcactgcacttctgctcagttggcttctgcatcgggatcacacagccatcagcaggactgcccagttggtgagcacactccattgaccacgtggcgccagcgcttcctcaatgcacatgattgagaggaaagaaagttctcttagatgttactgcttttgctcagactttgcaaaaaaaaatatatatatatatatgtataaatatataattattaatcacttttgtccttgagaaagtcttgaatgaacagagaatttattccattgcaatatttgattgtatagaggcacactgtttcatcgacagaagaagcaaaaaggctttgtgtaagtttttggtactatgtaccacctctgttattcttttaaagctgaagtattcatgtacttaaaccatattatatttaattgtgtttgattttaaaatatatatatatgaattctattta

SEQ ID NO: 384260 - DNA, 1971 bp, Homo sapiens
ccatccggcgcccaggctgtgatttccagtgtcaatgagacctccctcatgctggagtggacccctcccagcgacttgatataagtcgctgactgctcctggctctgttggccctcctgatgagtctcacccagggagttctgacagctctgcgtctcagtccagtgtgaaaaaagccagtattaaaatactgaaaaattttgatgaagcgataattgtggatgcggcaagtctggatccagaatctttatatcaacggacatatgccgggaagatgacatttggaagagtcagtgacttggggcaattcatccgagaatctgagcctgaacctgatgtaaggaaatcaaaaggatccatgttctcacaagctatgaagaaatgggtgcaaggaaatactgatgaggcccaggaagagctagcttggaagattgctaaaatgatagtcagtgacattatgcagcaggctcagtatgatcaaccgttagagaaatctacaaagttatgactcaaaacttgagataaaggaaatctgcttgtgaaaaataagagaacttttttcccttggttggattcttcaacacagccaatgaaaacagcactatatttctgatctgtcactgttgtttccaggagagaatgggagacaatcctagacttccaccataatgcagttacctgtaggcataattgatgcacatgatgttcacacagtgagagtcttaaagatacaaaatggtattgtttacattactagaaaattattagttttccaatggcaataacccatttatgagagtgttttagcctactggaatagacagggaccacatcctctgggaagcagataagcatagaactgatacttgatgcacactcgtagtggtaactcatccctaatcagcattgtaaagcaggtgccagaggtggtttgctttgtccttccaaagcaggtgagtcagccccaccgagagccaggcagctttgagtggcagcgtggtgctagcagcttcagcggaacagggtgagagttaattatgcagtcttcttgacagcggcattaatttggaaggaaactgacaagtcatgggtcaagtttcagtgacttcctccttcctctgatggcagtatatagttttcacattttaattcctcctcctgagatgcactatacttaaaaccattctctcccctgctaacagaagggtgtgaatctggtttactttgagcattaggatttgcccctttggaattctgcactccagttacttaactttcccttcagaatacatgtggaaagaaagaaagaaatagcgatgactccacttttgcccctgtggcaccttgaacaaagcagttcttcccaaattatactttttttttttttaaataaggtgagcaggatgactggggagagagaaacatttgactttgactgcctcccccattctttgctgtgagctggaaagtgtgcagttggtcgtctttcttctcctttctttaggatagtaagagactcactcactgcacttctgctcagttggcttctgcatcgggatcacacagccatcagcaggactgcccagttggtgagcacactccattgaccacgtggcgccagcgcttcctcaatgcacatgattgagaggaaagaaagttctcttagatgttactgcttttgctcagactttgcaaaaaaaaatatatatatatatatgtataaatatataattattaatcacttttgtccttgagaaagtcttgaatgaacagagaatttattccattgcaatatttgattgtatagaggcacactgtttcatcgacagaagaagcaaaaaggctttgtgtaagtttttggtactatgtaccacctctgttattcttttaaagctgaagtattcatgtacttaaaccatattatatttaattgtgtttgattttaaaatatatatatatgaattctattta

SEQ ID NO: 384261 - DNA, 2938 bp, Homo sapiens
  misc_feature (898)..(900): n is a, c, g, or t
  misc_feature (1007)..(1008): n is a, c, g, or t
  misc_feature (1191)..(1191): n is a, c, g, or t
  misc_feature (1193)..(1193): n is a, c, g, or t
tttataagcagtttacaactacttggcatcactagctcagaagctcaaaatgtatatacaaagaaatgattagaatttatcttaactgaaagcactagtttaaacagcctagagtcttgtagaaattgttatccaaaacatgcagaggcagcaagagttgcccaaaaccacattatctatactttatatgcttttctgttaaagattgaagcaatgtgaagtggatggaaatatttgcttaaaagaacaaaatgaattaacacagcatagatgactaataaaaaccttgggtttatgccatacacttcaaactcaaggcaaagtccagtagtggctcatgttctgggtttttagaaagcaaatgaaaatatttggaaagatcaatatatttcaacagaagagccataaatgccctgaaagcagaaagttgacacaattttaaatagaattattgaattaaacaggaccttgcctcaagaaataatctaccaacaattaacttgttttaaagcaaagttaggaagtgagcatgttcaaattattaaataaaaaagtaagctgtgtatttcattcatagaaatagaggctggcctacttcggatgattctcagcatgtgattacagatgtgggcttatacatcctagggagttaaggcgtactctggcttggatagagtagagctctttgaaactcttctctcacccagctagtttatatagactagagaactagaatgtagcagcatactctgtcttagaagcccttttatatggagctggtctggaaggtttgaaaacataacaaatgtgttggtgtctcccaatgtattgctagattcttacccaagagcattatcctggttagggtttggtttggttttgttttgtttttaatgtnnnccacaaactaacactagatgttagttctttcatcaagtgaggagagtagaagaaaagtccagaactctgaaacaccttttcaaaagtttttcaagccatgatgtttnnaagttaaatgctctgttatgtaagcaatataatcagtttttattaatgtaacattccttagtgttttggggtatcacacaaaaaagaatatccatatctggaagcaacagcttttaaataagagcattgtggtggtggtggtgatagtggtttttttttttttttttgagttggagtctcgcncngttgcccaggttggagtgcagtggcacgatctcagctcgcttcaacctctgctcccaggttcaagcaattcttctgcctcagcctcctgagtagctgggattataggcacctgctaccatgcctggctgatttttattattttagtagagacaggtttcaccatgttggccaggctggtcttgaactcttaacctcaggtgaatcacccacctcggcctcccaaagtgctggaattacaggcatgaaccaccatggccagccaaataagagcatttttaatgtaaaattatgcatgaaatgtacattcaattttgtctttgtttactaggatccatgttctcacaagctatgaagaaatgggtgcaaggaaatactgatgagtctgatctgtcactgttgtttccaggagagaatgggagacaatcctagacttccaccataatgcagttacctgtaggcataattgatgcacatgatgttcacacagtgagagtcttaaagatacaaaatggtattgtttacattactagaaaattattagttttccaatggcaataacccatttatgagagtgttttagcctactggaatagacagggaccacatcctctgggaagcagataagcatagaactgatacttgatgcacactcgtagtggtaactcatccctaatcagcattgtaaagcaggtgccagaggtggtttgctttgtccttccaaagcaggtgagtcagccccaccgagagccaggcagctttgagtggcagcgtggtgctagcagcttcagcggaacagggtgagagttaattatgcagtcttcttgacagcggcattaatttggaaggaaactgacaagtcatgggtcaagtttcagtgacttcctccttcctctgatggcagtatatagttttcacattttaattcctcctcctgagatgcactatacttaaaaccattctctcccctgctaacagaagggtgtgaatctggtttactttgagcattaggatttgcccctttggaattctgcactccagttacttaactttcccttcagaatacatgtggaaagaaagaaagaaatagcgatgactccacttttgcccctgtggcaccttgaacaaagcagttcttcccaaattatactttttttttttttaaataaggtgagcaggatgactggggagagagaaacatttgactttgactgcctcccccattctttgctgtgagctggaaagtgtgcagttggtcgtctttcttctcctttctttaggatagtaagagactcactcactgcacttctgctcagttggcttctgcatcgggatcacacagccatcagcaggactgcccagttggtgagcacactccattgaccacgtggcgccagcgcttcctcaatgcacatgattgagaggaaagaaagttctcttagatgttactgcttttgctcagactttgcaaaaaaaaatatatatatatatatgtataaatatataattattaatcacttttgtccttgagaaagtcttgaatgaacagagaatttattccattgcaatatttgattgtatagaggcacactgtttcatcgacagaagaagcaaaaaggctttgtgtaagtttttggtactatgtaccacctctgttattcttttaaagctgaagtattcatgtacttaaaccatattatatttaattgtgtttgattttaaaatatatatatatgaattctattta

SEQ ID NO: 384262 - DNA, 2098 bp, Homo sapiens
gcctagcgcggggaaggaccggaactccgggcgggcggcttgttgataatatggcggctggagctgcctgggcatcccgaggaggcggtggggcccactcccggaagaagggtcccttttcgcgctagtgcagcggcccctctggacccggaagtccgggccggttgctgaatgaggggagccgggccctccccgcgccagtccccccgcaccctccgtcccgacccgggccccgccatgtccttcttccggcggaaagtgaaaggcaaagaacaagagaagacctcagatgtgaagtccattaaagcttcaatatccgtacattccccacaaaaaagcactaaaaatcatgccttgctggaggctgcaggaccaagtcatgttgcaatcaatgccatttctgccaacatggactccttttcaagtagcaggacagccacacttaagaagcagccaagccacatggaggccgctcattttggtgacctgggcagatcttgtctggactaccagactcaagagaccaaatcaagcctttctaagacccttgaacaagtcttgcacgacactattgtcctcccttacttcattcaattcatggaacttcggcgaatggagcatttggtgaaattttggttagaggctgaaagttttcattcaacaacttggtcgcgaataagagcacacagtctaaacacagtgaagcagagctcactggctgagcctgtctctccatctaaaaagcatgaaactacagcgtcttttttaactgattctcttgataagagattggaggattctggctcagcacagttgtttatgactcattcagaaggaattgacctgaataatagaactaacagcactcagaatcacttgctgctttcccaggaatgtgacagtgcccattctctccgtcttgaaatggccagagcaggaactcaccaagtttccatggaaacccaagaatcttcctctacacttacagtagccagtagaaatagtcccgcttctccactaaaagaattgtcaggaaaactaatgaaaagtatagaacaagatgcagtgaatacttttaccaaatatatatctccagatgctgctaaaccaataccaattacagaagcaatgagaaatgacatcatagcaaggatttgtggagaagatggacaggtggatcccaactgtttcgttttggcacagtccatagtctttagtgcaatggagcaagagcactttagtgagtttctgcgaagtcaccatttctgtaaataccagattgaagtgctgaccagtggaactgtttacctggctgacattctcttctgtgagtcagccctcttttatttctctgagtacatggaaaaagaggatgcagtgaatatcttacaattctggttggcagcagataacttccagtctcagcttgctgccaaaaaggggcaatatgatggacaggaggcacagaatgatgccatgattttatatgacaagtacttctccctccaagccacacatcctcttggatttgatgatgttgtacgattagaaattgaatccaatatctgcagggaaggtgggccactccccaactgtttcacaactccattacgtcaggcctggacaaccatggagaaggtctttttgcctggctttctgtccagcaatctttattataaatatttgaatgatctcatccattcggttcgaggagatgaatttctgggcgggaacgtgtcgctgactgctcctggctctgttggccctcctgatgagtctcacccagggagttctgacagctctgcgtctcagtccagtgtgaaaaaagccagtattaaaatactgaaaaattttgatgaagcgataattgtggatgcggcaagtctggatccagaatctttatatcaacggacatatgccgggaagatgacatttggaagagtcagtgacttggggcaattcatccgagaatctgagcctgaacctgatgtaaggaaatcaaaaggatccatgttctcacaagctatgaagaaatgggtgcaaggaaatactgatgagcccggagactagcttgtagactgctaatatagtcacataa

SEQ ID NO: 384263 - DNA, 1878 bp, Homo sapiens
gcctagcgcggggaaggaccggaactccgggcgggcggcttgttgataatatggcggctggagctgcctgggcatcccgaggaggcggtggggcccactcccggaagaagggtcccttttcgcgctagtgcagcggcccctctggacccggaagtccgggccggttgctgaatgaggggagccgggccctccccgcgccagtccccccgcaccctccgtcccgacccgggccccgccatgtccttcttccggcggaaagtgaaaggcaaagaacaagagaagacctcagatgtgaagtccattaaagcttcaatatccgtacattccccacaaaaaagcactaaaaatcatgccttgctggaggctgcaggaccaagtcatgttgcaatcaatgccatttctgccaacatggactccttttcaagtagcaggacagccacacttaagaagcagccaagccacatggaggccgctcattttggtgacctgggcagatcttgtctggactaccagactcaagagaccaaatcaagcctttctaagacccttgaacaagtcttgcacgacactattgtcctcccttacttcattcaattcatggaacttcggcgaatggagcatttggtgaaattttggttagaggctgaaagttttcattcaacaacttggtcgcgaataagagcacacagtctaaacacagtgaagcagagctcactggctgagcctgtctctccatctaaaaagcatgaaactacagcgtcttttttaactgattctcttgataagagattggaggattctggctcagcacagttgtttatgactcattcagaaggaattgacctgaataatagaactaacagcactcagaatcacttgctgctttcccaggaatgtgacagtgcccattctctccgtcttgaaatggccagagcaggaactcaccaagtttccatggaaacccaagaatcttcctctacacttacagtagccagtagaaatagtcccgcttctccactaaaagaattgtcaggaaaactaatgaaaagtatagaacaagatgcagtgaatacttttaccaaatatatatctccagatgctgctaaaccaataccaattacagaagcaatgagaaatgacatcataggtaagcagtgcttgaaactatggcaaaaaaaaaaagtgacaaaaaatgcacagaactgacaattttcgttatggactaagataattttttcttaacatggaatttagcagttcccttcctaattggttttctgagtatttttaatatcggataatagctcactttaaaagttcctcggctgcattcggtgcgggggtcttggcctgggccaggtgggctgcagtgtagcgggtgctcaggcctgcccgctgctgagcagccgggccggcgggcggctacgctaaccggcacagaccaccggatggactggccggcagccccgcaccagtgcacgaagtgggcgggacagaaacttctggggttggaagtccagtgaggctaaaagccggtaccaaagtctctaggcatcagggctgcagcccaagagtctcacgaccagtgggcaactggatggccagacaggtgtctcagtggtggcctctccgtctcagggcttcatcccacttctcagtgggcctgacgtccctgggcaccctggatgtctacctgcattagccagagccatcacatggcctgtgacttgcctttttttgccagttgattgtgccacacacagtgtcatttctgtgtcatttggcacagctggaggtgcaaggaggagggcagcctcatgtccagtcccagtttcacgtaactttattcttctgaataaagacaatttgctaacctta

SEQ ID NO: 384264 - DNA, 283 bp, Homo sapiens
ttcactaaaagtttgcatccagctgtgtaggtagtgtttgtttcttgttaacttttttttcgtctaaaagaatactttaaaacttttcaatctcaaatgactgtaacttgctgacaggtgttaacagaagaagtagatctttttgttttttgcttatgacctgtattttaatatttgagcttatagattagagattgtgagagaaatctgtttatagtcttattttcccttgtgtattttttcttcctagtacatggaaaaagaggatgcagtgaatatctta

SEQ ID NO: 384265 - DNA, 443 bp, Homo sapiens
gattgttagtttctttgcctcagttgtagtctgatccttacagcttttaaacaacagtagagttcaccgtcaagaactaaggatggttggcaggcagatagaaaggtagcaagttgacccaactatctctggggaagtgggaacaaagaaaggttacatcagcactgtcatcacatagctctatagttctaggcctgcaggctcaatcaagtagccttgtataagattctctggaggaggtgctgaaagttgcttatacttgctatggaatttgattttacttcggatatctttttaccataggtacttctccctccaagccacacatcctcttggatttgatgatgttgtacgattagaaattgaatccaatatctgcagggaaggtgggccactccccaactgtttcacaactccattacgtcaggcctggacaaccatgg

SEQ ID NO: 384266 - DNA, 406 bp, Homo sapiens
atcctcttggatttgatgatgttgtacgattagaaattgaatccaatatctgcagggaaggtgggccactccccaactgtttcacaactccattacgtcaggcctggacaaccatggagaaggtaacccagaacttcaaacgtatcaaactacaagaagttttattggtagaactcataaaatataaggtgggaaaaccaagcagaatagcacagtggaaattgaagcagtccagcaaagtgattaagagcagaggccttgagtctggcctggtatgtacagtcacgtgccacataacattttagtcaacagtggactgcgtgtacgatggtcctgtacgattataatggatcaaagctggtagtgcaataataacaaaagttagaaaaaataaattttaataagt

SEQ ID NO: 384267 - DNA, 304 bp, Homo sapiens
gtgaatcacccacctcggcctcccaaagtgctggaattacaggcatgaaccaccatggccagccaaataagagcatttttaatgtaaaattatgcatgaaatgtacattcaattttgtctttgtttactaggatccatgttctcacaagctatgaagaaatgggtgcaaggaaatactgatgaggtaaatcctacctttaggataaaaagatttctgtttataagtgccaccctcatgtaagtgaggtttaaaattttccttttctttaggtcccatgtttaagcagcatggcacatttatgtt

SEQ ID NO: 384268 - DNA, 697 bp, Homo sapiens
cagtgctgtgactacaggagggagtcagtgaatgtctgcatgtgtgtctttaccatccctcttgaatatgctctagggttaattcctagaagtagaattactctattgaaaattggcaatatttttcattctaatatctattgccaacatgggaaagcaagtctggatgccagtccttgttatatgccccttgggtaagttacgtaacctctttaagcttctgttcactcatattttaacaaggaaaattacaatattttacctcacaaaattgtagtcagcttctggctgtcttaaactctggtatatagtaaacactaagtgttggtgtccatccttaatttgtaataataggtcacttgttagagaaatgcaccttaccattttcttttcttttcttttttcagttatgactcaaaacttgagataaaggaaatctgcttgtgaaaaataagagaacttttttcccttggttggattcttcaacacagccaatgaaaacagcactatatttctgatctgtcactgttgtttccaggagagaatgggagacaatcctagacttccaccataatgcagttacctgtaggcataattgatgcacatgatgttcacacagtgagagtcttaaagatacaaaatggtattgtttacattactagaaaattattagttttccaatggcaataacccattt

SEQ ID NO: 384269 - DNA, 3569 bp, Homo sapiens
gcctagcgcggggaaggaccggaactccgggcgggcggcttgttgataatatggcggctggagctgcctgggcatcccgaggaggcggtggggcccactcccggaagaagggtcccttttcgcgctagtgcagcggcccctctggacccggaagtccgggccggttgctgaatgaggggagccgggccctccccgcgccagtccccccgcaccctccgtcccgacccgggccccgccatgtccttcttccggcggaaagtgaaaggcaaagaacaagagaagacctcagatgtgaagtccattaaagcttcaatatccgtacattccccacaaaaaagcactaaaaatcatgccttgctggaggctgcaggaccaagtcatgttgcaatcaatgccatttctgccaacatggactccttttcaagtagcaggacagccacacttaagaagcagccaagccacatggaggccgctcattttggtgacctgggcagatcttgtctggactaccagactcaagagaccaaatcaagcctttctaagacccttgaacaagtcttgcacgacactattgtcctcccttacttcattcaattcatggaacttcggcgaatggagcatttggtgaaattttggttagaggctgaaagttttcattcaacaacttggtcgcgaataagagcacacagtctaaacacagtgaagcagagctcactggctgagcctgtctctccatctaaagattctggctcagcacagttgtttatgactcattcagaaggaattgacctgaataatagaactaacagcactcagaatcacttgctgctttcccaggaatgtgacagtgcccattctctccgtcttgaaatggccagagcaggaactcaccaagtttccatggaaacccaagaatcttcctctacacttacagtagccagtagaaatagtcccgcttctccactaaaagaattgtcaggaaaactaatgaaaagtatagaacaagatgcagtgaatacttttaccaaatatatatctccagatgctgctaaaccaataccaattacagaagcaatgagaaatgacatcatagcaaggatttgtggagaagatggacaggtggatcccaactgtttcgttttggcacagtccatagtctttagtgcaatggagcaagagcactttagtgagtttctgcgaagtcaccatttctgtaaataccagattgaagtgctgaccagtggaactgtttacctggctgacattctcttctgtgagtcagccctcttttatttctctgagtacatggaaaaagaggatgcagtgaatatcttacaattctggttggcagcagataacttccagtctcagcttgctgccaaaaaggggcaatatgatggacaggaggcacagaatgatgccatgattttatatgacaagtacttctccctccaagccacacatcctcttggatttgatgatgttgtacgattagaaattgaatccaatatctgcagggaaggtgggccactccccaactgtttcacaactccattacgtcaggcctggacaaccatggagaaggtctttttgcctggctttctgtccagcaatctttattataaatatttgaatgatctcatccattcggttcgaggagatgaatttctgggcgggaacgtgtcgctgactgctcctggctctgttggccctcctgatgagtctcacccagggagttctgacagctctgcgtctcagtccagtgtgaaaaaagccagtattaaaatactgaaaaattttgatgaagcgataattgtggatgcggcaagtctggatccagaatctttatatcaacggacatatgccgggaagatgacatttggaagagtcagtgacttggggcaattcatccgagaatctgagcctgaacctgatgtaaggaaatcaaaaggatccatgttctcacaagctatgaagaaatgggtgcaaggaaatactgatgaggcccaggaagagctagcttggaagattgctaaaatgatagtcagtgacattatgcagcaggctcagtatgatcaaccgttagagaaatctacaaagttatgactcaaaacttgagataaaggaaatctgcttgtgaaaaataagagaacttttttcccttggttggattcttcaacacagccaatgaaaacagcactatatttctgatctgtcactgttgtttccaggagagaatgggagacaatcctagacttccaccataatgcagttacctgtaggcataattgatgcacatgatgttcacacagtgagagtcttaaagatacaaaatggtattgtttacattactagaaaattattagttttccaatggcaataacccatttatgagagtgttttagcctactggaatagacagggaccacatcctctgggaagcagataagcatagaactgatacttgatgcacactcgtagtggtaactcatccctaatcagcattgtaaagcaggtgccagaggtggtttgctttgtccttccaaagcaggtgagtcagccccaccgagagccaggcagctttgagtggcagcgtggtgctagcagcttcagcggaacagggtgagagttaattatgcagtcttcttgacagcggcattaatttggaaggaaactgacaagtcatgggtcaagtttcagtgacttcctccttcctctgatggcagtatatagttttcacattttaattcctcctcctgagatgcactatacttaaaaccattctctcccctgctaacagaagggtgtgaatctggtttactttgagcattaggatttgcccctttggaattctgcactccagttacttaactttcccttcagaatacatgtggaaagaaagaaagaaatagcgatgactccacttttgcccctgtggcaccttgaacaaagcagttcttcccaaattatactttttttttttttaaataaggtgagcaggatgactggggagagagaaacatttgactttgactgcctcccccattctttgctgtgagctggaaagtgtgcagttggtcgtctttcttctcctttctttaggatagtaagagactcactcactgcacttctgctcagttggcttctgcatcgggatcacacagccatcagcaggactgcccagttggtgagcacactccattgaccacgtggcgccagcgcttcctcaatgcacatgattgagaggaaagaaagttctcttagatgttactgcttttgctcagactttgcaaaaaaaaatatatatatatatatgtataaatatataattattaatcacttttgtccttgagaaagtcttgaatgaacagagaatttattccattgcaatatttgattgtatagaggcacactgtttcatcgacagaagaagcaaaaaggctttgtgtaagtttttggtactatgtaccacctctgttattcttttaaagctgaagtattcatgtacttaaaccatattatatttaattgtgtttgattttaaaatatatatatatgaattctattta

SEQ ID NO: 384270 - DNA, 3513 bp, Homo sapiens
gcctagcgcggggaaggaccggaactccgggcgggcggcttgttgataatatggcggctggagctgcctgggcatcccgaggaggcggtggggcccactcccggaagaagggtcccttttcgcgctagtgcagcggcccctctggacccggaagtccgggccggttgctgaatgaggggagccgggccctccccgcgccagtccccccgcaccctccgtcccgacccgggccccgccatgtccttcttccggcggaaagtgaaaggcaaagaacaagagaagacctcagatgtgaagtccattaaagcttcaatatccgtacattccccacaaaaaagcactaaaaatcatgccttgctggaggctgcaggaccaagtcatgttgcaatcaatgccatttctgccaacatggactccttttcaagtagcaggacagccacacttaagaagcagccaagccacatggaggccgctcattttggtgacctgggcagatcttgtctggactaccagactcaagagaccaaatcaagcctttctaagacccttgaacaagtcttgcacgacactattgtcctcccttacttcattcaattcatggaacttcggcgaatggagcatttggtgaaattttggttagaggctgaaagttttcattcaacaacttggtcgcgaataagagcacacagtctaaacacagtgaagcagagctcactggctgagcctgtctctccatctaaaaagcatgaaactacagcgtcttttttaactgattctcttgataagagattggaggattctggctcagcacagttgtttatgactcattcagaaggaattgacctgaataatagaactaacagcactcagaatcacttgctgctttcccaggaatgtgacagtgcccattctctccgtcttgaaatggccagagcaggaactcaccaagtttccatggaaacccaagaatcttcctctacacttacagtagccagtagaaatagtcccgcttctccactaaaagaattgtcaggaaaactaatgaaaagtatagaacaagatgcagtgaatacttttaccaaatatatatctccagatgctgctaaaccaataccaattacagaagcaatgagaaatgacatcatagcaaggatttgtggagaagatggacaggtggatcccaactgtttcgttttggcacagtccatagtctttagtgcaatggagcaagagcactttagtgagtttctgcgaagtcaccatttctgtaaataccagattgaagtgctgaccagtggaactgtttacctggctgacattctcttctgtgagtcagccctcttttatttctctgagtacatggaaaaagaggatgcagtgaatatcttacaattctggttggcagcagataacttccagtctcagcttgctgccaaaaaggggcaatatgatggacaggaggcacagaatgatgccatgattttatatgacaagtacttctccctccaagccacacatcctcttggatttgatgatgttgtacgattagaaattgaatccaatatctgcagggaaggtgggccactccccaactgtttcacaactccattacgtcaggcctggacaaccatggagaaggtctttttgcctggctttctgtccagcaatctttattataaatatttgaatgatctcatccattcggttcgaggagatgaatttctgggcgggaacgtgtcgctgactgctcctggctctgttggccctcctgatgagtctcacccagggagttctgacagctctgcgtctcaggaagatgacatttggaagagtcagtgacttggggcaattcatccgagaatctgagcctgaacctgatgtaaggaaatcaaaaggatccatgttctcacaagctatgaagaaatgggtgcaaggaaatactgatgaggcccaggaagagctagcttggaagattgctaaaatgatagtcagtgacattatgcagcaggctcagtatgatcaaccgttagagaaatctacaaagttatgactcaaaacttgagataaaggaaatctgcttgtgaaaaataagagaacttttttcccttggttggattcttcaacacagccaatgaaaacagcactatatttctgatctgtcactgttgtttccaggagagaatgggagacaatcctagacttccaccataatgcagttacctgtaggcataattgatgcacatgatgttcacacagtgagagtcttaaagatacaaaatggtattgtttacattactagaaaattattagttttccaatggcaataacccatttatgagagtgttttagcctactggaatagacagggaccacatcctctgggaagcagataagcatagaactgatacttgatgcacactcgtagtggtaactcatccctaatcagcattgtaaagcaggtgccagaggtggtttgctttgtccttccaaagcaggtgagtcagccccaccgagagccaggcagctttgagtggcagcgtggtgctagcagcttcagcggaacagggtgagagttaattatgcagtcttcttgacagcggcattaatttggaaggaaactgacaagtcatgggtcaagtttcagtgacttcctccttcctctgatggcagtatatagttttcacattttaattcctcctcctgagatgcactatacttaaaaccattctctcccctgctaacagaagggtgtgaatctggtttactttgagcattaggatttgcccctttggaattctgcactccagttacttaactttcccttcagaatacatgtggaaagaaagaaagaaatagcgatgactccacttttgcccctgtggcaccttgaacaaagcagttcttcccaaattatactttttttttttttaaataaggtgagcaggatgactggggagagagaaacatttgactttgactgcctcccccattctttgctgtgagctggaaagtgtgcagttggtcgtctttcttctcctttctttaggatagtaagagactcactcactgcacttctgctcagttggcttctgcatcgggatcacacagccatcagcaggactgcccagttggtgagcacactccattgaccacgtggcgccagcgcttcctcaatgcacatgattgagaggaaagaaagttctcttagatgttactgcttttgctcagactttgcaaaaaaaaatatatatatatatatgtataaatatataattattaatcacttttgtccttgagaaagtcttgaatgaacagagaatttattccattgcaatatttgattgtatagaggcacactgtttcatcgacagaagaagcaaaaaggctttgtgtaagtttttggtactatgtaccacctctgttattcttttaaagctgaagtattcatgtacttaaaccatattatatttaattgtgtttgattttaaaatatatatatatgaattctattta

SEQ ID NO: 384271 - DNA, 2173 bp, Homo sapiens
gcctagcgcggggaaggaccggaactccgggcgggcggcttgttgataatatggcggctggagctgcctgggcatcccgaggaggcggtggggcccactcccggaagaagggtcccttttcgcgctagtgcagcggcccctctggacccggaagtccgggccggttgctgaatgaggggagccgggccctccccgcgccagtccccccgcaccctccgtcccgacccgggccccgccatgtccttcttccggcggaaagtgaaaggcaaagaacaagagaagacctcagatgtgaagtccattaaagcttcaatatccgtacattccccacaaaaaagcactaaaaatcatgccttgctggaggctgcaggaccaagtcatgttgcaatcaatgccatttctgccaacatggactccttttcaagtagcaggacagccacacttaagaagcagccaagccacatggaggccgctcattttggtgacctgggcagatcttgtctggactaccagactcaagagaccaaatcaagcctttctaagacccttgaacaagtcttgcacgacactattgtcctcccttacttcattcaattcatggaacttcggcgaatggagcatttggtgaaattttggttagaggctgaaagttttcattcaacaacttggtcgcgaataagagcacacagtctaaacacagtgaagcagagctcactggctgagcctgtctctccatctaaaaagcatgaaactacagcgtcttttttaactgattctcttgataagagattggaggattctggctcagcacagttgtttatgactcattcagaaggaattgacctgaataatagaactaacagcactcagaatcacttgctgctttcccaggaatgtgacagtgcccattctctccgtcttgaaatggccagagcaggaactcaccaagtttccatggaaacccaagaatcttcctctacacttacagtagccagtagaaatagtcccgcttctccactaaaagaattgtcaggaaaactaatgaaaagtatagaacaagatgcagtgaatacttttaccaaatatatatctccagatgctgctaaaccaataccaattacagaagcaatgagaaatgacatcatagcaaggatttgtggagaagatggacaggtggatcccaactgtttcgttttggcacagtccatagtctttagtgcaatggagcaagagcactttagtgagtttctgcgaagtcaccatttctgtaaataccagattgaagtgctgaccagtggaactgtttacctggctgacattctcttctgtgagtcagccctcttttatttctctgagtacatggaaaaagaggatgcagtgaatatcttacaattctggttggcagcagataacttccagtctcagcttgctgccaaaaaggggcaatatgatggacaggaggcacagaatgatgccatgattttatatgacaagtacttctccctccaagccacacatcctcttggatttgatgatgttgtacgattagaaattgaatccaatatctgcagggaaggtgggccactccccaactgtttcacaactccattacgtcaggcctggacaaccatggagaaggtctttttgcctggctttctgtccagcaatctttattataaatatttgaatgatctcatccattcggttcgaggagatgaatttctgggcgggaacgtgtcgctgactgctcctggctctgttggccctcctgatgagtctcacccagggagttctgacagctctgcgtctcagtccagtgtgaaaaaagccagtattaaaatactgaaaaattttgatgaagcgataattgtggatgcggcaagtctggatccagaatctttatatcaacggacatatgccgggaagatgacatttggaagagtcagtgacttggggcaattcatccgagaatctgagcctgaacctgatgtaaggaaatcaaaaggatccatgttctcacaagctatgaagaaatgggtgcaaggaaatactgatgaggcccaggaagagctagcttggaagattgctaaaatgatagtcagtgacattatgcatcaagtatcagttctatgcttatctgcttcccagaggatgtggtccctgtctattccag

SEQ ID NO: 384272 - DNA, 1929 bp, Homo sapiens
gcctagcgcggggaaggaccggaactccgggcgggcggcttgttgataatatggcggctggagctgcctgggcatcccgaggaggcggtggggcccactcccggaagaagggtcccttttcgcgctagtgcagcggcccctctggacccggaagtccgggccggttgctgaatgaggggagccgggccctccccgcgccagtccccccgcaccctccgtcccgacccgggccccgccatgtccttcttccggcggaaagtgaaaggcaaagaacaagagaagacctcagatgtgaagtccattaaagcttcaatatccgtacattccccacaaaaaagcactaaaaatcatgccttgctggaggctgcaggaccaagtcatgttgcaatcaatgccatttctgccaacatggactccttttcaagtagcaggacagccacacttaagaagcagccaagccacatggaggccgctcattttggtgacctgggcagatcttgtctggactaccagactcaagagaccaaatcaagcctttctaagacccttgaacaagtcttgcacgacactattgtcctcccttacttcattcaattcatggaacttcggcgaatggagcatttggtgaaattttggttagaggctgaaagttttcattcaacaacttggtcgcgaataagagcacacagtctaaacacagtgaagcagagctcactggctgagcctgtctctccatctaaaaagcatgaaactacagcgtcttttttaactgattctcttgataagagattggaggattctggctcagcacagttgtttatgactcattcagaaggaattgacctgaataatagaactaacagcactcagaatcacttgctgctttcccaggaatgtgacagtgcccattctctccgtcttgaaatggccagagcaggaactcaccaagtttccatggaaacccaagaatcttcctctacacttacagtagccagtagaaatagtcccgcttctccactaaaagaattgtcaggaaaactaatgaaaagtatagaacaagatgcagtgaatacttttaccaaatatatatctccagatgctgctaaaccaataccaattacagaagcaatgagaaatgacatcatagcaaggatttgtggagaagatggacaggtggatcccaactgtttcgttttggcacagtccatagtctttagtgcaatggagcaagagcactttagtgagtttctgcgaagtcaccatttctgtaaataccagattgaagtgctgaccagtggaactgtttacctggctgacattctcttctgtgagtcagccctcttttatttctctgagtacatggaaaaagaggatgcagtgaatatcttacaattctggttggcagcagataacttccagtctcagcttgctgccaaaaaggggcaatatgatggacaggaggcacagaatgatgccatgattttatatgacaagtacttctccctccaagccacacatcctcttggatttgatgatgttgtacgattagaaattgaatccaatatctgcagggaaggtgggccactccccaactgtttcacaactccattacgtcaggcctggacaaccatggagaaggtaacccagaacttcaaacgtatcaaactacaagaagttttattggtagaactcataaaatataaggtgggaaaaccaagcagaatagcacagtggaaattgaagcagtccagcaaagtgattaagagcagaggccttgagtctggcctggtatgtacagtcacgtgccacataacattttagtcaacagtggactgcgtgtacgatggtcctgtacgattataatggatcaaagctggtagtgcaataataacaaaagttagaaaaaataaattttaataagtaaaaaag

SEQ ID NO: 384273 - DNA, 474 bp, Homo sapiens
ctccatgttggtcaggctggtcttgaactctggacctcaggtgatccgcccacctcggcgtcccaaagtgctgggattacaggcgtgagccaccgtgcccagccttaattaaaaactttcttaacagcaaaagtcacttttcccaaatatgtcaaagtcttctagattctgatcttgcttctagatcatcttagttcatcctgtagtttagtgattctcagtgaatccttacatcagaatctctgggttacttgttaaaaaatgcttgcacccttctccaaacatttaattaaattttagggagcaggtccaagaattgcatttaaacaagtacctcagatatgtggtgtgcagaataaagcttgagtacctagatctggaagcagcatagttattaatgttaaaattaaaaatcattgatctgtctactttggcagaatgtaaacgtcaggtttacagggaccatgtgtgtct

SEQ ID NO: 384274 - DNA, 875 bp, Homo sapiens
tgtagagacagggtctcactatgttgcccaggctggtctcaaactcctggactcaagagagccacccgccctggcctcccaaagtgctgggattacaggagtgagccactgtgcctggccctaaaaataatttattaagcacataaagcactctatgccagacacggttcaaagaacttcatgttaactcatttaatcctcccagttgtagctataaaggagatgctagtataaaaagttcaagaaactgaggcaaagagcaatttagtaacttttggggatttgaatccaggtagcctttctaataccaagggaataaaacaaaataaattacatgcagtttaaagcagtggcacttctgtcatgtttatctcttcatttcctagagccaaatctttcccaggacttacataagtaatgtccattccttgtcctgtttaaagatagtaccatctagcctcaaagaactgattatagaattgggtctgtaatttgtttctggaaattggtgttctgaaactatttccccaacaaaacacctagaaatgctgaataaaatataagaaaaatcttttaatgtataaatgagtggtgaggaaacaaaaatgaagagagaatagagaactagggatgatagctggtgctaaccctatggctacgttggagttgcttgatggtcttgacaacgaagatttaacaggtgcctgagcgcaggcgataaggagtgagaccactgtatagtgaggaattagaataaagacctctatataaagccaggactttgaaaacctaagccttcattaaaaggtggatgtaaaacaaatcagccttcttgtaaagaaagatgacaaggaaacttgtcatagcctaggttc

SEQ ID NO: 384275 - DNA, 541 bp, Homo sapiens
atgcgtcctccggttggcggcggctgcggcggtggcggctacgagcggctccgtttttttaaagggaaacgctgaggcgccgggggtgactgtgggggagggggaccccgagccgcggagacccccgggagaggcgacagaccccctctcccggagtaggagggctttgggcggacccagccctccaccccctcctgaggaggaggggggggaaatggaggctcggggcggttgaggcgagctccggggcggggggccggggcggggaagggggggtgcggggtggggagacgaggcgggcccggccgggccagggggggccgaagcgagctccggggatgagctcgggggcggctgggtgcgagctcctgcctctgaggcgaaggcggcggcggcggcagcagaggcggcggcgaggcccccatgggccggcggcgggcctcagccgcggcctccacgtctccgcacgccggcgggatggcgcccgggccccggaggagccgcgctagcggaggcctgctgccgcgctgctgaggcgagc

SEQ ID NO: 384276 - DNA, 457 bp, Homo sapiens
gagccagaagaacagcagaattgccttcgcccgccctgcccctcgcctgctgcagaagcttccagaaactccctggtgggcgacccagcccgagctgcctggggccccaagggaagctgaacgccctgtgggctcctgggatggttcttcccgttctttgcgccgccttcacccattgaaggagcctgtgcccaccctgcccagtcgctttccgggccgctgaggagcttccgctgccatcttcggatcctgtgttccgcacgggggctccaccagggcagggatggtggtgagggtcgctcgtgggtcccctcgcggggagcagggtctggtactcaccagggcgcacgactaggacttgtggaatgaattcatcgtcgcctttagcttttagtcctttgaagagccctgagagtggaaatcaagagattttttccacggggaagttctttttaca

SEQ ID NO: 384277 - DNA, 493 bp, Homo sapiens
acacaaacacacacgcacacgttcatgcctagagtattctcaccatctctcatagcaccgttttttagtccgctctgccggagcttcaaaattccgcgatctttagacaactctagggtcagattttaatgtttaactttcattcaaagacgaggccttttgctttttcacagcccatttttctttccgcgtctggacagagctggctttagttggcgcccgagcacccgcagcttggggcaccaacctgcagcaacgggggatcagtccggcctgcgcgttgtaggcactcactccacagaggaaactatgtatttcgaaagcgtttcaaaaattccaccgagcctggtggccccgaaaaaccccaaggcccgccagactttggagaagggtctgtgaggtaccctcactgtcatacctacgccggcactctcagtcttttggagaagctactagagaagtgcctcaagaccagcctcggaggagcctggct

SEQ ID NO: 384278 - DNA, 317 bp, Homo sapiens
taggttgaccttttgtggaagggtagaatgtccaatcagggaaatgacctagcagaaagctagggagttcctcagcctcatgaattttttattagaagtcattcctaatttttatctttaaatgtacattttcaaggatgtacactagccacctctgattacagtaggcttacagcataaccccttttgcttcttggccccttttgcttcttttcagtgcctcttgggcttaatgaatagattttatcttcatgctaagcacattcatcatttaaaacatgcctggtatttgctgaagatgaattgaggagaaagtt

SEQ ID NO: 384279 - DNA, 1220 bp, Homo sapiens
atcactttacaactctgagcataagggcgggagcgctgatggcgggaaagcaagtcaacagcacgcccatcccacctgcagcatagggaccgcacctccccttgatttcatcggtgatattctatttataggacttcactcattactgtgaacacccaaacaactaatgctgtgtgtaagggggtctgcgccctgccactgatggtggagactgtgcttaggattagagtcttcgggggctccacttacaggtgaaataggcaggtctgggagcctggggccagggcgatgcctcttctcttctcactggaagtttgggagccttgctcagtgggggccttgggttttctggattcttgctaaagtgcttccttaagccctgagtcctctcttctccaaacaccacagaaacagccagtgccattgttatgcacattctcacaaagcaaggagctagagagagcaggtgccaggagaggactgagtggggcaggcacatggcaggcactggctggggcggatgggagctgccagcctgtaccctcccagggaaccccctccccatgtcacagggaacagctttgccatctactggagagctgtggcccatgacggtgggtgagatggctggtgctcatctctgccaccctggaagggggtaaagaacggcattgccttatattcattgttcagcaacatcttttgtctttaatgaccttcagaaaaaaaaaacaacctcattcatctctctgttttttcttaaataacacatgatgttgggatccttctggagtctgtggaatttgctttttaaagaggaaaggaacagaagaaggttcctgaccaggcatttttcatcctcacctatcacagtccaagaggaaatgagtttaaattgaagtcaatgaaatttgcagaaattcacgaaggtggcatttttaaatgtaaaattggtctttttggggaaagtaatggaattgtctttttaacaaagaggctttcaaccttttaaatgtactcaagatcccatgaggccactgctcattgcagtgcctgtccccagaggctctggttctcctgggagccagtgcttcctggcatgtgccagggctctgaaggctttggttgatcttggagtcacacgctgaaccttgcctccctggagatgagagtgacacgcagtcagctggggcacaggtcactaaggtgcccaacaaacc

SEQ ID NO: 384280 - DNA, 984 bp, Homo sapiens
agaataataataaagtaggaaaaacagccctcttaagaggaaggccatcttaaagctctaccagcttcaggtgagggctgatccagcagatcccagagaaacaggctcacagagaggggagggggcttgtctaagcttacccagcccggaagcatcggggtcaaagcttaaccccctgctggaaggtgtcgagagccaggcagccaagcctgacctgggagatggggaagtgggggcccccccaagctcgccgactgcccttcccagcctgctgccagtctgattccacagagggtgctctgaccgagtgtttaccaaaacatgtattaggcaagacccgggccgaatgtgggtggcaccgcccctgtgctgggccaggagaatgtgcccgcaccggtcccagatcctgtttccccagtgggttgtacaagacaccttgaacttctgcatgaactgggacattcagaattccctggagcaaccccctccctccaccctgtgccttgatatctcctattaaagcttgtgtttgaatgtctgttaatagacatgatttaattattgatattaattcaaatgtattaatttgaattattaacttattaatcatttgatgtcgattaaagcaatgatcttgatccaatgtcatctcctccatgaagtcttcctggattatctaaggtgcagccccacagccagggacagtggttcatgcctataatcccagcattttgggaggctgaggtgggagggttggttgagcccaggagttcgagaccagcctggacaacttagtgagacccactcccctcatctctacaagaaatatataaaaattagctgggtgtggtggtgtgcacctgtgatcccagctgctcaagagactgaggtgggaggattgcttgagcccaggaggtggaggctgtagtgagctgtgattgcaccattgcacttcagcctgggtgacagagagagaccgtctct

SEQ ID NO: 384281 - DNA, 926 bp, Homo sapiens
ctatggctttgccagaccccgggtgccgccgcccccatggaattgcaggactgttatctgagcaacgtcgacgggggagaacacccctgcccgaggttaaagatagcaccgctcgaatcacatcacaggccgaaaaggccagatgacccaccagggacattgaatccgtgtcccgagaggggtggggcgggggtgtggattcctgcggggagcttcgggactggaaaaaacagagggtgctctgaccgagtgtttaccaaaacatgtattaggcaagacccgggccgaatgtgggtggcaccgcccctgtgctgggccaggagaatgtgcccgcaccggtcccagatcctgtttccccagtgggttgtacaagacaccttgaacttctgcatgaactgggacattcagaattccctggagcaaccccctccctccaccctgtgccttgatatctcctattaaagcttgtgtttgaatgtctgttaatagacatgatttaattattgatattaattcaaatgtattaatttgaattattaacttattaatcatttgatgtcgattaaagcaatgatcttgatccaatgtcatctcctccatgaagtcttcctggattatctaaggtgcagccccacagccagggacagtggttcatgcctataatcccagcattttgggaggctgaggtgggagggttggttgagcccaggagttcgagaccagcctggacaacttagtgagacccactcccctcatctctacaagaaatatataaaaattagctgggtgtggtggtgtgcacctgtgatcccagctgctcaagagactgaggtgggaggattgcttgagcccaggaggtggaggctgtagtgagctgtgattgcaccattgcacttcagcctgggtgacagagagagaccgtctct

SEQ ID NO: 384282 - DNA, 354 bp, Homo sapiens
agaataataataaagtaggaaaaacagccctcttaagaggaaggccatcttaaagctctaccagcttcaggtgagggctgatccagcagatcccagagaaacaggctcacagagaggggagggggcttgtctaagcttacccagcccggaagcatcggggtcaaagcttaaccccctgctggaaggtgtcgagagccaggcagccaagcctgacctgggagatggggaagtgggggcccccccaagctcgccgactgcccttcccagcctgctgccagtctgattccacagagctgaagtcgggacctggagttctgctcattcgctcatctactcagtgactttcttagaccc

SEQ ID NO: 384283 - DNA, 414 bp, Homo sapiens
tttcattcatgctcagacgatataataggaggaatagaccccatgtccccatagacatcctccctcattcacagttcagccctccactacctcccacatggacccctggcacctgccttaacatcttctgatataagcacagaaattgatgtgattagacagctacattgtttggaaagtccccatccttcttataaacccaccctccctacttattccctgccaacaacacacacaatagtaagtttggctagagcctgcttgttatgaacaaggcttaggaatagggcctctttagggctagtcttctcatttccaaacacttatcagcagttccaaaatgaagagcctgaccttattactgggcacagctgattgtgtatgcattattagaaaactttctgtggtctcaca

SEQ ID NO: 384284 - DNA, 502 bp, Homo sapiens
tcctgttaggttgggagttcctagatggcagggaatgtcatctttccctgttcctggagcatcattctcaatacatgacctttgaatgggtggatgaacaaatgaatgaatggaacaaatgaatgaatgagaccaagagcagcagtatctgcaactccttgtggccattccgtgttcttgtgaaatatctctaaggttcccgtttgtgtctcaaagaatggtggctggagcctccatatgagtggaggaggccaacctctgacggcaccccacctaggccctcagagccgtcttcagagctggcctgggcctggcagtgagtgtttcctatgtggaaggcaacatttgcgctttgtaggactagcaaaagacctagaagagggcggagcatgggagctcatgtctgtaatctcagcactttgggaggtcaaggtgggaggactgcttgagcccaggaatttgagaccagcctgggtagcatagggagaccccagctctacaa

SEQ ID NO: 384285 - DNA, 190 bp, Homo sapiens
aggccatggttcaaagcatgttgtcctttagggggacatccttttgtatatcctccatggtggaggggagagtgttttgtaagccataaagctctgagctaacaggtgatcttaataatattatcttttcggggtggctttgactcttggagattgttaaggtcatctaagccacttgtgttggattaag

SEQ ID NO: 384286 - DNA, 297 bp, Homo sapiens
tgcgtttgtaaaaggaaaataaattaacaacaagtgtttgtttttcaagcatgagagagggcccacacctggctcaggaatgcagcctcggcctctggctcctgaggcccctgcaacagttgttagaggcctgcttccggtctcatgctgcccctgagcgtctagggatggtgggcagaccctgaactgggttcctaacccccctgtctaagacatgccagtgtcttcagccccttgtcgcctacattcttctcccactggttctctcattgtgcacgtccctccctacctcctgat

SEQ ID NO: 384287 - DNA, 665 bp, Homo sapiens
caaaattacaccgttgttgatatactgtattcccttctaggttttgggttaatacgtctgtacattttttcttttttaaaaagaaaatgagatcatactaaaagaatcacactgttttataaccttttttcccattcaccaatatgtactgaaaaacagtattttaatggctgtatagtttttccattatgttaatatgtcataatttactatgaatctcctgttgagttattttaattctaatgtttcactaaacatttttaaaaaacatctgcagtagaatcataacatacatctttatttccccaagataagttgatagatgctaagtgaaaaggtatgcatatttttgagggttttagatcctctctagtattctacttttcctattagtataggataaataagacaagatgactgaaatgaaaaggataggtgtgagacattaatattatcaattattcagcatagacatgtgtagattttatttggaatgctgcaagtaacatgtactacttgggtcaaaataagctcattacaaaataggttatcaagtagttcattattctagttaagaataaattgggtccctacgtttccctttttgacctaagacattttcctttgtaaagagtacttggaaactggaagtaccaatggatttt

SEQ ID NO: 384288 - DNA, 371 bp, Homo sapiens
agggaaacattttctagagcttttctgttttctatagtacgtagtctggtaggctctgaagtaagacatctggatttgaatccttgctcctcaaaccagactatgagcatggctaagttacataatgtcccagtgcttcagtttcattacagtgttgtttttaggtgttaattcaagtgaagcgcttatgacattgcctggcatatggtgaaatctcaacaagtatttatcattatccctggatatagaagtagttaaatttattgtagtacctggccagtcatagatgtttagtaagtatttattgactgaataacattcttctcattttctcattgttatatatttaatagttcctcagttattgaatg

SEQ ID NO: 384289 - DNA, 914 bp, Homo sapiens
ggagtggctttgatcagggaacatacatcagtaactgttttgtgaccttagtcccggctgtgttttatggcttggccaaagtttatcatataatttccactttaggaatttgcccacttactaaggctttgagggcaggggaggtgaagtagtattgtgggagaggagtaataaatgtgttttcttttcagtttctacagtgagtggtctgttttgaaatgagtgcaggtggttgcagtccactccctccacaaacaggacaaattaagatcattttgctctttcgggaagctgagggcaagcctgcacaggtgaggtcacgagaggcaagctatgtgcacacctggtgtcctcgtgcttcttgggcaggccagctccatgcagtgcagtgcccctgaagggaatggggccaggagaagacataacagggcatgaggatcttctctgtgccaagaatcatgctaggtaacccccctgagatttctcatcctcttgagaatcctgtgagatgatcctgctgcccttatttttccagatggaaaaacggattacccaggattcaccgcttgtgagtggcagaaagtggcagcattagaactgctgcactccatggatacatccagcacatgtgctctcctctagtgtgtgattccggttcatttaagtcagattttggattccactcaatgaagtttgtaactgctaagtttgtgatgtagcactgtaccgagctcaccaagcgcgtgggctctttgtgtctctcctggcgcctgggttagggctgtgctccccaatgtgtaccccaatgtgacagaggaacacagtcaacaggatgcaattccagaaaggagccccctgtgccctgcattccaaggctgaacttgggtggcattgtcctcgtactccccaacgtg

SEQ ID NO: 384290 - DNA, 435 bp, Homo sapiens
tccactcaatgaagtttgtaactgctaagtttgtgatgtagcactgtaccgagctcaccaagaatttcaactaacccactatgctcaaagtgtggtccatggaccaagtaccttggaatcccttgaaagcccctgttgaaaattcagattcctggccgggcatggtggctcacgcctgtaatcccagcattttgggaggctgaggcaggcagatcacaaggtcaggagtttgagaccagcctgaccaatatgatgaaaccccatctctactaaaaataccaaaaaaaattagccaggcatggtggtacacacctgtaatcccaactaatcaagaggctgaggcaggagaatcacttaaacctgggaggcggagttgcagtgagctgagatcacgccactgcactccagcctgtgtgacagagtgagactccgtgt

SEQ ID NO: 384291 - DNA, 162 bp, Homo sapiens
tttggaattggagcctaaaaataaataacttacgattctactcataattatttcctgctaatatttatgagcagagaagaattatataagcaacatgcatatgttatttatgctattttatgttatctatatgcagggcataattaagaatactcttcaaat

SEQ ID NO: 384292 - DNA, 337 bp, Homo sapiens
actagggagtaaaattaataaagggttaaagtaattttattattgaaatatatgaagaaaatacaaatatttaatgcatcaagtgtattatgttacatataaaagtaatctttagttaagttgttaaatctattagtactcatttaatgattagaagaggtatttggttttttaaggaagttttattttaaaaaaatgaggcccatacactttttaaaagtttatagtgaattaaattatttacttacttatttgcaagtgttactagtctcatacttaatgcatatctcttttttttgcaatttagataactgggcaaagtgtttctaaaaactaa

SEQ ID NO: 384293 - DNA, 386 bp, Homo sapiens
gtgtatagtaatttaatagtaattaaatgtagagtatttgtaaaaacaaggagaggaaaaagaacaactcatatttgagaactcctaataatcttctagagcagagttcaaagaagcagtggtaaaaataaagccaaagagatataggggctagtcttagaaccaggacttcctatagaaccagcttcctatagaatctgaactttatctgaaactctttcacagatctcctccaccttaacttccacaaaataagaaatttggattttgaggcaaatttgtatattttaaggagcaggacaatctcagctgtatctgggttgcagatatccaacaaatcctaccaaatcacttttcagctgcagactggaaatttcagatcagag

SEQ ID NO: 384294 - DNA, 551 bp, Homo sapiens
ctacttgggaggctgaggtgagagtatgcttgagcccaggaggtccaggctgcaacgagctggcattgcaccattgtactccagtgtgagctacagagcaagaccctgtctcataaataaataacccaaagctttagatatgtaaataaaatgtgtttcatattgcttaggaaaggtatagttggctggatgaaaatgtgtcttgctgctaatgtttcatatatcattttttctattaatttgaataacctttattgtttcatacaccaatttttctttattttttaactttaaaacattttctgttgtctatagctttatgttccttataagtaatttcttctatgagaaacctgtttctctttttaaaaaacctgttttgttttcttttttttaaaggctgtttttaaaaatcagttatatatatgcacatggtttaaaagtcttggtctgcgtatcctaacaaaaactaggggtgccctgcatgtttctttctcttgttttgtatttctagaggtaaccaataaagtattagggcacggcgacaaaac

SEQ ID NO: 384295 - DNA, 566 bp, Homo sapiens
tttaaatctaaatagctatatgtggataatggacatcatattagttaacacagttctagatgattctgtgcagaggctggttggttgccaaatatattattctgaccctgacaagggaaccccatccaagtagagtgattcacctttttaatctcaggtctattatattagttatcaagaccaaggctattgctattaacaaatgagaaaatctatagaattgccatggaaaccctattggagaaacacaggtttccatgtcaacccctgtccaggataccgctacaaaatgccctataagcaaaaacttctgaaaccacaatgttttctgactaatggaattaggagactgcgacttttgtccattgttcttaggcaaggcatttggggcccttccaagaagtagtctgaatatctgttataaggaaagaaaatgatacagtgtctaaaggcccttgactgaaaaatttgttttttgataaatatgtttttatctaaaggctctttgtcagaaatccttccttgggattatgcttgctgacttttctgatatgtttctattaaga

SEQ ID NO: 384296 - DNA, 495 bp, Homo sapiens
cctggtgtggtattgtaaattgtcgcttttagaccaactttttagtgatagaccctctctatgctttttgttgtaagctactgcagattcttgccacaggtatgaagtaaattctgttaatagccttgatttttcacctgtgccaccatatatatctttgccatggcctcatgatggatggaatatacttccctgccccttgacttgatacttgaccatgtaacttttttggaacaatgaaagatgatggaaatgtcagtatacctgtgctcaggtatactgtgctaggtcttaagaagcctccagtgtttccagctatacatctgcaatcaccatgagaaggacctgctcaagcaaaccactagtcacaggaggagaatgagagacacatggagcagagctgccctcagagtccacctagattagttgtcagcagacctccagtggacttgtagaaacacaagcaataataaaaggctgttgttttaaaaaact

SEQ ID NO: 384297 - DNA, 391 bp, Homo sapiens
ggtgcagcacaccagcatggcacacgtatacatatgtaactaacctgcacattgtgcaaagttaccttactgcataagccagtggttctcagcaaggagcaatgttgcccaccaaatttgacaatgtctagagatcttcctgactgtcgtgactaaggagatgctactgacatcgagcaggtagaggccacagatgctgctaaacatcctaccatgcacaggacagcccccacacaaagaattacacacctaaatgtcaacagtgccactgctgagaaagcctgctataagctaacataagagaagagcttctctggttaaagcaagtcaaggtggccggagagaatggagtggccttatgagagcaatacaccttgcaggccacatggcg

SEQ ID NO: 384298 - DNA, 526 bp, Homo sapiens
atccaggtaatttatatgcatactacattttgagacccactgatgaaagaattctaattttctatagagttactctagcaaggaaccttctcatttcttatgtattaggttatttctatatggaacatttcccagtagaccatattatttatggtatcttattaggtggaagccaaaagaacgttaaataatctgctggtgtttttgggttagttttgcactatttctcacagtgcaagcaattcttgttacctagtaaaacggttccccctttgaagggttgaatattgttcacatagcaccccagcctgtggtgtatatgtttaatctgtcaaatctcattaaatttttcttctataagaatgctaatgataccaatttctagaattgaatgatttctactctgcctgttggactgcaaatttgaaatcccctataataattagacccctccttagagtatattataatgaccatcgaacctgtatctaaaaattctagtaacttaaccatccagtcttaaaaa

SEQ ID NO: 384299 - DNA, 558 bp, Homo sapiens
acactcctgaagctcccttcagacctccagtgaagcatttctcttggaaacacacacataacccagacagagtaagagacattcccgccccactacttctgcaattgttgtagcatgggatttcttttcttttcttctcttttcttttctttcttttatttgtttatttattttatttttttggagacagaatcttgctctgtcgcccaggccggagtgcaatggcgtgatctcggctcactgcaacctccgcctcaagcgattctcctgcctcagctttccaagtagctgggattacaggtgcctgccaccatgcctggctaattttcatatttttagtagagacggggttttgccatgttgtccaggctggtctcgaactcctgatctcgggtgatccacctgccttggcctcccaaagtgctgggattacaggggtaagccactgtgcccatagcacggggtttctaaacctcggcactattgatattttggacaatgcttgaaatgttatggggggctgtcctgtgcattgcaggatgttcagcagcacccctg

SEQ ID NO: 384300 - DNA, 435 bp, Homo sapiens
atctgaagtgggaagagggtacaagttcccagggtacttccatagaacactgaaaactccaaacatgttgcacacacacaaaaaaaaattaagctattagttttaaaattattaaaaaataaatgacatctctatggatcaataataattcattctacaagcacttactgaacatcttccagcaaaacaacgatgctagtataatctggagtttcagctacaaacaaaatagttgagtttttgccttcatggggtgtacattacagagaataaaccaattcattatttaattagaattctaatatgtgctatgaagaagaaatacagatgttgcacttcttctgagccaagtttctgagaatatgaccttgaagctgaagtctcaaagaaggacaggcactatccaaaggaaacaagtaaaaaatggagaaaggt

SEQ ID NO: 384301 - DNA, 425 bp, Homo sapiens
ttttttttttgagacggagtcttgctttgtcacccaggctggagtgcagtggcgcaatcttggctcactgcaacctctgcctcctgggttcaagcgattctcctgcctcagcctcccaagtagctgagactacaggcgtgtgccaccatgcccggccaatttttttgtatttttagtagagacggggtttcaccatgttgaccaggctggtctcgaactcctgacctcagacaatccacccaccttggcctcccaaagtgctgggattataggcgcaagccaccgcgcctgcccattatttccatcttatagatggggtaaactgaggtacaaaccggttatgtcacttgcccaagtcgcatcgctgggatctgaaaccaggtcacctcgctccagaactcaggttctcagtcaccattagggat

SEQ ID NO: 384302 - DNA, 480 bp, Homo sapiens
ggggcaatgctatatttgttagaaaagaatgcaacaactcaaccacttgagatagtatatttccataatcatgtgtaagtaacacttaacaagaaaaattatcactcaatgtctatgagtaaggaaatgagagatgtatgcatttcttctacaacataatgctggacagaagaaccagtgtatagagaaagataagtagaaatagtgcaatgactgttaaccaagggtgattttgctccccagcggaactttgacaatatctgtggacagtattggttgttacagctatgggtagggggtgaggtgctcctagcatctagtgggtagaggctgaacaccctacaatctacaggacagcccctcacaacaaagaattatctggcacaaaacaatagtgctgagatggggaacccctgagacagcataagaaaaacaaccaaaaccaactgcttagtaaccaaaaaggcacgtcaaagaaaa

SEQ ID NO: 384303 - DNA, 705 bp, Homo sapiens
actcatgctgcatgtgagcagaacaagtcctgttacaatcaacagcctcacaaagaaaatttcagtatataaagcttatttatctcaggcagtattaattttggaccaaataaatgtactgttcccctgtcaacattttaacaggaacttaatttatgtacagaaaagagccatggagaggtgaatctccatctttggtttgcctgaataacctctttcttgaaatacaggatgtacaacttgcaattaatttgtcaccattctttgaactctcttggcccttgactaggagctcacagatgtttttcatccatcagtttagacaggtttgttccagtgtctttctcttctctttcaaatgactccagaatgcccactttcaaaatccatggtttttaataggtagcctcaaaaaaggattataatttattttaaattattcctaccctctagccccaccaaaagatgcttatgaaaaaactccccaaattaagtattttaatcttatggtcagtgtgtcctcatatctctagaaagggcacctacctggagaacctagggcaggagctgaggttcagtgtttctcaaccttgcctgattaaaatcatcacctgagaacactcattgaaaacacgtgttctaaggccccactcctatatattctgattcaggagacccattattgttgtaagaagaaaaagaaaa

SEQ ID NO: 384304 - DNA, 496 bp, Homo sapiens
tgtacctcactatgtcacctcagtgcccatcttgtacctgtctttctgttttcacttgttcattgctcattcacttgtctctgtcccctcactcacttctgattatctctaatttctttgactttggtagaagtagcttgtgcattactttgacaccaaatggctgggtaaaaagtgataaatcatccacttcaggtggtaagcttttcctacattatctaaatgtagtaatgtttctgtgaagcagtgctcgtattgataggtaagtgtttttgtttttgtggctctttgatcagatatttcccagtcctgtaatagagccacactaaaagtcacttcagtgcactgccttcgggctcatcttttcttcacatttctatcatgctttctggagtataaaggattttaactgagccacagaccaacatctcaacctcctgcttcacgcacaattgtatgagcttacagggatatcttagagatactgcaggtttgg

SEQ ID NO: 384305 - DNA, 433 bp, Homo sapiens
gagctctagattggtttccgcgtaggtccttgagagtttgatagcttgcttgatccattgatgaacaaaatatctgttgtggcccaactggatcaggcagttgagatctcaaggtttggtacagtgtctgaggaatttaggcagctgcaagacaggtgcttctaggccgagtgcggtggttcatgcctgtaatcccagcactttgggaggccaaggcaggcggatcacctgaggtcaggagttactggccaacatggtgaaaccccgtctctactaaagatttaaaaaatagccatgtgtagtggtgggcacctgtaatctctactcggaggctgaggtaggagaatcgcttgaacctgggaggcagaggttgcagtgagctgagagtgcaccactgcactccaccctgtgtgacagaaggaaaccctgactc

SEQ ID NO: 384306 - DNA, 350 bp, Homo sapiens
ccgagatcatgccactgcactccagcctgggcaacagagcaagactccatctcaaaaaaataaataaataaaagaatggcaggaagtaaaaacatccatttgaggaaaaacgaagcaatcagaactttaaagactagatattacaactctgaaacacttaacaaaaagtaaattcaccatgaaagtactaatttgtcatttgaatacaaaatgtttatcactataaactaaggggaaatgactaaatttatatgtatgtgtgtcctctgtagatatgtcctgttctctgacacctgtgggaagtaattgtccactgtttagcagaaattctgatttgcctcattttttca

SEQ ID NO: 384307 - DNA, 393 bp, Homo sapiens
gaggggattgggcagggaggtgagtacagcaggcgctcacaaagcggtcagctgtgggatgggaatggtcaactctgaagctacgggacttggagagagcctcagctgttggatgaaagagcgaaaacagatgcagtagttttcaaaccaagttccatggaggcattttaggggctttcctgggaaagcatgaagagctggaagaggtttatagccctctcctctctttccaccagaaatataaatgctttttctttctgtttcaacatgagattttatttgaaaaaatgatttcagtgtttttgtaataacttatttattgtagacatttttaagtacatgaaaatagcaagaataatataataaattctcattcttcaccaatgataattt

SEQ ID NO: 384308 - DNA, 1943 bp, Homo sapiens
ggtttccttcccatctcacagcttagcttgtgcttctcaacaccaagtctttaagagcaataaaaactacaccatgaatgtttgaattttttttttttgggggggggagggtggattttgcttttcatccagaaggaaaaggggaggagagctcctttacattttttaaattaaattcataaatcccagaacagtcttttttttttctttttcctttacaccctacttctgagcttaattcagttgatgttatgtccaaattcaggctgagtgctcaggctgaagcaactctgtagcccacagtccgtgctggccactgtcggggtgaggcacattctaggcctggcatcgctgatgccctctgcacccagtccttgagccaggccgaggacaggaagggcattgctggcctgtagctcctgttacccacccagagccaggcgccacactggaggctcccaggcgggagggcccaggcccacccacgggcgtctggccggtcaagctcccagcctgggccgtggtctcctggggacgccgctggcctcccagcttaggcccaggtgccaggtgtcatggggtctcctgcccatcttcccaaggatgccattgctgtcttcatcgtcttcccccgtgtgagacactggttgtctggtactcggcgacagtgtaccagacgcgcaccctatgtgaggtgctttaaggtccctgtcctcaggaagcgcagtctggtggaagagatgagcgctgaacaaatcactaaataacacaaaacaacaatgtaagcagcactttcttgtgtaaaaaaaaaaaaaaagcacgtcctgtcgatgaattttgagtctctctgccttgcctgtcccgactccctttcgcgcaccgtggcatgagaatctttcctcacgctgttcgttgcggtattgctgagcattgatgttgatttgaaggaaaagccgtggttggacccagctgtgtgtttcactcacgtgcaattgagtagctgttgccaggctgtccatgcctgttgtgactaccggttggggtcagatttggggtgaagaatgagtaagtttctgcatgctttgtctctacctgagacacttctacaacaagccaagtataatctctccagccctgcagattttcacctgacttgttcagccccatgcgtagactcccgctgcaggcctctggcctgtggctcactgcatgcagcccctggcgtgcaatactagtgctccacggcgcgatgtgcttctagcccttgcactgcacctaggctcagggttcaaacggccagcccgaaaagcctgcctgccttctttctggaaacagcacgtccccggccgtgtgcctgcccctttctctactgagctagtccccaaaccaaaggcaagccccctcgggcctcgggggatggggccggccacacccctgactccgccctggctctgccccatacccctgccgtggggccgacctgggggatgcagacatccggctccgtattcctgcctatcggggccaggatgcaaaaacaatttttgcgtaaaagatgtcacactgatctgctggagtggggtggacacatgaattcagttttatcatgaacactcgccactggctgcttgttaattcagggataatggtggcattcttacaaactgctcgggaaatagaatgacgggaacacttttagggagcccaggaagttaccagggacattggtgtcgccggcccaggcaacagcagcgtacgcttttcaaagatcattgagttgtcttagaatttgaagctgtgtaatgacaatgtcacctggagttcgtctccatttcttaactttttgttgcacaagtatttggacagaagtcgaactgtgaatgagatactgaaatgcactaaattgtattacattaaactggagttacttgatacaatgaaga

SEQ ID NO: 384309 - DNA, 2534 bp, Homo sapiens
ggtttccttcccatctcacagcttagcttgtgcttctcaacaccaagtctttaagagcaataaaaactacaccatgaatgtttgaattttttttttttgggggggggagggtggattttgcttttcatccagaaggaaaaggggaggagagctcctttacattttttaaattaaattcataaatcccagaacagtcttttttttttctttttcctttacaccctacttctgagcttaattcagttgatgttatgtccaaattcaggctgagtgctcaggctgaagcaactctgtagcccacagtccgtgctggccactgtcggggtgaggcacattctaggcctggcatcgctgatgccctctgcacccagtccttgagccaggccgaggacaggaagggcattgctggcctgtagctcctgttacccacccagagccaggcgccacactggaggctcccaggcgggagggcccaggcccacccacgggcgtctggccggtcaagctcccagcctgggccgtggtctcctggggacgccgctggcctcccagcttaggcccaggtgccaggtgtcatggggtctcctgcccatcttcccaaggatgccattgctgtcttcatcgtcttcccccgtgtgagacactggttgtctggtactcggcgacagtgtaccagacgcgcaccctatgtgaggtgctttaaggtccctgtcctcaggaagcgcagtctggtggaagagatgagcgctgaacaaatcactaaataacacaaaacaacaatgtaagcagcactttcttgtgtaaaaaaaaaaaaaaagcacgtcctgtcgatgaattttgagtctctctgccttgcctgtcccgactccctttcgcgcaccgtggcatgagaatctttcctcacgctgttcgttgcggtattgctgagcattgatgttgatttgaaggaaaagccgtggttggacccagctgtgtgtttcactcacgtgcaattgagtagctgttgccaggctgtccatgcctgttgtgactaccggttggggtcagatttggggtgaagaatgagtaagtttctgcatgctttgtctctacctgagacacttctacaacaagccaagtataatctctccagccctgcagattttcacctgacttgttcagccccatgcgtagactcccgctgcaggcctctggcctgtggctcactgcatgcagcccctggcgtgcaatactagtgctccacggcgcgatgtgcttctagcccttgcactgcacctaggctcagggttcaaacggccagcccgaaaagcctgcctgccttctttctggaaacagcacgtccccggccgtgtgcctgcccctttctctactgagctagtccccaaaccaaaggcaagccccctcgggcctcgggggatggggccggccacacccctgactccgccctggctctgccccatacccctgccgtggggccgacctgggggatgcagacatccggctccgtattcctgcctatcggggccaggatgcaaaaacaatttttgcgtaaaagatgtcacactgatctgctggagtggggtggacacatgaattcagttttatcatgaacactcgccactggctgcttgttaattcagggataatggtggcattcttacaaactgctcgggaaatagaatgacgggaacacttttagggagcccaggaagttaccagggacattggtgtcgccggcccaggcaacagcagcgtacgcttttcaaagatcattgagttgtcttagaatttgaagctgtgtaatgacaatgtcacctggagttcgtctccatttcttaactttttgttgcacaagtatttggacagaagtcgaactgtgaatgagatactgaaatgcactaaattgtattacattaaactggagttacttgatacaatgaagaaatgcatctgatctacttgtatttattgtctcagaattgtacgttgtgacaatcaaatgttacttgcctaaatgccaggaaattcaactggccttttaatcagcaagatcgccagcaagtactgtaactgtaaaggaaaatctctctctctggagaacccacacaaaccattgacctgagtgcgcatgacagccactggcttctttttctatgattgaaaatctgccatcgctgactgttggccagtttcaaagggacccattgtatacagggtgcaaatgtattatacggatgtttccttttgtacacttcatttttacaagttttgctactcacaagctttatgtagtggaggatagaggtatttttggtctttagaagcttgtcggggtgagggctgctaacttacacttcagaggcctgtgtcccaaaggcctggctgcgtttgccgtgctgtgcgaggacctgtgtacacaggcaggtgtgcgcctgcccgagcgcgagtagctcttgtgtagtggtgaaatgctgcaggcatctgtttattaaaattgctgctgtgaaagacagggataaaatatccacaatata

SEQ ID NO: 384310 - DNA, 1450 bp, Homo sapiens
ggtttccttcccatctcacagcttagcttgtgcttctcaacaccaagtctttaagagcaataaaaactacaccatgaatgtttgaattttttttttttgggggggggagggtggattttgcttttcatccagaaggaaaaggggaggagagctcctttacattttttaaattaaattcataaatcccagaacaggcccaggcaacagcagcgtacgcttttcaaagatcattgagttgtcttagaatttgaagctgtgtaatgacaatgtcacctggagttcgtctccatttcttaactttttgttgcacaagtatttggacagaagtcgaactgtgaatgagatactgaaatgcactaaattgtattacattaaactggagttacttgatacaatgaagaaatgcatctgatctacttgtatttattgtctcagaattgtacgttgtgacaatcaaatgttacttgcctaaatgccaggaaattcaactggccttttaatcagcaagatcgccagcaagtactgtaactgtaaaggaaaatctctctctctggagaacccacacaaaccattgacctgagtgcgcatgacagccactggcttctttttctatgattgaaaatctgccatcgctgactgttggccagtttcaaagggacccattgtatacagggtgcaaatgtattatacggatgtttccttttgtacacttcatttttacaagttttgctactcacaagctttatgtagtggaggatagaggtatttttggtctttagaagcttgtcggggtgagggctgctaacttacacttcagaggcctgtgtcccaaaggcctggctgcgtttgccgtgctgtgcgaggacctgtgtacacaggcaggtgtgcgcctgcccgagcgcgagtagctcttgtgtagtggtgaaatgctgcaggcatctgtttattaaaattgctgctgtgaaagacagggataaaatatccacaatataagagaaagcgacaaaaagcctccttctgtttcttcgtttccagtctgcatagatgtctccaaggggaaaccagggccaccaggcactcctgtcccatggggccacccaccttcagagcccactcccacgggctctgtttccttggaggccatcctgccgatggcacttttcaaggccctcccttccctacgagttgctttctgggaggggaaattgaaaaggagagcggtcacctggcaaaaacacaggggaaatcagccagtccacaaaaatacgcaaaatgacctgatgatgtccaaaaaagggttttaaaagcgatcaaggacaaaaggttttcctaagtggcatgtatacatccaaaactactctttttttgtaaaaacattcatctgtggagaaaaccaaggaacccctttctcttctttattaaaaagcaaaacaaaaactcttgttagaac

SEQ ID NO: 384311 - DNA, 2992 bp, Homo sapiens
ggtttccttcccatctcacagcttagcttgtgcttctcaacaccaagtctttaagagcaataaaaactacaccatgaatgtttgaattttttttttttgggggggggagggtggattttgcttttcatccagaaggaaaaggggaggagagctcctttacattttttaaattaaattcataaatcccagaacagtcttttttttttctttttcctttacaccctacttctgagcttaattcagttgatgttatgtccaaattcaggctgagtgctcaggctgaagcaactctgtagcccacagtccgtgctggccactgtcggggtgaggcacattctaggcctggcatcgctgatgccctctgcacccagtccttgagccaggccgaggacaggaagggcattgctggcctgtagctcctgttacccacccagagccaggcgccacactggaggctcccaggcgggagggcccaggcccacccacgggcgtctggccggtcaagctcccagcctgggccgtggtctcctggggacgccgctggcctcccagcttaggcccaggtgccaggtgtcatggggtctcctgcccatcttcccaaggatgccattgctgtcttcatcgtcttcccccgtgtgagacactggttgtctggtactcggcgacagtgtaccagacgcgcaccctatgtgaggtgctttaaggtccctgtcctcaggaagcgcagtctggtggaagagatgagcgctgaacaaatcactaaataacacaaaacaacaatgtaagcagcactttcttgtgtaaaaaaaaaaaaaaagcacgtcctgtcgatgaattttgagtctctctgccttgcctgtcccgactccctttcgcgcaccgtggcatgagaatctttcctcacgctgttcgttgcggtattgctgagcattgatgttgatttgaaggaaaagccgtggttggacccagctgtgtgtttcactcacgtgcaattgagtagctgttgccaggctgtccatgcctgttgtgactaccggttggggtcagatttggggtgaagaatgagtaagtttctgcatgctttgtctctacctgagacacttctacaacaagccaagtataatctctccagccctgcagattttcacctgacttgttcagccccatgcgtagactcccgctgcaggcctctggcctgtggctcactgcatgcagcccctggcgtgcaatactagtgctccacggcgcgatgtgcttctagcccttgcactgcacctaggctcagggttcaaacggccagcccgaaaagcctgcctgccttctttctggaaacagcacgtccccggccgtgtgcctgcccctttctctactgagctagtccccaaaccaaaggcaagccccctcgggcctcgggggatggggccggccacacccctgactccgccctggctctgccccatacccctgccgtggggccgacctgggggatgcagacatccggctccgtattcctgcctatcggggccaggatgcaaaaacaatttttgcgtaaaagatgtcacactgatctgctggagtggggtggacacatgaattcagttttatcatgaacactcgccactggctgcttgttaattcagggataatggtggcattcttacaaactgctcgggaaatagaatgacgggaacacttttagggagcccaggaagttaccagggacattggtgtcgccggcccaggcaacagcagcgtacgcttttcaaagatcattgagttgtcttagaatttgaagctgtgtaatgacaatgtcacctggagttcgtctccatttcttaactttttgttgcacaagtatttggacagaagtcgaactgtgaatgagatactgaaatgcactaaattgtattacattaaactggagttacttgatacaatgaagaaatgcatctgatctacttgtatttattgtctcagaattgtacgttgtgacaatcaaatgttacttgcctaaatgccaggaaattcaactggccttttaatcagcaagatcgccagcaagtactgtaactgtaaaggaaaatctctctctctggagaacccacacaaaccattgacctgagtgcgcatgacagccactggcttctttttctatgattgaaaatctgccatcgctgactgttggccagtttcaaagggacccattgtatacagggtgcaaatgtattatacggatgtttccttttgtacacttcatttttacaagttttgctactcacaagctttatgtagtggaggatagaggtatttttggtctttagaagcttgtcggggtgagggctgctaacttacacttcagaggcctgtgtcccaaaggcctggctgcgtttgccgtgctgtgcgaggacctgtgtacacaggcaggtgtgcgcctgcccgagcgcgagtagctcttgtgtagtggtgaaatgctgcaggcatctgtttattaaaattgctgctgtgaaagacagggataaaatatccacaatataagagaaagcgacaaaaagcctccttctgtttcttcgtttccagtctgcatagatgtctccaaggggaaaccagggccaccaggcactcctgtcccatggggccacccaccttcagagcccactcccacgggctctgtttccttggaggccatcctgccgatggcacttttcaaggccctcccttccctacgagttgctttctgggaggggaaattgaaaaggagagcggtcacctggcaaaaacacaggggaaatcagccagtccacaaaaatacgcaaaatgacctgatgatgtccaaaaaagggttttaaaagcgatcaaggacaaaaggttttcctaagtggcatgtatacatccaaaactactctttttttgtaaaaacattcatctgtggagaaaaccaaggaacccctttctcttctttattaaaaagcaaaacaaaaactcttgttagaac

SEQ ID NO: 384312 - DNA, 1365 bp, Homo sapiens
tatatattatacaaatacagtattatgtatagtacgtttatgctgttttgagcctccttgccctcatcctttgattcttgcctttttaatttcttgccagtttactatttatactgacaaaagcaacttagagtgtatacacaaaagattttataaaatcagtttatgtcctagtatttataatcccagattttataatataaaccatagaattttcaactttagtgactaaggatttttgggcaaaagatatgtgatatcctttatatcctctactttatagccacacttctaatttgaggtaaatcctctccttcaattttcttatagtccaatcagtgaaagtcgaagagtactacaggaatcatgtgagtttttcttaaagcacaattctaaagttaaacacaaaaagaagcactataaaccaagttcacacaagctgaaggtcatttccaaatccatgggaaccagcacaggagctacagcaaatcatggcacttctgcagtagcaattactagccatgattacctaggacaagaaactttgacagaaatccaaacctcaccagaaacatcaatgagagaggtgaaagcggacggagctagcacccccaggttaagagaacaggactgtggtgaacctgcctcgccagcagcatccatctccagactctctggggaacaggtcgacgggaagggccaggcaggcagtgtatctgaaagtgcgcggagtgaaggaaggtgagatttgattttatgtaaaatcatcactattttaaatactgcattacacattttttattaaagcataacacatttggaaagcattttgtgatatattatgtctgtactcttaccccaaggaagtttgggttcagcctataaatatgctatttagtagtttaattcttagctttgagaacagctttaatataggtggttcaagtaggaatgttcatttctgtggcaattgttaagagttccttgtacatttaagtaaatgcaatttacccaaaatacaggctaagttttaattaatactacattataattctgtctaaaaagtgtcaccttatacaaaattataatgtgtcattttatctaaaattattttattttctgaacatgaaaagatattgacattatctttaatgaattttctcaaatggccataggtgaccaaaacacaggtaagccagaatgcagacagctaattgcattaagatctcaaggttatcttacctagtcctctcagactaggctaaatgcaccttctctgtgatcctatgccgctttcatatatttggattgtaattagatacatgctttatcttctcgtagatttgtaaccttctcaatgggaga

SEQ ID NO: 384313 - DNA, 3099 bp, Homo sapiens
tctcgctccccgtgcggctctcgaggcagctccagtcccggacgcaaccccggagccgtctcaggtccctggggggaacggtgggttagacggggacgggaagggacagcggccttcgaccgccccccgagtaattgacccaggactcattttcaggaaagcctgaaaatgagtaaaatagtgaaatgaggaatttgaacattttatctttggatggggatcttctgaggatgcaaagagtgattcatccaagccatgtgatgtatgaaaatggcctacaacatgacgtttttccctaatctgatgggtcattatgaccagagtattgccgcggtggaaatggagcattttcttcctctcgcaaatctggaatgttcaccaaacattgaaactttcctctgcaaagcatttgtaccaacctgcatagaacaaattcatgtggttccaccttgtcgtaaactttgtgagaaagtatattctgattgcaaaaaattaattgacacttttgggatccgatggcctgaggagcttgaatgtgacagctgcaggaagaaaatggagttgtgaagccatcgagcaaaaagcagtgtggtttcatgctgttgcatggggaacaccaggtttcctgactgttatgcttcttgctctgaacaaagttgaaggagacaacattagtggagtttgctttgttggcctttatgacctggatgcttctcgctactttgtactcttgccactgtgcctttgtgtgtttgttgggctctctcttcttttagctggcattatttccttaaatcatgttcgacaagtcatacaacatgatggccggaaccaagaaaaactaaagaaatttatgattcgaattggagtcttcagcggcttgtatcttgtgccattagtgacacttctcggatgttacgtctatgagcaagtgaacaggattacctgggagataacttgggtctctgatcattgtcgtcagtaccatatcccatgtccttatcaggcaaaagcaaaagctcgaccagaattggctttatttatgataaaatacctgatgacattaattgttggcatctctgctgtcttctgggttggaagcaaaaagacatgcacagaatgggctgggttttttaaacgaaatcgcaagagagatccaatcagtgaaagtcgaagagtactacaggaatcatgtgagtttttcttaaagcacaattctaaagttaaacacaaaaagaagcactataaaccaagttcacacaagctgaaggtcatttccaaatccatgggaaccagcacaggagctacagcaaatcatggcacttctgcagtagcaattactagccatgattacctaggacaagaaactttgacagaaatccaaacctcaccagaaacatcaatgagagaggtgaaagcggacggagctagcacccccaggttaagagaacaggactgtggtgaacctgcctcgccagcagcatccatctccagactctctggggaacaggtcgacgggaagggccaggcaggcagtgtatctgaaagtgcgcggagtgaaggaaggattagtccaaagagtgatattactgacactggcctggcacagagcaacaatttgcaggtccccagttcttcagaaccaagcagcctcaaaggttccacatctctgcttgttcacccggtttcaggagtgagaaaagagcagggaggtggttgtcattcagatacttgaagaacattttctctcgttactcagaagcaaatttgtgttacactggaagtgacctatgcactgttttgtaagaatcactgttacgttcttcttttgcacttaaagttgcattgcctactgttatactggaaaaaatagagttcaagaataatatgactcatttcacacaaaggttaatgacaacaatatacctgaaaacagaaatgtgcaggttaataatatttttttaatagtgtgggaggacagagttagaggaatcttccttttctatttatgaagattctactcttggtaagagtattttaagatgtactatgctattttacttttttgatataaaatcaagatatttctttgctgaagtatttaaatcttatccttgtatctttttatacatatttgaaaataagcttatatgtatttgaacttttttgaaatcctattcaagtatttttatcatgctattgtgatattttagcactttggtagcttttacactgaatttctaagaaaattgtaaaatagtcttcttttatactgtaaaaaaagatataccaaaaagtcttataataggaatttaactttaaaaacccacttattgataccttaccatctaaaatgtgtgatttttatagtctcgttttaggaatttcacagatctaaattatgtaactgaaataaggtgcttactcaaagagtgtccactattgattgtattatgctgctcactgatccttctgcatatttaaaataaaatgtcctaaagggttagtagacaaaatgttagtcttttgtatattaggccaagtgcaattgacttcccttttttaatgtttcatgaccacccattgattgtattataaccacttacagttgcttatattttttgttttaacttttgttttttaacatttagaatattacattttgtattatacagtacctttctcagacattttgtagaattcatttcggcagctcactaggattttgctgaacattaaaaagtgtgatagcgatattagtgccaatcaaatggaaaaaaggtagtcttaataaacaagacacaacgtttttatacaacatactttaaaatattaaggagttttcttaattttgtttcctattaagtattattctttgggcaagattttctgatgcttttgattttctctcaatttagcatttgcttttggtttttttctctatttagcattctgttaaggcacaaaaactatgtactgtatgggaaatgttgtaaatattaccttttccacattttaaacagacaactttgaatacaaaaactttgttttgtgtgatcttttcattaataaaattatctttgtataagaaaaaaaaag

SEQ ID NO: 384314 - DNA, 2274 bp, Homo sapiens
tatatattatacaaatacagtattatgtatagtacgtttatgctgttttgagcctccttgccctcatcctttgattcttgcctttttaatttcttgccagtttactatttatactgacaaaagcaacttagagtgtatacacaaaagattttataaaatcagtttatgtcctagtatttataatcccagattttataatataaaccatagaattttcaactttagtgactaaggatttttgggcaaaagatatgtgatatcctttatatcctctactttatagccacacttctaatttgaggtaaatcctctccttcaattttcttatagtccaatcagtgaaagtcgaagagtactacaggaatcatgtgagtttttcttaaagcacaattctaaagttaaacacaaaaagaagcactataaaccaagttcacacaagctgaaggtcatttccaaatccatgggaaccagcacaggagctacagcaaatcatggcacttctgcagtagcaattactagccatgattacctaggacaagaaactttgacagaaatccaaacctcaccagaaacatcaatgagagaggtgaaagcggacggagctagcacccccaggttaagagaacaggactgtggtgaacctgcctcgccagcagcatccatctccagactctctggggaacaggtcgacgggaagggccaggcaggcagtgtatctgaaagtgcgcggagtgaaggaaggattagtccaaagagtgatattactgacactggcctggcacagagcaacaatttgcaggtccccagttcttcagaaccaagcagcctcaaaggttccacatctctgcttgttcacccggtttcaggagtgagaaaagagcagggaggtggttgtcattcagatacttgaagaacattttctctcgttactcagaagcaaatttgtgttacactggaagtgacctatgcactgttttgtaagaatcactgttacgttcttcttttgcacttaaagttgcattgcctactgttatactggaaaaaatagagttcaagaataatatgactcatttcacacaaaggttaatgacaacaatatacctgaaaacagaaatgtgcaggttaataatatttttttaatagtgtgggaggacagagttagaggaatcttccttttctatttatgaagattctactcttggtaagagtattttaagatgtactatgctattttacttttttgatataaaatcaagatatttctttgctgaagtatttaaatcttatccttgtatctttttatacatatttgaaaataagcttatatgtatttgaacttttttgaaatcctattcaagtatttttatcatgctattgtgatattttagcactttggtagcttttacactgaatttctaagaaaattgtaaaatagtcttcttttatactgtaaaaaaagatataccaaaaagtcttataataggaatttaactttaaaaacccacttattgataccttaccatctaaaatgtgtgatttttatagtctcgttttaggaatttcacagatctaaattatgtaactgaaataaggtgcttactcaaagagtgtccactattgattgtattatgctgctcactgatccttctgcatatttaaaataaaatgtcctaaagggttagtagacaaaatgttagtcttttgtatattaggccaagtgcaattgacttcccttttttaatgtttcatgaccacccattgattgtattataaccacttacagttgcttatattttttgttttaacttttgttttttaacatttagaatattacattttgtattatacagtacctttctcagacattttgtagaattcatttcggcagctcactaggattttgctgaacattaaaaagtgtgatagcgatattagtgccaatcaaatggaaaaaaggtagtcttaataaacaagacacaacgtttttatacaacatactttaaaatattaaggagttttcttaattttgtttcctattaagtattattctttgggcaagattttctgatgcttttgattttctctcaatttagcatttgcttttggtttttttctctatttagcattctgttaaggcacaaaaactatgtactgtatgggaaatgttgtaaatattaccttttccacattttaaacagacaactttgaatacaaaaactttgttttgtgtgatcttttcattaataaaattatctttgtataagaaaaaaaaag

SEQ ID NO: 384315 - DNA, 2071 bp, Homo sapiens
  misc_feature (113)..(113): n is a, c, g, or t
aatggggtggtactggtggttggtaacagatgtagaggggggtcatctcctgctccctcagtccactgttgtggatgtaggagaggcatttttcgaattaacccagtcagacnaaaatagaaaagagaattttaaaaaatgaacaaatccttttaaaaaaatcatgtgagtttttcttaaagcacaattctaaagttaaacacaaaaagaagcactataaaccaagttcacacaagctgaaggtcatttccaaatccatgggaaccagcacaggagctacagcaaatcatggcacttctgcagtagcaattactagccatgattacctaggacaagaaactttgacagaaatccaaacctcaccagaaacatcaatgagagaggtgaaagcggacggagctagcacccccaggttaagagaacaggactgtggtgaacctgcctcgccagcagcatccatctccagactctctggggaacaggtcgacgggaagggccaggcaggcagtgtatctgaaagtgcgcggagtgaaggaaggattagtccaaagagtgatattactgacactggcctggcacagagcaacaatttgcaggtccccagttcttcagaaccaagcagcctcaaaggttccacatctctgcttgttcacccggtttcaggagtgagaaaagagcagggaggtggttgtcattcagatacttgaagaacattttctctcgttactcagaagcaaatttgtgttacactggaagtgacctatgcactgttttgtaagaatcactgttacgttcttcttttgcacttaaagttgcattgcctactgttatactggaaaaaatagagttcaagaataatatgactcatttcacacaaaggttaatgacaacaatatacctgaaaacagaaatgtgcaggttaataatatttttttaatagtgtgggaggacagagttagaggaatcttccttttctatttatgaagattctactcttggtaagagtattttaagatgtactatgctattttacttttttgatataaaatcaagatatttctttgctgaagtatttaaatcttatccttgtatctttttatacatatttgaaaataagcttatatgtatttgaacttttttgaaatcctattcaagtatttttatcatgctattgtgatattttagcactttggtagcttttacactgaatttctaagaaaattgtaaaatagtcttcttttatactgtaaaaaaagatataccaaaaagtcttataataggaatttaactttaaaaacccacttattgataccttaccatctaaaatgtgtgatttttatagtctcgttttaggaatttcacagatctaaattatgtaactgaaataaggtgcttactcaaagagtgtccactattgattgtattatgctgctcactgatccttctgcatatttaaaataaaatgtcctaaagggttagtagacaaaatgttagtcttttgtatattaggccaagtgcaattgacttcccttttttaatgtttcatgaccacccattgattgtattataaccacttacagttgcttatattttttgttttaacttttgttttttaacatttagaatattacattttgtattatacagtacctttctcagacattttgtagaattcatttcggcagctcactaggattttgctgaacattaaaaagtgtgatagcgatattagtgccaatcaaatggaaaaaaggtagtcttaataaacaagacacaacgtttttatacaacatactttaaaatattaaggagttttcttaattttgtttcctattaagtattattctttgggcaagattttctgatgcttttgattttctctcaatttagcatttgcttttggtttttttctctatttagcattctgttaaggcacaaaaactatgtactgtatgggaaatgttgtaaatattaccttttccacattttaaacagacaactttgaatacaaaaactttgttttgtgtgatcttttcattaataaaattatctttgtataagaaaaaaaaag

SEQ ID NO: 384316 - DNA, 1576 bp, Homo sapiens
tgtttgtggatgtgtgtgtgtcaactttttttcttttatctaggattagtccaaagagtgatattactgacactggcctggcacagagcaacaatttgcaggtccccagttcttcagaaccaagcagcctcaaaggttccacatctctgcttgttcacccggtttcaggagtgagaaaagagcagggaggtggttgtcattcagatacttgaagaacattttctctcgttactcagaagcaaatttgtgttacactggaagtgacctatgcactgttttgtaagaatcactgttacgttcttcttttgcacttaaagttgcattgcctactgttatactggaaaaaatagagttcaagaataatatgactcatttcacacaaaggttaatgacaacaatatacctgaaaacagaaatgtgcaggttaataatatttttttaatagtgtgggaggacagagttagaggaatcttccttttctatttatgaagattctactcttggtaagagtattttaagatgtactatgctattttacttttttgatataaaatcaagatatttctttgctgaagtatttaaatcttatccttgtatctttttatacatatttgaaaataagcttatatgtatttgaacttttttgaaatcctattcaagtatttttatcatgctattgtgatattttagcactttggtagcttttacactgaatttctaagaaaattgtaaaatagtcttcttttatactgtaaaaaaagatataccaaaaagtcttataataggaatttaactttaaaaacccacttattgataccttaccatctaaaatgtgtgatttttatagtctcgttttaggaatttcacagatctaaattatgtaactgaaataaggtgcttactcaaagagtgtccactattgattgtattatgctgctcactgatccttctgcatatttaaaataaaatgtcctaaagggttagtagacaaaatgttagtcttttgtatattaggccaagtgcaattgacttcccttttttaatgtttcatgaccacccattgattgtattataaccacttacagttgcttatattttttgttttaacttttgttttttaacatttagaatattacattttgtattatacagtacctttctcagacattttgtagaattcatttcggcagctcactaggattttgctgaacattaaaaagtgtgatagcgatattagtgccaatcaaatggaaaaaaggtagtcttaataaacaagacacaacgtttttatacaacatactttaaaatattaaggagttttcttaattttgtttcctattaagtattattctttgggcaagattttctgatgcttttgattttctctcaatttagcatttgcttttggtttttttctctatttagcattctgttaaggcacaaaaactatgtactgtatgggaaatgttgtaaatattaccttttccacattttaaacagacaactttgaatacaaaaactttgttttgtgtgatcttttcattaataaaattatctttgtataagaaaaaaaaag

SEQ ID NO: 384317 - DNA, 2856 bp, Homo sapiens
atacggatccgtcgacggccattaccaatcgcgaaaccacgcaaccccggagccgtctcaggtccctggggggaacggtgggttagacggggacgggaagggacagcggccttcgaccgccccccgagtaattgacccaggactcattttcaggaaagcctgaaaatgagtaaaatagtgaaatgaggaatttgaacattttatctttggatggggatcttctgaggatgcaaagagtgattcatccaagccatgtggtaaaatcaggaatttgaagaaaatggagatgtttacatttttgttgacgtgtatttttctacccctcctaagagggcacagtctcttcacctgtgaaccaattactgttcccagatgtatgaaaatggcctacaacatgacgtttttccctaatctgatgggtcattatgaccagagtattgccgcggtggaaatggagcattttcttcctctcgcaaatctggaatgttcaccaaacattgaaactttcctctgcaaagcatttgtaccaacctgcatagaacaaattcatgtggttccaccttgtcgtaaactttgtgagaaagtatattctgattgcaaaaaattaattgacacttttgggatccgatggcctgaggagcttgaatgtgacagattacaatactgtgatgagactgttcctgtaacttttgatccacacacagaatttcttggtcctcagaagaaaacagaacaagtccaaagagacattggattttggtgtccaaggcatcttaagacttctgggggacaaggatataagtttctgggaattgaccagtgtgcgcctccatgccccaacatgtattttaaaagtgatgagctagagtttgcaaaaagttttattggaacagtttcaatattttgtctttgtgcaactctgttcacattccttacttttttaattgatgttagaagattcagatacccagagagaccaattatatattactctgtctgttacagcattgtatctcttatgtacttcattggatttttgctgggcgatagcacagcctgcaataaggcagatgagaagctagaacttggtgacactgttgtcctaggctctcaaaataaggcttgcaccgttttgttcatgcttttgtattttttcacaatggctggcactgtgtggtgggtgattcttaccattacttggttcttagctgcaggaagaaaatggagttgtgaagccatcgagcaaaaagcagtgtggtttcatgctgttgcatggggaacaccaggtttcctgactgttatgcttcttgctctgaacaaagttgaaggagacaacattagtggagtttgctttgttggcctttatgacctggatgcttctcgctactttgtactcttgccactgtgcctttgtgtgtttgttgggctctctcttcttttagctggcattatttccttaaatcatgttcgacaagtcatacaacatgatggccggaaccaagaaaaactaaagaaatttatgattcgaattggagtcttcagcggcttgtatcttgtgccattagtgacacttctcggatgttacgtctatgagcaagtgaacaggattacctgggagataacttgggtctctgatcattgtcgtcagtaccatatcccatgtccttatcaggcaaaagcaaaagctcgaccagaattggctttatttatgataaaatacctgatgacattaattgttggcatctctgctgtcttctgggttggaagcaaaaagacatgcacagaatgggctgggttttttaaacgaaatcgcaagagagatccaatcagtgaaagtcgaagagtactacaggaatcatgtgagtttttcttaaagcacaattctaaagttaaacacaaaaagaagcactataaaccaagttcacacaagctgaaggtcatttccaaatccatgggaaccagcacaggagctacagcaaatcatggcacttctgcagtagcaattactagccatgattacctaggacaagaaactttgacagaaatccaaacctcaccagaaacatcaatgagagaggtgaaagcggacggagctagcacccccaggttaagagaacaggactgtggtgaacctgcctcgccagcagcatccatctccagactctctggggaacaggtcgacgggaagggccaggcaggcagtgtatctgaaagtgcgcggagtgaaggaaggtgagatttgattttatgtaaaatcatcactattttaaatactgcattacacattttttattaaagcataacacatttggaaagcattttgtgatatattatgtctgtactcttaccccaaggaagtttgggttcagcctataaatatgctatttagtagtttaattcttagctttgagaacagctttaatataggtggttcaagtaggaatgttcatttctgtggcaattgttaagagttccttgtacatttaagtaaatgcaatttacccaaaatacaggctaagttttaattaatactacattataattctgtctaaaaagtgtcaccttatacaaaattataatgtgtcattttatctaaaattattttattttctgaacatgaaaagatattgacattatctttaatgaattttctcaaatggccataggtgaccaaaacacaggtaagccagaatgcagacagctaattgcattaagatctcaaggttatcttacctagtcctctcagactaggctaaatgcaccttctctgtgatcctatgccgctttcatatatttggattgtaattagatacatgctttatcttctcgtagatttgtaaccttctcaatgggaga

SEQ ID NO: 384318 - DNA, 3765 bp, Homo sapiens
atacggatccgtcgacggccattaccaatcgcgaaaccacgcaaccccggagccgtctcaggtccctggggggaacggtgggttagacggggacgggaagggacagcggccttcgaccgccccccgagtaattgacccaggactcattttcaggaaagcctgaaaatgagtaaaatagtgaaatgaggaatttgaacattttatctttggatggggatcttctgaggatgcaaagagtgattcatccaagccatgtggtaaaatcaggaatttgaagaaaatggagatgtttacatttttgttgacgtgtatttttctacccctcctaagagggcacagtctcttcacctgtgaaccaattactgttcccagatgtatgaaaatggcctacaacatgacgtttttccctaatctgatgggtcattatgaccagagtattgccgcggtggaaatggagcattttcttcctctcgcaaatctggaatgttcaccaaacattgaaactttcctctgcaaagcatttgtaccaacctgcatagaacaaattcatgtggttccaccttgtcgtaaactttgtgagaaagtatattctgattgcaaaaaattaattgacacttttgggatccgatggcctgaggagcttgaatgtgacagattacaatactgtgatgagactgttcctgtaacttttgatccacacacagaatttcttggtcctcagaagaaaacagaacaagtccaaagagacattggattttggtgtccaaggcatcttaagacttctgggggacaaggatataagtttctgggaattgaccagtgtgcgcctccatgccccaacatgtattttaaaagtgatgagctagagtttgcaaaaagttttattggaacagtttcaatattttgtctttgtgcaactctgttcacattccttacttttttaattgatgttagaagattcagatacccagagagaccaattatatattactctgtctgttacagcattgtatctcttatgtacttcattggatttttgctgggcgatagcacagcctgcaataaggcagatgagaagctagaacttggtgacactgttgtcctaggctctcaaaataaggcttgcaccgttttgttcatgcttttgtattttttcacaatggctggcactgtgtggtgggtgattcttaccattacttggttcttagctgcaggaagaaaatggagttgtgaagccatcgagcaaaaagcagtgtggtttcatgctgttgcatggggaacaccaggtttcctgactgttatgcttcttgctctgaacaaagttgaaggagacaacattagtggagtttgctttgttggcctttatgacctggatgcttctcgctactttgtactcttgccactgtgcctttgtgtgtttgttgggctctctcttcttttagctggcattatttccttaaatcatgttcgacaagtcatacaacatgatggccggaaccaagaaaaactaaagaaatttatgattcgaattggagtcttcagcggcttgtatcttgtgccattagtgacacttctcggatgttacgtctatgagcaagtgaacaggattacctgggagataacttgggtctctgatcattgtcgtcagtaccatatcccatgtccttatcaggcaaaagcaaaagctcgaccagaattggctttatttatgataaaatacctgatgacattaattgttggcatctctgctgtcttctgggttggaagcaaaaagacatgcacagaatgggctgggttttttaaacgaaatcgcaagagagatccaatcagtgaaagtcgaagagtactacaggaatcatgtgagtttttcttaaagcacaattctaaagttaaacacaaaaagaagcactataaaccaagttcacacaagctgaaggtcatttccaaatccatgggaaccagcacaggagctacagcaaatcatggcacttctgcagtagcaattactagccatgattacctaggacaagaaactttgacagaaatccaaacctcaccagaaacatcaatgagagaggtgaaagcggacggagctagcacccccaggttaagagaacaggactgtggtgaacctgcctcgccagcagcatccatctccagactctctggggaacaggtcgacgggaagggccaggcaggcagtgtatctgaaagtgcgcggagtgaaggaaggattagtccaaagagtgatattactgacactggcctggcacagagcaacaatttgcaggtccccagttcttcagaaccaagcagcctcaaaggttccacatctctgcttgttcacccggtttcaggagtgagaaaagagcagggaggtggttgtcattcagatacttgaagaacattttctctcgttactcagaagcaaatttgtgttacactggaagtgacctatgcactgttttgtaagaatcactgttacgttcttcttttgcacttaaagttgcattgcctactgttatactggaaaaaatagagttcaagaataatatgactcatttcacacaaaggttaatgacaacaatatacctgaaaacagaaatgtgcaggttaataatatttttttaatagtgtgggaggacagagttagaggaatcttccttttctatttatgaagattctactcttggtaagagtattttaagatgtactatgctattttacttttttgatataaaatcaagatatttctttgctgaagtatttaaatcttatccttgtatctttttatacatatttgaaaataagcttatatgtatttgaacttttttgaaatcctattcaagtatttttatcatgctattgtgatattttagcactttggtagcttttacactgaatttctaagaaaattgtaaaatagtcttcttttatactgtaaaaaaagatataccaaaaagtcttataataggaatttaactttaaaaacccacttattgataccttaccatctaaaatgtgtgatttttatagtctcgttttaggaatttcacagatctaaattatgtaactgaaataaggtgcttactcaaagagtgtccactattgattgtattatgctgctcactgatccttctgcatatttaaaataaaatgtcctaaagggttagtagacaaaatgttagtcttttgtatattaggccaagtgcaattgacttcccttttttaatgtttcatgaccacccattgattgtattataaccacttacagttgcttatattttttgttttaacttttgttttttaacatttagaatattacattttgtattatacagtacctttctcagacattttgtagaattcatttcggcagctcactaggattttgctgaacattaaaaagtgtgatagcgatattagtgccaatcaaatggaaaaaaggtagtcttaataaacaagacacaacgtttttatacaacatactttaaaatattaaggagttttcttaattttgtttcctattaagtattattctttgggcaagattttctgatgcttttgattttctctcaatttagcatttgcttttggtttttttctctatttagcattctgttaaggcacaaaaactatgtactgtatgggaaatgttgtaaatattaccttttccacattttaaacagacaactttgaatacaaaaactttgttttgtgtgatcttttcattaataaaattatctttgtataagaaaaaaaaag

SEQ ID NO: 384319 - DNA, 3386 bp, Homo sapiens
atacggatccgtcgacggccattaccaatcgcgaaaccacgcaaccccggagccgtctcaggtccctggggggaacggtgggttagacggggacgggaagggacagcggccttcgaccgccccccgagtaattgacccaggactcattttcaggaaagcctgaaaatgagtaaaatagtgaaatgaggaatttgaacattttatctttggatggggatcttctgaggatgcaaagagtgattcatccaagccatgtggtaaaatcaggaatttgaagaaaatggagatgtttacatttttgttgacgtgtatttttctacccctcctaagagggcacagtctcttcacctgtgaaccaattactgttcccagatgtatgaaaatggcctacaacatgacgtttttccctaatctgatgggtcattatgaccagagtattgccgcggtggaaatggagcattttcttcctctcgcaaatctggaatgttcaccaaacattgaaactttcctctgcaaagcatttgtaccaacctgcatagaacaaattcatgtggttccaccttgtcgtaaactttgtgagaaagtatattctgattgcaaaaaattaattgacacttttgggatccgatggcctgaggagcttgaatgtgacagattacaatactgtgatgagactgttcctgtaacttttgatccacacacagaatttcttggtcctcagaagaaaacagaacaagtccaaagagacattggattttggtgtccaaggcatcttaagacttctgggggacaaggatataagtttctgggaattgaccagtgtgcgcctccatgccccaacatgtattttaaaagtgatgagctagagtttgcaaaaagttttattggaacagtttcaatattttgtctttgtgcaactctgttcacattccttacttttttaattgatgttagaagattcagatacccagagagaccaattatatattactctgtctgttacagcattgtatctcttatgtacttcattggatttttgctgggcgatagcacagcctgcaataaggcagatgagaagctagaacttggtgacactgttgtcctaggctctcaaaataaggcttgcaccgttttgttcatgcttttgtattttttcacaatggctggcactgtgtggtgggtgattcttaccattacttggttcttagctgcaggaagaaaatggagttgtgaagccatcgagcaaaaagcagtgtggtttcatgctgttgcatggggaacaccaggtttcctgactgttatgcttcttgctctgaacaaagttgaaggagacaacattagtggagtttgctttgttggcctttatgacctggatgcttctcgctactttgtactcttgccactgtgcctttgtgtgtttgttgggctctctcttcttttagctggcattatttccttaaatcatgttcgacaagtcatacaacatgatggccggaaccaagaaaaactaaagaaatttatgattcgaattggagtcttcagcggcttgtatcttgtgccattagtgacacttctcggatgttacgtctatgagcaagtgaacaggattacctgggagataacttgggtctctgatcattgtcgtcagtaccatatcccatgtccttatcaggcaaaagcaaaagctcgaccagaattggctttatttatgataaaatacctgatgacattaattgttggcatctctgctgtcttctgggttggaagcaaaaagacatgcacagaatgggctgggttttttaaacgaaatcgcaagagagatccaatcagtgaaagtcgaagagtactacagggattagtccaaagagtgatattactgacactggcctggcacagagcaacaatttgcaggtccccagttcttcagaaccaagcagcctcaaaggttccacatctctgcttgttcacccggtttcaggagtgagaaaagagcagggaggtggttgtcattcagatacttgaagaacattttctctcgttactcagaagcaaatttgtgttacactggaagtgacctatgcactgttttgtaagaatcactgttacgttcttcttttgcacttaaagttgcattgcctactgttatactggaaaaaatagagttcaagaataatatgactcatttcacacaaaggttaatgacaacaatatacctgaaaacagaaatgtgcaggttaataatatttttttaatagtgtgggaggacagagttagaggaatcttccttttctatttatgaagattctactcttggtaagagtattttaagatgtactatgctattttacttttttgatataaaatcaagatatttctttgctgaagtatttaaatcttatccttgtatctttttatacatatttgaaaataagcttatatgtatttgaacttttttgaaatcctattcaagtatttttatcatgctattgtgatattttagcactttggtagcttttacactgaatttctaagaaaattgtaaaatagtcttcttttatactgtaaaaaaagatataccaaaaagtcttataataggaatttaactttaaaaacccacttattgataccttaccatctaaaatgtgtgatttttatagtctcgttttaggaatttcacagatctaaattatgtaactgaaataaggtgcttactcaaagagtgtccactattgattgtattatgctgctcactgatccttctgcatatttaaaataaaatgtcctaaagggttagtagacaaaatgttagtcttttgtatattaggccaagtgcaattgacttcccttttttaatgtttcatgaccacccattgattgtattataaccacttacagttgcttatattttttgttttaacttttgttttttaacatttagaatattacattttgtattatacagtacctttctcagacattttgtagaattcatttcggcagctcactaggattttgctgaacattaaaaagtgtgatagcgatattagtgccaatcaaatggaaaaaaggtagtcttaataaacaagacacaacgtttttatacaacatactttaaaatattaaggagttttcttaattttgtttcctattaagtattattctttgggcaagattttctgatgcttttgattttctctcaatttagcatttgcttttggtttttttctctatttagcattctgttaaggcacaaaaactatgtactgtatgggaaatgttgtaaatattaccttttccacattttaaacagacaactttgaatacaaaaactttgttttgtgtgatcttttcattaataaaattatctttgtataagaaaaaaaaag

SEQ ID NO: 384320 - DNA, 3099 bp, Homo sapiens
atacggatccgtcgacggccattaccaatcgcgaaaccacgcaaccccggagccgtctcaggtccctggggggaacggtgggttagacggggacgggaagggacagcggccttcgaccgccccccgagtaattgacccaggactcattttcaggaaagcctgaaaatgagtaaaatagtgaaatgaggaatttgaacattttatctttggatggggatcttctgaggatgcaaagagtgattcatccaagccatgtggtaaaatcaggaatttgaagaaaatggagatgtttacatttttgttgacgtgtatttttctacccctcctaagagggcacagtctcttcacctgtgaaccaattactgttcccagatgtatgaaaatggcctacaacatgacgtttttccctaatctgatgggtcattatgaccagagtattgccgcggtggaaatggagcattttcttcctctcgcaaatctggaatgttcaccaaacattgaaactttcctctgcaaagcatttgtaccaacctgcatagaacaaattcatgtggttccaccttgtcgtaaactttgtgagaaagtatattctgattgcaaaaaattaattgacacttttgggatccgatggcctgaggagcttgaatgtgacagattacaatactgtgatgagactgttcctgtaacttttgatccacacacagaatttcttggtcctcagaagaaaacagaacaagtccaaagagacattggattttggtgtccaaggcatcttaagacttctgggggacaaggatataagtttctgggaattgaccagtgtgcgcctccatgccccaacatgtattttaaaagtgatgagctagagtttgcaaaaagttttattggaacagtttcaatattttgtctttgtgcaactctgttcacattccttacttttttaattgatgttagaagattcagatacccagagagaccaattatatattactctgtctgttacagcattgtatctcttatgtacttcattggatttttgctgggcgatagcacagcctgcaataaggcagatgagaagctagaacttggtgacactgttgtcctaggctctcaaaataaggcttgcaccgttttgttcatgcttttgtattttttcacaatggctggcactgtgtggtgggtgattcttaccattacttggttcttagctgcaggaagaaaatggagttgtgaagccatcgagcaaaaagcagtgtggtttcatgctgttgcatggggaacaccaggtttcctgactgttatgcttcttgctctgaacaaagttgaaggagacaacattagtggagtttgctttgttggcctttatgacctggatgcttctcgctactttgtactcttgccactgtgcctttgtgtgtttgttgggctctctcttcttttagctggcattatttccttaaatcatgttcgacaagtcatacaacatgatggccggaaccaagaaaaactaaagaaatttatgattcgaattggagtcttcagcggcttgtatcttgtgccattagtgacacttctcggatgttacgtctatgagcaagtgaacaggattacctgggagataacttgggtctctgatcattgtcgtcagtaccatatcccatgtccttatcaggcaaaagcaaaagctcgaccagaattggctttatttatgataaaatacctgatgacattaattgttggcatctctgctgtcttctgggttggaagcaaaaagacatgcacagaatgggctgggttttttaaacgaaatcgcaagagagatccaatcagtgaaagtcgaagagtactacaggaatcatgtgagtttttcttaaagcacaattctaaagttaaacacaaaaagaagcactataaaccaagttcacacaagctgaaggtcatttccaaatccatgggaaccagcacaggagctacagcaaatcatggcacttctgcagtagcaattactagccatgattacctaggacaagaaactttgacagaaatccaaacctcaccagaaacatcaatgagagaggtgaaagcggacggagctagcacccccaggttaagagaacaggactgtggtgaacctgcctcgccagcagcatccatctccagactctctggggaacaggtcgacgggaagggccaggcaggcagtgtatctgaaagtgcgcggagtgaaggaaggattagtccaaagagtgatattactgacactggcctggcacagagcaacaatttgcaggtccccagttcttcagaaccaagcagcctcaaaggttccacatctctgcttgttcacccggtttcaggagtgagaaaagagcagggaggtggttgtcattcagatacttgaagaacattttctctcgttactcagaagcaaatttgtgttacactggaagtgacctatgcactgttttgtaagaatcactgttacgttcttcttttgcacttaaagttgcattgcctactgttatactggaaaaaatagagttcaagaataatatgactcatttcacacaaaggttaatgacaacaatatacctgaaaacagaaatgtgcaggttaataatatttttttaatagtgtgggaggacagagttagaggaatcttccttttctatttatgaagattctactcttggtaagagtattttaagatgtactatgctattttacttttttgatataaaatcaagatatttctttgctgaagtatttaaatcttatccttgtatctttttatacatatttgaaaataagcttatatgtatttgaacttttttgaaatcctattcaagtatttttatcatgctattgtgatattttagcactttggtagcttttacactgaatttctaagaaaattgtaaaatagtcttcttttatactgtaaaaaaagatataccaaaaagtcttataataggaatttaactttaaaaacccacttattgataccttaccatctaaaatgtgtgatttttatagtctcgttttaggaatttcacagatctaaattatgtaactgattgggatcctctgccgccccgc

SEQ ID NO: 384321 - DNA, 572 bp, Homo sapiens
gaaagggagaaacacttcttgcctccataattcagacagtaaactgatcgctgagatttaagtttgcttgtttcctggggaagcttgaagatcctcgtgggaccaccatcccctgctcagtcctccctggaagggggcactggctgggtataagccgcgtcaccgttgggtttgtgactttctggatggtgcctgggtttcacctggggctggctgaggaaaggggaggcggtagggtctgctctgtctgtcaggggcttgtggcttggcgggtgggctttgccatggtctcgcctcttgagtccagccccgtcctgatggggcagacttctgttcgttctgcttcctgggtgatgtcaatactgaatgagagggcaagagaaggggaaagggaaccgccatatgttcttcacgtgctgcaagggggctgtgtggttcccatgaaatggtcagcagagactttgggatgggtatgactcgtgggtcacagggttgactagacagaatctaaagaaggtgggtgcttagctgggaagtctgcagtagggacggatcactgtgaagctctaggg

SEQ ID NO: 384322 - DNA, 244 bp, Homo sapiens
caaaaaactataatgtactacttcaaaacatgctaaagatattattaaataaattataccagatattagacagtaacaaaaatcagaaacaagaaaattcagaaatgaagtgacagacataaataatttcaaaaattaagactaaacccgaagcaatataaaagtgagtgaacacagctggcaatgtcttaagaaaaagagaagtcagaaagaaataaacatttaaaagtcaaaagaaataaaa

SEQ ID NO: 384323 - DNA, 308 bp, Homo sapiens
ttgcatcaatttagtcaggagtggagctgggtttgggttttgttgttgccttcagtgcaccacagtcttcagatacttccagcaattgactgctattactttatgcttcttagagtagtgcctgaagtgcaagatatttattttgagtccttttattttgaacctgtctgtgctatgatagatccccattttattcagagtccttaatatggtcagcaaggctctacgtgatctggtagagggccagatagtaatcatttaggattttgtaggccacataatctctgtcacaactatttaattctgct

SEQ ID NO: 384324 - DNA, 437 bp, Homo sapiens
tacatctatgttcagttgcttctatttttatttgctttctggtcagttaaaaaataatttaaatcttatagtgcctcaattattttgtctacaatgtgactttattaattgtagtcctaatcacatgcaacaggatcagtctctgacacctgtcaatattactctgtgaaaacaggaaattataaatttgaatgatagtgacccaacctaaacacagtagctattgagtatcctggaattgccttgattactattattttcttggtcatttatttccttcttctgacttaatttttggtaccacatacttgtagcataagctggaatggtccagtcaaatcttggaattagtaaatcattttatgttcccaaagagcttattgtctgtattattctggaaacataatttattgcgtttgcactttattccaaattta

SEQ ID NO: 384325 - DNA, 641 bp, Homo sapiens
gactggactacttggacttggtattcttatcccctgttttctacttcaggggaagtttctcaggtttttggagacaatctctgtagcgcctcacttgaggctcctcctccagtgccatttctctgcatctttcctgactcttcccattttactccgcctactgtatcaatactttattcagattgcaggtatttattggtgtctcttgtcccactgccacagtgacctcctcaagaatagtgaactgtcttatttttataccctatccaagcacaatgcctgcggtgtaggtgctgaccaaatatgttctgaatgaatgagagagagagagactgtggggatgggggtgatggaggatgggggtcggagatagtggtggtgatactcaccttaataaggaacttcagatattgaaagtgtggaacagaatgagtcctaaaaggaaatgaagtgataaggatgacaaaatgacacctttgacaatggatctctgctttagaatattgccatttgcatatatactgactgactgaataactggttttattaatttctccttgaagttcaaatggccatatagctattaaagtgtgtacttggtttgctaggaaaaattttaaaaacttaaacctccaacagat

SEQ ID NO: 384326 - DNA, 278 bp, Homo sapiens
ggttctttgaggcatacaagagctaatgaatataagggtatgatagacagtcagcaagtttttgtcattattacttttgctactgtgcatgtaacatttaatgtggtatggtgatcagtactctttggtggtagttttattttgttttaagagacaaggtgtcactatgttgcccaggctagactcaatctcctggactcaagtgatcctccccatcagcttcccaggtacctgagattacaggggcctggcttctgtggttgcttaataagtccatg

SEQ ID NO: 384327 - DNA, 752 bp, Homo sapiens
acctcccctgctggcgcttcctgtcgctaccgctgcggcccagggcccgcgggagcccagggcggtgccgggtgagacaaggccggggtttggctcggattcaccgcgaggtatctaggctgccatgatgccaggccaagacctcggaagggccctcaggccagaggccaaggggtggccgctgccaagcagatggggctctttatggagtttggccctgaggacacgctgctgggcatggatgaggctgaagatgatgaggacctggaggctgagctgctggctctcacaggggaagcacaaaccacaggcaagaagccagcacccaaggggcaggcccccctgcccatggcccacatcgagaagttggcggcagactgtatgcgggatgtggaggaggaggaggaggaggaagggctggaggaagatgcagagctgctggtgtgtctgccaggctggtatcccagggctctgagacggagctgcaggaggtcttaggtgtggacgaggagactgagcccctggatggtgatgaggtagctgacccaggcggctctgaggaggagaacggcctagaagacactgaacctccagtgcagacagccgtcctgacagcttcagccccagcagctcaggtgggttctggaggagggcccctgtgcctctgatgctcctgtgcgcccagacgtaacacgtgtgtggcctggcctgcacagcaaggctgcagtcaccctttccaggaccctccccca

SEQ ID NO: 384328 - DNA, 3376 bp, Homo sapiens
acctcccctgctggcgcttcctgtcgctaccgctgcggcccagggcccgcgggagcccagggcggtgccgggtgagacaaggccggggtttggctcggattcaccgcgaggtatctaggctgccatgatgccaggccaagacctcggaagggccctcaggccagaggccaaggggtggccgctgccaagcagatggggctctttatggagtttggccctgaggacacgctgctgggcatggatgaggctgaagatgatgaggacctggaggctgagctgctggctctcacaggggaagcacaaaccacaggcaagaagccagcacccaaggggcaggcccccctgcccatggcccacatcgagaagttggcggcagactgtatgcgggatgtggaggaggaggaggaggaggaagggctggaggaagatgcagagctgctgacggagctgcaggaggtcttaggtgtggacgaggagactgagcccctggatggtgatgaggtagctgacccaggcggctctgaggaggagaacggcctagaagacactgaacctccagtgcagacagccgtcctgacagcttcagccccagcagctcaggccggagcatctcaggggctacacgctttgctggaggaacggattcacaactaccgagaggctgcggccagtgccaaggaggcaggcgaagcagccaaagccaggcgctgcgagcgcggcctgaagaccttggagtcgcagctagcctctgtgaggagaggcagaaagatcaatgaggatgagatcccacctccagtggccttaggaaagcggcccctggccccccaggaaccagccaacaggagccctgagacagaccctccagctccccctgccttggagtcagacaacccctcccaacctgagaccagcctccctggcatttctgcccagcccgtttcagacttagacccagacccgcgggccctgctgtcatcccgacagagagagtacaaagtggctgccctcagtgccaagcgggctggagagctagaccgtgcccgagagctcatgaggattgggaagagattcggtgctgtcctggaggccctggagaaggggcagcccgtggatctgagtgccatgcccccggcacctgaggatctgaagccccagcaggcttctcaggctcccacagcaccctcagtcattcccccagccgtggagcgagtgcagccagtgatggcccctgacgtcccagcaaccccagtggcccctacagagtcacagacagtgctggatgccctgcagcagaggctgaacaagtaccgcgaggcgggcatccaggcccggagtggtggggacgagcgcaaggctcggatgcatgagcgcattgccaagcaatatcaagatgctattcgagcacaccgagcaggacggaaagtcaactttgctgaattgcctgttcctccaggatttccccccatccctggcctggagtccactatgggtgttgaggaggacgcagtggcagcgacattggcagctgcagagaaactggcctctgcagaggattcagccccggctgataaagacgaggacgagaccagggtgagcccccagcacaggccccagtggccaagaaacctgcacggcccacagtcccttcatcccagcgcctgcctgagcccagggcctcaagttctaaggagtcaccgagtccatctgtgcgggagcagctggcactgctggaggcacggaaactgcagtatcagcgggcagccctgcaggccaagcgcagccaggacctggagcaggccaaagcctatctgcgggtagccaaatggcttgaggctcagatcatccaggcccgatctggcagacctgttgatctgtccaaggtgccttcgcccttgacggatgaggagggtgacttcatcctcatccaccatgaggacctgcgactctcccagaaggcggaggaggtgtatgcccagctgcaaaaaatgcttctggagcaacaagagaagtgcctgctgttctccaagcagttcatgcaccagggcaacgtggctgagaccacccgatttgagaagcttgctcaggaccgcaagaaacagctggagatcctgcagctggcccaggctcagggcctcgaccctcccacccaccactttgagttgaagacattccagactgtgaggatcttctcagaactcaacagcacagaaatgcatctgatcattgtccggggaatgaacctcccagcccctccaggggtgactcccgatgacctggatgcttttgtgcggtttgagtttcactaccctaactcggaccaggctcaaaaaagcaaaacagctgtggtgaagaacacaaactctccagaatttgatcaactcttcaaactaaacatcaaccgaaaccaccggggcttcaagagggtgatccagagcaaaggcatcaagtttgagatcttccacaaagggtccttcttcagaagcgacaagctggttggcacagcacacctgaaactggagcggctggagaatgagtgtgagatcagagaaattgtggaggtcctggatggaaggaagcccaccggggggaagctggaggtgaaggtgaggctgcgggagcctctgagtggccaggatgtgcagatggtcactgagaactggctggttctggagcccaggggcttgtgagccgatggccagcaccaggagaggagtcaggccgcgactgtgcaggagatgactttcccagctttgctggcttcagaagcctttgtacataagagatgctgctacccaagcaccaaagacctgttaagcatgtgcactactgaccacgactctggtctttcctgttgttggcccctctggggctctacagaaacaggctgggttccaggagcccatctccccgctgtctccccctgccccgagtctggaagagggcaaggacacttccattcctctgtaccatggagtcctgcagccccttaacccctgcgtggcaactgtgtacagcttacccctgcctccagttgcaccacttctagatgtgcctttaaaagatctaactatgggatgggagaacttgagggtgatcgggaacctcccctgctgagggtggtgtcagggttccgtgactccagtgggccagtggtagcctgtcccagacaactccgtcaccccagctctgcctgtgcctttatccctgacagctgctgcactagccttcctgcttccctaaggacttagtggagggggaaagttgtttttggtactacttggtgggaagtaaggggaaggttggatcttgggtttggtctacccacccaagagaaaagactgttaactggaagaaaaaatatatatataaaatttta

SEQ ID NO: 384329 - DNA, 3670 bp, Homo sapiens
acctcccctgctggcgcttcctgtcgctaccgctgcggcccagggcccgcgggagcccagggcggtgccgggtgagacaaggccggggtttggctcggattcaccgcgaggtatctaggctgccatgatgccaggccaagacctcggaagggccctcaggccagaggccaaggggtggccgctgccaagcagatggggctctttatggagtttggccctgaggacacgctgctgggcatggatgaggctgaagatgatgaggacctggaggctgagctgctggctctcacaggggaagcacaaaccacaggcaagaagccagcacccaaggggcaggcccccctgcccatggcccacatcgagaagttggcggcagactgtatgcgggatgtggaggaggaggaggaggaggaagggctggaggaagatgcagagctgctgacggagctgcaggaggtcttaggtgtggacgaggagactgagcccctggatggtgatgaggtagctgacccaggcggctctgaggaggagaacggcctagaagacactgaacctccagtgcagacagccgtcctgacagcttcagccccagcagctcaggccggagcatctcaggggctacacgctttgctggaggaacggattcacaactaccgagaggctgcggccagtgccaaggaggcaggcgaagcagccaaagccaggcgctgcgagcgcggcctgaagaccttggagtcgcagctagcctctgtgaggagaggcagaaagatcaatgaggatgagatcccacctccagtggccttaggaaagcggcccctggccccccaggaaccagccaacaggagccctgagacagaccctccagctccccctgccttggagtcagacaacccctcccaacctgagaccagcctccctggcatttctgcccagcccgtttcagacttagacccagacccgcgggccctgctgtcatcccgacagagagagtacaaagtggctgccctcagtgccaagcgggctggagagctagaccgtgcccgagagctcatgaggattgggaagagattcggtgctgtcctggaggccctggagaaggggcagcccgtggatctgagtgccatgcccccggcacctgaggatctgaagccccagcaggcttctcaggctcccacagcaccctcagtcattcccccagccgtggagcgagtgcagccagtgatggcccctgacgtcccagcaaccccagtggcccctacagagtcacagacagtgctggatgccctgcagcagaggctgaacaagtaccgcgaggcgggcatccaggcccggagtggtggggacgagcgcaaggctcggatgcatgagcgcattgccaagcaatatcaagatgctattcgagcacaccgagcaggacggaaagtcaactttgctgaattgcctgttcctccaggatttccccccatccctggcctggagtccactatgggtgttgaggaggacgcagtggcagcgacattggcagctgcagagaaactggcctctgcagaggattcagccccggctgataaagacgaggacgagaccagggtgagcccccagcacaggccccagtggccaagaaacctgcacggcccacagtcccttcatcccagcgcctgcctgagcccagggcctcaagttctaaggagtcaccgagtccatctgtgcgggagcagctggcactgctggaggcacggaaactgcagtatcagcgggcagccctgcaggccaagcgcagccaggacctggagcaggccaaagcctatctgcgggtagccaaatggcttgaggctcagatcatccaggcccgatctggcagacctgttgatctgtccaaggtgccttcgcccttgacggatgaggagggtgacttcatcctcatccaccatgaggacctgcgactctcccagaaggcggaggaggtgtatgcccagctgcaaaaaatgcttctggagcaacaagagaagtgcctgctgttctccaagcagttcatgcaccagggcaacgtggctgagaccacccgatttgagaagcttgctcaggaccgcaagaaacagctggagatcctgcagctggcccaggctcagggcctcgaccctcccacccaccactttgagttgaagacattccagactgtgaggatcttctcagaactcaacagcacagaaatgcatctgatcattgtccggggaatgaacctcccagcccctccaggggtgactcccgatgacctggatgcttttgtgcggtttgagtttcactaccctaactcggaccaggctcaaaaaagcaaaacagctgtggtgaagaacacaaactctccagaatttgatcaactcttcaaactaaacatcaaccgaaaccaccggggcttcaagagggtgatccagagcaaaggcatcaagtttgagatcttccacaaagggtccttcttcagaagcgacaagctggttggcacagcacacctgaaactggagcggctggagaatgagtgtgagatcagagaaattgtggaggtcctggatggaaggaagcccaccggggggaagctggaggtgaaggtgaggctgcgggagcctctgagtggccaggatgtgcagatggtcactgagaactggctggttctggagcccaggggcttgtgaggtgggcagctctctgggccttcagaacctttgccccctccttttactcaactaactactcaactcatatctggagagaaaacctaggagtttctcatctatgagaaagacctaccatgctgggtagggcttatgggctgagtttctgatgttcctcagtagaactgggaagagaaggtaaccttccaaggtttaactatctatctatctatctatcttcaggaaaccctttctaaaatctttgtgttttcactgcagtttagactgacttcttgtgctttgcacccctgtgtagccgatggccagcaccaggagaggagtcaggccgcgactgtgcaggagatgactttcccagctttgctggcttcagaagcctttgtacataagagatgctgctacccaagcaccaaagacctgttaagcatgtgcactactgaccacgactctggtctttcctgttgttggcccctctggggctctacagaaacaggctgggttccaggagcccatctccccgctgtctccccctgccccgagtctggaagagggcaaggacacttccattcctctgtaccatggagtcctgcagccccttaacccctgcgtggcaactgtgtacagcttacccctgcctccagttgcaccacttctagatgtgcctttaaaagatctaactatgggatgggagaacttgagggtgatcgggaacctcccctgctgagggtggtgtcagggttccgtgactccagtgggccagtggtagcctgtcccagacaactccgtcaccccagctctgcctgtgcctttatccctgacagctgctgcactagccttcctgcttccctaaggacttagtggagggggaaagttgtttttggtactacttggtgggaagtaaggggaaggttggatcttgggtttggtctacccacccaagagaaaagactgttaactggaagaaaaaatatatatataaaatttta

SEQ ID NO: 384330 - DNA, 1879 bp, Homo sapiens
acctcccctgctggcgcttcctgtcgctaccgctgcggcccagggcccgcgggagcccagggcggtgccgggtgagacaaggccgggaccagggtgagcccccagcacaggccccagtggccaagaaacctgcacggcccacagtcccttcatcccagcgcctgcctgagcccagggcctcaagttctaaggagtcaccgagtccatctgtgcgggagcagctggcactgctggaggcacggaaactgcagtatcagcgggcagccctgcaggccaagcgcagccaggacctggagcaggccaaagcctatctgcgggtagccaaatggcttgaggctcagatcatccaggcccgatctggcagacctgttgatctgtccaaggtgccttcgcccttgacggatgaggagggtgacttcatcctcatccaccatgaggacctgcgactctcccagaaggcggaggaggtgtatgcccagctgcaaaaaatgcttctggagcaacaagagaagtgcctgctgttctccaagcagttcatgcaccagggcaacgtggctgagaccacccgatttgagaagcttgctcaggaccgcaagaaacagctggagatcctgcagctggcccaggctcagggcctcgaccctcccacccaccactttgagttgaagacattccagactgtgaggatcttctcagaactcaacagcacagaaatgcatctgatcattgtccggggaatgaacctcccagcccctccaggggtgactcccgatgacctggatgcttttgtgcggtttgagtttcactaccctaactcggaccaggctcaaaaaagcaaaacagctgtggtgaagaacacaaactctccagaatttgatcaactcttcaaactaaacatcaaccgaaaccaccggggcttcaagagggtgatccagagcaaaggcatcaagtttgagatcttccacaaagggtccttcttcagaagcgacaagctggttggcacagcacacctgaaactggagcggctggagaatgagtgtgagatcagagaaattgtggaggtcctggatggaaggaagcccaccggggggaagctggaggtgaaggtgaggctgcgggagcctctgagtggccaggatgtgcagatggtcactgagaactggctggttctggagcccaggggcttgtgagccgatggccagcaccaggagaggagtcaggccgcgactgtgcaggagatgactttcccagctttgctggcttcagaagcctttgtacataagagatgctgctacccaagcaccaaagacctgttaagcatgtgcactactgaccacgactctggtctttcctgttgttggcccctctggggctctacagaaacaggctgggttccaggagcccatctccccgctgtctccccctgccccgagtctggaagagggcaaggacacttccattcctctgtaccatggagtcctgcagccccttaacccctgcgtggcaactgtgtacagcttacccctgcctccagttgcaccacttctagatgtgcctttaaaagatctaactatgggatgggagaacttgagggtgatcgggaacctcccctgctgagggtggtgtcagggttccgtgactccagtgggccagtggtagcctgtcccagacaactccgtcaccccagctctgcctgtgcctttatccctgacagctgctgcactagccttcctgcttccctaaggacttagtggagggggaaagttgtttttggtactacttggtgggaagtaaggggaaggttggatcttgggtttggtctacccacccaagagaaaagactgttaactggaagaaaaaatatatatataaaatttta

SEQ ID NO: 384331 - DNA, 1560 bp, Homo sapiens
gactgcctcatcttctgcccaaaagagggagtagcgtggtgaatgggaaggaaccctgggtttggggttccagtgctgactctgccacatagagtcatctgcttctctctcttggccatctgtgaagtgagggtttgggtcagtggaaggctgcttcttcaagccaatgtttcttccagaagttgccgtggggattgaggagaaaatgaacagagctctaggatgcttgtctggatttatttattacttttttaataagactcacctaaaaccaccaccacctcctcctccaaatactgggagggtagggttttcatgaatggagattcctgtgttcatgccacaggacatcttagctcctctcacttctttcctgggaatgtagggacctgcctgctccccatctctgtccccttagttaccatttccctctctgtggtcctcacaggtcctggatggaaggaagcccaccggggggaagctggaggtgaaggtgaggctgcgggagcctctgagtggccaggatgtgcagatggtcactgagaactggctggttctggagcccaggggcttgtgaggtgggcagctctctgggccttcagaacctttgccccctccttttactcaactaactactcaactcatatctggagagaaaacctaggagtttctcatctatgagaaagacctaccatgctgggtagggcttatgggctgagtttctgatgttcctcagtagaactgggaagagaaggtaaccttccaaggtttaactatctatctatctatctatcttcaggaaaccctttctaaaatctttgtgttttcactgcagtttagactgacttcttgtgctttgcacccctgtgtagccgatggccagcaccaggagaggagtcaggccgcgactgtgcaggagatgactttcccagctttgctggcttcagaagcctttgtacataagagatgctgctacccaagcaccaaagacctgttaagcatgtgcactactgaccacgactctggtctttcctgttgttggcccctctggggctctacagaaacaggctgggttccaggagcccatctccccgctgtctccccctgccccgagtctggaagagggcaaggacacttccattcctctgtaccatggagtcctgcagccccttaacccctgcgtggcaactgtgtacagcttacccctgcctccagttgcaccacttctagatgtgcctttaaaagatctaactatgggatgggagaacttgagggtgatcgggaacctcccctgctgagggtggtgtcagggttccgtgactccagtgggccagtggtagcctgtcccagacaactccgtcaccccagctctgcctgtgcctttatccctgacagctgctgcactagccttcctgcttccctaaggacttagtggagggggaaagttgtttttggtactacttggtgggaagtaaggggaaggttggatcttgggtttggtctacccacccaagagaaaagactgttaactggaagaaaaaatatatatataaaatttta

SEQ ID NO: 384332 - DNA, 1046 bp, Homo sapiens
gagccaagcccctccttgctttctccccctttgccagaatttgatcaactcttcaaactaaacatcaaccgaaaccaccggggcttcaagagggtgatccagagcaaaggcatcaagtttgagatcttccacaaagggtccttcttcagaagcgacaagctggttggcacagcacacctgaaactggagcggctggagaatgagtgtgagatcagagaaattgtggaggtcctggatggaaggaagcccaccggggggaagctggaggtgaaggtgaggctgcgggagcctctgagtggccaggatgtgcagatggtcactgagaactggctggttctggagcccaggggcttgtgagccgatggccagcaccaggagaggagtcaggccgcgactgtgcaggagatgactttcccagctttgctggcttcagaagcctttgtacataagagatgctgctacccaagcaccaaagacctgttaagcatgtgcactactgaccacgactctggtctttcctgttgttggcccctctggggctctacagaaacaggctgggttccaggagcccatctccccgctgtctccccctgccccgagtctggaagagggcaaggacacttccattcctctgtaccatggagtcctgcagccccttaacccctgcgtggcaactgtgtacagcttacccctgcctccagttgcaccacttctagatgtgcctttaaaagatctaactatgggatgggagaacttgagggtgatcgggaacctcccctgctgagggtggtgtcagggttccgtgactccagtgggccagtggtagcctgtcccagacaactccgtcaccccagctctgcctgtgcctttatccctgacagctgctgcactagccttcctgcttccctaaggacttagtggagggggaaagttgtttttggtactacttggtgggaagtaaggggaaggttggatcttgggtttggtctacccacccaagagaaaagactgttaactggaagaaaaaatatatatataaaatttta

SEQ ID NO: 384333 - DNA, 3713 bp, Homo sapiens
  misc_feature (3691)..(3691): n is a, c, g, or t
  misc_feature (3693)..(3693): n is a, c, g, or t
acctcccctgctggcgcttcctgtcgctaccgctgcggcccagggcccgcgggagcccagggcggtgccgggtgagacaaggccggggtttggctcggattcaccgcgaggtatctaggctgccatgatgccaggccaagacctcggaagggccctcaggccagaggccaaggggtggccgctgccaagcagatggggctctttatggagtttggccctgaggacacgctgctgggcatggatgaggctgaagatgatgaggacctggaggctgagctgctggctctcacaggggaagcacaaaccacaggcaagaagccagcacccaaggggcaggcccccctgcccatggcccacatcgagaagttggcggcagactgtatgcgggatgtggaggaggaggaggaggaggaagggctggaggaagatgcagagctgctgacggagctgcaggaggtcttaggtgtggacgaggagactgagcccctggatggtgatgaggtagctgacccaggcggctctgaggaggagaacggcctagaagacactgaacctccagtgcagacagccgtcctgacagcttcagccccagcagctcaggccggagcatctcaggggctacacgctttgctggaggaacggattcacaactaccgagaggctgcggccagtgccaaggaggcaggcgaagcagccaaagccaggcgctgcgagcgcggcctgaagaccttggagtcgcagctagcctctgtgaggagaggcagaaagatcaatgaggatgagatcccacctccagtggccttaggaaagcggcccctggccccccaggaaccagccaacaggagccctgagacagaccctccagctccccctgccttggagtcagacaacccctcccaacctgagaccagcctccctggcatttctgcccagcccgtttcagacttagacccagacccgcgggccctgctgtcatcccgacagagagagtacaaagtggctgccctcagtgccaagcgggctggagagctagaccgtgcccgagagctcatgaggattgggaagagattcggtgctgtcctggaggccctggagaaggggcagcccgtggatctgagtgccatgcccccggcacctgaggatctgaagccccagcaggcttctcaggctcccacagcaccctcagtcattcccccagccgtggagcgagtgcagccagtgatggcccctgacgtcccagcaaccccagtggcccctacagagtcacagacagtgctggatgccctgcagcagaggctgaacaagtaccgcgaggcgggcatccaggcccggagtggtggggacgagcgcaaggctcggatgcatgagcgcattgccaagcaatatcaagatgctattcgagcacaccgagcaggacggaaagtcaactttgctgaattgcctgttcctccaggatttccccccatccctggcctggagtccactatgggtgttgaggaggacgcagtggcagcgacattggcagctgcagagaaactggcctctgcagaggattcagccccggctgataaagacgaggacgagaccagggtgagcccccagcacaggccccagtggccaagaaacctgcacggcccacagtcccttcatcccagcgcctgcctgagcccagggcctcaagttctaaggagtcaccgagtccatctgtgcgggagcagctggcactgctggaggcacggaaactgcagtatcagcgggcagccctgcaggccaagcgcagccaggacctggagcaggccaaagcctatctgcgggtagccaaatggcttgaggctcagatcatccaggcccgatctggcagacctgttgatctgtccaaggtgccttcgcccttgacggatgaggagggtgacttcatcctcatccaccatgaggacctgcgactctcccagaaggcggaggaggtgtatgcccagctgcaaaaaatgcttctggagcaacaagagaagtgcctgctgttctccaagcagttcatgcaccagggcaacgtggctgagaccacccgatttgagaagcttgctcaggaccgcaagaaacagctggagatcctgcagctggcccaggctcagggcctcgaccctcccacccaccactttgagttgaagacattccagactgtgaggatcttctcagaactcaacagcacagaaatgcatctgatcattgtccggggaatgaacctcccagcccctccaggggtgactcccgatgacctggatgcttttgtgcggtttgagtttcactaccctaactcggaccaggctcaaaaaagcaaaacagctgtggtgaagaacacaaactctccagaatttgatcaactcttcaaactaaacatcaaccgaaaccaccggggcttcaagagggtgatccagagcaaaggcatcaagtttgagatcttccacaaagggtccttcttcagaagcgacaagctggttggcacagcacacctgaaactggagcggctggagaatgagtgtgagatcagagaaattgtggaggtcctggatggaaggaagcccaccggggggaagctggaggtgaaggtgaggctgcgggagcctctgagtggccaggatgtgcagatggtcactgagaactggctggttctggagcccaggggcttgtgagccgatggccagcaccaggagaggagtcaggccgcgactgtgcaggagatgactttcccagctttgctggcttcagaagcctttgtacataagagatgctgctacccaagcaccaaagacctgttaagcatgtgcactactgaccacgactctggtctttcctgttgttggcccctctggggctctacagaaacaggctgggttccaggagcccatctccccgctgtctccccctgccccgagtctggaagagggcaaggacacttccattcctctgtaccatggagtcctgcagccccttaacccctgcgtggcaactgtgtacagcttacccctgcctccagttgcaccacttctagatgtgcctttaaaagatctaactatgggatgggagaacttgagggtgatcgggaacctcccctgctgagggtggtgtcagggttccgtgactccagtgggccagtggtagcctgtcccagacaactccgtcaccccagctctgcctgtgcctttatccctgacagctgctgcactagccttcctgcttccctaaggacttagtggagggggaaagttgtttttggtactacttggtgggaagtaaggggaaggttggatcttgggtttggtctacccacccaagagaaaagactgttaactggaagaaaaaatatatatataaaattttaaaaaaaaaaaaaaaaaaaaaaaaaagatttgcggccgcaaatcttttttttttttttttttttaaagcataacaaatttatttaattttaaaaatcaaagtcttgcgtgacactggaaccttcagaaatgacacagatacccaggggaaaactgctgtttttttatgcttaggtttgatgaagaatgggctgtaaaccaaaaataaaatttgaagcccttcagccatctgaatgggcacctcctctcggccaagggcattctaaagttaacctgaaaaactagttcaggtcatgatcggaaggggggagtcaganangccttgttaccattcacgtc

SEQ ID NO: 384334 - DNA, 1646 bp, Homo sapiens
acctcccctgctggcgcttcctgtcgctaccgctgcggcccagggcccgcgggagcccagggcggtgccgggtgagacaaggccggggtttggctcggattcaccgcgaggtatctaggctgccatgatgccaggccaagacctcggaagggccctcaggccagaggccaaggggtggccgctgccaagcagatggggctctttatggagtttggccctgaggacacgctgctgggcatggatgaggctgaagatgatgaggacctggaggctgagctgctggctctcacaggggaagcacaaaccacaggcaagaagccagcacccaaggggcaggcccccctgcccatggcccacatcgagaagttggcggcagactgtatgcgggatgtggaggaggaggaggaggaggaagggctggaggaagatgcagagctgctgacggagctgcaggaggtcttaggtgtggacgaggagactgagcccctggatggtgatgaggtagctgacccaggcggctctgaggaggagaacggcctagaagacactgaacctccagtgcagacagccgtcctgacagcttcagccccagcagctcaggccggagcatctcaggggctacacgctttgctggaggaacggattcacaactaccgagaggctgcggccagtgccaaggaggcaggcgaagcagccaaagccaggcgctgcgagcgcggcctgaagaccttggagtcgcagctagcctctgtgaggagaggcagaaagatcaatgaggatgagatcccacctccagtggccttaggaaagcggcccctggccccccaggaaccagccaacaggagccctgagacagaccctccagctccccctgccttggagtcagacaacccctcccaacctgagaccagcctccctggcatttctgcccagcccgtttcagacttagacccagacccgcgggccctgctgtcatcccgacagagagagtacaaagtggctgccctcagtgccaagcgggctggagagctagaccgtgcccgagagctcatgaggattgggaagagattcggtgctgtcctggaggccctggagaaggggcagcccgtggatctgagtgccatgcccccggcacctgaggatctgaagccccagcaggcttctcaggctcccacagcaccctcagtcattcccccagccgtggagcgagtgcagccagtgatggcccctgacgtcccagcaaccccagtggcccctacagagtcacagacagtgctggatgccctgcagcagaggctgaacaagtaccgcgaggcgggcatccaggcccggagtggtggggacgagcgcaaggctcggatgcatgagcgcattgccaagcaatatcaagatgctattcgagcacaccgagcaggacggaaagtcaactttgctgaattgcctgttcctccaggatttccccccatccctggcctggagtccactatgggtgttgaggaggacgcagtggcagcgacattggcagctgcagagaaactggcctctgcagaggattcagccccggctgataaagacgaggacgagcattgtgggcagctgcagctgtgtgcaacagtctgagcgctacgggtagactgtcagcgcgt

SEQ ID NO: 384335 - DNA, 5840 bp, Homo sapiens
  misc_feature (4344)..(4344): n is a, c, g, or t
  misc_feature (4374)..(4374): n is a, c, g, or t
  misc_feature (4385)..(4385): n is a, c, g, or t
  misc_feature (4391)..(4391): n is a, c, g, or t
  misc_feature (4398)..(4398): n is a, c, g, or t
  misc_feature (4405)..(4405): n is a, c, g, or t
  misc_feature (4431)..(4431): n is a, c, g, or t
  misc_feature (4444)..(4444): n is a, c, g, or t
  misc_feature (4450)..(4450): n is a, c, g, or t
  misc_feature (4470)..(4470): n is a, c, g, or t
  misc_feature (4479)..(4479): n is a, c, g, or t
  misc_feature (4485)..(4485): n is a, c, g, or t
  misc_feature (4488)..(4488): n is a, c, g, or t
  misc_feature (4514)..(4514): n is a, c, g, or t
  misc_feature (4555)..(4555): n is a, c, g, or t
  misc_feature (5204)..(5204): n is a, c, g, or t
  misc_feature (5232)..(5232): n is a, c, g, or t
  misc_feature (5240)..(5241): n is a, c, g, or t
  misc_feature (5255)..(5256): n is a, c, g, or t
  misc_feature (5266)..(5266): n is a, c, g, or t
  misc_feature (5286)..(5287): n is a, c, g, or t
acctcccctgctggcgcttcctgtcgctaccgctgcggcccagggcccgcgggagcccagggcggtgccgggtgagacaaggccggggtttggctcggattcaccgcgaggtatctaggctgccatgatgccaggccaagacctcggaagggccctcaggccagaggccaaggggtggccgctgccaagcagatggggctctttatggagtttggccctgaggacacgctgctgggcatggatgaggctgaagatgatgaggacctggaggctgagctgctggctctcacaggggaagcacaaaccacaggcaagaagccagcacccaaggggcaggcccccctgcccatggcccacatcgagaagttggcggcagactgtatgcgggatgtggaggaggaggaggaggaggaagggctggaggaagatgcagagctgctgacggagctgcaggaggtcttaggtgtggacgaggagactgagcccctggatggtgatgaggtagctgacccaggcggctctgaggaggagaacggcctagaagacactgaacctccagtgcagacagccgtcctgacagcttcagccccagcagctcaggccggagcatctcaggggctacacgctttgctggaggaacggattcacaactaccgagaggctgcggccagtgccaaggaggcaggcgaagcagccaaagccaggcgctgcgagcgcggcctgaagaccttggagtcgcagctagcctctgtgaggagaggcagaaagatcaatgaggatgagatcccacctccagtggccttaggaaagcggcccctggccccccaggaaccagccaacaggagccctgagacagaccctccagctccccctgccttggagtcagacaacccctcccaacctgagaccagcctccctggcatttctgcccagcccgtttcagacttagacccagacccgcgggccctgctgtcatcccgacagagagagtacaaagtggctgccctcagtgccaagcgggctggagagctagaccgtgcccgagagctcatgaggattgggaagagattcggtgctgtcctggaggccctggagaaggggcagcccgtggatctgagtgccatgcccccggcacctgaggatctgaagccccagcaggcttctcaggctcccacagcaccctcagtcattcccccagccgtggagcgagtgcagccagtgatggcccctgacgtcccagcaaccccagtggcccctacagagtcacagacagtgctggatgccctgcagcagaggctgaacaagtaccgcgaggcgggcatccaggcccggagtggtggggacgagcgcaaggctcggatgcatgagcgcattgccaagcaatatcaagatgctattcgagcacaccgagcaggacggaaagtcaactttgctgaattgcctgttcctccaggatttccccccatccctggcctggagtccactatgggtgttgaggaggacgcagtggcagcgacattggcagctgcagagaaactggcctctgcagaggattcagccccggctgataaagacgaggacgagaccagggtgagcccccagcacaggccccagtggccaagaaacctgcacggcccacagtcccttcatcccagcgcctgcctgagcccagggcctcaagttctaaggagtcaccgagtccatctgtgcgggagcagctggcactgctggaggcacggaaactgcagtatcagcgggcagccctgcaggccaagcgcagccaggacctggagcaggccaaagcctatctgcgggtagccaaatggcttgaggctcagatcatccaggcccgatctggcagacctgttgatctgtccaaggtgccttcgcccttgacggatgaggagggtgacttcatcctcatccaccatgaggacctgcgactctcccagaaggcggaggaggtgtatgcccagctgcaaaaaatgcttctggagcaacaagagaagtgcctgctgttctccaagcagttcatgcaccagggcaacgtggctgagaccacccgatttgagaagcttgctcaggaccgcaagaaacagctggagatcctgcagctggcccaggctcagggcctcgaccctcccacccaccactttgagttgaagacattccagactgtgaggatcttctcagaactcaacagcacagaaatgcatctgatcattgtccggggaatgaacctcccagcccctccaggggtgactcccgatgacctggatgcttttgtgcggtttgagtttcactaccctaactcggaccaggctcaaaaaagcaaaacagctgtggtgaagaacacaaactctccagaatttgatcaactcttcaaactaaacatcaaccgaaaccaccggggcttcaagagggtgatccagagcaaaggcatcaagtttgagatcttccacaaagggtccttcttcagaagcgacaagctggttggcacagcacacctgaaactggagcggctggagaatgagtgtgagatcagagaaattgtggaggtcctggatggaaggaagcccaccggggggaagctggaggtgaaggtgaggctgcgggagcctctgagtggccaggatgtgcagatggtcactgagaactggctggttctggagcccaggggcttgtgaggtgggcagctctctgggccttcagaacctttgccccctccttttactcaactaactactcaactcatatctggagagaaaacctaggagtttctcatctatgagaaagacctaccatgctgggtagggcttatgggctgagtttctgatgttcctcagtagaactgggaagagaaggtaaccttccaaggtttaactatctatctatctatctatcttcaggaaaccctttctaaaatctttgtgttttcactgcagtttagactgacttcttgtgctttgcacccctgtgtagccgatggccagcaccaggagaggagtcaggccgcgactgtgcaggagatgactttcccagctttgctggcttcagaagcctttgtacataagagatgctgctacccaagcaccaaagacctgttaagcatgtgcactactgaccacgactctggtctttcctgttgttggcccctctggggctctacagaaacaggctgggttccaggagcccatctccccgctgtctccccctgccccgagtctggaagagggcaaggacacttccattcctctgtaccatggagtcctgcagccccttaacccctgcgtggcaactgtgtacagcttacccctgcctccagttgcaccacttctagatgtgcctttaaaagatctaactatgggatgggagaacttgagggtgatcgggaacctcccctgctgagggtggtgtcagggttccgtgactccagtgggccagtggtagcctgtcccagacaactccgtcaccccagctctgcctgtgcctttatccctgacagctgctgcactagccttcctgcttccctaaggacttagtggagggggaaagttgtttttggtactacttggtgggaagtaaggggaaggttggatcttgggtttggtctacccacccaagagaaaagactgttaactggaagaaaaaatatatatataaaattttatgtagacacgtttatttatttaggaaactaagtctaactcattgtagggattttatactcaactatacagagtatccaccaaagtcctaatctaaagtcctgctccctgtcactttttaaaagccagggtagcagtaacatgacaaacggctgctgtggcttcctcttgagagaggacagggaaagcctttcctcttcggctggttatgtggggaacttccttagtttttttccacaagaaattctcctttggctttgtttttctgaatggatggagactatgaaggggtttgtagttgtaagagatttaatattcaaaactgaaatattctgcatttcttagaaataccccatcttcccccaccccctttttgaattattaattcaagatcaacaaagcattcctcaagatcacttttaaaaaaggttagaagtgaagcaaatacattcagcttactgatcactatagtattgcataagcacagctcaagaactgagctttgtatgtgtccttttgggggataacagggctggaccatgcttccctgcccttaaacgcagagcttttagtgggtcacagagcgggaactacacacaagtgacttttttccccatgagccctctggccgattttttttttttttttttttttgagacagagtagctctctgccngccaggctggagtgcagtggcatgatctcngctcgctgcancccccncctcccnggttcangcgattctcctgtgtcagtctcctgngtagctgggattncaggcncccaccactatgcccagctnatttttttntttttngtngagacggtgtttcaccatgttggtcnggctggtctcgaactcctgacctcatgatccacccacctcngcctcccaaagtgctgggattacaggtgtgagccaccgcacccggctggccaatcttatcagaagtgagctaccaaaacttccacagatgtgagatttaacacttaattgcagtcacgtgtatgcaacacagcaataatctagaatgaaaaggagggtgattagccttcataagatgacctatagagcaaagaaaggtgactggaagggttcctaacccaacctactccccttagggtgtgtatccaacccagtgcttcctaagagggttacggaccactgtggttatcctctaaagttccagccagctctaggagtttctaaattcaggcctctgttggaaatggcctatttcgatagatagaaagttttctatagctctaaaggtttctcctttgcaacccattcaatttcagtctgctgctttgctctttcaaaacagaacctccaggctgacgaggcaagacaaagcctcccaccagacttggagattgaagttcttaaaaggcctttgttgtagccaaaggcatgcatgcgtcactggtagtaggaggagcctgtcccagcttcatcttgtcctgagatttatccacatacaggaaacaggcgggacacagtggctcacgcctgtaatcccaccactttggaangctgaggcaggtggatcacctgaggtcnggaattcnngaccagcctggccnncatggtgaanccccgtctccactaaaaacnnaaacaattagctgggcatggtggccggcgcctgtagtcccagctactagggaggctgagacacacgaatcccttgagcccgggaagcggaggttgcagtgagcctcgattgtaccactgcactccagcctgggcgacagagcaagactctgtctcaaaacaaacacaaatacagtatccaaacattggagattagtgactcacctgcagttgggagccagctacaacccaaatcattttaaaattttcaattctttgatctcatgcaatgcacactttcttctgaattagcaaactgaataaactacagaaattttttagaatcaagaagtcttgcttacaattaaagggcaaactcctgtgactctaacatttttcctttctcacagcaccattctgaaatttgcattgttgcttctggattttgaagccttgttttccaagtatttgtgggcagctcctaaaagactttgtcccttaagtaagggcagctgctttcaggatgaaaccatgcgactgagactggcagatcctgggagcttgcacctgggtca

SEQ ID NO: 384336 - DNA, 2643 bp, Homo sapiens
  misc_feature (84)..(85): n is a, c, g, or t
  misc_feature (91)..(91): n is a, c, g, or t
ggtctggcactctagtcagattactcctctaccaagtccaacaaaggcaggagcccaaactaagtaattcttcagcttctactnnagtccngtgatgacaactcatcgcctcccattctatcccaaaataacactcttgcctcccatggcctggcccagccttgtcatctctgaccacaggcagcccaccttcatcttatagataggggaaacaggctcagaaagggagctagactgagattgagtgagattggcctaagtgggggttgtttcagcccaggctcttggggtcccctgtctttcacccacacctgcttttccaacttctgcagagattcggtgctgtcctggaggccctggagaaggggcagcccgtggatctgagtgccatgcccccggcacctgaggatctgaagccccagcaggcttctcaggctcccacagcaccctcagtcattcccccagccgtggagcgagtgcagccagtgatggcccctgacgtcccagcaaccccagtggcccctacagagtcacagacagtgctggatgccctgcagcagaggctgaacaagtaccgcgaggcgggcatccaggcccggagtggtggggacgagcgcaaggctcggatgcatgagcgcattgccaagcaatatcaagatgctattcgagcacaccgagcaggacggaaagtcaactttgctgaattgcctgttcctccaggatttccccccatccctggcctggagtccactatgggtgttgaggaggacgcagtggcagcgacattggcagctgcagagaaactggcctctgcagaggattcagccccggctgataaagacgaggacgagaccagggtgagcccccagcacaggccccagtggccaagaaacctgcacggcccacagtcccttcatcccagcgcctgcctgagcccagggcctcaagttctaaggagtcaccgagtccatctgtgcgggagcagctggcactgctggaggcacggaaactgcagtatcagcgggcagccctgcaggccaagcgcagccaggacctggagcaggccaaagcctatctgcgggtagccaaatggcttgaggctcagatcatccaggcccgatctggcagacctgttgatctgtccaaggtgccttcgcccttgacggatgaggagggtgacttcatcctcatccaccatgaggacctgcgactctcccagaaggcggaggaggtgtatgcccagctgcaaaaaatgcttctggagcaacaagagaagtgcctgctgttctccaagcagttcatgcaccagggcaacgtggctgagaccacccgatttgagaagcttgctcaggaccgcaagaaacagctggagatcctgcagctggcccaggctcagggcctcgaccctcccacccaccactttgagttgaagacattccagactgtgaggatcttctcagaactcaacagcacagaaatgcatctgatcattgtccggggaatgaacctcccagcccctccaggggtgactcccgatgacctggatgcttttgtgcggtttgagtttcactaccctaactcggaccaggctcaaaaaagcaaaacagctgtggtgaagaacacaaactctccagaatttgatcaactcttcaaactaaacatcaaccgaaaccaccggggcttcaagagggtgatccagagcaaaggcatcaagtttgagatcttccacaaagggtccttcttcagaagcgacaagctggttggcacagcacacctgaaactggagcggctggagaatgagtgtgagatcagagaaattgtggaggtcctggatggaaggaagcccaccggggggaagctggaggtgaaggtgaggctgcgggagcctctgagtggccaggatgtgcagatggtcactgagaactggctggttctggagcccaggggcttgtgagccgatggccagcaccaggagaggagtcaggccgcgactgtgcaggagatgactttcccagctttgctggcttcagaagcctttgtacataagagatgctgctacccaagcaccaaagacctgttaagcatgtgcactactgaccacgactctggtctttcctgttgttggcccctctggggctctacagaaacaggctgggttccaggagcccatctccccgctgtctccccctgccccgagtctggaagagggcaaggacacttccattcctctgtaccatggagtcctgcagccccttaacccctgcgtggcaactgtgtacagcttacccctgcctccagttgcaccacttctagatgtgcctttaaaagatctaactatgggatgggagaacttgagggtgatcgggaacctcccctgctgagggtggtgtcagggttccgtgactccagtgggccagtggtagcctgtcccagacaactccgtcaccccagctctgcctgtgcctttatccctgacagctgctgcactagccttcctgcttccctaaggacttagtggagggggaaagttgtttttggtactacttggtgggaagtaaggggaaggttggatcttgggtttggtctacccacccaagagaaaagactgttaactggaagaaaaaatatatatataaaatttta

SEQ ID NO: 384337 - DNA, 3622 bp, Homo sapiens
acctcccctgctggcgcttcctgtcgctaccgctgcggcccagggcccgcgggagcccagggcggtgccgggtgagacaaggccggggtttggctcggattcaccgcgaggtatctaggctgccatgatgccaggccaagacctcggaagggccctcaggccagaggccaaggggtggccgctgccaagcagatggggctctttatggagtttggccctgaggacacgctgctgggcatggatgaggctgaagatgatgaggacctggaggctgagctgctggctctcacaggggaagcacaaaccacaggcaagaagccagcacccaaggggcaggcccccctgcccatggcccacatcgagaagttggcggcagactgtatgcgggatgtggaggaggaggaggaggaggaagggctggaggaagatgcagagctgctgacggagctgcaggaggtcttaggtgtggacgaggagactgagcccctggatggtgatgaggtagctgacccaggcggctctgaggaggagaacggcctagaagacactgaacctccagtgcagacagccgtcctgacagcttcagccccagcagctcaggccggagcatctcaggggctacacgctttgctggaggaacggattcacaactaccgagaggctgcggccagtgccaaggaggcaggcgaagcagccaaagccaggcgctgcgagcgcggcctgaagaccttggagtcgcagctagcctctgtgaggagaggcagaaagatcaatgaggatgagatcccacctccagtggccttaggaaagcggcccctggccccccaggaaccagccaacaggagccctgagacagaccctccagctccccctgccttggagtcagacaacccctcccaacctgagaccagcctccctggcatttctgcccagcccgtttcagacttagacccagacccgcgggccctgctgtcatcccgacagagagagtacaaagtggctgccctcagtgccaagcgggctggagagctagaccgtgcccgagagctcatgaggattgggaagagattcggtgctgtcctggaggccctggagaaggggcagcccgtggatctgagtgccatgcccccggcacctgaggatctgaagccccagcaggcttctcaggctcccacagcaccctcagtcattcccccagccgtggagcgagtgcagccagtgatggcccctgacgtcccagcaaccccagtggcccctacagagtcacagacagtgctggatgccctgcagcagaggctgaacaagtaccgcgaggcgggcatccaggcccggagtggtggggacgagcgcaaggctcggatgcatgagcgcattgccaagcaatatcaagatgctattcgagcacaccgagcaggacggaaagtcaactttgctgaattgcctgttcctccaggatttccccccatccctggcctggagtccactatgggtgttgaggaggacgcagtggcagcgacattggcagctgcagagaaactggcctctgcagaggattcagccccggctgataaagacgaggacgagaccagggtgagcccccagcacaggccccagtggccaagaaacctgcacggcccacagtcccttcatcccagcgcctgcctgagcccagggcctcaagttctaaggagtcaccgagtccatctgtgcgggagcagctggcactgctggaggcacggaaactgcagtatcagcgggcagccctgcaggccaagcgcagccaggacctggagcaggccaaagcctatctgcgggtagccaaatggcttgaggctcagatcatccaggcccgatctggcagacctgttgatctgtccaaggtgccttcgcccttgacggatgaggagggtgacttcatcctcatccaccatgaggacctgcgactctcccagaaggcggaggaggtgtatgcccagctgcaaaaaatgcttctggagcaacaagaggtcagcaggcccctcgtctgttcctcccctctgtgcccacagcctccccgtggaggaagacctggagctcagaccacacagccctggactcaaaattctcagctcttccacttactcactgtgtgacttgggcaaggcactttcttctctgaactacattttcctcatctatgagatggggtgataatacccctttcagggtggtacaaacaacagagaagagggaaagaacattgtgatgtgcgtaagtgcctgctgttctccaagcagttcatgcaccagggcaacgtggctgagaccacccgatttgagaagcttgctcaggaccgcaagaaacagctggagatcctgcagctggcccaggctcagggcctcgaccctcccacccaccactttgagttgaagacattccagactgtgaggatcttctcagaactcaacagcacagaaatgcatctgatcattgtccggggaatgaacctcccagcccctccaggggtgactcccgatgacctggatgcttttgtgcggtttgagtttcactaccctaactcggaccaggctcaaaaaagcaaaacagctgtggtgaagaacacaaactctccagaatttgatcaactcttcaaactaaacatcaaccgaaaccaccggggcttcaagagggtgatccagagcaaaggcatcaagtttgagatcttccacaaagggtccttcttcagaagcgacaagctggttggcacagcacacctgaaactggagcggctggagaatgagtgtgagatcagagaaattgtggaggtcctggatggaaggaagcccaccggggggaagctggaggtgaaggtgaggctgcgggagcctctgagtggccaggatgtgcagatggtcactgagaactggctggttctggagcccaggggcttgtgagccgatggccagcaccaggagaggagtcaggccgcgactgtgcaggagatgactttcccagctttgctggcttcagaagcctttgtacataagagatgctgctacccaagcaccaaagacctgttaagcatgtgcactactgaccacgactctggtctttcctgttgttggcccctctggggctctacagaaacaggctgggttccaggagcccatctccccgctgtctccccctgccccgagtctggaagagggcaaggacacttccattcctctgtaccatggagtcctgcagccccttaacccctgcgtggcaactgtgtacagcttacccctgcctccagttgcaccacttctagatgtgcctttaaaagatctaactatgggatgggagaacttgagggtgatcgggaacctcccctgctgagggtggtgtcagggttccgtgactccagtgggccagtggtagcctgtcccagacaactccgtcaccccagctctgcctgtgcctttatccctgacagctgctgcactagccttcctgcttccctaaggacttagtggagggggaaagttgtttttggtactacttggtgggaagtaaggggaaggttggatcttgggtttggtctacccacccaagagaaaagactgttaactggaagaaaaaatatatatataaaatttta

SEQ ID NO: 384338 - DNA, 847 bp, Homo sapiens
ggtcaggcactgaagcctggtcaggcactgaagcctggtcaggcactgaagcctggtcaggcactgaagcctctatctatcttcaggaaaccctttctaaaatctttgtgttttcactgcagtttagactgacttcttgtgctttgcacccctgtgtagccgatggccagcaccaggagaggagtcaggccgcgactgtgcaggagatgactttcccagctttgctggcttcagaagcctttgtacataagagatgctgctacccaagcaccaaagacctgttaagcatgtgcactactgaccacgactctggtctttcctgttgttggcccctctggggctctacagaaacaggctgggttccaggagcccatctccccgctgtctccccctgccccgagtctggaagagggcaaggacacttccattcctctgtaccatggagtcctgcagccccttaacccctgcgtggcaactgtgtacagcttacccctgcctccagttgcaccacttctagatgtgcctttaaaagatctaactatgggatgggagaacttgagggtgatcgggaacctcccctgctgagggtggtgtcagggttccgtgactccagtgggccagtggtagcctgtcccagacaactccgtcaccccagctctgcctgtgcctttatccctgacagctgctgcactagccttcctgcttccctaaggacttagtggagggggaaagttgtttttggtactacttggtgggaagtaaggggaaggttggatcttgggtttggtctacccacccaagagaaaagactgttaactggaagaaaaaatatatatataaaatttta

SEQ ID NO: 384339 - DNA, 3387 bp, Homo sapiens
acctcccctgctggcgcttcctgtcgctaccgctgcggcccagggcccgcgggagcccagggcggtgccgggtgagacaaggccggggtttggctcggattcaccgcgaggtatctaggctgccatgatgccaggccaagacctcggaagggccctcaggccagaggccaaggggtggccgctgccaagcagatggggctctttatggagtttggccctgaggacacgctgctgggcatggatgaggctgaagatgatgaggacctggaggctgagctgctggctctcacaggggaagcacaaaccacaggcaagaagccagcacccaaggggcaggcccccctgcccatggcccacatcgagaagttggcggcagactgtatgcgggatgtggaggaggaggaggaggaggaagggctggaggaagatgcagagctgctgacggagctgcaggaggtcttaggtgtggacgaggagactgagcccctggatggtgatgaggtagctgacccaggcggctctgaggaggagaacggcctagaagacactgaacctccagtgcagacagccgtcctgacagcttcagccccagcagctcaggccggagcatctcaggggctacacgctttgctggaggaacggattcacaactaccgagaggctgcggccagtgccaaggaggcaggcgaagcagccaaagccaggcgctgcgagcgcggcctgaagaccttggagtcgcagctagcctctgtgaggagaggcagaaagatcaatgaggatgagatcccacctccagtggccttaggaaagcggcccctggccccccaggaaccagccaacaggagccctgagacagaccctccagctccccctgccttggagtcagacaacccctcccaacctgagaccagcctccctggcatttctgcccagcccgtttcagacttagacccagacccgcgggccctgctgtcatcccgacagagagagtacaaagtggctgccctcagtgccaagcgggctggagagctagaccgtgcccgagagctcatgaggattgggaagagattcggtgctgtcctggaggccctggagaaggggcagcccgtggatctgagtgccatgcccccggcacctgaggatctgaagccccagcaggcttctcaggctcccacagcaccctcagtcattcccccagccgtggagcgagtgcagccagtgatggcccctgacgtcccagcaaccccagtggcccctacagagtcacagacagtgctggatgccctgcagcagaggctgaacaagtaccgcgaggcgggcatccaggcccggagtggtggggacgagcgcaaggctcggatgcatgagcgcattgccaagcaatatcaagatgctattcgagcacaccgagcaggacggaaagtcaactttgctgaattgcctgttcctccaggatttccccccatccctggcctggagtccactatgggtgttgaggaggacgcagtggcagcgacattggcagctgcagagaaactggcctctgcagaggattcagccccggctgataaagacgaggacgagaccagggtgagcccccagcacaggccccagtggccaagaaacctgcacggcccacagtcccttcatcccagcgcctgcctgagcccagggcctcaagttctaaggagtcaccgagtccatctgtgcgggagcagctggcactgctggaggcacggaaactgcagtatcagcgggcagccctgcaggccaagcgcagccaggacctggagcaggccaaagcctatctgcgggtagccaaatggcttgaggctcagatcatccaggcccgatctggcagacctgttgatctgtccaaggtgccttcgcccttgacggatgaggagggtgacttcatcctcatccaccatgaggacctgcgactctcccagaaggcggaggaggtgtatgcccagctgcaaaaaatgcttctggagcaacaagagaagtgcctgctgttctccaagcagttcatgcaccagggcaacgtggctgagaccacccgatttgagaagcttgctcaggaccgcaagaaacagctggagatcctgcagctggcccaggctcagggcctcgaccctcccacccaccactttgagttgaagacattccagactgtgaggatcttctcagaactcaacagcacagaaatgcatctgatcattgtccggggaatgaacctcccagcccctccaggggtgactcccgatgacctggatgcttttgtgcggtttgagtttcactaccctaactcggaccaggctcaaaaaagcaaaacagctgtggtgaagaacacaaactctccagaatttgatcaactcttcaaactaaacatcaaccgaaaccaccggggcttcaagagggtgatccagagcaaaggcatcaagtttgagatcttccacaaagggtccttcttcagaagcgacaagctggttggcacagcacacctgaaactggagcggctggagaatgagtgtgagatcagagaaattgtggaggtcctggatggaaggaagcccaccggggggaagctggaggtgaaggtgaggctgcgggagcctctgagtggccaggatgtgcagatggtcactgagaactggctggttctggagcccaggggcttgtgagccgatggccagcaccaggagaggagtcaggccgcgactgtgcaggagatgactttcccagctttgctggcttcagaagcctttgtacataagagatgctgctacccaagcaccaaagacctgttaagcatgtgcactactgaccacgactctggtctttcctgttgttggcccctctggggctctacagaaacaggctgggttccaggagcccatctccccgctgtctccccctgccccgagtctggaagagggcaaggacacttccattcctctgtaccatggagtcctgcagccccttaacccctgcgtggcaactgtgtacagcttacccctgcctccagttgcaccacttctagatgtgcctttaaaagatctaactatgggatgggagaacttgagggtgatcgggaacctcccctgctgagggtggtgtcagggttccgtgactccagtgggccagtggtagcctgtcccagacaactccgtcaccccagctctgcctgtgcctttatccctgacagctgctgcactagccttcctgcttccttaggcccttcctccggccactcctccctttcccattcgtctgtcttcgcttcctccgtccttcttttcttctctctcttctctccctctccgtccccatagatgaaaatgacttgttaacttggaagtataaatttatatataaaattta

SEQ ID NO: 384340 - DNA, 296 bp, Homo sapiens
catctctggaaaatgtttcacctctttgaaatttgttggctggctgaggtggctcaacctgtaatcctaccactttgggagtccaggagtttgagaccagcctgggcaatgtggtgaaaccccgtctctacaaaaaatacaaaaattagccagtgtggtggtgcatgcctgtattcccagctaattgggaggctgaggtgggaggattgcttgggcccaggagttctaggatgcagtgagctgtgatggcaccattgcattttagcctgggcaacagaggaagaccctgtctcaat

SEQ ID NO: 384341 - DNA, 433 bp, Homo sapiens
ttcacagacaagacaagattccctcagataactaagccattccctggccatgagttactacagtttcggtcattcattcagtggaaaagcgaccagggacagaaggcgccgccataaaggtcacctggcccgagcagacgccaggtcgctgcttcttccttggctgctgacattttaacagcggcccagacagtctgtttccgctttccccaaacaagcaccctggagaccctcccccgacggctcgaggcgagaaacggggcctggcccaggagccggtggccgcgacctcgggtatgcagtggcgccctctgcaccttgggaagcgcccgacgcacaggacagggaccgggcaggaggcaggggcggccccaggagaccgggcagcggacgggggagaccgcgggggacccggaaggggatgggggcggcc

SEQ ID NO: 384342 - DNA, 2421 bp, Homo sapiens
  misc_feature (46)..(48): n is a, c, g, or t
ccgtcagaaatctaaacccgtgactatcatgggactcaaaaccagnnnaaaaaataagtcaaagacgattaagagccagagaagcagtcttcatacacgcggccagccagcagacagaggactctcattaaggaaggtgtcctgtgccctgaccctacaagatgccaagagaagatgctcacttcatctatggttaccccaagaaggggcacggccactcttacaccacggctgaagaggccgctgggatcggcatcctgacagtgatcctgggagtcttactgctcatcggctgttggtattgtagaagacgaaatggatacagagccttgatggataaaagtcttcatgttggcactcaatgtgccttaacaagaagatgcccacaagaagggtttgatcatcgggacagcaaagtgtctcttcaagagaaaaactgtgaacctgtggttcccaatgctccacctgcttatgagaaactctctgcagaacagtcaccaccaccttattcaccttaagagccagcgagacacctgagacatgctgaaattatttctctcacacttttgcttgaatttaatacagacatctaatgttctcctttggaatggtgtaggaaaaatgcaagccatctctaataataagtcagtgttaaaattttagtaggtccgctagcagtactaatcatgtgaggaaatgatgagaaatattaaattgggaaaactccatcaataaatgttgcaatgcatgatactatctgtgccagaggtaatgttagtaaatccatggtgttattttctgagagacagaattcaagtgggtattctggggccatccaatttctctttacttgaaatttggctaataacaaactagtcaggttttcgaaccttgaccgacatgaactgtacacagaattgttccagtactatggagtgctcacaaaggatacttttacaggttaagacaaagggttgactggcctatttatctgatcaagaacatgtcagcaatgtctctttgtgctctaaaattctattatactacaataatatattgtaaagatcctatagctctttttttttgagatggagtttcgcttttgttgcccaggctggagtgcaatggcgcgatcttggctcaccataacctccgcctcccaggttcaagcaattctcctgccttagcctcctgagtagctgggattacaggcgtgcgccactatgcctgactaattttgtagttttagtagagacggggtttctccatgttggtcaggctggtctcaaactcctgacctcaggtgatctgcccgcctcagcctcccaaagtgctggaattacaggcgtgagccaccacgcctggctggatcctatatcttaggtaagacatataacgcagtctaattacatttcacttcaaggctcaatgctattctaactaatgacaagtattttctactaaaccagaaattggtagaaggatttaaataagtaaaagctactatgtactgccttagtgctgatgcctgtgtactgccttaaatgtacctatggcaatttagctctcttgggttcccaaatccctctcacaagaatgtgcagaagaaatcataaaggatcagagattctggaatggtgtcattatttgcatagcaacattgcaatttgttttcctttggctacatcaacgtatcacctacactattatttatctaatatttctctttcaggcagctcatttaaactttttttggctttaattcctattgccatcctgagtggaaaaccagtatcattttccatagtagaggataactataacaacgaagataatgaaagtaatttttttaacctaagaaaatactaatggtcacagaaggctatgaacctgagacctgctctctttgtcaaacagagattaacaaggatcagagaaaagttaaaggctgtctttgacataactgggaaggcttacaagagttttaaagaaattactttctcactatatgattcattgctatttaacggtgagtcagtaaaccacctaaaaatcatcttgtctcatcagaaacactagtgtaacataactgcatcattttctactaaagacaaaatttcaccaaaggggaaaaagaaaacacaggataaagagatgtattacacacatcgaaaaaaacaacatttaacaaaatattaaaatatttccccactcttctgatactgtcaagtcttactacttaaaataaggcttccacctctcccacttcaaacaaataaatgaattctaaaccaaagaaacttcatcaggcatttgggtacctcctcccctcaccacgaggtctctgctgaacctcaatcctgtacactgaggaacctgtggcttgaaccctacatccctccagaacccccagactgtcac

SEQ ID NO: 384343 - DNA, 910 bp, Homo sapiens
  misc_feature (46)..(48): n is a, c, g, or t
ccgtcagaaatctaaacccgtgactatcatgggactcaaaaccagnnnaaaaaataagtcaaagacgattaagagccagagaagcagtcttcatacacgcggccagccagcagacagaggactctcattaaggaaggtgtcctgtgccctgaccctacaagatgccaagagaagatgctcacttcatctatggttaccccaagaaggggcacggccactcttacaccacggctgaagaggccgctgggatcggcatcctgacagtgatcctgggagtcttactgctcatcggctgttggtattgtagaagacgaaatggatacagagccttgatggataaaagtcttcatgttggcactcaatgtgccttaacaagaagatgcccacaagaagggtttgatcatcgggacagcaaagtgtctcttcaagagaaaaactgtgaacctgtggttcccaatgctccacctgcttatgagaaactctctgcagaacagtcaccaccaccttattcaccttaagagccagcgagacacctgagacatgctgaaattatttctctcacacttttgcttgaatttaatacagacatctaatgttctcctttggaatggtgtaggaaaaatgcaagccatctctaataataagtcagtgttaaaattttagtaggtccgctagcagtactaatcatgtgaggaaatgatgagaaatattaaattgggaaaactccatcaataaatgttgcaatgcatgcacaaacaaaaagaaaaaaaaatctttgggccgccggcccggaaagttttaaccatttttgggggcggccccagtaaaaacgggcacggtccaaaccgcggaggggttccaaaaaccgggacgggtgaaaccccggcggctggtccaggccctcacccgg

SEQ ID NO: 384344 - DNA, 645 bp, Homo sapiens
  misc_feature (46)..(48): n is a, c, g, or t
ccgtcagaaatctaaacccgtgactatcatgggactcaaaaccagnnnaaaaaataagtcaaagacgattaagagccagagaagcagtcttcatacacgcggccagccagcagacagaggactctcattaaggaaggtgtcctgtgccctgaccctacaagatgccaagagaagatgctcacttcatctatggttaccccaagaaggggcacggccactcttacaccacggctgaagaggccgctgggatcggcatcctgacagtgatcctgggagtcttactgctcatcggctgttggtattgtagaagacgaaatggatacagagccttgatggataaaagtcttcatgttggcactcaatgtgccttaacaagaagatgcccacaagaagggtttgatcatcgggacagcaaagtgtctcttcaagagaaaaactgtgaacctgtggtaggttaagatccttcataagggtattttcatgaatggctgtttttaactcaagtgaatacaattatttccatttaaaaagcaaggacaatgtgaatgtactcattgccactgaactatatacacctaaaaatggttaaaatggcaacttttatgtgtattttatgagaataaaaaataaataataataaaaaac

SEQ ID NO: 384345 - DNA, 2356 bp, Homo sapiens
tcgtgtctattcacgcgtgctgtgcattctaaccaggtactctcacttcacggagggtgtccgtgtcgctcctgaccctactccgaatagtccaagtatcaagaatgtctactcattgtacctatagtctaaccccaataaggcgcaccgcgatttttaatcagggctgaagaggccgctgggatcggcatcctgacagtgatcctgggagtcttactgctcatcggctgttggtattgtagaagacgaaatggatacagagccttgatggataaaagtcttcatgttggcactcaatgtgccttaacaagaagatgcccacaagaagggtttgatcatcgggacagcaaagtgtctcttcaagagaaaaactgtgaacctgtggttcccaatgctccacctgcttatgagaaactctctgcagaacagtcaccaccaccttattcaccttaagagccagcgagacacctgagacatgctgaaattatttctctcacacttttgcttgaatttaatacagacatctaatgttctcctttggaatggtgtaggaaaaatgcaagccatctctaataataagtcagtgttaaaattttagtaggtccgctagcagtactaatcatgtgaggaaatgatgagaaatattaaattgggaaaactccatcaataaatgttgcaatgcatgatactatctgtgccagaggtaatgttagtaaatccatggtgttattttctgagagacagaattcaagtgggtattctggggccatccaatttctctttacttgaaatttggctaataacaaactagtcaggttttcgaaccttgaccgacatgaactgtacacagaattgttccagtactatggagtgctcacaaaggatacttttacaggttaagacaaagggttgactggcctatttatctgatcaagaacatgtcagcaatgtctctttgtgctctaaaattctattatactacaataatatattgtaaagatcctatagctctttttttttgagatggagtttcgcttttgttgcccaggctggagtgcaatggcgcgatcttggctcaccataacctccgcctcccaggttcaagcaattctcctgccttagcctcctgagtagctgggattacaggcgtgcgccactatgcctgactaattttgtagttttagtagagacggggtttctccatgttggtcaggctggtctcaaactcctgacctcaggtgatctgcccgcctcagcctcccaaagtgctggaattacaggcgtgagccaccacgcctggctggatcctatatcttaggtaagacatataacgcagtctaattacatttcacttcaaggctcaatgctattctaactaatgacaagtattttctactaaaccagaaattggtagaaggatttaaataagtaaaagctactatgtactgccttagtgctgatgcctgtgtactgccttaaatgtacctatggcaatttagctctcttgggttcccaaatccctctcacaagaatgtgcagaagaaatcataaaggatcagagattctggaatggtgtcattatttgcatagcaacattgcaatttgttttcctttggctacatcaacgtatcacctacactattatttatctaatatttctctttcaggcagctcatttaaactttttttggctttaattcctattgccatcctgagtggaaaaccagtatcattttccatagtagaggataactataacaacgaagataatgaaagtaatttttttaacctaagaaaatactaatggtcacagaaggctatgaacctgagacctgctctctttgtcaaacagagattaacaaggatcagagaaaagttaaaggctgtctttgacataactgggaaggcttacaagagttttaaagaaattactttctcactatatgattcattgctatttaacggtgagtcagtaaaccacctaaaaatcatcttgtctcatcagaaacactagtgtaacataactgcatcattttctactaaagacaaaatttcaccaaaggggaaaaagaaaacacaggataaagagatgtattacacacatcgaaaaaaacaacatttaacaaaatattaaaatatttccccactcttctgatactgtcaagtcttactacttaaaataaggcttccacctctcccacttcaaacaaataaatgaattctaaaccaaagaaacttcatcaggcatttgggtacctcctcccctcaccacgaggtctctgctgaacctcaatcctgtacactgaggaacctgtggcttgaaccctacatccctccagaacccccagactgtcac

SEQ ID NO: 384346 - DNA, 751 bp, Homo sapiens
  misc_feature (46)..(48): n is a, c, g, or t
ccgtcagaaatctaaacccgtgactatcatgggactcaaaaccagnnnaaaaaataagtcaaagacgattaagagccagagaagcagtcttcatacacgcggccagccagcagacagaggactctcattaaggaaggtgtcctgtgccctgaccctacaagatgccaagagaagatgctcacttcatctatggttaccccaagaaggggcacggccactcttacaccacggctgaagaggccgctgggatcggcatcctgacagtgatcctgggagtcttactgctcatcggctgttggtattgtagaagacgaaatggatacagagccttgatggaaatcctgggatggagcgcagtggtgaacatgagtcactgtagccttgacctcctgggctcaagccatcctcctgtctcagcctccagagtagctgggaccacaggataaaagtcttcatgttggcactcaatgtgccttaacaagaagatgcccacaagaagggtttgatcatcgggacagcaaagtgtctcttcaagagaaaaactgtgaacctgtggtaggttaagatccttcataagggtattttcatgaatggctgtttttaactcaagtgaatacaattatttccatttaaaaagcaaggacaatgtgaatgtactcattgccactgaactatatacacctaaaaatggttaaaatggcaacttttatgtgtattttatgagaataaaaaataaataataataaaaaac

SEQ ID NO: 384347 - DNA, 2787 bp, Homo sapiens
  misc_feature (46)..(48): n is a, c, g, or t
ccgtcagaaatctaaacccgtgactatcatgggactcaaaaccagnnnaaaaaataagtcaaagacgattaagagccagagaagcagtcttcatacacgcggccagccagcagacagaggactctcattaaggaaggtaagagcgttgccttctcgccataatcatagtcctcttctcccagaataggatttgggaaattctggctaagtcctctgcctaccctcattgccccgctgatgtgtgacatcaacagaatttctccgcaacgtttgtcagtctccaacctcagagggctcacaaagcctcctcctgaatcctctctcagtcctccaacactaccaagaagaaaagcaattattcaggatggcatcttgctggggagaagcagcctccctgaggtagatgtgttctcctgtcacttaaagaaccacttctcctggtctgagtagtaagaggcgcatttgctgttgctgcaccatttgccaaggctctgagtttgaggtgtcctgtgccctgaccctacaagatgccaagagaagatgctcacttcatctatggttaccccaagaaggggcacggccactcttacaccacggctgaagaggccgctgggatcggcatcctgacagtgatcctgggagtcttactgctcatcggctgttggtattgtagaagacgaaatggatacagagccttgatggataaaagtcttcatgttggcactcaatgtgccttaacaagaagatgcccacaagaagggtttgatcatcgggacagcaaagtgtctcttcaagagaaaaactgtgaacctgtggttcccaatgctccacctgcttatgagaaactctctgcagaacagtcaccaccaccttattcaccttaagagccagcgagacacctgagacatgctgaaattatttctctcacacttttgcttgaatttaatacagacatctaatgttctcctttggaatggtgtaggaaaaatgcaagccatctctaataataagtcagtgttaaaattttagtaggtccgctagcagtactaatcatgtgaggaaatgatgagaaatattaaattgggaaaactccatcaataaatgttgcaatgcatgatactatctgtgccagaggtaatgttagtaaatccatggtgttattttctgagagacagaattcaagtgggtattctggggccatccaatttctctttacttgaaatttggctaataacaaactagtcaggttttcgaaccttgaccgacatgaactgtacacagaattgttccagtactatggagtgctcacaaaggatacttttacaggttaagacaaagggttgactggcctatttatctgatcaagaacatgtcagcaatgtctctttgtgctctaaaattctattatactacaataatatattgtaaagatcctatagctctttttttttgagatggagtttcgcttttgttgcccaggctggagtgcaatggcgcgatcttggctcaccataacctccgcctcccaggttcaagcaattctcctgccttagcctcctgagtagctgggattacaggcgtgcgccactatgcctgactaattttgtagttttagtagagacggggtttctccatgttggtcaggctggtctcaaactcctgacctcaggtgatctgcccgcctcagcctcccaaagtgctggaattacaggcgtgagccaccacgcctggctggatcctatatcttaggtaagacatataacgcagtctaattacatttcacttcaaggctcaatgctattctaactaatgacaagtattttctactaaaccagaaattggtagaaggatttaaataagtaaaagctactatgtactgccttagtgctgatgcctgtgtactgccttaaatgtacctatggcaatttagctctcttgggttcccaaatccctctcacaagaatgtgcagaagaaatcataaaggatcagagattctggaatggtgtcattatttgcatagcaacattgcaatttgttttcctttggctacatcaacgtatcacctacactattatttatctaatatttctctttcaggcagctcatttaaactttttttggctttaattcctattgccatcctgagtggaaaaccagtatcattttccatagtagaggataactataacaacgaagataatgaaagtaatttttttaacctaagaaaatactaatggtcacagaaggctatgaacctgagacctgctctctttgtcaaacagagattaacaaggatcagagaaaagttaaaggctgtctttgacataactgggaaggcttacaagagttttaaagaaattactttctcactatatgattcattgctatttaacggtgagtcagtaaaccacctaaaaatcatcttgtctcatcagaaacactagtgtaacataactgcatcattttctactaaagacaaaatttcaccaaaggggaaaaagaaaacacaggataaagagatgtattacacacatcgaaaaaaacaacatttaacaaaatattaaaatatttccccactcttctgatactgtcaagtcttactacttaaaataaggcttccacctctcccacttcaaacaaataaatgaattctaaaccaaagaaacttcatcaggcatttgggtacctcctcccctcaccacgaggtctctgctgaacctcaatcctgtacactgaggaacctgtggcttgaaccctacatccctccagaacccccagactgtcac

SEQ ID NO: 384348 - DNA, 426 bp, Homo sapiens
caatatgccatttaacctccttaagccaaacttagatctgggattatcttaccctccagctgcctcagtggattttctttcgaagctactgctttaggttctcctgaagcagaaacctgcccgtctccagctagagccttcacctggtaacgtgggcccctctcccgaacataaaaccctgtgttctgagagttgtttttcaaactgtcctttgttagtgtgctagatggataatgtcagctttttctcaaatctatcttgatttggggtcctctttgtcctaatgagtatttcacagctccatctatgaactcgcttccatttgcctggactcctgagagtggaggtacctggccttccagtgatgcataaagatgtgttttctttatccatttgaatcatctacccaccaagcacctatgtgtc

SEQ ID NO: 384349 - DNA, 3102 bp, Homo sapiens
gcaaatattttaaaataagtaatttcaagaagtcagtcaaactcacaaagctttaacaaggtggcatccagcttggaagtcaagtgttcaagcccgcagtcgggacatccaagagctctttacatcctaattacaacacggaacccagactcactgcataccccgtcccgtatataatgcaaaacttgattctgcaagttcctttctcgggcggtgaaacttcgaaggtcctctccatggagacctttgataaatgtttaagcagtgatcttttctttcgcgtttgcctccattgcaacgcctccgctgatgggaaaaactactccctccgctactgcggggtggcagtgacgtcaacgaattagctgacctgttttttcgggcttcgcggacataggagttccgaaggccgagagtgagtgagtgagtgggagcggggcggctgcggctcctcctgtccggggcggagccctgcgtcgcgggcctggggaggccccgccagcacccttgacgtctgggtcccgagcagtgcggcagccacacgacactgaggcgagcgagtgggtgtgtgcgtggggggtcagccaaacttcctgtcccgcgctcgagctgcttccggcgggagccggaagacgctgtgtgtggacggaattcgggaccgactgacggccggccggcttcccggaactggaaggttacattgattacccacctagtacaacatcttacgggaagagcatagtatttcctagaggaatatgaacataacaggaaggtatcattggctctgaattaaatttgaacttgtcccctgaatagctacaggttttggaagctgaatcaatgttatcagatgagttagaatccaaaccagagctcctggtacagtttgttcagaatacgtccatcccattgggacaggggcttgtagaatcagaagctaaagatattacttgcttgtccctccttcccgtgactgaagcctcagaatgcagtcggctaatgttaccagatgatactacaaatcattctaactcctccaaggaggtcccttcctcagctgttttgagaagccttcgggtgaatgtgggtccagacggagaggagacgagagctcagactgtacagaaatccccggagtttttgtccacttcagagtcttctagcttgttgcaagatctacagccaagtgatagcacttcttttattcttcttaacctaacaagagcaggtctgggctcttcagctgagcacttagtgtttgtacaggatgaggcagaagattcagggaatgatttcctctccagtgagagcacagacagtagcattccatggttcctccgggttcaggagttggcccatgacagtttgattgctgctactcgtgcacaactggcaaagaatgcaaaaaccagcagcaatggagaaaatgtccaccttggttctggtgatgggcagtcaaaagattctgggccccttcctcaagtggaaaagaagctcaagtgtacagttgaaggttgtgaccggacatttgtatggccagctcactttaaataccacctcaagactcatcggggaaaagcttctatgtgctgcagaggctgaaggtgcacatgaggacccacaatggagagaagccctttatgtgccatgagtctggctgtggtaagcagtttactacagctggaaacctgaagaaccaccggcgcatccacacaggagagaaacctttcctttgtgaagcccaaggatgtggccgttcctttgctgagtattctagcctccgaaaacatctggtggttcactcaggagagaagcctcatcagtgccaagtctgtgggaagaccttctctcagagtggaagcaggaatgtgcatatgagaaagcatcacctgcagctgggagcagctgggagtcaagagcaggagcaaactgctgagccactaatgggcagtagtttgcttgaagaggcttcagtacccagtaaaaacctggtgtctatgaattcccagcccagccttggtggagagtccttgaacctaccaaataccaattctatcctgggagttgatgatgaggtgcttgctgaaggatccccacgttccctgtcttcagtgcctgatgtgacacatcacctggtgaccatgcagtcagggaggcaatcatatgaagtttctgtcttaactgcagtaaatccacaagaggtggagtcttgctatgttgcccaggctggagtgcagtggcaccatctcggctcactgcaacctctacctcccgaattcaagcggttcttctgcctcagcctcctgagtagctgggaccacagttactaaaccaaggagatttaactgaaagacggacatgagcgtgggtgctgactcctggaagagcaactctatctgatctcaaaatgcgtatactgggaacaggatgccttagcccacaacagaaccagaatgaatctttgaaggcacaagactctgcttttgccactcttcctctttcctggtatagaagatggatgtaggagagcttcttttctaactaccatctgatcagacaaggaatgaagcaatgactgtgggctgggaaactgtacctacctctcttcccactgcaaatttctgggatagaccaaaagtgaatttgattatgtgttggctgaagttcttcattctgactgttgaggggaggttttcctttgaagagttttcatcccagactcagctgtcttttcacatggatgaaataattcctgctaccaacaacagagcttcaccaggaagttgagttttcaagatgccttgttgctttgaagaagggagtgatgtcaattctcttgttacattctccctttagcaacctgagtaagagactctctgccactgggctgcaaaaaaataaattacttgaatctccccttggcccaggctgaggtactatcttgtcctatacacttctacttggtcactttgctttcttcgttaatggaacatacagtagcatgttaagagggatttcatgtttttgtttttttaaagttaaaaattacatgatgcagagattcaggttttcctttaaataaacaaaacagcccagtca

SEQ ID NO: 384350 - DNA, 3017 bp, Homo sapiens
gcaaatattttaaaataagtaatttcaagaagtcagtcaaactcacaaagctttaacaaggtggcatccagcttggaagtcaagtgttcaagcccgcagtcgggacatccaagagctctttacatcctaattacaacacggaacccagactcactgcataccccgtcccgtatataatgcaaaacttgattctgcaagttcctttctcgggcggtgaaacttcgaaggtcctctccatggagacctttgataaatgtttaagcagtgatcttttctttcgcgtttgcctccattgcaacgcctccgctgatgggaaaaactactccctccgctactgcggggtggcagtgacgtcaacgaattagctgacctgttttttcgggcttcgcggacataggagttccgaaggccgagagtgagtgagtgagtgggagcggggcggctgcggctcctcctgtccggggcggagccctgcgtcgcgggcctggggaggccccgccagcacccttgacgtctgggtcccgagcagtgcggcagccacacgacactgaggcgagcgagtgggtgtgtgcgtggggggtcagccaaacttcctgtcccgcgctcgagctgcttccggcgggagccggaagacgctgtgtgtggacggaattcgggaccgactgacggccggccggcttcccggaactggaaggttacattgattacccacctagtacaacatcttacgggaagagcatagtatttcctagaggaatatgaacataacaggaaggtatcattggctctgaattaaatttgaacttgtcccctgaatagctacaggttttggaagctgaatcaatgttatcagatgagttagaatccaaaccagagctcctggtacagtttgttcagaatacgtccatcccattgggacaggggcttgtagaatcagaagctaaagatattacttgcttgtccctccttcccgtgactgaagcctcagaatgcagtcggctaatgttaccagatgatactacaaatcattctaactcctccaaggaggtcccttcctcagctgttttgagaagccttcgggtgaatgtgggtccagacggagaggagacgagagctcagactgtacagaaatccccggagtttttgtccacttcagagtcttctagcttgttgcaagatctacagccaagtgatagcacttcttttattcttcttaacctaacaagagcaggtctgggctcttcagctgagcacttagtgtttgtacaggatgaggcagaagattcagggaatgatttcctctccagtgagagcacagacagtagcattccatggttcctccgggttcaggagttggcccatgacagtttgattgctgctactcgtgcacaactggcaaagaatgcaaaaaccagcagcaatggagaaaatgtccaccttggttctggtgatgggcagtcaaaagattctgggccccttcctcaagtggaaaagaagctcaagtgtacagttgaaggttgtgaccggacatttgtatggccagctcactttaaataccacctcaagactcatcgaaatgaccgctccttcatctgtcctgcagaaggttgtgggaaaagcttctatgtgctgcagaggctgaaggtgcacatgaggacccacaatggagagaagccctttatgtgccatgagtctggctgtggtaagcagtttactacagctggaaacctgaagaaccaccggcgcatccacacaggagagaaacctttcctttgtgaagcccaaggatgtggccgttcctttgctgagtattctagcctccgaaaacatctggtggttcactcaggagagaagcctcatcagtgccaagtctgtgggaagaccttctctcagagtggaagcaggaatgtgcatatgagaaagcatcacctgcagctgggagcagctgggagtcaagagcaggagcaaactgctgagccactaatgggcagtagtttgcttgaagaggcttcagtacccagtaaaaacctggtgtctatgaattcccagcccagccttggtggagagtccttgaacctaccaaataccaattctatcctgggagttgatgatgaggtgcttgctgaaggatccccacgttccctgtcttcagtgcctgatgtgacacatcacctggtgaccatgcagtcagggaggcaatcatatgaagtttctgtcttaactgcagtaaatccacaagagttactaaaccaaggagatttaactgaaagacggacatgagcgtgggtgctgactcctggaagagcaactctatctgatctcaaaatgcgtatactgggaacaggatgccttagcccacaacagaaccagaatgaatctttgaaggcacaagactctgcttttgccactcttcctctttcctggtatagaagatggatgtaggagagcttcttttctaactaccatctgatcagacaaggaatgaagcaatgactgtgggctgggaaactgtacctacctctcttcccactgcaaatttctgggatagaccaaaagtgaatttgattatgtgttggctgaagttcttcattctgactgttgaggggaggttttcctttgaagagttttcatcccagactcagctgtcttttcacatggatgaaataattcctgctaccaacaacagagcttcaccaggaagttgagttttcaagatgccttgttgctttgaagaagggagtgatgtcaattctcttgttacattctccctttagcaacctgagtaagagactctctgccactgggctgcaaaaaaataaattacttgaatctccccttggcccaggctgaggtactatcttgtcctatacacttctacttggtcactttgctttcttcgttaatggaacatacagtagcatgttaagagggatttcatgtttttgtttttttaaagttaaaaattacatgatgcagagattcaggttttcctttaaataaacaaaacagcccagtca

SEQ ID NO: 384351 - DNA, 2572 bp, Homo sapiens
gcaaatattttaaaataagtaatttcaagaagtcagtcaaactcacaaagctttaacaaggtggcatccagcttggaagtcaagtgttcaagcccgcagtcgggacatccaagagctctttacatcctaattacaacacggaacccagactcactgcataccccgtcccgtatataatgcaaaacttgattctgcaagttcctttctcgggcggtgaaacttcgaaggtcctctccatggagacctttgataaatgtttaagcagtgatcttttctttcgcgtttgcctccattgcaacgcctccgctgatgggaaaaactactccctccgctactgcggggtggcagtgacgtcaacgaattagctgacctgttttttcgggcttcgcggacataggagttccgaaggccgagagtgagtgagtgagtgggagcggggcggctgcggctcctcctgtccggggcggagccctgcgtcgcgggcctggggaggccccgccagcacccttgacgtctgggtcccgagcagtgcggcagccacacgacactgaggcgagcgagtgggtgtgtgcgtggggggtcagccaaacttcctgtcccgcgctcgagctgcttccggcgggagccggaagacgctgtgtgtggacggaattcgggaccgactgacggccggccggcttcccggaactggaaggttacattgattacccacctagtacaacatcttacgggaagagcatagtatttcctagaggaatatgaacataacaggaaggtatcattggctctgaattaaatttgaacttgtcccctgaatagctacaggttttggaagctgaatcaatgttatcagatgagttagaatccaaaccagagctcctggtacagtttgttcagaatacgtccatcccattgggacaggggcttgtagaatcagaagctaaagatattacttgcttgtccctccttcccgtgactgaagcctcagaatgcagtcggctaatgttaccagatgatactacaaatcattctaactcctccaaggaggtcccttcctcagctgttttgagaagccttcgggtgaatgtgggtccagacggagaggagacgagagctcagactgtacagaaatccccggagtttttgtccacttcagagtcttctagcttgttgcaagatctacagccaagtgatagcacttcttttattcttcttaacctaacaagagcaggtctgggctcttcagctgagcacttagtgtttgtacaggatgaggcagaagattcagggaatgatttcctctccagtgagagcacagacagtagcattccatggttcctccgggttcaggagttggcccatgacagtttgattgctgctactcgtgcacaactggcaaagaatgcaaaaaccagcagcaatggagaaaatgtccaccttggttctggtgatgggcagtcaaaagattctgggccccttcctcaagtggaaaagaagctcaagtgtacagttgaaggttgtgaccggacatttgtatggccagctcactttaaataccacctcaagactcatcgaaatgaccgctccttcatctgtcctgcagaaggttgtgggaaaagcttctatgtgctgcagaggctgaaggtgcacatgaggacccacaatggagagaagccctttatgtgccatgagtctggctgtggtaagcagtttactacagctggaaacctgaagaaccaccggcgcatccacacaggagagaaacctttcctttgtgaagcccaaggatgtggccgttcctttgctgagtattctagcctccgaaaacatctggtggttcactcaggagagaagcctcatcagtgccaagtctgtgggaagaccttctctcagagtggaagcaggaatgtgcatatgagaaagcatcacctgcagctgggagcagctgggagtcaagagcaggagcaaactgctgagccactaatgggcagtagtttgcttgaagaggcttcagtacccagtaaaaacctggtgtctatgaattcccagcccagccttggtggagagtccttgaacctaccaaataccaaatttctgggatagaccaaaagtgaatttgattatgtgttggctgaagttcttcattctgactgttgaggggaggttttcctttgaagagttttcatcccagactcagctgtcttttcacatggatgaaataattcctgctaccaacaacagagcttcaccaggaagttgagttttcaagatgccttgttgctttgaagaagggagtgatgtcaattctcttgttacattctccctttagcaacctgagtaagagactctctgccactgggctgcaaaaaaataaattacttgaatctccccttggcccaggctgaggtactatcttgtcctatacacttctacttggtcactttgctttcttcgttaatggaacatacagtagcatgttaagagggatttcatgtttttgtttttttaaagttaaaaattacatgatgcagagattcaggttttcctttaaataaacaaaacagcccagtca

SEQ ID NO: 384352 - DNA, 2916 bp, Homo sapiens
gcaaatattttaaaataagtaatttcaagaagtcagtcaaactcacaaagctttaacaaggtggcatccagcttggaagtcaagtgttcaagcccgcagtcgggacatccaagagctctttacatcctaattacaacacggaacccagactcactgcataccccgtcccgtatataatgcaaaacttgattctgcaagttcctttctcgggcggtgaaacttcgaaggtcctctccatggagacctttgataaatgtttaagcagtgatcttttctttcgcgtttgcctccattgcaacgcctccgctgatgggaaaaactactccctccgctactgcggggtggcagtgacgtcaacgaattagctgacctgttttttcgggcttcgcggacataggagttccgaaggccgagagtgagtgagtgagtgggagcggggcggctgcggctcctcctgtccggggcggagccctgcgtcgcgggcctggggaggccccgccagcacccttgacgtctgggtcccgagcagtgcggcagccacacgacactgaggcgagcgagtgggtgtgtgcgtggggggtcagccaaacttcctgtcccgcgctcgagctgcttccggcgggagccggaagacgctgtgtgtggacggaattcgggaccgactgacggccggccggcttcccggaactggaaggttacattgattacccacctagtacaacatcttacgggaagagcatagtatttcctagaggaatatgaacataacaggaagctcctggtacagtttgttcagaatacgtccatcccattgggacaggggcttgtagaatcagaagctaaagatattacttgcttgtccctccttcccgtgactgaagcctcagaatgcagtcggctaatgttaccagatgatactacaaatcattctaactcctccaaggaggtcccttcctcagctgttttgagaagccttcgggtgaatgtgggtccagacggagaggagacgagagctcagactgtacagaaatccccggagtttttgtccacttcagagtcttctagcttgttgcaagatctacagccaagtgatagcacttcttttattcttcttaacctaacaagagcaggtctgggctcttcagctgagcacttagtgtttgtacaggatgaggcagaagattcagggaatgatttcctctccagtgagagcacagacagtagcattccatggttcctccgggttcaggagttggcccatgacagtttgattgctgctactcgtgcacaactggcaaagaatgcaaaaaccagcagcaatggagaaaatgtccaccttggttctggtgatgggcagtcaaaagattctgggccccttcctcaagtggaaaagaagctcaagtgtacagttgaaggttgtgaccggacatttgtatggccagctcactttaaataccacctcaagactcatcgaaatgaccgctccttcatctgtcctgcagaaggttgtgggaaaagcttctatgtgctgcagaggctgaaggtgcacatgaggacccacaatggagagaagccctttatgtgccatgagtctggctgtggtaagcagtttactacagctggaaacctgaagaaccaccggcgcatccacacaggagagaaacctttcctttgtgaagcccaaggatgtggccgttcctttgctgagtattctagcctccgaaaacatctggtggttcactcaggagagaagcctcatcagtgccaagtctgtgggaagaccttctctcagagtggaagcaggaatgtgcatatgagaaagcatcacctgcagctgggagcagctgggagtcaagagcaggagcaaactgctgagccactaatgggcagtagtttgcttgaagaggcttcagtacccagtaaaaacctggtgtctatgaattcccagcccagccttggtggagagtccttgaacctaccaaataccaattctatcctgggagttgatgatgaggtgcttgctgaaggatccccacgttccctgtcttcagtgcctgatgtgacacatcacctggtgaccatgcagtcagggaggcaatcatatgaagtttctgtcttaactgcagtaaatccacaagagttactaaaccaaggagatttaactgaaagacggacatgagcgtgggtgctgactcctggaagagcaactctatctgatctcaaaatgcgtatactgggaacaggatgccttagcccacaacagaaccagaatgaatctttgaaggcacaagactctgcttttgccactcttcctctttcctggtatagaagatggatgtaggagagcttcttttctaactaccatctgatcagacaaggaatgaagcaatgactgtgggctgggaaactgtacctacctctcttcccactgcaaatttctgggatagaccaaaagtgaatttgattatgtgttggctgaagttcttcattctgactgttgaggggaggttttcctttgaagagttttcatcccagactcagctgtcttttcacatggatgaaataattcctgctaccaacaacagagcttcaccaggaagttgagttttcaagatgccttgttgctttgaagaagggagtgatgtcaattctcttgttacattctccctttagcaacctgagtaagagactctctgccactgggctgcaaaaaaataaattacttgaatctccccttggcccaggctgaggtactatcttgtcctatacacttctacttggtcactttgctttcttcgttaatggaacatacagtagcatgttaagagggatttcatgtttttgtttttttaaagttaaaaattacatgatgcagagattcaggttttcctttaaataaacaaaacagcccagtca

SEQ ID NO: 384353 - DNA, 3068 bp, Homo sapiens
gcaaatattttaaaataagtaatttcaagaagtcagtcaaactcacaaagctttaacaaggtggcatccagcttggaagtcaagtgttcaagcccgcagtcgggacatccaagagctctttacatcctaattacaacacggaacccagactcactgcataccccgtcccgtatataatgcaaaacttgattctgcaagttcctttctcgggcggtgaaacttcgaaggtcctctccatggagacctttgataaatgtttaagcagtgatcttttctttcgcgtttgcctccattgcaacgcctccgctgatgggaaaaactactccctccgctactgcggggtggcagtgacgtcaacgaattagctgacctgttttttcgggcttcgcggacataggagttccgaaggccgagagtgagtgagtgagtgggagcggggcggctgcggctcctcctgtccggggcggagccctgcgtcgcgggcctggggaggccccgccagcacccttgacgtctgggtcccgagcagtgcggcagccacacgacactgaggcgagcgagtgggtgtgtgcgtggggggtcagccaaacttcctgtcccgcgctcgagctgcttccggcgggagccggaagacgctgtgtgtggacggaattcgggaccgactgacggccggccggcttcccggaactggaaggttacattgattacccacctagtacaacatcttacgggaagagcatagtatttcctagaggaatatgaacataacaggaaggtatcattggctctgaattaaatttgaacttgtcccctgaatagctacaggttttggaagctgaatcaatgttatcagatgagttagaatccaaaccagagctcctggtacagtttgttcagaatacgtccatcccattgggacaggggcttgtagaatcagaagctaaagatattacttgcttgtccctccttcccgtgactgaagcctcagaatgcagtcggctaatgttaccagaacctgttccatggagagaagaggatggaaagtcaggctgcagtgacttgaatgatactacaaatcattctaactcctccaaggaggtcccttcctcagctgttttgagaagccttcgggtgaatgtgggtccagacggagaggagacgagagctcagactgtacagaaatccccggagtttttgtccacttcagagtcttctagcttgttgcaagatctacagccaagtgatagcacttcttttattcttcttaacctaacaagagcaggtctgggctcttcagctgagcacttagtgtttgtacaggatgaggcagaagattcagggaatgatttcctctccagtgagagcacagacagtagcattccatggttcctccgggttcaggagttggcccatgacagtttgattgctgctactcgtgcacaactggcaaagaatgcaaaaaccagcagcaatggagaaaatgtccaccttggttctggtgatgggcagtcaaaagattctgggccccttcctcaagtggaaaagaagctcaagtgtacagttgaaggttgtgaccggacatttgtatggccagctcactttaaataccacctcaagactcatcgaaatgaccgctccttcatctgtcctgcagaaggttgtgggaaaagcttctatgtgctgcagaggctgaaggtgcacatgaggacccacaatggagagaagccctttatgtgccatgagtctggctgtggtaagcagtttactacagctggaaacctgaagaaccaccggcgcatccacacaggagagaaacctttcctttgtgaagcccaaggatgtggccgttcctttgctgagtattctagcctccgaaaacatctggtggttcactcaggagagaagcctcatcagtgccaagtctgtgggaagaccttctctcagagtggaagcaggaatgtgcatatgagaaagcatcacctgcagctgggagcagctgggagtcaagagcaggagcaaactgctgagccactaatgggcagtagtttgcttgaagaggcttcagtacccagtaaaaacctggtgtctatgaattcccagcccagccttggtggagagtccttgaacctaccaaataccaattctatcctgggagttgatgatgaggtgcttgctgaaggatccccacgttccctgtcttcagtgcctgatgtgacacatcacctggtgaccatgcagtcagggaggcaatcatatgaagtttctgtcttaactgcagtaaatccacaagagttactaaaccaaggagatttaactgaaagacggacatgagcgtgggtgctgactcctggaagagcaactctatctgatctcaaaatgcgtatactgggaacaggatgccttagcccacaacagaaccagaatgaatctttgaaggcacaagactctgcttttgccactcttcctctttcctggtatagaagatggatgtaggagagcttcttttctaactaccatctgatcagacaaggaatgaagcaatgactgtgggctgggaaactgtacctacctctcttcccactgcaaatttctgggatagaccaaaagtgaatttgattatgtgttggctgaagttcttcattctgactgttgaggggaggttttcctttgaagagttttcatcccagactcagctgtcttttcacatggatgaaataattcctgctaccaacaacagagcttcaccaggaagttgagttttcaagatgccttgttgctttgaagaagggagtgatgtcaattctcttgttacattctccctttagcaacctgagtaagagactctctgccactgggctgcaaaaaaataaattacttgaatctccccttggcccaggctgaggtactatcttgtcctatacacttctacttggtcactttgctttcttcgttaatggaacatacagtagcatgttaagagggatttcatgtttttgtttttttaaagttaaaaattacatgatgcagagattcaggttttcctttaaataaacaaaacagcccagtca

SEQ ID NO: 384354 - DNA, 3160 bp, Homo sapiens
gcaaatattttaaaataagtaatttcaagaagtcagtcaaactcacaaagctttaacaaggtggcatccagcttggaagtcaagtgttcaagcccgcagtcgggacatccaagagctctttacatcctaattacaacacggaacccagactcactgcataccccgtcccgtatataatgcaaaacttgattctgcaagttcctttctcgggcggtgaaacttcgaaggtcctctccatggagacctttgataaatgtttaagcagtgatcttttctttcgcgtttgcctccattgcaacgcctccgctgatgggaaaaactactccctccgctactgcggggtggcagtgacgtcaacgaattagctgacctgttttttcgggcttcgcggacataggagttccgaaggccgagagtgagtgagtgagtgggagcggggcggctgcggctcctcctgtccggggcggagccctgcgtcgcgggcctggggaggccccgccagcacccttgacgtctgggtcccgagcagtgcggcagccacacgacactgaggcgagcgagtgggtgtgtgcgtggggggtcagccaaacttcctgtcccgcgctcgagctgcttccggcgggagccggaagacgctgtgtgtggacggaattcgggaccgactgacggccggccggcttcccggaactggaaggtttgagatgctgttggatatacatgtggagatacctagcaagcagttagaaatgaaggtttggagttcagaagagatgactagagaaaaatgttacattgattacccacctagtacaacatcttacgggaagagcatagtatttcctagaggaatatgaacataacaggaaggtatcattggctctgaattaaatttgaacttgtcccctgaatagctacaggttttggaagctgaatcaatgttatcagatgagttagaatccaaaccagagctcctggtacagtttgttcagaatacgtccatcccattgggacaggggcttgtagaatcagaagctaaagatattacttgcttgtccctccttcccgtgactgaagcctcagaatgcagtcggctaatgttaccagaacctgttccatggagagaagaggatggaaagtcaggctgcagtgacttgaatgatactacaaatcattctaactcctccaaggaggtcccttcctcagctgttttgagaagccttcgggtgaatgtgggtccagacggagaggagacgagagctcagactgtacagaaatccccggagtttttgtccacttcagagtcttctagcttgttgcaagatctacagccaagtgatagcacttcttttattcttcttaacctaacaagagcaggtctgggctcttcagctgagcacttagtgtttgtacaggatgaggcagaagattcagggaatgatttcctctccagtgagagcacagacagtagcattccatggttcctccgggttcaggagttggcccatgacagtttgattgctgctactcgtgcacaactggcaaagaatgcaaaaaccagcagcaatggagaaaatgtccaccttggttctggtgatgggcagtcaaaagattctgggccccttcctcaagtggaaaagaagctcaagtgtacagttgaaggttgtgaccggacatttgtatggccagctcactttaaataccacctcaagactcatcgaaatgaccgctccttcatctgtcctgcagaaggttgtgggaaaagcttctatgtgctgcagaggctgaaggtgcacatgaggacccacaatggagagaagccctttatgtgccatgagtctggctgtggtaagcagtttactacagctggaaacctgaagaaccaccggcgcatccacacaggagagaaacctttcctttgtgaagcccaaggatgtggccgttcctttgctgagtattctagcctccgaaaacatctggtggttcactcaggagagaagcctcatcagtgccaagtctgtgggaagaccttctctcagagtggaagcaggaatgtgcatatgagaaagcatcacctgcagctgggagcagctgggagtcaagagcaggagcaaactgctgagccactaatgggcagtagtttgcttgaagaggcttcagtacccagtaaaaacctggtgtctatgaattcccagcccagccttggtggagagtccttgaacctaccaaataccaattctatcctgggagttgatgatgaggtgcttgctgaaggatccccacgttccctgtcttcagtgcctgatgtgacacatcacctggtgaccatgcagtcagggaggcaatcatatgaagtttctgtcttaactgcagtaaatccacaagagttactaaaccaaggagatttaactgaaagacggacatgagcgtgggtgctgactcctggaagagcaactctatctgatctcaaaatgcgtatactgggaacaggatgccttagcccacaacagaaccagaatgaatctttgaaggcacaagactctgcttttgccactcttcctctttcctggtatagaagatggatgtaggagagcttcttttctaactaccatctgatcagacaaggaatgaagcaatgactgtgggctgggaaactgtacctacctctcttcccactgcaaatttctgggatagaccaaaagtgaatttgattatgtgttggctgaagttcttcattctgactgttgaggggaggttttcctttgaagagttttcatcccagactcagctgtcttttcacatggatgaaataattcctgctaccaacaacagagcttcaccaggaagttgagttttcaagatgccttgttgctttgaagaagggagtgatgtcaattctcttgttacattctccctttagcaacctgagtaagagactctctgccactgggctgcaaaaaaataaattacttgaatctccccttggcccaggctgaggtactatcttgtcctatacacttctacttggtcactttgctttcttcgttaatggaacatacagtagcatgttaagagggatttcatgtttttgtttttttaaagttaaaaattacatgatgcagagattcaggttttcctttaaataaacaaaacagcccagtca

SEQ ID NO: 384355 - DNA, 2058 bp, Homo sapiens
ccgcgtgtggatcggacgaggacgctcagaatgcagtcggctaatgttaccagatgatactacaaatcattctaactcctccaaggaggtcccttcctcagctgttttgagaagccttcgggtgaatgtgggtccagacggagaggagacgagagctcagactgtacagaaatccccggagtttttgtccacttcagagtcttctagcttgttgcaagatctacagccaagtgatagcacttcttttattcttcttaacctaacaagagcaggtctgggctcttcagctgagcacttagtgtttgtacaggatgaggcagaagattcagggaatgatttcctctccagtgagagcacagacagtagcattccatggttcctccgggttcaggagttggcccatgacagtttgattgctgctactcgtgcacaactggcaaagaatgcaaaaaccagcagcaatggagaaaatgtccaccttggttctggtgatgggcagtcaaaagattctgggccccttcctcaagtggaaaagaagctcaagtgtacagttgaaggttgtgaccggacatttgtatggccagctcactttaaataccacctcaagactcatcgaaatgaccgctccttcatctgtcctgcagaaggttgtgggaaaagcttctatgtgctgcagaggctgaaggtgcacatgaggacccacaatggagagaagccctttatgtgccatgagtctggctgtggtaagcagtttactacagctggaaacctgaagaaccaccggcgcatccacacaggagagaaacctttcctttgtgaagcccaaggatgtggccgttcctttgctgagtattctagcctccgaaaacatctggtggttcactcaggagagaagcctcatcagtgccaagtctgtgggaagaccttctctcagagtggaagcaggaatgtgcatatgagaaagcatcacctgcagctgggagcagctgggagtcaagagcaggagcaaactgctgagccactaatgggcagtagtttgcttgaagaggcttcagtacccagtaaaaacctggtgtctatgaattcccagcccagccttggtggagagtccttgaacctaccaaataccaattctatcctgggagttgatgatgaggtgcttgctgaaggatccccacgttccctgtcttcagtgcctgatgtgacacatcacctggtgaccatgcagtcagggaggcaatcatatgaagtttctgtcttaactgcagtaaatccacaagagttactaaaccaaggagatttaactgaaagacggacatgagcgtgggtgctgactcctggaagagcaactctatctgatctcaaaatgcgtatactgggaacaggatgccttagcccacaacagaaccagaatgaatctttgaaggcacaagactctgcttttgccactcttcctctttcctggtatagaagatggatgtaggagagcttcttttctaactaccatctgatcagacaaggaatgaagcaatgactgtgggctgggaaactgtacctacctctcttcccactgcaaatttctgggatagaccaaaagtgaatttgattatgtgttggctgaagttcttcattctgactgttgaggggaggttttcctttgaagagttttcatcccagactcagctgtcttttcacatggatgaaataattcctgctaccaacaacagagcttcaccaggaagttgagttttcaagatgccttgttgctttgaagaagggagtgatgtcaattctcttgttacattctccctttagcaacctgagtaagagactctctgccactgggctgcaaaaaaataaattacttgaatctccccttggcccaggctgaggtactatcttgtcctatacacttctacttggtcactttgctttcttcgttaatggaacatacagtagcatgttaagagggatttcatgtttttgtttttttaaagttaaaaattacatgatgcagagattcaggttttcctttaaataaacaaaacagcccagtca

SEQ ID NO: 384356 - DNA, 2690 bp, Homo sapiens
gcaaatattttaaaataagtaatttcaagaagtcagtcaaactcacaaagctttaacaaggtggcatccagcttggaagtcaagtgttcaagcccgcagtcgggacatccaagagctctttacatcctaattacaacacggaacccagactcactgcataccccgtcccgtatataatgcaaaacttgattctgcaagttcctttctcgggcggtgaaacttcgaaggtcctctccatggagacctttgataaatgtttaagcagtgatcttttctttcgcgtttgcctccattgcaacgcctccgctgatgggaaaaactactccctccgctactgcggggtggcagtgacgtcaacgaattagctgacctgttttttcgggcttcgcggacataggagttccgaaggccgagagtgagtgagtgagtgggagcggggcggctgcggctcctcctgtccggggcggagccctgcgtcgcgggcctggggaggccccgccagcacccttgacgtctgggtcccgagcagtgcggcagccacacgacactgaggcgagcgagtgggtgtgtgcgtggggggtcagccaaacttcctgtcccgcgctcgagctgcttccggcgggagccggaagacgctgtgtgtggacggaattcgggaccgactgacggccggccggcttcccggaactggaaggttacattgattacccacctagtacaacatcttacgggaagagcatagtatttcctagaggaatatgaacataacaggaaggtatcattggctctgaattaaatttgaacttgtcccctgaatagctacaggttttggaagctgaatcaatgttatcagatgagttagaatccaaaccagagctcctggtacagtttgttcagaatacgtccatcccattgggacaggggcttgtagaatcagaagctaaagatattacttgcttgtccctccttcccgtgactgaagcctcagaatgcagtcggctaatgttaccagatgatactacaaatcattctaactcctccaaggaggtcccttcctcagctgttttgagaagccttcgggtgaatgtgggtccagacggagaggagacgagagctcagactgtacagaaatccccggagtttttgtccacttcagagtcttctagcttgttgcaagatctacagccaagtgatagcacttcttttattcttcttaacctaacaagagcaggtctgggctcttcagctgagcacttagtgtttgtacaggatgaggcagaagattcagggaatgatttcctctccagtgagagcacagacagtagcattccatggttcctccgggttcaggagttggcccatgacagtttgattgctgctactcgtgcacaactggcaaagaatgcaaaaaccagcagcaatggagaaaatgtccaccttggttctggtgatgggcagtcaaaagattctgggccccttcctcaagtggaaaagaagctcaagtgtacagttgaaggttgtgaccggacatttgtatggccagctcactttaaataccacctcaagactcatcgaaatgaccgctccttcatctgtcctgcagaaggttgtgggaaaagcttctatgtgctgcagaggctgaaggtgcacatgaggacccacaatggagagaagccctttatgtgccatgagtctggctgtggtaagcagtttactacagctggaaacctgaagaaccaccggcgcatccacacaggagagaaacctttcctttgtgaagcccaaggatgtggccgttcctttgctgagtattctagcctccgaaaacatctggtggttcactcaggagagaagcctcatcagtgccaagtctgtgggaagaccttctctcagagtggaagcaggaatgtgcatatgagaaagcatcacctgcagctgggagcagctgggagtcaagagcaggagcaaactgctgagccactaatgggcagtagtttgcttgaagaggcttcagtacccagtaaaaacctggtgtctatgaattcccagcccagccttggtggagagtccttgaacctaccaaataccaattctatcctgggagttgatgatgaggtgcttgctgaaggatccccacgttccctgtcttcagtgcctgatgtgacacatcacctggtgaccatgcagtcagggaggcaatcatatgaagtttctgtcttaactgcagtaaatccacaagagttactaaaccaaggagatttaactgaaagacggacatgagcgtgggtgctgactcctggaagagcaactctatctgatctcaaaatgcgtatactgggaacaggatgccttagcccacaacagcaccaggaagttgagttttcaagatgccttgttgctttgaagaagggagtgatgtcaattctcttgttacattctccctttagcaacctgagtaagagactctctgccactgggctgcaaaaaaataaattacttgaatctccccttggcccaggctgaggtactatcttgtcctatacacttctacttggtcactttgctttcttcgttaatggaacatacagtagcatgttaagagggatttcatgtttttgtttttttaaagttaaaaattacatgatgcagagattcaggttttcctttaaataaacaaaacagcccagtca

SEQ ID NO: 384357 - DNA, 2798 bp, Homo sapiens
gcaaatattttaaaataagtaatttcaagaagtcagtcaaactcacaaagctttaacaaggtggcatccagcttggaagtcaagtgttcaagcccgcagtcgggacatccaagagctctttacatcctaattacaacacggaacccagactcactgcataccccgtcccgtatataatgcaaaacttgattctgcaagttcctttctcgggcggtgaaacttcgaaggtcctctccatggagacctttgataaatgtttaagcagtgatcttttctttcgcgtttgcctccattgcaacgcctccgctgatgggaaaaactactccctccgctactgcggggtggcagtgacgtcaacgaattagctgacctgttttttcgggcttcgcggacataggagttccgaaggccgagagtgagtgagtgagtgggagcggggcggctgcggctcctcctgtccggggcggagccctgcgtcgcgggcctggggaggccccgccagcacccttgacgtctgggtcccgagcagtgcggcagccacacgacactgaggcgagcgagtgggtgtgtgcgtggggggtcagccaaacttcctgtcccgcgctcgagctgcttccggcgggagccggaagacgctgtgtgtggacggaattcgggaccgactgacggccggccggcttcccggaactggaaggttacattgattacccacctagtacaacatcttacgggaagagcatagtatttcctagaggaatatgaacataacaggaaggtatcattggctctgaattaaatttgaacttgtcccctgaatagctacaggttttggaagctgaatcaatgttatcagatgagttagaatccaaaccagagctcctggtacagtttgttcagaatacgtccatcccattgggacaggggcttgtagaatcagaagctaaagatattacttgcttgtccctccttcccgtgactgaagcctcagaatgcagtcggctaatgttaccaggtctgggctcttcagctgagcacttagtgtttgtacaggatgaggcagaagattcagggaatgatttcctctccagtgagagcacagacagtagcattccatggttcctccgggttcaggagttggcccatgacagtttgattgctgctactcgtgcacaactggcaaagaatgcaaaaaccagcagcaatggagaaaatgtccaccttggttctggtgatgggcagtcaaaagattctgggccccttcctcaagtggaaaagaagctcaagtgtacagttgaaggttgtgaccggacatttgtatggccagctcactttaaataccacctcaagactcatcgaaatgaccgctccttcatctgtcctgcagaaggttgtgggaaaagcttctatgtgctgcagaggctgaaggtgcacatgaggacccacaatggagagaagccctttatgtgccatgagtctggctgtggtaagcagtttactacagctggaaacctgaagaaccaccggcgcatccacacaggagagaaacctttcctttgtgaagcccaaggatgtggccgttcctttgctgagtattctagcctccgaaaacatctggtggttcactcaggagagaagcctcatcagtgccaagtctgtgggaagaccttctctcagagtggaagcaggaatgtgcatatgagaaagcatcacctgcagctgggagcagctgggagtcaagagcaggagcaaactgctgagccactaatgggcagtagtttgcttgaagaggcttcagtacccagtaaaaacctggtgtctatgaattcccagcccagccttggtggagagtccttgaacctaccaaataccaattctatcctgggagttgatgatgaggtgcttgctgaaggatccccacgttccctgtcttcagtgcctgatgtgacacatcacctggtgaccatgcagtcagggaggcaatcatatgaagtttctgtcttaactgcagtaaatccacaagagttactaaaccaaggagatttaactgaaagacggacatgagcgtgggtgctgactcctggaagagcaactctatctgatctcaaaatgcgtatactgggaacaggatgccttagcccacaacagaaccagaatgaatctttgaaggcacaagactctgcttttgccactcttcctctttcctggtatagaagatggatgtaggagagcttcttttctaactaccatctgatcagacaaggaatgaagcaatgactgtgggctgggaaactgtacctacctctcttcccactgcaaatttctgggatagaccaaaagtgaatttgattatgtgttggctgaagttcttcattctgactgttgaggggaggttttcctttgaagagttttcatcccagactcagctgtcttttcacatggatgaaataattcctgctaccaacaacagagcttcaccaggaagttgagttttcaagatgccttgttgctttgaagaagggagtgatgtcaattctcttgttacattctccctttagcaacctgagtaagagactctctgccactgggctgcaaaaaaataaattacttgaatctccccttggcccaggctgaggtactatcttgtcctatacacttctacttggtcactttgctttcttcgttaatggaacatacagtagcatgttaagagggatttcatgtttttgtttttttaaagttaaaaattacatgatgcagagattcaggttttcctttaaataaacaaaacagcccagtca

SEQ ID NO: 384358 - DNA, 2469 bp, Homo sapiens
gcaaatattttaaaataagtaatttcaagaagtcagtcaaactcacaaagctttaacaaggtggcatccagcttggaagtcaagtgttcaagcccgcagtcgggacatccaagagctctttacatcctaattacaacacggaacccagactcactgcataccccgtcccgtatataatgcaaaacttgattctgcaagttcctttctcgggcggtgaaacttcgaaggtcctctccatggagacctttgataaatgtttaagcagtgatcttttctttcgcgtttgcctccattgcaacgcctccgctgatgggaaaaactactccctccgctactgcggggtggcagtgacgtcaacgaattagctgacctgttttttcgggcttcgcggacataggagttccgaaggccgagagtgagtgagtgagtgggagcggggcggctgcggctcctcctgtccggggcggagccctgcgtcgcgggcctggggaggccccgccagcacccttgacgtctgggtcccgagcagtgcggcagccacacgacactgaggcgagcgagtgggtgtgtgcgtggggggtcagccaaacttcctgtcccgcgctcgagctgcttccggcgggagccggaagacgctgtgtgtggacggaattcgggaccgactgacggccggccggcttcccggaactggaaggttacattgattacccacctagtacaacatcttacgggaagagcatagtatttcctagaggaatatgaacataacaggaaggtatcattggctctgaattaaatttgaacttgtcccctgaatagctacaggttttggaagctgaatcaatgttatcagatgagttagaatccaaaccagagctcctggtacagtttgttcagaatacgtccatcccattgggacaggggcttgtagaatcagaagctaaagatattacttgcttgtccctccttcccgtgactgaagcctcagaatgcagtcggctaatgttaccagatgatactacaaatcattctaactcctccaaggaggtcccttcctcagctgttttgagaagccttcgggtgaatgtgggtccagacggagaggagacgagagctcagactgtacagaaatccccggagtttttgtccacttcagagtcttctagcttgttgcaagatctacagccaagtgatagcacttcttttattcttcttaacctaacaagagcaggtctgggctcttcagctgagcacttagtgtttgtacaggatgaggcagaagattcagggaatgatttcctctccagtgagagcacagacagtagcattccatggttcctccgggttcaggagttggcccatgacagtttgattgctgctactcgtgcacaactggcaaagaatgcaaaaaccagcagcaatggagaaaatgtccaccttggttctggtgatgggcagtcaaaagattctgggccccttcctcaagtggaaaagaagctcaagtgtacagttgaaggttgtgaccggacatttgtatggccagctcactttaaataccacctcaagactcatcgaaatgaccgctccttcatctgtcctgcagaaggttgtgggaaaagcttctatgtgctgcagaggctgaaggtgcacatgaggacccacaatggagagaagccctttatgtgccatgagtctggctgtggtaagcagtttactacagctggaaacctgaagaaccaccggcgcatccacacaggagagaaacctttcctttgtgaagcccaaggatgtggccgttcctttgctgagtattctagcctccgaaaacatctggtggttcactcaggagagaagcctcatcagtgccaagtctgtgggaagaccttctctcagagtggaagcaggaatgtgcatatgagaaagcatcacctgcagctgggagcagctgggagtcaagagcaggagcaaactgctgagccactaatgggcagtagtttgcttgaagaggcttcagtacccagtaaaaacctggtgtctatgaattcccagcccagccttggtggagagtccttgaacctaccaaataccaattctatcctgggagttgatgatgaggtgcttgctgaaggatccccacgttccctgtcttcagtgcctgatgtgacacatcacctggtgaccatgcagtcagggaggcaatcatatgaagtttctgtcttaactgcagtaaatccacaagagactgtactccagcctgggtgacagagtgagaccctgtctcaaaagacaaaaacacaattaactttatactgttcttgttttatctctttcctccttttgttgttgttgctgtttatgatggagtatttcaaagcaaattgtaggcatgtcatttcttctgtatatatttcagtatatgcctctaacaagatacaatattaaaaactataatatctttaccacttcaaa

SEQ ID NO: 384359 - DNA, 2469 bp, Homo sapiens
gcaaatattttaaaataagtaatttcaagaagtcagtcaaactcacaaagctttaacaaggtggcatccagcttggaagtcaagtgttcaagcccgcagtcgggacatccaagagctctttacatcctaattacaacacggaacccagactcactgcataccccgtcccgtatataatgcaaaacttgattctgcaagttcctttctcgggcggtgaaacttcgaaggtcctctccatggagacctttgataaatgtttaagcagtgatcttttctttcgcgtttgcctccattgcaacgcctccgctgatgggaaaaactactccctccgctactgcggggtggcagtgacgtcaacgaattagctgacctgttttttcgggcttcgcggacataggagttccgaaggccgagagtgagtgagtgagtgggagcggggcggctgcggctcctcctgtccggggcggagccctgcgtcgcgggcctggggaggccccgccagcacccttgacgtctgggtcccgagcagtgcggcagccacacgacactgaggcgagcgagtgggtgtgtgcgtggggggtcagccaaacttcctgtcccgcgctcgagctgcttccggcgggagccggaagacgctgtgtgtggacggaattcgggaccgactgacggccggccggcttcccggaactggaaggttacattgattacccacctagtacaacatcttacgggaagagcatagtatttcctagaggaatatgaacataacaggaaggtatcattggctctgaattaaatttgaacttgtcccctgaatagctacaggttttggaagctgaatcaatgttatcagatgagttagaatccaaaccagagctcctggtacagtttgttcagaatacgtccatcccattgggacaggggcttgtagaatcagaagctaaagatattacttgcttgtccctccttcccgtgactgaagcctcagaatgcagtcggctaatgttaccagatgatactacaaatcattctaactcctccaaggaggtcccttcctcagctgttttgagaagccttcgggtgaatgtgggtccagacggagaggagacgagagctcagactgtacagaaatccccggagtttttgtccacttcagagtcttctagcttgttgcaagatctacagccaagtgatagcacttcttttattcttcttaacctaacaagagcaggtctgggctcttcagctgagcacttagtgtttgtacaggatgaggcagaagattcagggaatgatttcctctccagtgagagcacagacagtagcattccatggttcctccgggttcaggagttggcccatgacagtttgattgctgctactcgtgcacaactggcaaagaatgcaaaaaccagcagcaatggagaaaatgtccaccttggttctggtgatgggcagtcaaaagattctgggccccttcctcaagtggaaaagaagctcaagtgtacagttgaaggttgtgaccggacatttgtatggccagctcactttaaataccacctcaagactcatcgaaatgaccgctccttcatctgtcctgcagaaggttgtgggaaaagcttctatgtgctgcagaggctgaaggtgcacatgaggacccacaatggagagaagccctttatgtgccatgagtctggctgtggtaagcagtttactacagctggaaacctgaagaaccaccggcgcatccacacaggagagaaacctttcctttgtgaagcccaaggatgtggccgttcctttgctgagtattctagcctccgaaaacatctggtggttcactcaggagagaagcctcatcagtgccaagtctgtgggaagaccttctctcagagtggaagcaggaatgtgcatatgagaaagcatcacctgcagctgggagcagctgggagtcaagagcaggagcaaactgctgagccactaatgggcagtagtttgcttgaagaggcttcagtacccagtaaaaacctggtgtctatgaattcccagcccagccttggtggagagtccttgaacctaccaaataccaattctatcctgggagttgatgatgttatggaagaacttaacttttagaacatttaaacagaacataaccaggttttacagaggagatataaagcaatttctccataccttcaaaagccatatcttctggagaaaagaaagggctctctaggaaacacttgctcctctctggtatagaaatttcacccaagttacacaggccaggccctcttctctgaaaaacttaacaggtgaggtcagcatgcatttattcagtgcctactgtgtgcctggcaccatgggaaagacaaaagtagaagatagggaccttaaaatccagttgagaagtgaaagcttacatatatatgggaaagaacattgagtacataaaagatagtatat

SEQ ID NO: 384360 - DNA, 2343 bp, Homo sapiens
gcaaatattttaaaataagtaatttcaagaagtcagtcaaactcacaaagctttaacaaggtggcatccagcttggaagtcaagtgttcaagcccgcagtcgggacatccaagagctctttacatcctaattacaacacggaacccagactcactgcataccccgtcccgtatataatgcaaaacttgattctgcaagttcctttctcgggcggtgaaacttcgaaggtcctctccatggagacctttgataaatgtttaagcagtgatcttttctttcgcgtttgcctccattgcaacgcctccgctgatgggaaaaactactccctccgctactgcggggtggcagtgacgtcaacgaattagctgacctgttttttcgggcttcgcggacataggagttccgaaggccgagagtgagtgagtgagtgggagcggggcggctgcggctcctcctgtccggggcggagccctgcgtcgcgggcctggggaggccccgccagcacccttgacgtctgggtcccgagcagtgcggcagccacacgacactgaggcgagcgagtgggtgtgtgcgtggggggtcagccaaacttcctgtcccgcgctcgagctgcttccggcgggagccggaagacgctgtgtgtggacggaattcgggaccgactgacggccggccggcttcccggaactggaaggttacattgattacccacctagtacaacatcttacgggaagagcatagtatttcctagaggaatatgaacataacaggaaggtatcattggctctgaattaaatttgaacttgtcccctgaatagctacaggttttggaagctgaatcaatgttatcagatgagttagaatccaaaccagagctcctggtacagtttgttcagaatacgtccatcccattgggacaggggcttgtagaatcagaagctaaagatattacttgcttgtccctccttcccgtgactgaagcctcagaatgcagtcggctaatgttaccagatgatactacaaatcattctaactcctccaaggaggtcccttcctcagctgttttgagaagccttcgggtgaatgtgggtccagacggagaggagacgagagctcagactgtacagaaatccccggagtttttgtccacttcagagtcttctagcttgttgcaagatctacagccaagtgatagcacttcttttattcttcttaacctaacaagagcaggtctgggctcttcagctgagcacttagtgtttgtacaggatgaggcagaagattcagggaatgatttcctctccagtgagagcacagacagtagcattccatggttcctccgggttcaggagttggcccatgacagtttgattgctgctactcgtgcacaactggcaaagaatgcaaaaaccagcagcaatggagaaaatgtccaccttggttctggtgatgggcagtcaaaagattctgggccccttcctcaagtggaaaagaagctcaagtgtacagttgaaggttgtgaccggacatttgtatggccagctcactttaaataccacctcaagactcatcgaaatgaccgctccttcatctgtcctgcagaaggttgtgggaaaagcttctatgtgctgcagaggctgaaggtgcacatgaggacccacaatggagagaagccctttatgtgccatgagtctggctgtggtaagcagtttactacagctggaaacctgaagaaccaccggcgcatccacacaggagagaaacctttcctttgtgaagcccaaggatgtggccgttcctttgctgagtattctagcctccgaaaacatctggtggttcactcagctgagccactaatgggcagtagtttgcttgaagaggcttcagtacccagtaaaaacctggtgtctatgaattcccagcccagccttggtggagagtccttgaacctaccaaataccaattctatcctgggagttgatgatgttatggaagaacttaacttttagaacatttaaacagaacataaccaggttttacagaggagatataaagcaatttctccataccttcaaaagccatatcttctggagaaaagaaagggctctctaggaaacacttgctcctctctggtatagaaatttcacccaagttacacaggccaggccctcttctctgaaaaacttaacaggtgaggtcagcatgcatttattcagtgcctactgtgtgcctggcaccatgggaaagacaaaagtagaagatagggaccttaaaatccagttgagaagtgaaagcttacatatatatgggaaagaacattgagtacataaaagatagtatat

SEQ ID NO: 384361 - DNA, 1975 bp, Homo sapiens
gcaaatattttaaaataagtaatttcaagaagtcagtcaaactcacaaagctttaacaaggtggcatccagcttggaagtcaagtgttcaagcccgcagtcgggacatccaagagctctttacatcctaattacaacacggaacccagactcactgcataccccgtcccgtatataatgcaaaacttgattctgcaagttcctttctcgggcggtgaaacttcgaaggtcctctccatggagacctttgataaatgtttaagcagtgatcttttctttcgcgtttgcctccattgcaacgcctccgctgatgggaaaaactactccctccgctactgcggggtggcagtgacgtcaacgaattagctgacctgttttttcgggcttcgcggacataggagttccgaaggccgagagtgagtgagtgagtgggagcggggcggctgcggctcctcctgtccggggcggagccctgcgtcgcgggcctggggaggccccgccagcacccttgacgtctgggtcccgagcagtgcggcagccacacgacactgaggcgagcgagtgggtgtgtgcgtggggggtcagccaaacttcctgtcccgcgctcgagctgcttccggcgggagccggaagacgctgtgtgtggacggaattcgggaccgactgacggccggccggcttcccggaactggaaggttacattgattacccacctagtacaacatcttacgggaagagcatagtatttcctagaggaatatgaacataacaggaaggtatcattggctctgaattaaatttgaacttgtcccctgaatagctacaggttttggaagctgaatcaatgttatcagatgagttagaatccaaaccagagctcctggtacagtttgttcagaatacgtccatcccattgggacaggggcttgtagaatcagaagctaaagatattacttgcttgtccctccttcccgtgactgaagcctcagaatgcagtcggctaatgttaccagatgatactacaaatcattctaactcctccaaggaggtcccttcctcagctgttttgagaagccttcgggtgaatgtgggtccagacggagaggagacgagagctcagactgtacagaaatccccggagtttttgtccacttcagagtcttctagcttgttgcaagatctacagccaagtgatagcacttcttttattcttcttaacctaacaagagcaggtctgggctcttcagctgagcacttagtgtttgtacaggatgaggcagaagattcagggaatgatttcctctccagtgagagcacagacagtagcattccatggttcctccgggttcaggagttggcccatgacagtttgattgctgctactcgtgcacaactggcaaagaatgcaaaaaccagcagcaatggagaaaatgtccaccttggttctggtgatgggcagtcaaaagattctgggccccttcctcaagtggaaaagaagctcaagtgtacagttgaaggttgtgaccggacatttgtatggccagctcactttaaataccacctcaagactcatcgaaatgaccgctccttcatctgtcctgcagaaggttgtgggaaaagcttctatgtgctgcagaggctgaaggtgcacatgaggacccacaatggagagaagccctttatgtgccatgagtctggctgtggtaagcagtttactacagctggaaacctgaagaaccaccggcgcatccacacaggagagaaacctttcctttgtgaagcccaaggatgtggccgttcctttgctgaggtactatcttgtcctatacacttctacttggtcactttgctttcttcgttaatggaacatacagtagcatgttaagagggatttcatgtttttgtttttttaaagttaaaaattacatgatgcagagattcaggttttcctttaaataaacaaaacagcccagtca

SEQ ID NO: 384362 - DNA, 1209 bp, Homo sapiens
gtaacgagcgctctttgaaagcactgcgactctaggatgataaccgtctatagattccgtaatctgtgggaagaccttctctcagagtggaagcaggaatgtgcatatgagaaagcatcacctgcagctgggagcagctgggagtcaagagcaggagcaaactgctgagccactaatgggcagtagtttgcttgaagaggcttcagtacccagtaaaaacctggtgtctatgaattcccagcccagccttggtggagagtccttgaacctaccaaataccaattctatcctgggagttgatgatgaggtgcttgctgaaggatccccacgttccctgtcttcagtgcctgatgtgacacatcacctggtgaccatgcagtcagggaggcaatcatatgaagtttctgtcttaactgcagtaaatccacaagagttactaaaccaaggagatttaactgaaagacggacatgagcgtgggtgctgactcctggaagagcaactctatctgatctcaaaatgcgtatactgggaacaggatgccttagcccacaacagaaccagaatgaatctttgaaggcacaagactctgcttttgccactcttcctctttcctggtatagaagatggatgtaggagagcttcttttctaactaccatctgatcagacaaggaatgaagcaatgactgtgggctgggaaactgtacctacctctcttcccactgcaaatttctgggatagaccaaaagtgaatttgattatgtgttggctgaagttcttcattctgactgttgaggggaggttttcctttgaagagttttcatcccagactcagctgtcttttcacatggatgaaataattcctgctaccaacaacagagcttcaccaggaagttgagttttcaagatgccttgttgctttgaagaagggagtgatgtcaattctcttgttacattctccctttagcaacctgagtaagagactctctgccactgggctgcaaaaaaataaattacttgaatctccccttggcccaggctgaggtactatcttgtcctatacacttctacttggtcactttgctttcttcgttaatggaacatacagtagcatgttaagagggatttcatgtttttgtttttttaaagttaaaaattacatgatgcagagattcaggttttcctttaaataaacaaaacagcccagtca

SEQ ID NO: 384363 - DNA, 1173 bp, Homo sapiens
gggggtggcatcccatctataggttaacttctagtaatgaaagagaaggccagcttctgttgaaagaaaatgaggaccaggcacagccttgattgctgtatgtctctcacaacctattctctgtgcagctgagccactaatgggcagtagtttgcttgaagaggcttcagtacccagtaaaaacctggtgtctatgaattcccagcccagccttggtggagagtccttgaacctaccaaataccaattctatcctgggagttgatgatgaggtgcttgctgaaggatccccacgttccctgtcttcagtgcctgatgtgacacatcacctggtgaccatgcagtcagggaggcaatcatatgaagtttctgtcttaactgcagtaaatccacaagagttactaaaccaaggagatttaactgaaagacggacatgagcgtgggtgctgactcctggaagagcaactctatctgatctcaaaatgcgtatactgggaacaggatgccttagcccacaacagaaccagaatgaatctttgaaggcacaagactctgcttttgccactcttcctctttcctggtatagaagatggatgtaggagagcttcttttctaactaccatctgatcagacaaggaatgaagcaatgactgtgggctgggaaactgtacctacctctcttcccactgcaaatttctgggatagaccaaaagtgaatttgattatgtgttggctgaagttcttcattctgactgttgaggggaggttttcctttgaagagttttcatcccagactcagctgtcttttcacatggatgaaataattcctgctaccaacaacagagcttcaccaggaagttgagttttcaagatgccttgttgctttgaagaagggagtgatgtcaattctcttgttacattctccctttagcaacctgagtaagagactctctgccactgggctgcaaaaaaataaattacttgaatctccccttggcccaggctgaggtactatcttgtcctatacacttctacttggtcactttgctttcttcgttaatggaacatacagtagcatgttaagagggatttcatgtttttgtttttttaaagttaaaaattacatgatgcagagattcaggttttcctttaaataaacaaaacagcccagtca

SEQ ID NO: 384364 - DNA, 924 bp, Homo sapiens
atttttctgttgcttcacagaggtgcttgctgaaggatccccacgttccctgtcttcagtgcctgatgtgacacatcacctggtgaccatgcagtcagggaggcaatcatatgaagtttctgtcttaactgcagtaaatccacaagagttactaaaccaaggagatttaactgaaagacggacatgagcgtgggtgctgactcctggaagagcaactctatctgatctcaaaatgcgtatactgggaacaggatgccttagcccacaacagaaccagaatgaatctttgaaggcacaagactctgcttttgccactcttcctctttcctggtatagaagatggatgtaggagagcttcttttctaactaccatctgatcagacaaggaatgaagcaatgactgtgggctgggaaactgtacctacctctcttcccactgcaaatttctgggatagaccaaaagtgaatttgattatgtgttggctgaagttcttcattctgactgttgaggggaggttttcctttgaagagttttcatcccagactcagctgtcttttcacatggatgaaataattcctgctaccaacaacagagcttcaccaggaagttgagttttcaagatgccttgttgctttgaagaagggagtgatgtcaattctcttgttacattctccctttagcaacctgagtaagagactctctgccactgggctgcaaaaaaataaattacttgaatctccccttggcccaggctgaggtactatcttgtcctatacacttctacttggtcactttgctttcttcgttaatggaacatacagtagcatgttaagagggatttcatgtttttgtttttttaaagttaaaaattacatgatgcagagattcaggttttcctttaaataaacaaaacagcccagtca

SEQ ID NO: 384365 - DNA, 285 bp, Homo sapiens
cagtcctcccaccttggcttcccaaagtgcttgggattataggtgtgagcaccatgcctggccaagtttctgctgttaagtgcatacaaagataactggggaagatgaagatagatacctgattaatgatcactaggagtaaaatataggagctttattgtttgagcctaagtatctgagtagggtctttccctggattacaaatatgtgactctgttacaggagaaaatgtccaccttggttctggtgatgggcagtcaaaagattctgggccccttcctcaag

SEQ ID NO: 384366 - DNA, 713 bp, Homo sapiens
ctttccttaattattccaaatattcctttctaaagatccacctatcctgtttcatatgctaattcttcagacgctgaacacaagcaaggatcattatcttctaaggcttactctttcccttctaggtttattcttgtttctcgaaagtaggtgaaatagggggtggcatcccatctataggttaacttctagtaatgaaagagaaggccagcttctgttgaaagaaaatgaggaccaggcacagccttgattgctgtatgtctctcacaacctattctctgtgcagctgagccactaatgggcagtagtttgcttgaagaggcttcagtacccagtaaaaacctggtgtctatgaattcccagcccagccttggtggagagtccttgaacctaccaaataccaattctatcctgggagttgatgatggtaagacttccaactctcctttatttgggaaaaatgggctgcaactaggggctaaggaatggggtgtctccacaatgtatgtttaaatctcatttcttatgagtagctgtggtatgagtagcatttgtgttcttattctctggggtggattagtcaatctgtttaaaaaaaaattttttttcattgaagataatataataaaagaataaaaagaaaaaattcttaagaaaaaattattcctaatcctagcatcctagcccaactatttctatctttcctattgcag

SEQ ID NO: 384367 - DNA, 348 bp, Homo sapiens
caccaggaagttgagttttcaagatgccttgttgctttgaagaagggagtgatgtcaattctcttgttacattctccctttagcaacctgagtaagagactctctgccactgggctgcaaaaaaataaattacttgaatctccccttggcccaggctgaggtactatcttgtcctatacacttctacttggtcactttgctttcttcgttaatggaacatacagtagcatgttaagagggatttcatgtttttgtttttttaaagttaaaaattacatgatgcagagattcaggttttcctttaaataaacaaaacagcccagtcagttctttggctcttgttttata

SEQ ID NO: 384368 - DNA, 2845 bp, Homo sapiens
gcaaatattttaaaataagtaatttcaagaagtcagtcaaactcacaaagctttaacaaggtggcatccagcttggaagtcaagtgttcaagcccgcagtcgggacatccaagagctctttacatcctaattacaacacggaacccagactcactgcataccccgtcccgtatataatgcaaaacttgattctgcaagttcctttctcgggcggtgaaacttcgaaggtcctctccatggagacctttgataaatgtttaagcagtgatcttttctttcgcgtttgcctccattgcaacgcctccgctgatgggaaaaactactccctccgctactgcggggtggcagtgacgtcaacgaattagctgacctgttttttcgggcttcgcggacataggagttccgaaggccgagagtgagtgagtgagtgggagcggggcggctgcggctcctcctgtccggggcggagccctgcgtcgcgggcctggggaggccccgccagcacccttgacgtctgggtcccgagcagtgcggcagccacacgacactgaggcgagcgagtgggtgtgtgcgtggggggtcagccaaacttcctgtcccgcgctcgagctgcttccggcgggagccggaagacgctgtgtgtggacggaattcgggaccgactgacggccggccggcttcccggaactggaaggttacattgattacccacctagtacaacatcttacgggaagagcatagtatttcctagaggaatatgaacataacaggaaggtatcattggctctgaattaaatttgaacttgtcccctgaatagctacaggttttggaagctgaatcaatgttatcagatgagttagaatccaaaccagagctcctggtacagtttgttcagaatacgtccatcccattgggacaggggcttgtagaatcagaagctaaagatattacttgcttgtccctccttcccgtgactgaagcctcagaatgcagtcggctaatgttaccagatgatactacaaatcattctaactcctccaaggaggtcccttcctcagctgttttgagaagccttcgggtgaatgtgggtccagacggagaggagacgagagctcagactgtacagaaatccccggagtttttgtccacttcagagtcttctagcttgttgcaagatctacagccaagtgatagcacttcttttattcttcttaacctaacaagagcaggtctgggctcttcagctgagcacttagtgtttgtacaggatgaggcagaagattcagggaatgatttcctctccagtgagagcacagacagtagcattccatggttcctccgggttcaggagttggcccatgacagtttgattgctgctactcgtgcacaactggcaaagaatgcaaaaaccagcagcaatggagaaaatgtccaccttggttctggtgatgggcagtcaaaagattctgggccccttcctcaagtggaaaagaagctcaagtgtacagttgaaggttgtgaccggacatttgtatggccagctcactttaaataccacctcaagactcatcgaaatgaccgctccttcatctgtcctgcagaaggttgtgggaaaagcttctatgtgctgcagaggctgaaggtgcacatgaggacccacaatggagagaagccctttatgtgccatgagtctggctgtggtaagcagtttactacagctggaaacctgaagaaccaccggcgcatccacacaggagagaaacctttcctttgtgaagcccaaggatgtggccgttcctttgctgagtattctagcctccgaaaacatctggtggttcactcaggagagaagcctcatcagtgccaagtctgtgggaagaccttctctcagagtggaagcaggaatgtgcatatgagaaagcatcacctgcagctgggagcagctgggagtcaagagcaggagcaaactgctgagccactaatgggcagtagtttgcttgaagaggcttcagtacccagtaaaaacctggtgtctatgaattcccagcccagccttggtggagagtccttgaacctaccaaataccaattctatcctgggagttgatgatgaggtgcttgctgaaggatccccacgttccctgtcttcagtgcctgatgtgacacatcacctggtgaccatgcagtcagggaggcaatcatatgaagtttctgtcttaactgcagtaaatccacaagagttactaaaccaaggagatttaactgaaagacggacatgagcgtgggtgctgactcctggaagagcaactctatctgatctcaaaatgcgtatactgggaacaggatgccttagcccacaacagaaccagaatgaatctttgaaggcacaagactctgcttttgccactcttcctctttcctggtatagaagatggatgtaggagagcttcttttctaactaccatctgatcagacaaggaatgaagcaatgactgtgggctgggaaactgtacctacctctcttcccactgcaaatttctgggatagaccaaaagtgaatttgattatgtgttggctgaagttcttcattctgactgttgaggggaggttttcctttgaagagttttcatcccagactcagctgtcttttcacatggatgaaataattcctgctaccaacaacagagcttcaccaggaagttgagttttcaagatgccttgttgctttgaagaagggagtgatgtcaattctcttgttacattctccctttagcaacctgagtaagagactctctgccactgggctgcaaaaaaataaattacttgaatctccccttggcccag

SEQ ID NO: 384369 - DNA, 2876 bp, Homo sapiens
gcaaatattttaaaataagtaatttcaagaagtcagtcaaactcacaaagctttaacaaggtggcatccagcttggaagtcaagtgttcaagcccgcagtcgggacatccaagagctctttacatcctaattacaacacggaacccagactcactgcataccccgtcccgtatataatgcaaaacttgattctgcaagttcctttctcgggcggtgaaacttcgaaggtcctctccatggagacctttgataaatgtttaagcagtgatcttttctttcgcgtttgcctccattgcaacgcctccgctgatgggaaaaactactccctccgctactgcggggtggcagtgacgtcaacgaattagctgacctgttttttcgggcttcgcggacataggagttccgaaggccgagagtgagtgagtgagtgggagcggggcggctgcggctcctcctgtccggggcggagccctgcgtcgcgggcctggggaggccccgccagcacccttgacgtctgggtcccgagcagtgcggcagccacacgacactgaggcgagcgagtgggtgtgtgcgtggggggtcagccaaacttcctgtcccgcgctcgagctgcttccggcgggagccggaagacgctgtgtgtggacggaattcgggaccgactgacggccggccggcttcccggaactggaaggttacattgattacccacctagtacaacatcttacgggaagagcatagtatttcctagaggaatatgaacataacaggaaggtatcattggctctgaattaaatttgaacttgtcccctgaatagctacaggttttggaagctgaatcaatgttatcagatgagttagaatccaaaccagagctcctggtacagtttgttcagaatacgtccatcccattgggacaggggcttgtagaatcagaagctaaagatattacttgcttgtccctccttcccgtgactgaagcctcagaatgcagtcggctaatgttaccagatgatactacaaatcattctaactcctccaaggaggtcccttcctcagctgttttgagaagccttcgggtgaatgtgggtccagacggagaggagacgagagctcagactgtacagaaatccccggagtttttgtccacttcagagtcttctagcttgttgcaagatctacagccaagtgatagcacttcttttattcttcttaacctaacaagagcaggtctgggctcttcagctgagcacttagtgtttgtacaggatgaggcagaagattcagggaatgatttcctctccagtgagagcacagacagtagcattccatggttcctccgggttcaggagttggcccatgacagtttgattgctgctactcgtgcacaactggcaaagaatgcaaaaaccagcagcaatggagaaaatgtccaccttggttctggtgatgggcagtcaaaagattctgggccccttcctcaagtggaaaagaagctcaagtgtacagttgaaggttgtgaccggacatttgtatggccagctcactttaaataccacctcaagactcatcgaaatgaccgctccttcatctgtcctgcagaaggttgtgggaaaagcttctatgtgctgcagaggctgaaggtgcacatgaggacccacaatggagagaagccctttatgtgccatgagtctggctgtggtaagcagtttactacagctggaaacctgaagaaccaccggcgcatccacacaggagagaaacctttcctttgtgaagcccaaggatgtggccgttcctttgctgagtattctagcctccgaaaacatctggtggttcactcaggagagaagcctcatcagtgccaagtctgtgggaagaccttctctcagagtggaagcaggaatgtgcatatgagaaagcatcacctgcagctgggagcagctgggagtcaagagcaggagcaaactgaggtgcttgctgaaggatccccacgttccctgtcttcagtgcctgatgtgacacatcacctggtgaccatgcagtcagggaggcaatcatatgaagtttctgtcttaactgcagtaaatccacaagagttactaaaccaaggagatttaactgaaagacggacatgagcgtgggtgctgactcctggaagagcaactctatctgatctcaaaatgcgtatactgggaacaggatgccttagcccacaacagaaccagaatgaatctttgaaggcacaagactctgcttttgccactcttcctctttcctggtatagaagatggatgtaggagagcttcttttctaactaccatctgatcagacaaggaatgaagcaatgactgtgggctgggaaactgtacctacctctcttcccactgcaaatttctgggatagaccaaaagtgaatttgattatgtgttggctgaagttcttcattctgactgttgaggggaggttttcctttgaagagttttcatcccagactcagctgtcttttcacatggatgaaataattcctgctaccaacaacagagcttcaccaggaagttgagttttcaagatgccttgttgctttgaagaagggagtgatgtcaattctcttgttacattctccctttagcaacctgagtaagagactctctgccactgggctgcaaaaaaataaattacttgaatctccccttggcccaggctgaggtactatcttgtcctatacacttctacttggtcactttgctttcttcgttaatggaacatacagtagcatgttaagagggatttcatgtttttgtttttttaaagttaaaaattacatgatgcagagattcaggttttcctttaaataaacaaaacagcccagtca

SEQ ID NO: 384370 - DNA, 3109 bp, Homo sapiens
gcaaatattttaaaataagtaatttcaagaagtcagtcaaactcacaaagctttaacaaggtggcatccagcttggaagtcaagtgttcaagcccgcagtcgggacatccaagagctctttacatcctaattacaacacggaacccagactcactgcataccccgtcccgtatataatgcaaaacttgattctgcaagttcctttctcgggcggtgaaacttcgaaggtcctctccatggagacctttgataaatgtttaagcagtgatcttttctttcgcgtttgcctccattgcaacgcctccgctgatgggaaaaactactccctccgctactgcggggtggcagtgacgtcaacgaattagctgacctgttttttcgggcttcgcggacataggagttccgaaggccgagagtgagtgagtgagtgggagcggggcggctgcggctcctcctgtccggggcggagccctgcgtcgcgggcctggggaggccccgccagcacccttgacgtctgggtcccgagcagtgcggcagccacacgacactgaggcgagcgagtgggtgtgtgcgtggggggtcagccaaacttcctgtcccgcgctcgagctgcttccggcgggagccggaagacgctgtgtgtggacggaattcgggaccgactgacggccggccggcttcccggaactggaaggtttgagatgctgttggatatacatgtggagatacctagcaagcagttagaaatgaaggtttggagttcagaagagatgactagagaaaaatgttacattgattacccacctagtacaacatcttacgggaagagcatagtatttcctagaggaatatgaacataacaggaaggtatcattggctctgaattaaatttgaacttgtcccctgaatagctacaggttttggaagctgaatcaatgttatcagatgagttagaatccaaaccagagctcctggtacagtttgttcagaatacgtccatcccattgggacaggggcttgtagaatcagaagctaaagatattacttgcttgtccctccttcccgtgactgaagcctcagaatgcagtcggctaatgttaccagatgatactacaaatcattctaactcctccaaggaggtcccttcctcagctgttttgagaagccttcgggtgaatgtgggtccagacggagaggagacgagagctcagactgtacagaaatccccggagtttttgtccacttcagagtcttctagcttgttgcaagatctacagccaagtgatagcacttcttttattcttcttaacctaacaagagcaggtctgggctcttcagctgagcacttagtgtttgtacaggatgaggcagaagattcagggaatgatttcctctccagtgagagcacagacagtagcattccatggttcctccgggttcaggagttggcccatgacagtttgattgctgctactcgtgcacaactggcaaagaatgcaaaaaccagcagcaatggagaaaatgtccaccttggttctggtgatgggcagtcaaaagattctgggccccttcctcaagtggaaaagaagctcaagtgtacagttgaaggttgtgaccggacatttgtatggccagctcactttaaataccacctcaagactcatcgaaatgaccgctccttcatctgtcctgcagaaggttgtgggaaaagcttctatgtgctgcagaggctgaaggtgcacatgaggacccacaatggagagaagccctttatgtgccatgagtctggctgtggtaagcagtttactacagctggaaacctgaagaaccaccggcgcatccacacaggagagaaacctttcctttgtgaagcccaaggatgtggccgttcctttgctgagtattctagcctccgaaaacatctggtggttcactcaggagagaagcctcatcagtgccaagtctgtgggaagaccttctctcagagtggaagcaggaatgtgcatatgagaaagcatcacctgcagctgggagcagctgggagtcaagagcaggagcaaactgctgagccactaatgggcagtagtttgcttgaagaggcttcagtacccagtaaaaacctggtgtctatgaattcccagcccagccttggtggagagtccttgaacctaccaaataccaattctatcctgggagttgatgatgaggtgcttgctgaaggatccccacgttccctgtcttcagtgcctgatgtgacacatcacctggtgaccatgcagtcagggaggcaatcatatgaagtttctgtcttaactgcagtaaatccacaagagttactaaaccaaggagatttaactgaaagacggacatgagcgtgggtgctgactcctggaagagcaactctatctgatctcaaaatgcgtatactgggaacaggatgccttagcccacaacagaaccagaatgaatctttgaaggcacaagactctgcttttgccactcttcctctttcctggtatagaagatggatgtaggagagcttcttttctaactaccatctgatcagacaaggaatgaagcaatgactgtgggctgggaaactgtacctacctctcttcccactgcaaatttctgggatagaccaaaagtgaatttgattatgtgttggctgaagttcttcattctgactgttgaggggaggttttcctttgaagagttttcatcccagactcagctgtcttttcacatggatgaaataattcctgctaccaacaacagagcttcaccaggaagttgagttttcaagatgccttgttgctttgaagaagggagtgatgtcaattctcttgttacattctccctttagcaacctgagtaagagactctctgccactgggctgcaaaaaaataaattacttgaatctccccttggcccaggctgaggtactatcttgtcctatacacttctacttggtcactttgctttcttcgttaatggaacatacagtagcatgttaagagggatttcatgtttttgtttttttaaagttaaaaattacatgatgcagagattcaggttttcctttaaataaacaaaacagcccagtca

SEQ ID NO: 384371 - DNA, 2902 bp, Homo sapiens
gcaaatattttaaaataagtaatttcaagaagtcagtcaaactcacaaagctttaacaaggtggcatccagcttggaagtcaagtgttcaagcccgcagtcgggacatccaagagctctttacatcctaattacaacacggaacccagactcactgcataccccgtcccgtatataatgcaaaacttgattctgcaagttcctttctcgggcggtgaaacttcgaaggtcctctccatggagacctttgataaatgtttaagcagtgatcttttctttcgcgtttgcctccattgcaacgcctccgctgatgggaaaaactactccctccgctactgcggggtggcagtgacgtcaacgaattagctgacctgttttttcgggcttcgcggacataggagttccgaaggccgagagtgagtgagtgagtgggagcggggcggctgcggctcctcctgtccggggcggagccctgcgtcgcgggcctggggaggccccgccagcacccttgacgtctgggtcccgagcagtgcggcagccacacgacactgaggcgagcgagtgggtgtgtgcgtggggggtcagccaaacttcctgtcccgcgctcgagctgcttccggcgggagccggaagacgctgtgtgtggacggaattcgggaccgactgacggccggccggcttcccggaactggaaggttacattgattacccacctagtacaacatcttacgggaagagcatagtatttcctagaggaatatgaacataacaggaaggtatcattggctctgaattaaatttgaacttgtcccctgaatagctacaggttttggaagctgaatcaatgttatcagatgagttagaatccaaaccagagctcctggtacagtttgttcagaatacgtccatcccattgggacaggggcttgtagaatcagaagctaaagatattacttgcttgtccctccttcccgtgactgaagcctcagaatgcagtcggctaatgttaccagatgatactacaaatcattctaactcctccaaggaggtcccttcctcagctgttttgagaagccttcgggtgaatgtgggtccagacggagaggagacgagagctcagactgtacagaaatccccggagtttttgtccacttcagagtcttctagcttgttgcaagatctacagccaagtgatagcacttcttttattcttcttaacctaacaagagcaggtctgggctcttcagctgagcacttagtgtttgtacaggatgaggcagaagattcagggaatgatttcctctccagtgagagcacagacagtagcattccatggttcctccgggttcaggagttggcccatgacagtttgattgctgctactcgtgcacaactggcaaagaatgcaaaaaccagcagcaatggagaaaatgtccaccttggttctggtgatgggcagtcaaaagattctgggccccttcctcaagtggaaaagaagctcaagtgtacagttgaaggttgtgaccggacatttgtatggccagctcactttaaataccacctcaagactcatcgaaatgaccgctccttcatctgtcctgcagaaggttgtgggaaaagcttctatgtgctgcagaggctgaaggtgcacatgaggacccacaatggagagaagccctttatgtgccatgagtctggctgtggtaagcagtttactacagctggaaacctgaagaaccaccggcgcatccacacaggagagaaacctttcctttgtgaagcccaaggatgtggccgttcctttgctgagtattctagcctccgaaaacatctggtggttcactcaggagagaagcctcatcagtgccaagtctgtgggaagaccttctctcagagtggaagcaggaatgtgcatatgagaaagcatcacctgcagctgggagcagctgggagtcaagagcaggagcaaactgctgagccactaatgggcagtagtttgcttgaagaggcttcagtacccagtaaaaacctggtgtctatgaattcccagcccagccttggtggagagtccttgaacctaccaaataccaattctatcctgggagttgatgatgaggtgcttgctgaaggatccccacgttccctgtcttcagtgcctgatgtgacacatcacctggtgaccatgcagtcagggaggcaatcatatgaagtttctgtcttaactgcagtaaatccacaagagttactaaaccaaggagatttaactgaaagacggacatgagcgtgggtgctgactcctggaagagcaactctatctgatctcaaaatgcgtatactgggaacaggatgccttagcccacaacagaaccagaatgaatctttgaaggcacaagactctgcttttgccactcttcctctttcctggtatagaagatggatgtaggagagcttcttttctaactaccatctgatcagacaaggaatgaagcaatgactgtgggctgggaaactgtacctacctctcttcccactgcaaatttctgggatagaccaaaagtgaatttgattatgtgttggctgaagttcttcattctgactgttgaggggaggttttcctttgaagagttttcatcccagactcagctgtcttttcacatggatgaaataattcctgctaccaacaacagagcttcaccaggaagttgagttttcaagatgccttgttgctttgaagaagggagtgatgtcaattctcttgttacattctccctttagcaacctgagtaagagactctctgccactgggctgcaaaaaaataaattacttgaatctccccttggcccaggctcgcagcaagtatcttctagctcactacatgggggatcgcatcgtagcgtcgact

SEQ ID NO: 384372 - DNA, 2980 bp, Homo sapiens
gcaaatattttaaaataagtaatttcaagaagtcagtcaaactcacaaagctttaacaaggtggcatccagcttggaagtcaagtgttcaagcccgcagtcgggacatccaagagctctttacatcctaattacaacacggaacccagactcactgcataccccgtcccgtatataatgcaaaacttgattctgcaagttcctttctcgggcggtgaaacttcgaaggtcctctccatggagacctttgataaatgtttaagcagtgatcttttctttcgcgtttgcctccattgcaacgcctccgctgatgggaaaaactactccctccgctactgcggggtggcagtgacgtcaacgaattagctgacctgttttttcgggcttcgcggacataggagttccgaaggccgagagtgagtgagtgagtgggagcggggcggctgcggctcctcctgtccggggcggagccctgcgtcgcgggcctggggaggccccgccagcacccttgacgtctgggtcccgagcagtgcggcagccacacgacactgaggcgagcgagtgggtgtgtgcgtggggggtcagccaaacttcctgtcccgcgctcgagctgcttccggcgggagccggaagacgctgtgtgtggacggaattcgggaccgactgacggccggccggcttcccggaactggaaggttacattgattacccacctagtacaacatcttacgggaagagcatagtatttcctagaggaatatgaacataacaggaaggtatcattggctctgaattaaatttgaacttgtcccctgaatagctacaggttttggaagctgaatcaatgttatcagatgagttagaatccaaaccagagctcctggtacagtttgttcagaatacgtccatcccattgggacaggggcttgtagaatcagaagctaaagatattacttgcttgtccctccttcccgtgactgaagcctcagaatgcagtcggctaatgttaccagcccttcctcagctgttttgagaagccttcgggtgaatgtgggtccagacggagaggagacgagagctcagactgtacagaaatccccggagtttttgtccacttcagagtcttctagcttgttgcaagatctacagccaagtgatagcacttcttttattcttcttaacctaacaagagcaggtctgggctcttcagctgagcacttagtgtttgtacaggatgaggcagaagattcagggaatgatttcctctccagtgagagcacagacagtagcattccatggttcctccgggttcaggagttggcccatgacagtttgattgctgctactcgtgcacaactggcaaagaatgcaaaaaccagcagcaatggagaaaatgtccaccttggttctggtgatgggcagtcaaaagattctgggccccttcctcaagtggaaaagaagctcaagtgtacagttgaaggttgtgaccggacatttgtatggccagctcactttaaataccacctcaagactcatcgaaatgaccgctccttcatctgtcctgcagaaggttgtgggaaaagcttctatgtgctgcagaggctgaaggtgcacatgaggacccacaatggagagaagccctttatgtgccatgagtctggctgtggtaagcagtttactacagctggaaacctgaagaaccaccggcgcatccacacaggagagaaacctttcctttgtgaagcccaaggatgtggccgttcctttgctgagtattctagcctccgaaaacatctggtggttcactcaggagagaagcctcatcagtgccaagtctgtgggaagaccttctctcagagtggaagcaggaatgtgcatatgagaaagcatcacctgcagctgggagcagctgggagtcaagagcaggagcaaactgctgagccactaatgggcagtagtttgcttgaagaggcttcagtacccagtaaaaacctggtgtctatgaattcccagcccagccttggtggagagtccttgaacctaccaaataccaattctatcctgggagttgatgatgaggtgcttgctgaaggatccccacgttccctgtcttcagtgcctgatgtgacacatcacctggtgaccatgcagtcagggaggcaatcatatgaagtttctgtcttaactgcagtaaatccacaagagttactaaaccaaggagatttaactgaaagacggacatgagcgtgggtgctgactcctggaagagcaactctatctgatctcaaaatgcgtatactgggaacaggatgccttagcccacaacagaaccagaatgaatctttgaaggcacaagactctgcttttgccactcttcctctttcctggtatagaagatggatgtaggagagcttcttttctaactaccatctgatcagacaaggaatgaagcaatgactgtgggctgggaaactgtacctacctctcttcccactgcaaatttctgggatagaccaaaagtgaatttgattatgtgttggctgaagttcttcattctgactgttgaggggaggttttcctttgaagagttttcatcccagactcagctgtcttttcacatggatgaaataattcctgctaccaacaacagagcttcaccaggaagttgagttttcaagatgccttgttgctttgaagaagggagtgatgtcaattctcttgttacattctccctttagcaacctgagtaagagactctctgccactgggctgcaaaaaaataaattacttgaatctccccttggcccaggctgaggtactatcttgtcctatacacttctacttggtcactttgctttcttcgttaatggaacatacagtagcatgttaagagggatttcatgtttttgtttttttaaagttaaaaattacatgatgcagagattcaggttttcctttaaataaacaaaacagcccagtca

SEQ ID NO: 384373 - DNA, 3072 bp, Homo sapiens
gcaaatattttaaaataagtaatttcaagaagtcagtcaaactcacaaagctttaacaaggtggcatccagcttggaagtcaagtgttcaagcccgcagtcgggacatccaagagctctttacatcctaattacaacacggaacccagactcactgcataccccgtcccgtatataatgcaaaacttgattctgcaagttcctttctcgggcggtgaaacttcgaaggtcctctccatggagacctttgataaatgtttaagcagtgatcttttctttcgcgtttgcctccattgcaacgcctccgctgatgggaaaaactactccctccgctactgcggggtggcagtgacgtcaacgaattagctgacctgttttttcgggcttcgcggacataggagttccgaaggccgagagtgagtgagtgagtgggagcggggcggctgcggctcctcctgtccggggcggagccctgcgtcgcgggcctggggaggccccgccagcacccttgacgtctgggtcccgagcagtgcggcagccacacgacactgaggcgagcgagtgggtgtgtgcgtggggggtcagccaaacttcctgtcccgcgctcgagctgcttccggcgggagccggaagacgctgtgtgtggacggaattcgggaccgactgacggccggccggcttcccggaactggaaggtttgagatgctgttggatatacatgtggagatacctagcaagcagttagaaatgaaggtttggagttcagaagagatgactagagaaaaatgttacattgattacccacctagtacaacatcttacgggaagagcatagtatttcctagaggaatatgaacataacaggaaggtatcattggctctgaattaaatttgaacttgtcccctgaatagctacaggttttggaagctgaatcaatgttatcagatgagttagaatccaaaccagagctcctggtacagtttgttcagaatacgtccatcccattgggacaggggcttgtagaatcagaagctaaagatattacttgcttgtccctccttcccgtgactgaagcctcagaatgcagtcggctaatgttaccagcccttcctcagctgttttgagaagccttcgggtgaatgtgggtccagacggagaggagacgagagctcagactgtacagaaatccccggagtttttgtccacttcagagtcttctagcttgttgcaagatctacagccaagtgatagcacttcttttattcttcttaacctaacaagagcaggtctgggctcttcagctgagcacttagtgtttgtacaggatgaggcagaagattcagggaatgatttcctctccagtgagagcacagacagtagcattccatggttcctccgggttcaggagttggcccatgacagtttgattgctgctactcgtgcacaactggcaaagaatgcaaaaaccagcagcaatggagaaaatgtccaccttggttctggtgatgggcagtcaaaagattctgggccccttcctcaagtggaaaagaagctcaagtgtacagttgaaggttgtgaccggacatttgtatggccagctcactttaaataccacctcaagactcatcgaaatgaccgctccttcatctgtcctgcagaaggttgtgggaaaagcttctatgtgctgcagaggctgaaggtgcacatgaggacccacaatggagagaagccctttatgtgccatgagtctggctgtggtaagcagtttactacagctggaaacctgaagaaccaccggcgcatccacacaggagagaaacctttcctttgtgaagcccaaggatgtggccgttcctttgctgagtattctagcctccgaaaacatctggtggttcactcaggagagaagcctcatcagtgccaagtctgtgggaagaccttctctcagagtggaagcaggaatgtgcatatgagaaagcatcacctgcagctgggagcagctgggagtcaagagcaggagcaaactgctgagccactaatgggcagtagtttgcttgaagaggcttcagtacccagtaaaaacctggtgtctatgaattcccagcccagccttggtggagagtccttgaacctaccaaataccaattctatcctgggagttgatgatgaggtgcttgctgaaggatccccacgttccctgtcttcagtgcctgatgtgacacatcacctggtgaccatgcagtcagggaggcaatcatatgaagtttctgtcttaactgcagtaaatccacaagagttactaaaccaaggagatttaactgaaagacggacatgagcgtgggtgctgactcctggaagagcaactctatctgatctcaaaatgcgtatactgggaacaggatgccttagcccacaacagaaccagaatgaatctttgaaggcacaagactctgcttttgccactcttcctctttcctggtatagaagatggatgtaggagagcttcttttctaactaccatctgatcagacaaggaatgaagcaatgactgtgggctgggaaactgtacctacctctcttcccactgcaaatttctgggatagaccaaaagtgaatttgattatgtgttggctgaagttcttcattctgactgttgaggggaggttttcctttgaagagttttcatcccagactcagctgtcttttcacatggatgaaataattcctgctaccaacaacagagcttcaccaggaagttgagttttcaagatgccttgttgctttgaagaagggagtgatgtcaattctcttgttacattctccctttagcaacctgagtaagagactctctgccactgggctgcaaaaaaataaattacttgaatctccccttggcccaggctgaggtactatcttgtcctatacacttctacttggtcactttgctttcttcgttaatggaacatacagtagcatgttaagagggatttcatgtttttgtttttttaaagttaaaaattacatgatgcagagattcaggttttcctttaaataaacaaaacagcccagtca

SEQ ID NO: 384374 - DNA, 2372 bp, Homo sapiens
gcaaatattttaaaataagtaatttcaagaagtcagtcaaactcacaaagctttaacaaggtggcatccagcttggaagtcaagtgttcaagcccgcagtcgggacatccaagagctctttacatcctaattacaacacggaacccagactcactgcataccccgtcccgtatataatgcaaaacttgattctgcaagttcctttctcgggcggtgaaacttcgaaggtcctctccatggagacctttgataaatgtttaagcagtgatcttttctttcgcgtttgcctccattgcaacgcctccgctgatgggaaaaactactccctccgctactgcggggtggcagtgacgtcaacgaattagctgacctgttttttcgggcttcgcggacataggagttccgaaggccgagagtgagtgagtgagtgggagcggggcggctgcggctcctcctgtccggggcggagccctgcgtcgcgggcctggggaggccccgccagcacccttgacgtctgggtcccgagcagtgcggcagccacacgacactgaggcgagcgagtgggtgtgtgcgtggggggtcagccaaacttcctgtcccgcgctcgagctgcttccggcgggagccggaagacgctgtgtgtggacggaattcgggaccgactgacggccggccggcttcccggaactggaaggttacattgattacccacctagtacaacatcttacgggaagagcatagtatttcctagaggaatatgaacataacaggaaggtatcattggctctgaattaaatttgaacttgtcccctgaatagctacaggttttggaagctgaatcaatgttatcagatgagttagaatccaaaccagagctcctggtacagtttgttcagaatacgtccatcccattgggacaggggcttgtagaatcagaagctaaagatattacttgcttgtccctccttcccgtgactgaagcctcagaatgcagtcggctaatgttaccagatgatactacaaatcattctaactcctccaaggaggtcccttcctcagctgttttgagaagccttcgggtgaatgtgggtccagacggagaggagacgagagctcagactgtacagaaatccccggagtttttgtccacttcagagtcttctagcttgttgcaagatctacagccaagtgatagcacttcttttattcttcttaacctaacaagagcaggtctgggctcttcagctgagcacttagtgtttgtacaggatgaggcagaagattcagggaatgatttcctctccagtgagagcacagacagtagcattccatggttcctccgggttcaggagttggcccatgacagtttgattgctgctactcgtgcacaactggcaaagaatgcaaaaaccagcagcaatggagaaaatgtccaccttggttctggtgatgggcagtcaaaagattctgggccccttcctcaagtggaaaagaagctcaagtgtacagttgaaggttgtgaccggacatttgtatggccagctcactttaaataccacctcaagactcatcgaaatgaccgctccttcatctgtcctgcagaaggttgtgggaaaagcttctatgtgctgcagaggctgaaggtgcacatgaggacccacaatggagagaagccctttatgtgccatgagtctggctgtggtaagcagtttactacagctggaaacctgaagaaccaccggcgcatccacacaggagagaaacctttcctttgtgaagcccaaggatgtggccgttcctttgctgagtattctagcctccgaaaacatctggtggttcactcaggagagaagcctcatcagtgccaagtctgtgggaagaccttctctcagagtggaagcaggaatgtgcatatgagaaagcatcacctgcagctgggagcagctgggagtcaagagcaggagcaaactgctgagccactaatgggcagtagtttgcttgaagaggcttcagtacccagtaaaaacctggtgtctatgaattcccaccaggaagttgagttttcaagatgccttgttgctttgaagaagggagtgatgtcaattctcttgttacattctccctttagcaacctgagtaagagactctctgccactgggctgcaaaaaaataaattacttgaatctccccttggcccaggctgaggtactatcttgtcctatacacttctacttggtcactttgctttcttcgttaatggaacatacagtagcatgttaagagggatttcatgtttttgtttttttaaagttaaaaattacatgatgcagagattcaggttttcctttaaataaacaaaacagcccagtca

SEQ ID NO: 384375 - DNA, 2272 bp, Homo sapiens
gcaaatattttaaaataagtaatttcaagaagtcagtcaaactcacaaagctttaacaaggtggcatccagcttggaagtcaagtgttcaagcccgcagtcgggacatccaagagctctttacatcctaattacaacacggaacccagactcactgcataccccgtcccgtatataatgcaaaacttgattctgcaagttcctttctcgggcggtgaaacttcgaaggtcctctccatggagacctttgataaatgtttaagcagtgatcttttctttcgcgtttgcctccattgcaacgcctccgctgatgggaaaaactactccctccgctactgcggggtggcagtgacgtcaacgaattagctgacctgttttttcgggcttcgcggacataggagttccgaaggccgagagtgagtgagtgagtgggagcggggcggctgcggctcctcctgtccggggcggagccctgcgtcgcgggcctggggaggccccgccagcacccttgacgtctgggtcccgagcagtgcggcagccacacgacactgaggcgagcgagtgggtgtgtgcgtggggggtcagccaaacttcctgtcccgcgctcgagctgcttccggcgggagccggaagacgctgtgtgtggacggaattcgggaccgactgacggccggccggcttcccggaactggaaggttacattgattacccacctagtacaacatcttacgggaagagcatagtatttcctagaggaatatgaacataacaggaaggtatcattggctctgaattaaatttgaacttgtcccctgaatagctacaggttttggaagctgaatcaatgttatcagatgagttagaatccaaaccagagctcctggtacagtttgttcagaatacgtccatcccattgggacaggggcttgtagaatcagaagctaaagatattacttgcttgtccctccttcccgtgactgaagcctcagaatgcagtcggctaatgttaccagatgatactacaaatcattctaactcctccaaggaggtcccttcctcagctgttttgagaagccttcgggtgaatgtgggtccagacggagaggagacgagagctcagactgtacagaaatccccggagtttttgtccacttcagagtcttctagcttgttgcaagatctacagccaagtgatagcacttcttttattcttcttaacctaacaagagcaggtctgggctcttcagctgagcacttagtgtttgtacaggatgaggcagaagattcagggaatgatttcctctccagtgagagcacagacagtagcattccatggttcctccgggttcaggagttggcccatgacagtttgattgctgctactcgtgcacaactggcaaagaatgcaaaaaccagcagcaatggagaaaatgtccaccttggttctggtgatgggcagtcaaaagattctgggccccttcctcaagtggaaaagaagctcaagtgtacagttgaaggttgtgaccggacatttgtatggccagctcactttaaataccacctcaagactcatcgaaatgaccgctccttcatctgtcctgcagaaggttgtgggaaaagcttctatgtgctgcagaggctgaaggtgcacatgaggacccacaatggagagaagccctttatgtgccatgagtctggctgtggtaagcagtttactacagctggaaacctgaagaaccaccggcgcatccacacaggagagaaacctttcctttgtgaagcccaaggatgtggccgttcctttgctgagtattctagcctccgaaaacatctggtggttcactcaggagagaagcctcatcagtgccaagtctgtgggaagaccttctctcagagtggaagcaggaatgtgcatatgagaaagcatcacctgcagctgggagcagctgggagtcaagagcaggagcaaactgctgagccactaatgggcagtagtttgcttgaagaggcttcagtacccagtaaaaacctggtgtctatgaattcctctctgccactgggctgcaaaaaaataaattacttgaatctccccttggcccaggctgaggtactatcttgtcctatacacttctacttggtcactttgctttcttcgttaatggaacatacagtagcatgttaagagggatttcatgtttttgtttttttaaagttaaaaattacatgatgcagagattcaggttttcctttaaataaacaaaacagcccagtca

SEQ ID NO: 384376 - DNA, 2064 bp, Homo sapiens
  misc_feature (1915)..(1915): n is a, c, g, or t
gcaaatattttaaaataagtaatttcaagaagtcagtcaaactcacaaagctttaacaaggtggcatccagcttggaagtcaagtgttcaagcccgcagtcgggacatccaagagctctttacatcctaattacaacacggaacccagactcactgcataccccgtcccgtatataatgcaaaacttgattctgcaagttcctttctcgggcggtgaaacttcgaaggtcctctccatggagacctttgataaatgtttaagcagtgatcttttctttcgcgtttgcctccattgcaacgcctccgctgatgggaaaaactactccctccgctactgcggggtggcagtgacgtcaacgaattagctgacctgttttttcgggcttcgcggacataggagttccgaaggccgagagtgagtgagtgagtgggagcggggcggctgcggctcctcctgtccggggcggagccctgcgtcgcgggcctggggaggccccgccagcacccttgacgtctgggtcccgagcagtgcggcagccacacgacactgaggcgagcgagtgggtgtgtgcgtggggggtcagccaaacttcctgtcccgcgctcgagctgcttccggcgggagccggaagacgctgtgtgtggacggaattcgggaccgactgacggccggccggcttcccggaactggaaggttacattgattacccacctagtacaacatcttacgggaagagcatagtatttcctagaggaatatgaacataacaggaaggtatcattggctctgaattaaatttgaacttgtcccctgaatagctacaggttttggaagctgaatcaatgttatcagatgagttagaatccaaaccagagctcctggtacagtttgttcagaatacgtccatcccattgggacaggggcttgtagaatcagaagctaaagatattacttgcttgtccctccttcccgtgactgaagcctcagaatgcagtcggctaatgttaccagatgatactacaaatcattctaactcctccaaggaggtcccttcctcagctgttttgagaagccttcgggtgaatgtgggtccagacggagaggagacgagagctcagactgtacagaaatccccggagtttttgtccacttcagagtcttctagcttgttgcaagatctacagccaagtgatagcacttcttttattcttcttaacctaacaagagcaggtctgggctcttcagctgagcacttagtgtttgtacaggatgaggcagaagattcagggaatgatttcctctccagtgagagcacagacagtagcattccatggttcctccgggttcaggagttggcccatgacagtttgattgctgctactcgtgcacaactggcaaagaatgcaaaaaccagcagcaatggagaaaatgtccaccttggttctggtgatgggcagtcaaaagattctgggccccttcctcaagtggaaaagaagctcaagtgtacagttgaaggttgtgaccggacatttgtatggccagctcactttaaataccacctcaagactcatcgaaatgaccgctccttcatctgtcctgcagaaggttgtgggaaaagcttctatgtgctgcagaggctgaaggtgcacatgaggacccacaatggagagaagccctttatgtgccatgagtctggctgtggtaagcagtttactacagctggaaacctgaagaaccaccggcgcatccacacaggagagaaacctttcctttgtgaagcccaaggatgtggccgttcctttgctgagtattctagcctccgaaaacatctggtggttcactcaggagagaagcctcatcagtgccaagtctgtgggaagaccttctctcagagtggaagcaggaatgtgcttngaagctcctgcgtgggcgcgtgggttcagagcggaggactgtggcccatggtcgacttgtgacagtcccccctcaccggggttgatcccccctggtgggtcttgccacctcatttcggggtgcggggggagccccccgttggcgggtct

SEQ ID NO: 384377 - DNA, 2032 bp, Homo sapiens
gcaaatattttaaaataagtaatttcaagaagtcagtcaaactcacaaagctttaacaaggtggcatccagcttggaagtcaagtgttcaagcccgcagtcgggacatccaagagctctttacatcctaattacaacacggaacccagactcactgcataccccgtcccgtatataatgcaaaacttgattctgcaagttcctttctcgggcggtgaaacttcgaaggtcctctccatggagacctttgataaatgtttaagcagtgatcttttctttcgcgtttgcctccattgcaacgcctccgctgatgggaaaaactactccctccgctactgcggggtggcagtgacgtcaacgaattagctgacctgttttttcgggcttcgcggacataggagttccgaaggccgagagtgagtgagtgagtgggagcggggcggctgcggctcctcctgtccggggcggagccctgcgtcgcgggcctggggaggccccgccagcacccttgacgtctgggtcccgagcagtgcggcagccacacgacactgaggcgagcgagtgggtgtgtgcgtggggggtcagccaaacttcctgtcccgcgctcgagctgcttccggcgggagccggaagacgctgtgtgtggacggaattcgggaccgactgacggccggccggcttcccggaactggaaggttacattgattacccacctagtacaacatcttacgggaagagcatagtatttcctagaggaatatgaacataacaggaaggtatcattggctctgaattaaatttgaacttgtcccctgaatagctacaggttttggaagctgaatcaatgttatcagatgagttagaatccaaaccagagctcctggtacagtttgttcagaatacgtccatcccattgggacaggggcttgtagaatcagaagctaaagatattacttgcttgtccctccttcccgtgactgaagcctcagaatgcagtcggctaatgttaccagatgatactacaaatcattctaactcctccaaggaggtcccttcctcagctgttttgagaagccttcgggtgaatgtgggtccagacggagaggagacgagagctcagactgtacagaaatccccggagtttttgtccacttcagagtcttctagcttgttgcaagatctacagccaagtgatagcacttcttttattcttcttaacctaacaagagcaggtctgggctcttcagctgagcacttagtgtttgtacaggatgaggcagaagattcagggaatgatttcctctccagtgagagcacagacagtagcattccatggttcctccgggttcaggagttggcccatgacagtttgattgctgctactcgtgcacaactggcaaagaatgcaaaaaccagcagcaatggagaaaatgtccaccttggttctggtgatgggcagtcaaaagattctgggccccttcctcaagtggaaaagaagctcaagtgtacagttgaaggttgtgaccggacatttgtatggccagctcactttaaataccacctcaagactcatcgaaatgaccgctccttcatctgtcctgcagaaggttgtgggaaaagcttctatgtgctgcagaggctgaaggtgcacatgaggacccacaatggagagaagccctttatgtgccatgagtctggctgtggtaagcagtttactacagctggaaacctgaagaaccaccggcgcatccacacaggagagaaacctttcctttgtgaagcccaaggatgtggccgttcctttgctgagtattctagcctccgaaaacatctggtggttcactcaggtatcagaacctctgccattcatagattttaggaaaagtagacaaaagaataaaagggttgtgggggtgatataaagacaactaaaaagaaacaaactgttcactataaagatagaaagcttctcatcatcatgacagaatcagaaatcaaggcccttaattcttataatcaaggttggggggggg

SEQ ID NO: 384378 - DNA, 1845 bp, Homo sapiens
gcaaatattttaaaataagtaatttcaagaagtcagtcaaactcacaaagctttaacaaggtggcatccagcttggaagtcaagtgttcaagcccgcagtcgggacatccaagagctctttacatcctaattacaacacggaacccagactcactgcataccccgtcccgtatataatgcaaaacttgattctgcaagttcctttctcgggcggtgaaacttcgaaggtcctctccatggagacctttgataaatgtttaagcagtgatcttttctttcgcgtttgcctccattgcaacgcctccgctgatgggaaaaactactccctccgctactgcggggtggcagtgacgtcaacgaattagctgacctgttttttcgggcttcgcggacataggagttccgaaggccgagagtgagtgagtgagtgggagcggggcggctgcggctcctcctgtccggggcggagccctgcgtcgcgggcctggggaggccccgccagcacccttgacgtctgggtcccgagcagtgcggcagccacacgacactgaggcgagcgagtgggtgtgtgcgtggggggtcagccaaacttcctgtcccgcgctcgagctgcttccggcgggagccggaagacgctgtgtgtggacggaattcgggaccgactgacggccggccggcttcccggaactggaaggttacattgattacccacctagtacaacatcttacgggaagagcatagtatttcctagaggaatatgaacataacaggaaggtatcattggctctgaattaaatttgaacttgtcccctgaatagctacaggttttggaagctgaatcaatgttatcagatgagttagaatccaaaccagagctcctggtacagtttgttcagaatacgtccatcccattgggacaggggcttgtagaatcagaagctaaagatattacttgcttgtccctccttcccgtgactgaagcctcagaatgcagtcggctaatgttaccagatgatactacaaatcattctaactcctccaaggaggtcccttcctcagctgttttgagaagccttcgggtgaatgtgggtccagacggagaggagacgagagctcagactgtacagaaatccccggagtttttgtccacttcagagtcttctagcttgttgcaagatctacagccaagtgatagcacttcttttattcttcttaacctaacaagagcaggtctgggctcttcagctgagcacttagtgtttgtacaggatgaggcagaagattcagggaatgatttcctctccagtgagagcacagacagtagcattccatggttcctccgggttcaggagttggcccatgacagtttgattgctgctactcgtgcacaactggcaaagaatgcaaaaaccagcagcaatggagaaaatgtccaccttggttctggtgatgggcagtcaaaagattctgggccccttcctcaagtggaaaagaagctcaagtgtacagttgaaggttgtgaccggacatttgtatggccagctcactttaaataccacctcaagactcatcgaaatgaccgctccttcatctgtcctgcagaaggttgtgggaaaagcttctatgtgctgcagaggctgaaggtgcacatgaggacccacaatggagagaagccctttatgtgccatgagtctggctgtggtaagcagtttactacagctggaaacctgaagaaccaccggcgcatccacacaggagaggttcctttcctttgtgaagcgcaccgaagagcccgatccatggctaaggctgttacccgccgtaaacctctggccagtgaatca

SEQ ID NO: 384379 - DNA, 816 bp, Homo sapiens
ttcattccatcccatcaccccatgatccttccccattgtcccatgaccagcccccgcaggaccctcccctgctccatgtgaccctccctctgcctcctccatgaaggtctcctggatttccccactcgcctctcacagccctccattgtctctgcagacgttgccccatctgacgctcggctcgaggcctctctgtgagggaccggggggccatccccctccagggcggagatcggaggtcgctgccaagcatggcgcccacctggggccctggcatggtgtctgtggttggtcccatgggcctccttgtggtcctgctcgttggaggctgtgcagcagaagagccccccaggtttatcaaagaacccaaggaccagatcggcgtgtcggggggtgtggcctctttcgtgtgtcaggccacgggtgaccccaagccacgagtgacctggaacaagaagggcaagaaggtcaactctcagcgctttgagacgattgagtttgatgagagtgcaggggcagtgctgaggatccagccgctgaggacaccgcgggatgaaaacgtgtacgagtgtgtggcccagaactcggttggggagatcacagtccatgccaagcttactgtcctccgaggaccttgatctcccttatccaaccagtaacagtctcagggcccagcgcctactggtggggatttattgtgcctttgcaagaaagaaaggaattgagagactagaatcatcctaatttataatcttcatcatgtgcttctgatgacaaaaggctgatccaactcagatgggttcaagcgagaaaggt

SEQ ID NO: 384380 - DNA, 6311 bp, Homo sapiens
  misc_feature (2365)..(2365): n is a, c, g, or t
  misc_feature (2434)..(2434): n is a, c, g, or t
  misc_feature (2601)..(2601): n is a, c, g, or t
  misc_feature (6138)..(6138): n is a, c, g, or t
  misc_feature (6143)..(6143): n is a, c, g, or t
ctgccagcccgggggagctgtgactggggacttcgcagaaggcggaggaggcaacaggaccgcagagggggcagacgttgccccatctgacgctcggctcgaggcctctctgtgagggaccggggggccatccccctccagggcggagatcggaggtcgctgccaagcatggcgcccacctggggccctggcatggtgtctgtggttggtcccatgggcctccttgtggtcctgctcgttggaggctgtgcagcagaagagccccccaggtttatcaaagaacccaaggaccagatcggcgtgtcggggggtgtggcctctttcgtgtgtcaggccacgggtgaccccaagccacgagtgacctggaacaagaagggcaagaaggtcaactctcagcgctttgagacgattgagtttgatgagagtgcaggggcagtgctgaggatccagccgctgaggacaccgcgggatgaaaacgtgtacgagtgtgtggcccagaactcggttggggagatcacagtccatgccaagcttactgtcctccgagaggaccagctgccctctggcttccccaacatcgacatgggcccacagttgaaggtggtggagcggacacggacagccaccatgctctgtgcagccagcggcaaccctgaccctgagatcacctggttcaaggacttcctgcctgtggatcctagtgccagcaatggacgcatcaaacagctgcgatcaggagccctgcagattgaaagcagtgaggaaaccgaccagggcaaatatgagtgtgtggccaccaacagcgccggcgtgcgctactcctcacctgccaacctctacgtgcgagtccgccgcgtggccccgcgcttctccatcctgcccatgagccacgagatcatgccagggggcaacgtgaacatcacctgcgtggccgtgggctcgcccatgccatacgtgaagtggatgcagggggccgaggacctgacccccgaggatgacatgcccgtgggtcggaacgtgctggaactcacagatgtcaaggactcggccaactacacctgcgtggccatgtccagcctgggcgtcattgaggcggttgctcagatcacggtgaaatctctccccaaagctcccgggactcccatggtgactgagaacacagccaccagcatcaccatcacgtgggactcgggcaacccagatcctgtgtcctattacgtcatcgaatataaatccaagagccaagacgggccgtatcagattaaagaggacatcaccaccacacgttacagcatcggcggcctgagccccaactcggagtacgagatctgggtgtcggccgtcaactccatcggccaggggccccccagcgagtccgtggtcacccgcacaggcgagcaggccccggccagcgcgccgcggaacgtgcaagcccggatgctcagcgcgaccaccatgattgtgcagtgggaggagccggtggagcccaacggcctgatccgcggctaccgcgtctactacaccatggaaccggagcaccccgtgggcaactggcagaagcacaacgtggacgacagcctgctgaccaccgtgggcagcctgctggaggacgagacctacaccgtgcgggtgctcgccttcacctccgtcggcgacgggcccctctcggaccccatccaggtcaagacgcagcagggagtgccgggccagcccatgaacctgcgggccgaggccaggtcggagaccagcatcacgctgtcctggagccccccgcggcaggagagtatcatcaagtacgagctcctcttccgggaaggcgaccatggccgggaggtgggaaggaccttcgacccgacgacttcctacgtggtggaggacctgaagcccaacacggagtacgccttccgcctggcggcccgctcgccgcagggcctgggcgccttcacccccgtggtgcggcagcgcacgctgcagtccaaaccgtcagccccccctcaagacgttaaatgtgtcagcgtgcgctccacggccattttggtaagttggcgcccgccgccgccggaaacgcacaacggggccctggtgggctacagcgtccgctaccgaccgctgggctcagaggacccggaacccaaggaggtgaacggcatccccccgaccaccactcagatcctgctggaggccttggagaagtggacccagtaccgcatcacgactgtcgctcacacagaggtgggaccagggcccgagagctcgcccgtggtcgtccgcaccgacgaggatgtgcccagcgcgccgccgcggaaggtggaggcggaggcgctcaacgccacggccatccgcgtgctgtggcgctcggccctgngcccggccggcagcacggccagatccgcggctaccaggtccactacgtgcgcatggagggcgccgaggnccgcgggccgccgcgcatcaaggacgtcatgctggccgatgcccaggagatggtcatcacaaacttgcagcctgagaccgcgtactccatcacggtagccgcctacaccatgaagggcgatggcgctcgcagcaaacccaaggtggttgtgaccaagggagcagtgntgggccgcccaaccctgtcggtgcagcagacccccgagggcagcctgctggcacgctgggagcccccggctggcaccgcggaggaccaggtgctgggctaccgcctgcagtttggccgtgaggactcgacgcccctggccaccctggagttcccgccctccgaggaccgctacacggcatcaggcgtgcacaagggggccacgtatgtgttccggcttgcggcccggagccggggcggcctgggcgaggaggcagccgaggtcctgagcatcccggaggacacgccccgtggccacccgcagattctggaggcggccggcaacgcctcggccgggaccgtccttctccgctggctgccacccgtgcccgccgagcgcaacggggccatcgtcaaatacacggtggccgtgcgggaggccggtgccctgggccctgcccgagagactgagctgccggcagcggctgagccgggcgcggagaacgcgctcacgctgcagggcctgaagcccgacacggcctatgacctccaagtgcgagcccacacgcgccggggccctggccccttcagcccccccgtccgctaccggacgttcctgcgggaccaagtctcgcccaagaacttcaaggtgaaaatgatcatgaagacatcagttctgctcagctgggagttccctgacaactacaactcacccacaccctacaagatccagtacaatgggctcacactggatgtggatggccgtaccaccaagaagctcatcacgcacctcaagccccacaccttctacaactttgtgctgaccaatcgcggcagcagcctgggcggcctccagcagacggtcaccgcctggactgccttcaacctgctcaacggcaagcccagcgtcgcccccaagcctgatgctgacggcttcatcatggtgtatcttcctgacggccagagccccgtgcctgtccagagctatttcattgtgatggtgccactgcgcaagtctcgtggaggccaattcctgaccccgctgggtagcccagaggacatggatctggaagagctcatccaggacatctcacggctacagaggcgcagcctgcggcactcgcgtcagctggaggtgccccggccctatattgcagctcgcttctctgtgctgccacccacgttccatcccggcgaccagaagcagtatggcggcttcgataaccggggcctggagcccggccaccgctatgtcctcttcgtgcttgccgtgcttcagaagagcgagcctacctttgcagccagtcccttctcagaccccttccagctggataacccggacccccagcccatcgtggatggcgaggaggggcttatctgggtgatcgggcctgtgctggccgtggtcttcataatctgcattgtcattgctatcctgctctacaagaacaaacccgacagtaaacgcaaggactcagaaccccgcaccaaatgcctcctgaacaatgccgacctcgcccctcaccaccccaaggaccctgtggaaatgagacgcattaacttccagactccaggcatgcttagccacccgccaattcccatcgcagacatggcggagcacacggagcggctcaaggccaacgacagcctcaagctctcccaggagtatgagtccatcgaccctggacagcagttcacatgggaacattccaacctggaagtgaacaagccgaagaaccgctatgccaacgtcatcgcctatgaccactcccgtgtcatcctccagcccattgaaggcatcatgggcagtgattacatcaatgccaactacgtggacggctaccggcgtcagaacgcgtacattgccacgcaggggccgctgcctgagacctttggggacttctggcgtatggtgtgggagcagcggtcggcgaccatcgtcatgatgacgcggctggaggagaagtcacggatcaagtgtgatcagtattggcccaacagaggcacggagacctacggcttcatccaggtcacgttgctagataccatcgagctggccacattctgcgtcaggacattctctctgcacaagaatggctccagtgagaaacgcgaggtccgccagttccagtttacggcgtggccggaccatggcgtgcccgaatacccaacgcccttcctggctttcctgcggagagtcaagacctgcaacccaccagatgccggccccatcgtggttcactgcagtgccggtgtgggccgcacaggctgctttatcgtcatcgacgccatgcttgagcggatcaagccagagaagacagtcgatgtctatggccacgtgacgctcatgaggtcccagcgcaactacatggtgcagacggaggaccagtacagcttcatccacgaggccctgctggaggccgtgggctgtggcaacacagaagtgcccgcacgcagcctctatgcctacatccagaagctggcccaggtggagcctggcgaacacgtcactggcatggaactcgagttcaagcggctggctaactccaaggcccacacgtcacgcttcatcagtgccaatctgccttgtaacaagttcaagaaccgcctggtgaacatcatgccctatgagagcacacgggtctgtctgcaacccatccggggtgtggagggctctgactacatcaacgccagcttcattgatggctacaggcagcagaaggcctacatcgcgacacaggggccgctggcggagaccacggaagacttctggcgcatgctgtgggagaacaattcgacgatcgtggtgatgctgaccaagctgcgggagatgggccgggagaagtgtcaccagtactggccggccgagcgctctgcccgctaccagtactttgtggtagatccgatggcagaatacaacatgcctcagtatatcctgcgagagttcaaggtcacagatgcccgggatggccagtcccggactgtccggcagttccagttcacagactggccggaacagggtgtgccaaagtcgggggagggcttcatcgacttcattggccaagtgcataagactaaggagcagtttggccaggacggccccatctctgtccactgcagtgccggcgtgggcaggacgggcgtcttcatcacgcttagcatcgtgctggagcggatgcggtatgaaggcgtggtggacatctttcagacggtgaagatgctacgaacccagcggccggccatggtgcagacagaggatgagtaccagttctgttaccaggcggcactggagtacctcggaagctttgaccactatgcaacctaaagccatggtcccccccaggcccgacaccactggccccggatgcctctgcccctcccgggcggacctcctgaggcctggacccccagtgggcagggcaggaggtggcagcggcagcagctgtgtttctgcaccatttccgaggacgacgcagcccctcgagcccccccaccggccccggccgccccagcgacctccctggcaccggccgccgccttcaaatacttggcacattccnccganttccttccaattccaaaaccagattccggggtggggggtggggggatggtgagcaaataggagtgctccccagaaccagaggagggtggggcacagaccatagacggacccctcgtcctcccccagcggtggtagggggacccggggggctcctccccgctctgcacc

SEQ ID NO: 384381 - DNA, 6218 bp, Homo sapiens
  misc_feature (2365)..(2365): n is a, c, g, or t
  misc_feature (2434)..(2434): n is a, c, g, or t
  misc_feature (2628)..(2628): n is a, c, g, or t
  misc_feature (6045)..(6045): n is a, c, g, or t
  misc_feature (6050)..(6050): n is a, c, g, or t
ctgccagcccgggggagctgtgactggggacttcgcagaaggcggaggaggcaacaggaccgcagagggggcagacgttgccccatctgacgctcggctcgaggcctctctgtgagggaccggggggccatccccctccagggcggagatcggaggtcgctgccaagcatggcgcccacctggggccctggcatggtgtctgtggttggtcccatgggcctccttgtggtcctgctcgttggaggctgtgcagcagaagagccccccaggtttatcaaagaacccaaggaccagatcggcgtgtcggggggtgtggcctctttcgtgtgtcaggccacgggtgaccccaagccacgagtgacctggaacaagaagggcaagaaggtcaactctcagcgctttgagacgattgagtttgatgagagtgcaggggcagtgctgaggatccagccgctgaggacaccgcgggatgaaaacgtgtacgagtgtgtggcccagaactcggttggggagatcacagtccatgccaagcttactgtcctccgagaggaccagctgccctctggcttccccaacatcgacatgggcccacagttgaaggtggtggagcggacacggacagccaccatgctctgtgcagccagcggcaaccctgaccctgagatcacctggttcaaggacttcctgcctgtggatcctagtgccagcaatggacgcatcaaacagctgcgatcaggagccctgcagattgaaagcagtgaggaaaccgaccagggcaaatatgagtgtgtggccaccaacagcgccggcgtgcgctactcctcacctgccaacctctacgtgcgagtccgccgcgtggccccgcgcttctccatcctgcccatgagccacgagatcatgccagggggcaacgtgaacatcacctgcgtggccgtgggctcgcccatgccatacgtgaagtggatgcagggggccgaggacctgacccccgaggatgacatgcccgtgggtcggaacgtgctggaactcacagatgtcaaggactcggccaactacacctgcgtggccatgtccagcctgggcgtcattgaggcggttgctcagatcacggtgaaatctctccccaaagctcccgggactcccatggtgactgagaacacagccaccagcatcaccatcacgtgggactcgggcaacccagatcctgtgtcctattacgtcatcgaatataaatccaagagccaagacgggccgtatcagattaaagaggacatcaccaccacacgttacagcatcggcggcctgagccccaactcggagtacgagatctgggtgtcggccgtcaactccatcggccaggggccccccagcgagtccgtggtcacccgcacaggcgagcaggccccggccagcgcgccgcggaacgtgcaagcccggatgctcagcgcgaccaccatgattgtgcagtgggaggagccggtggagcccaacggcctgatccgcggctaccgcgtctactacaccatggaaccggagcaccccgtgggcaactggcagaagcacaacgtggacgacagcctgctgaccaccgtgggcagcctgctggaggacgagacctacaccgtgcgggtgctcgccttcacctccgtcggcgacgggcccctctcggaccccatccaggtcaagacgcagcagggagtgccgggccagcccatgaacctgcgggccgaggccaggtcggagaccagcatcacgctgtcctggagccccccgcggcaggagagtatcatcaagtacgagctcctcttccgggaaggcgaccatggccgggaggtgggaaggaccttcgacccgacgacttcctacgtggtggaggacctgaagcccaacacggagtacgccttccgcctggcggcccgctcgccgcagggcctgggcgccttcacccccgtggtgcggcagcgcacgctgcagtccaaaccgtcagccccccctcaagacgttaaatgtgtcagcgtgcgctccacggccattttggtaagttggcgcccgccgccgccggaaacgcacaacggggccctggtgggctacagcgtccgctaccgaccgctgggctcagaggacccggaacccaaggaggtgaacggcatccccccgaccaccactcagatcctgctggaggccttggagaagtggacccagtaccgcatcacgactgtcgctcacacagaggtgggaccagggcccgagagctcgcccgtggtcgtccgcaccgacgaggatgtgcccagcgcgccgccgcggaaggtggaggcggaggcgctcaacgccacggccatccgcgtgctgtggcgctcggccctgngcccggccggcagcacggccagatccgcggctaccaggtccactacgtgcgcatggagggcgccgaggnccgcgggccgccgcgcatcaaggacgtcatgctggccgatgcccagtgggagacggatgacacggccgaatatgagatggtcatcacaaacttgcagcctgagaccgcgtactccatcacggtagccgcctacaccatgaagggcgatggcgctcgcagcaaacccaaggtggttgtgaccaagggagcagtgntgggccgcccaaccctgtcggtgcagcagacccccgagggcagcctgctggcacgctgggagcccccggctggcaccgcggaggaccaggtgctgggctaccgcctgcagtttggccgtgaggactcgacgcccctggccaccctggagttcccgccctccgaggaccgctacacggcatcaggcgtgcacaagggggccacgtatgtgttccggcttgcggcccggagccggggcggcctgggcgaggaggcagccgaggtcctgagcatcccggaggacacgccccgtggccacccgcagattctggaggcggccggcaacgcctcggccgggaccgtccttctccgctggctgccacccgtgcccgccgagcgcaacggggccatcgtcaaatacacggtggccgtgcgggaggccggtgccctgggccctgcccgagagactgagctgccggcagcggctgagccgggcgcggagaacgcgctcacgctgcagggcctgaagcccgacacggcctatgacctccaagtgcgagcccacacgcgccggggccctggccccttcagcccccccgtccgctaccggacgttcctgcgggaccaagtctcgcccaagaacttcaaggtgaaaatgatcatgaagacatcagttctgctcagctgggagttccctgacaactacaactcacccacaccctacaagatccagtacaatgggctcacactggatgtggatggccgtaccaccaagaagctcatcacgcacctcaagccccacaccttctacaactttgtgctgaccaatcgcggcagcagcctgggcggcctccagcagacggtcaccgcctggactgccttcaacctgctcaacggcaagcccagcgtcgcccccaagcctgatgctgacggcttcatcatggtgtatcttcctgacggccagagccccgtgcctgtccagagctatttcattgtgatggtgccactgcgcaagtctcgtggaggccaattcctgaccccgctgggtagcccagaggacatggatctggaagagctcatccaggacatctcacggctacagaggcgcagcctgcggcactcgcgtcagctggaggtgccccggccctatattgcagctcgcttctctgtgctgccacccacgttccatcccggcgaccagaagcagtatggcggcttcgataaccggggcctggagcccggccaccgctatgtcctcttcgtgcttgccgtgcttcagaagagcgagcctacctttgcagccagtcccttctcagaccccttccagctggataacccggacccccagcccatcgtggatggcgaggaggggcttatctgggtgatcgggcctgtgctggccgtggtcttcataatctgcattgtcattgctatcctgctctacaagaacaaacccgacagtaaacgcaaggactcagaaccccgcaccaaatgcctcctgaacaatgccgacctcgcccctcaccaccccaaggaccctgtggaaatgagacgcattaacttccagactccaggcatgcttagccacccgccaattcccatcgcagacatggcggagcacacggagcggctcaaggccaacgacagcctcaagctctcccaggagtatgagtccatcgaccctggacagcagttcacatgggaacattccaacctggaagtgaacaagccgaagaaccgctatgccaacgtcatcgcctatgaccactcccgtgtcatcctccagcccattgaaggcatcatgggcagtgattacatcaatgccaactacgtggacggctaccggcgtcagaacgcgtacattgccacgcaggggccgctgcctgagacctttggggacttctggcgtatggtgtgggagcagcggtcggcgaccatcgtcatgatgacgcggctggaggagaagtcacggatcaagtgtgatcagtattggcccaacagaggcacggagacctacggcttcatccaggtcacgttgctagataccatcgagctggccacattctgcgtcaggacattctctctgcacaagaatggctccagtgagaaacgcgaggtccgccagttccagtttacggcgtggccggaccatggcgtgcccgaatacccaacgcccttcctggctttcctgcggagagtcaagacctgcaacccaccagatgccggccccatcgtggttcactgcagtgccggtgtgggccgcacaggctgctttatcgtcatcgacgccatgcttgagcggatcaagccagagaagacagtcgatgtctatggccacgtgacgctcatgaggtcccagcgcaactacatggtgcagacggaggaccagtacagcttcatccacgaggccctgctggaggccgtgggctgtggcaacacagaagtgcccgcacgcagcctctatgcctacatccagaagctggcccaggtggagcctggcgaacacgtcactggcatggaactcgagttcaagcggctggctaactccaaggcccacacgtcacgcttcatcagtgccaatctgccttgtaacaagttcaagaaccgcctggtgaacatcatgccctatgagagcacacgggtctgtctgcaacccatccggggtgtggagggctctgactacatcaacgccagcttcattgatggctacaggcagcagaaggcctacatcgcgacacaggggccgctggcggagaccacggaagacttctggcgcatgctgtgggagaacaattcgacgatcgtggtgatgctgaccaagctgcgggagatgggccgggagaagtgtcaccagtactggccggccgagcgctctgcccgctaccagtactttgtggtagatccgatggcagaatacaacatgcctcagtatatcctgcgagagttcaaggtcacagatgcccgggatggccagtcccggactgtccggcagttccagttcacagactggccggaacagggtgtgccaaagtcgggggagggcttcatcgacttcattggccaagtgcataagactaaggagcagtttggccaggacggccccatctctgtccactgcagtgccggcgtgggcaggacgggcgtcttcatcacgcttagcatcgtgctggagtacctcggaagctttgaccactatgcaacctaaagccatggtcccccccaggcccgacaccactggccccggatgcctctgcccctcccgggcggacctcctgaggcctggacccccagtgggcagggcaggaggtggcagcggcagcagctgtgtttctgcaccatttccgaggacgacgcagcccctcgagcccccccaccggccccggccgccccagcgacctccctggcaccggccgccgccttcaaatacttggcacattccnccganttccttccaattccaaaaccagattccggggtggggggtggggggatggtgagcaaataggagtgctccccagaaccagaggagggtggggcacagaccatagacggacccctcgtcctcccccagcggtggtagggggacccggggggctcctccccgctctgcacc

SEQ ID NO: 384382 - DNA, 1699 bp, Homo sapiens
  misc_feature (31)..(32): n is a, c, g, or t
  misc_feature (1526)..(1526): n is a, c, g, or t
  misc_feature (1531)..(1531): n is a, c, g, or t
tggctgtctagaggataccattaggcgcgtnntgcgtaggacattctctctgcacaagaatggctccagtgagaaacgcgaggtccgccagttccagtttacggcgtggccggaccatggcgtgcccgaatacccaacgcccttcctggctttcctgcggagagtcaagacctgcaacccaccagatgccggccccatcgtggttcactgcagtgccggtgtgggccgcacaggctgctttatcgtcatcgacgccatgcttgagcggatcaagccagagaagacagtcgatgtctatggccacgtgacgctcatgaggtcccagcgcaactacatggtgcagacggaggaccagtacagcttcatccacgaggccctgctggaggccgtgggctgtggcaacacagaagtgcccgcacgcagcctctatgcctacatccagaagctggcccaggtggagcctggcgaacacgtcactggcatggaactcgagttcaagcggctggctaactccaaggcccacacgtcacgcttcatcagtgccaatctgccttgtaacaagttcaagaaccgcctggtgaacatcatgccctatgagagcacacgggtctgtctgcaacccatccggggtgtggagggctctgactacatcaacgccagcttcattgatggctacaggcagcagaaggcctacatcgcgacacaggggccgctggcggagaccacggaagacttctggcgcatgctgtgggagaacaattcgacgatcgtggtgatgctgaccaagctgcgggagatgggccgggagaagtgtcaccagtactggccggccgagcgctctgcccgctaccagtactttgtggtagatccgatggcagaatacaacatgcctcagtatatcctgcgagagttcaaggtcacagatgcccgggatggccagtcccggactgtccggcagttccagttcacagactggccggaacagggtgtgccaaagtcgggggagggcttcatcgacttcattggccaagtgcataagactaaggagcagtttggccaggacggccccatctctgtccactgcagtgccggcgtgggcaggacgggcgtcttcatcacgcttagcatcgtgctggagcggatgcggtatgaaggcgtggtggacatctttcagacggtgaagatgctacgaacccagcggccggccatggtgcagacagaggatgagtaccagttctgttaccaggcggcactggagtacctcggaagctttgaccactatgcaacctaaagccatggtcccccccaggcccgacaccactggccccggatgcctctgcccctcccgggcggacctcctgaggcctggacccccagtgggcagggcaggaggtggcagcggcagcagctgtgtttctgcaccatttccgaggacgacgcagcccctcgagcccccccaccggccccggccgccccagcgacctccctggcaccggccgccgccttcaaatacttggcacattccnccganttccttccaattccaaaaccagattccggggtggggggtggggggatggtgagcaaataggagtgctccccagaaccagaggagggtggggcacagaccatagacggacccctcgtcctcccccagcggtggtagggggacccggggggctcctccccgctctgcacc

SEQ ID NO: 384383 - DNA, 3199 bp, Homo sapiens
  misc_feature (2365)..(2365): n is a, c, g, or t
  misc_feature (2434)..(2434): n is a, c, g, or t
  misc_feature (2628)..(2628): n is a, c, g, or t
ctgccagcccgggggagctgtgactggggacttcgcagaaggcggaggaggcaacaggaccgcagagggggcagacgttgccccatctgacgctcggctcgaggcctctctgtgagggaccggggggccatccccctccagggcggagatcggaggtcgctgccaagcatggcgcccacctggggccctggcatggtgtctgtggttggtcccatgggcctccttgtggtcctgctcgttggaggctgtgcagcagaagagccccccaggtttatcaaagaacccaaggaccagatcggcgtgtcggggggtgtggcctctttcgtgtgtcaggccacgggtgaccccaagccacgagtgacctggaacaagaagggcaagaaggtcaactctcagcgctttgagacgattgagtttgatgagagtgcaggggcagtgctgaggatccagccgctgaggacaccgcgggatgaaaacgtgtacgagtgtgtggcccagaactcggttggggagatcacagtccatgccaagcttactgtcctccgagaggaccagctgccctctggcttccccaacatcgacatgggcccacagttgaaggtggtggagcggacacggacagccaccatgctctgtgcagccagcggcaaccctgaccctgagatcacctggttcaaggacttcctgcctgtggatcctagtgccagcaatggacgcatcaaacagctgcgatcaggagccctgcagattgaaagcagtgaggaaaccgaccagggcaaatatgagtgtgtggccaccaacagcgccggcgtgcgctactcctcacctgccaacctctacgtgcgagtccgccgcgtggccccgcgcttctccatcctgcccatgagccacgagatcatgccagggggcaacgtgaacatcacctgcgtggccgtgggctcgcccatgccatacgtgaagtggatgcagggggccgaggacctgacccccgaggatgacatgcccgtgggtcggaacgtgctggaactcacagatgtcaaggactcggccaactacacctgcgtggccatgtccagcctgggcgtcattgaggcggttgctcagatcacggtgaaatctctccccaaagctcccgggactcccatggtgactgagaacacagccaccagcatcaccatcacgtgggactcgggcaacccagatcctgtgtcctattacgtcatcgaatataaatccaagagccaagacgggccgtatcagattaaagaggacatcaccaccacacgttacagcatcggcggcctgagccccaactcggagtacgagatctgggtgtcggccgtcaactccatcggccaggggccccccagcgagtccgtggtcacccgcacaggcgagcaggccccggccagcgcgccgcggaacgtgcaagcccggatgctcagcgcgaccaccatgattgtgcagtgggaggagccggtggagcccaacggcctgatccgcggctaccgcgtctactacaccatggaaccggagcaccccgtgggcaactggcagaagcacaacgtggacgacagcctgctgaccaccgtgggcagcctgctggaggacgagacctacaccgtgcgggtgctcgccttcacctccgtcggcgacgggcccctctcggaccccatccaggtcaagacgcagcagggagtgccgggccagcccatgaacctgcgggccgaggccaggtcggagaccagcatcacgctgtcctggagccccccgcggcaggagagtatcatcaagtacgagctcctcttccgggaaggcgaccatggccgggaggtgggaaggaccttcgacccgacgacttcctacgtggtggaggacctgaagcccaacacggagtacgccttccgcctggcggcccgctcgccgcagggcctgggcgccttcacccccgtggtgcggcagcgcacgctgcagtccaaaccgtcagccccccctcaagacgttaaatgtgtcagcgtgcgctccacggccattttggtaagttggcgcccgccgccgccggaaacgcacaacggggccctggtgggctacagcgtccgctaccgaccgctgggctcagaggacccggaacccaaggaggtgaacggcatccccccgaccaccactcagatcctgctggaggccttggagaagtggacccagtaccgcatcacgactgtcgctcacacagaggtgggaccagggcccgagagctcgcccgtggtcgtccgcaccgacgaggatgtgcccagcgcgccgccgcggaaggtggaggcggaggcgctcaacgccacggccatccgcgtgctgtggcgctcggccctgngcccggccggcagcacggccagatccgcggctaccaggtccactacgtgcgcatggagggcgccgaggnccgcgggccgccgcgcatcaaggacgtcatgctggccgatgcccagtgggagacggatgacacggccgaatatgagatggtcatcacaaacttgcagcctgagaccgcgtactccatcacggtagccgcctacaccatgaagggcgatggcgctcgcagcaaacccaaggtggttgtgaccaagggagcagtgntgggccgcccaaccctgtcggtgcagcagacccccgagggcagcctgctggcacgctgggagcccccggctggcaccgcggaggaccaggtgctgggctaccgcctgcagtttggccgtgaggactcgacgcccctggccaccctggagttcccgccctccgaggaccgctacacggcatcaggcgtgcacaagggggccacgtatgtgttccggcttgcggcccggagccggggcggcctgggcgaggaggcagccgaggtcctgagcatcccggaggacacgccccgtggccacccgcagattctggaggcggccggcaacgcctcggccgggaccgtccttctccgctggctgccacccgtgcccgccgagcgcaacggggccatcgtcaaatacacggtggccgtgcgggaggccggtgccctgggccctgcccgagagactgagctgccggcagcggctgagccgggcgcggagaacgcgctcacgctgcagggcctgaagcccgacacggcctatgacctccaagtgcgtttcattgttgaaaataaatataactttgtattcga

SEQ ID NO: 384384 - DNA, 6413 bp, Homo sapiens
  misc_feature (2392)..(2392): n is a, c, g, or t
  misc_feature (2461)..(2461): n is a, c, g, or t
  misc_feature (2655)..(2655): n is a, c, g, or t
  misc_feature (6240)..(6240): n is a, c, g, or t
  misc_feature (6245)..(6245): n is a, c, g, or t
ctgccagcccgggggagctgtgactggggacttcgcagaaggcggaggaggcaacaggaccgcagagggggcagacgttgccccatctgacgctcggctcgaggcctctctgtgagggaccggggggccatccccctccagggcggagatcggaggtcgctgccaagcatggcgcccacctggggccctggcatggtgtctgtggttggtcccatgggcctccttgtggtcctgctcgttggaggctgtgcagcagaagagccccccaggtttatcaaagaacccaaggaccagatcggcgtgtcggggggtgtggcctctttcgtgtgtcaggccacgggtgaccccaagccacgagtgacctggaacaagaagggcaagaaggtcaactctcagcgctttgagacgattgagtttgatgagagtgcaggggcagtgctgaggatccagccgctgaggacaccgcgggatgaaaacgtgtacgagtgtgtggcccagaactcggttggggagatcacagtccatgccaagcttactgtcctccgagaggaccagctgccctctggcttccccaacatcgacatgggcccacagttgaaggtggtggagcggacacggacagccaccatgctctgtgcagccagcggcaaccctgaccctgagatcacctggttcaaggacttcctgcctgtggatcctagtgccagcaatggacgcatcaaacagctgcgatcagaaacctttgaaagcactccgattcgaggagccctgcagattgaaagcagtgaggaaaccgaccagggcaaatatgagtgtgtggccaccaacagcgccggcgtgcgctactcctcacctgccaacctctacgtgcgagtccgccgcgtggccccgcgcttctccatcctgcccatgagccacgagatcatgccagggggcaacgtgaacatcacctgcgtggccgtgggctcgcccatgccatacgtgaagtggatgcagggggccgaggacctgacccccgaggatgacatgcccgtgggtcggaacgtgctggaactcacagatgtcaaggactcggccaactacacctgcgtggccatgtccagcctgggcgtcattgaggcggttgctcagatcacggtgaaatctctccccaaagctcccgggactcccatggtgactgagaacacagccaccagcatcaccatcacgtgggactcgggcaacccagatcctgtgtcctattacgtcatcgaatataaatccaagagccaagacgggccgtatcagattaaagaggacatcaccaccacacgttacagcatcggcggcctgagccccaactcggagtacgagatctgggtgtcggccgtcaactccatcggccaggggccccccagcgagtccgtggtcacccgcacaggcgagcaggccccggccagcgcgccgcggaacgtgcaagcccggatgctcagcgcgaccaccatgattgtgcagtgggaggagccggtggagcccaacggcctgatccgcggctaccgcgtctactacaccatggaaccggagcaccccgtgggcaactggcagaagcacaacgtggacgacagcctgctgaccaccgtgggcagcctgctggaggacgagacctacaccgtgcgggtgctcgccttcacctccgtcggcgacgggcccctctcggaccccatccaggtcaagacgcagcagggagtgccgggccagcccatgaacctgcgggccgaggccaggtcggagaccagcatcacgctgtcctggagccccccgcggcaggagagtatcatcaagtacgagctcctcttccgggaaggcgaccatggccgggaggtgggaaggaccttcgacccgacgacttcctacgtggtggaggacctgaagcccaacacggagtacgccttccgcctggcggcccgctcgccgcagggcctgggcgccttcacccccgtggtgcggcagcgcacgctgcagtccaaaccgtcagccccccctcaagacgttaaatgtgtcagcgtgcgctccacggccattttggtaagttggcgcccgccgccgccggaaacgcacaacggggccctggtgggctacagcgtccgctaccgaccgctgggctcagaggacccggaacccaaggaggtgaacggcatccccccgaccaccactcagatcctgctggaggccttggagaagtggacccagtaccgcatcacgactgtcgctcacacagaggtgggaccagggcccgagagctcgcccgtggtcgtccgcaccgacgaggatgtgcccagcgcgccgccgcggaaggtggaggcggaggcgctcaacgccacggccatccgcgtgctgtggcgctcggccctgngcccggccggcagcacggccagatccgcggctaccaggtccactacgtgcgcatggagggcgccgaggnccgcgggccgccgcgcatcaaggacgtcatgctggccgatgcccagtgggagacggatgacacggccgaatatgagatggtcatcacaaacttgcagcctgagaccgcgtactccatcacggtagccgcctacaccatgaagggcgatggcgctcgcagcaaacccaaggtggttgtgaccaagggagcagtgntgggccgcccaaccctgtcggtgcagcagacccccgagggcagcctgctggcacgctgggagcccccggctggcaccgcggaggaccaggtgctgggctaccgcctgcagtttggccgtgaggactcgacgcccctggccaccctggagttcccgccctccgaggaccgctacacggcatcaggcgtgcacaagggggccacgtatgtgttccggcttgcggcccggagccggggcggcctgggcgaggaggcagccgaggtcctgagcatcccggaggacacgccccgtggccacccgcagattctggaggcggccggcaacgcctcggccgggaccgtccttctccgctggctgccacccgtgcccgccgagcgcaacggggccatcgtcaaatacacggtggccgtgcgggaggccggtgccctgggccctgcccgagagactgagctgccggcagcggctgagccgggcgcggagaacgcgctcacgctgcagggcctgaagcccgacacggcctatgacctccaagtgcgagcccacacgcgccggggccctggccccttcagcccccccgtccgctaccggacgttcctgcgggaccaagtctcgcccaagaacttcaaggtgaaaatgatcatgaagacatcagttctgctcagctgggagttccctgacaactacaactcacccacaccctacaagatccagtacaatgggctcacactggatgtggatggccgtaccaccaagaagctcatcacgcacctcaagccccacaccttctacaactttgtgctgaccaatcgcggcagcagcctgggcggcctccagcagacggtcaccgcctggactgccttcaacctgctcaacggcaagcccagcgtcgcccccaagcctgatgctgacggcttcatcatggtgtatcttcctgacggccagagccccgtgcctgtccagagctatttcattgtgatggtgccactgcgcaagtctcgtggaggccaattcctgaccccgctgggtagcccagaggacatggatctggaagagctcatccaggacatctcacggctacagaggcgcagcctgcggcactcgcgtcagctggaggtgccccggccctatattgcagctcgcttctctgtgctgccacccacgttccatcccggcgaccagaagcagtatggcggcttcgataaccggggcctggagcccggccaccgctatgtcctcttcgtgcttgccgtgcttcagaagagcgagcctacctttgcagccagtcccttctcagaccccttccagctggataacccggacccccagcccatcgtggatggcgaggaggggcttatctgggtgatcgggcctgtgctggccgtggtcttcataatctgcattgtcattgctatcctgctctacaagaacaaacccgacagtaaacgcaaggactcagaaccccgcaccaaatgcctcctgaacaatgccgacctcgcccctcaccaccccaaggaccctgtggaaatgagacgcattaacttccagactccagattcaggcctcaggagccccctcagggagccggggtttcactttgaaagcatgcttagccacccgccaattcccatcgcagacatggcggagcacacggagcggctcaaggccaacgacagcctcaagctctcccaggagtatgagtccatcgaccctggacagcagttcacatgggaacattccaacctggaagtgaacaagccgaagaaccgctatgccaacgtcatcgcctatgaccactcccgtgtcatcctccagcccattgaaggcatcatgggcagtgattacatcaatgccaactacgtggacggctaccggcgtcagaacgcgtacattgccacgcaggggccgctgcctgagacctttggggacttctggcgtatggtgtgggagcagcggtcggcgaccatcgtcatgatgacgcggctggaggagaagtcacggatcaagtgtgatcagtattggcccaacagaggcacggagacctacggcttcatccaggtcacgttgctagataccatcgagctggccacattctgcgtcaggacattctctctgcacaagaatggctccagtgagaaacgcgaggtccgccagttccagtttacggcgtggccggaccatggcgtgcccgaatacccaacgcccttcctggctttcctgcggagagtcaagacctgcaacccaccagatgccggccccatcgtggttcactgcagtgccggtgtgggccgcacaggctgctttatcgtcatcgacgccatgcttgagcggatcaagccagagaagacagtcgatgtctatggccacgtgacgctcatgaggtcccagcgcaactacatggtgcagacggaggaccagtacagcttcatccacgaggccctgctggaggccgtgggctgtggcaacacagaagtgcccgcacgcagcctctatgcctacatccagaagctggcccaggtggagcctggcgaacacgtcactggcatggaactcgagttcaagcggctggctaactccaaggcccacacgtcacgcttcatcagtgccaatctgccttgtaacaagttcaagaaccgcctggtgaacatcatgccctatgagagcacacgggtctgtctgcaacccatccggggtgtggagggctctgactacatcaacgccagcttcattgatggctacaggcagcagaaggcctacatcgcgacacaggggccgctggcggagaccacggaagacttctggcgcatgctgtgggagaacaattcgacgatcgtggtgatgctgaccaagctgcgggagatgggccgggagaagtgtcaccagtactggccggccgagcgctctgcccgctaccagtactttgtggtagatccgatggcagaatacaacatgcctcagtatatcctgcgagagttcaaggtcacagatgcccgggatggccagtcccggactgtccggcagttccagttcacagactggccggaacagggtgtgccaaagtcgggggagggcttcatcgacttcattggccaagtgcataagactaaggagcagtttggccaggacggccccatctctgtccactgcagtgccggcgtgggcaggacgggcgtcttcatcacgcttagcatcgtgctggagcggatgcggtatgaaggcgtggtggacatctttcagacggtgaagatgctacgaacccagcggccggccatggtgcagacagaggatgagtaccagttctgttaccaggcggcactggagtacctcggaagctttgaccactatgcaacctaaagccatggtcccccccaggcccgacaccactggccccggatgcctctgcccctcccgggcggacctcctgaggcctggacccccagtgggcagggcaggaggtggcagcggcagcagctgtgtttctgcaccatttccgaggacgacgcagcccctcgagcccccccaccggccccggccgccccagcgacctccctggcaccggccgccgccttcaaatacttggcacattccnccganttccttccaattccaaaaccagattccggggtggggggtggggggatggtgagcaaataggagtgctccccagaaccagaggagggtggggcacagaccatagacggacccctcgtcctcccccagcggtggtagggggacccggggggctcctccccgctctgcacc

SEQ ID NO: 384385 - DNA, 5082 bp, Homo sapiens
  misc_feature (4909)..(4909): n is a, c, g, or t
  misc_feature (4914)..(4914): n is a, c, g, or t
ctgccagcccgggggagctgtgactggggacttcgcagaaggcggaggaggcaacaggaccgcagagggggcagacgttgccccatctgacgctcggctcgaggcctctctgtgagggaccggggggccatccccctccagggcggagatcggaggtcgctgccaagcatggcgcccacctggggccctggcatggtgtctgtggttggtcccatgggcctccttgtggtcctgctcgttggaggctgtgcagcagaagagccccccaggtttatcaaagaacccaaggaccagatcggcgtgtcggggggtgtggcctctttcgtgtgtcaggccacgggtgaccccaagccacgagtgacctggaacaagaagggcaagaaggtcaactctcagcgctttgagacgattgagtttgatgagagtgcaggggcagtgctgaggatccagccgctgaggacaccgcgggatgaaaacgtgtacgagtgtgtggcccagaactcggttggggagatcacagtccatgccaagcttactgtcctccgagaggaccagctgccctctggcttccccaacatcgacatgggcccacagttgaaggtggtggagcggacacggacagccaccatgctctgtgcagccagcggcaaccctgaccctgagatcacctggttcaaggacttcctgcctgtggatcctagtgccagcaatggacgcatcaaacagctgcgatcaggagccctgcagattgaaagcagtgaggaaaccgaccagggcaaatatgagtgtgtggccaccaacagcgccggcgtgcgctactcctcacctgccaacctctacgtgcgagtccgccgcgtggccccgcgcttctccatcctgcccatgagccacgagatcatgccagggggcaacgtgaacatcacctgcgtggccgtgggctcgcccatgccatacgtgaagtggatgcagggggccgaggacctgacccccgaggatgacatgcccgtgggtcggaacgtgctggaactcacagatgtcaaggactcggccaactacacctgcgtggccatgtccagcctgggcgtcattgaggcggttgctcagatcacggtgaaatctctccccaaagctcccgggactcccatggtgactgagaacacagccaccagcatcaccatcacgtgggactcgggcaacccagatcctgtgtcctattacgtcatcgaatataaatccaagagccaagacgggccgtatcagattaaagaggacatcaccaccacacgttacagcatcggcggcctgagccccaactcggagtacgagatctgggtgtcggccgtcaactccatcggccaggggccccccagcgagtccgtggtcacccgcacaggcgagcaggccccggccagcgcgccgcggaacgtgcaagcccggatgctcagcgcgaccaccatgattgtgcagtgggaggagccggtggagcccaacggcctgatccgcggctaccgcgtctactacaccatggaaccggagcaccccgtgggcaactggcagaagcacaacgtggacgacagcctgctgaccaccgtgggcagcctgctggaggacgagacctacaccgtgcgggtgctcgccttcacctccgtcggcgacgggcccctctcggaccccatccaggtcaagacgcagcagggagtgccgggccagcccatgaacctgcgggccgaggccaggtcggagaccagcatcacgctgtcctggagccccccgcggcaggagagtatcatcaagtacgagctcctcttccgggaaggcgaccatggccgggaggtgggaaggaccttcgacccgacgacttcctacgtggtggaggacctgaagcccaacacggagtacgccttccgcctggcggcccgctcgccgcagggcctgggcgccttcacccccgtggtgcggcagcgcacgctgcagtccatctcgcccaagaacttcaaggtgaaaatgatcatgaagacatcagttctgctcagctgggagttccctgacaactacaactcacccacaccctacaagatccagtacaatgggctcacactggatgtggatggccgtaccaccaagaagctcatcacgcacctcaagccccacaccttctacaactttgtgctgaccaatcgcggcagcagcctgggcggcctccagcagacggtcaccgcctggactgccttcaacctgctcaacggcaagcccagcgtcgcccccaagcctgatgctgacggcttcatcatggtgtatcttcctgacggccagagccccgtgcctgtccagagctatttcattgtgatggtgccactgcgcaagtctcgtggaggccaattcctgaccccgctgggtagcccagaggacatggatctggaagagctcatccaggacatctcacggctacagaggcgcagcctgcggcactcgcgtcagctggaggtgccccggccctatattgcagctcgcttctctgtgctgccacccacgttccatcccggcgaccagaagcagtatggcggcttcgataaccggggcctggagcccggccaccgctatgtcctcttcgtgcttgccgtgcttcagaagagcgagcctacctttgcagccagtcccttctcagaccccttccagctggataacccggacccccagcccatcgtggatggcgaggaggggcttatctgggtgatcgggcctgtgctggccgtggtcttcataatctgcattgtcattgctatcctgctctacaagaacaaacccgacagtaaacgcaaggactcagaaccccgcaccaaatgcctcctgaacaatgccgacctcgcccctcaccaccccaaggaccctgtggaaatgagacgcattaacttccagactccaggcatgcttagccacccgccaattcccatcgcagacatggcggagcacacggagcggctcaaggccaacgacagcctcaagctctcccaggagtatgagtccatcgaccctggacagcagttcacatgggaacattccaacctggaagtgaacaagccgaagaaccgctatgccaacgtcatcgcctatgaccactcccgtgtcatcctccagcccattgaaggcatcatgggcagtgattacatcaatgccaactacgtggacggctaccggcgtcagaacgcgtacattgccacgcaggggccgctgcctgagacctttggggacttctggcgtatggtgtgggagcagcggtcggcgaccatcgtcatgatgacgcggctggaggagaagtcacggatcaagtgtgatcagtattggcccaacagaggcacggagacctacggcttcatccaggtcacgttgctagataccatcgagctggccacattctgcgtcaggacattctctctgcacaagaatggctccagtgagaaacgcgaggtccgccagttccagtttacggcgtggccggaccatggcgtgcccgaatacccaacgcccttcctggctttcctgcggagagtcaagacctgcaacccaccagatgccggccccatcgtggttcactgcagtgccggtgtgggccgcacaggctgctttatcgtcatcgacgccatgcttgagcggatcaagccagagaagacagtcgatgtctatggccacgtgacgctcatgaggtcccagcgcaactacatggtgcagacggaggaccagtacagcttcatccacgaggccctgctggaggccgtgggctgtggcaacacagaagtgcccgcacgcagcctctatgcctacatccagaagctggcccaggtggagcctggcgaacacgtcactggcatggaactcgagttcaagcggctggctaactccaaggcccacacgtcacgcttcatcagtgccaatctgccttgtaacaagttcaagaaccgcctggtgaacatcatgccctatgagagcacacgggtctgtctgcaacccatccggggtgtggagggctctgactacatcaacgccagcttcattgatggctacaggcagcagaaggcctacatcgcgacacaggggccgctggcggagaccacggaagacttctggcgcatgctgtgggagaacaattcgacgatcgtggtgatgctgaccaagctgcgggagatgggccgggagaagtgtcaccagtactggccggccgagcgctctgcccgctaccagtactttgtggtagatccgatggcagaatacaacatgcctcagtatatcctgcgagagttcaaggtcacagatgcccgggatggccagtcccggactgtccggcagttccagttcacagactggccggaacagggtgtgccaaagtcgggggagggcttcatcgacttcattggccaagtgcataagactaaggagcagtttggccaggacggccccatctctgtccactgcagtgccggcgtgggcaggacgggcgtcttcatcacgcttagcatcgtgctggagcggatgcggtatgaaggcgtggtggacatctttcagacggtgaagatgctacgaacccagcggccggccatggtgcagacagaggatgagtaccagttctgttaccaggcggcactggagtacctcggaagctttgaccactatgcaacctaaagccatggtcccccccaggcccgacaccactggccccggatgcctctgcccctcccgggcggacctcctgaggcctggacccccagtgggcagggcaggaggtggcagcggcagcagctgtgtttctgcaccatttccgaggacgacgcagcccctcgagcccccccaccggccccggccgccccagcgacctccctggcaccggccgccgccttcaaatacttggcacattccnccganttccttccaattccaaaaccagattccggggtggggggtggggggatggtgagcaaataggagtgctccccagaaccagaggagggtggggcacagaccatagacggacccctcgtcctcccccagcggtggtagggggacccggggggctcctccccgctctgcacc

SEQ ID NO: 384386 - DNA, 2991 bp, Homo sapiens
  misc_feature (2818)..(2818): n is a, c, g, or t
  misc_feature (2823)..(2823): n is a, c, g, or t
agggaggagttgtctcagagaatcatcactaaaggtctctgttgtacacatggggaaaccgaagttcagagaggttaagccacttgatcaaggtcacacagcatgggaatggcagagctagggctcaaagcaggccagtggcttggcttctcctcttaacccctatcttcaactcagcaagatttggggtagaggctgcctgtgtccagttcaatgaggatagcaattgtagtggccccatggggcacatcccagggctgagataagcctccttgtggtgtcgataggcagggggacaaacaggaaatatgagcaccattttccagaggagaccaaagctcacagaggttaaggaaggcactgagagtcacagaacaagcccttgatggccggcacaccctcacctttcttctttttttcccccttctcacctgtgtctgctttcgggaacagcaaacccgacaggtaagaaccagccctcccccgtggaggcttcaggcaagaggaagaggacagggaatgggctgatagtgtgcccacaggagaggggatgcccggctgcccccacagcttgtacacgtagctgtacttggtcctggaaaccctagtcatacgggtccatggtccttttcttaccatgcattcctggggcctgaattgtgttcacacatgaacatgtgccactactaactggactgttccgcttgcttctcctaaagtaaacgcaaggactcagaaccccgcaccaaatgcctcctgaacaatgccgacctcgcccctcaccaccccaaggaccctgtggaaatgagacgcattaacttccagactccaggcatgcttagccacccgccaattcccatcgcagacatggcggagcacacggagcggctcaaggccaacgacagcctcaagctctcccaggagtatgagtccatcgaccctggacagcagttcacatgggaacattccaacctggaagtgaacaagccgaagaaccgctatgccaacgtcatcgcctatgaccactcccgtgtcatcctccagcccattgaaggcatcatgggcagtgattacatcaatgccaactacgtggacggctaccggcgtcagaacgcgtacattgccacgcaggggccgctgcctgagacctttggggacttctggcgtatggtgtgggagcagcggtcggcgaccatcgtcatgatgacgcggctggaggagaagtcacggatcaagtgtgatcagtattggcccaacagaggcacggagacctacggcttcatccaggtcacgttgctagataccatcgagctggccacattctgcgtcaggacattctctctgcacaagaatggctccagtgagaaacgcgaggtccgccagttccagtttacggcgtggccggaccatggcgtgcccgaatacccaacgcccttcctggctttcctgcggagagtcaagacctgcaacccaccagatgccggccccatcgtggttcactgcagtgccggtgtgggccgcacaggctgctttatcgtcatcgacgccatgcttgagcggatcaagccagagaagacagtcgatgtctatggccacgtgacgctcatgaggtcccagcgcaactacatggtgcagacggaggaccagtacagcttcatccacgaggccctgctggaggccgtgggctgtggcaacacagaagtgcccgcacgcagcctctatgcctacatccagaagctggcccaggtggagcctggcgaacacgtcactggcatggaactcgagttcaagcggctggctaactccaaggcccacacgtcacgcttcatcagtgccaatctgccttgtaacaagttcaagaaccgcctggtgaacatcatgccctatgagagcacacgggtctgtctgcaacccatccggggtgtggagggctctgactacatcaacgccagcttcattgatggctacaggcagcagaaggcctacatcgcgacacaggggccgctggcggagaccacggaagacttctggcgcatgctgtgggagaacaattcgacgatcgtggtgatgctgaccaagctgcgggagatgggccgggagaagtgtcaccagtactggccggccgagcgctctgcccgctaccagtactttgtggtagatccgatggcagaatacaacatgcctcagtatatcctgcgagagttcaaggtcacagatgcccgggatggccagtcccggactgtccggcagttccagttcacagactggccggaacagggtgtgccaaagtcgggggagggcttcatcgacttcattggccaagtgcataagactaaggagcagtttggccaggacggccccatctctgtccactgcagtgccggcgtgggcaggacgggcgtcttcatcacgcttagcatcgtgctggagcggatgcggtatgaaggcgtggtggacatctttcagacggtgaagatgctacgaacccagcggccggccatggtgcagacagaggatgagtaccagttctgttaccaggcggcactggagtacctcggaagctttgaccactatgcaacctaaagccatggtcccccccaggcccgacaccactggccccggatgcctctgcccctcccgggcggacctcctgaggcctggacccccagtgggcagggcaggaggtggcagcggcagcagctgtgtttctgcaccatttccgaggacgacgcagcccctcgagcccccccaccggccccggccgccccagcgacctccctggcaccggccgccgccttcaaatacttggcacattccnccganttccttccaattccaaaaccagattccggggtggggggtggggggatggtgagcaaataggagtgctccccagaaccagaggagggtggggcacagaccatagacggacccctcgtcctcccccagcggtggtagggggacccggggggctcctccccgctctgcacc

SEQ ID NO: 384387 - DNA, 3727 bp, Homo sapiens
  misc_feature (2365)..(2365): n is a, c, g, or t
  misc_feature (2434)..(2434): n is a, c, g, or t
  misc_feature (2628)..(2628): n is a, c, g, or t
ctgccagcccgggggagctgtgactggggacttcgcagaaggcggaggaggcaacaggaccgcagagggggcagacgttgccccatctgacgctcggctcgaggcctctctgtgagggaccggggggccatccccctccagggcggagatcggaggtcgctgccaagcatggcgcccacctggggccctggcatggtgtctgtggttggtcccatgggcctccttgtggtcctgctcgttggaggctgtgcagcagaagagccccccaggtttatcaaagaacccaaggaccagatcggcgtgtcggggggtgtggcctctttcgtgtgtcaggccacgggtgaccccaagccacgagtgacctggaacaagaagggcaagaaggtcaactctcagcgctttgagacgattgagtttgatgagagtgcaggggcagtgctgaggatccagccgctgaggacaccgcgggatgaaaacgtgtacgagtgtgtggcccagaactcggttggggagatcacagtccatgccaagcttactgtcctccgagaggaccagctgccctctggcttccccaacatcgacatgggcccacagttgaaggtggtggagcggacacggacagccaccatgctctgtgcagccagcggcaaccctgaccctgagatcacctggttcaaggacttcctgcctgtggatcctagtgccagcaatggacgcatcaaacagctgcgatcaggagccctgcagattgaaagcagtgaggaaaccgaccagggcaaatatgagtgtgtggccaccaacagcgccggcgtgcgctactcctcacctgccaacctctacgtgcgagtccgccgcgtggccccgcgcttctccatcctgcccatgagccacgagatcatgccagggggcaacgtgaacatcacctgcgtggccgtgggctcgcccatgccatacgtgaagtggatgcagggggccgaggacctgacccccgaggatgacatgcccgtgggtcggaacgtgctggaactcacagatgtcaaggactcggccaactacacctgcgtggccatgtccagcctgggcgtcattgaggcggttgctcagatcacggtgaaatctctccccaaagctcccgggactcccatggtgactgagaacacagccaccagcatcaccatcacgtgggactcgggcaacccagatcctgtgtcctattacgtcatcgaatataaatccaagagccaagacgggccgtatcagattaaagaggacatcaccaccacacgttacagcatcggcggcctgagccccaactcggagtacgagatctgggtgtcggccgtcaactccatcggccaggggccccccagcgagtccgtggtcacccgcacaggcgagcaggccccggccagcgcgccgcggaacgtgcaagcccggatgctcagcgcgaccaccatgattgtgcagtgggaggagccggtggagcccaacggcctgatccgcggctaccgcgtctactacaccatggaaccggagcaccccgtgggcaactggcagaagcacaacgtggacgacagcctgctgaccaccgtgggcagcctgctggaggacgagacctacaccgtgcgggtgctcgccttcacctccgtcggcgacgggcccctctcggaccccatccaggtcaagacgcagcagggagtgccgggccagcccatgaacctgcgggccgaggccaggtcggagaccagcatcacgctgtcctggagccccccgcggcaggagagtatcatcaagtacgagctcctcttccgggaaggcgaccatggccgggaggtgggaaggaccttcgacccgacgacttcctacgtggtggaggacctgaagcccaacacggagtacgccttccgcctggcggcccgctcgccgcagggcctgggcgccttcacccccgtggtgcggcagcgcacgctgcagtccaaaccgtcagccccccctcaagacgttaaatgtgtcagcgtgcgctccacggccattttggtaagttggcgcccgccgccgccggaaacgcacaacggggccctggtgggctacagcgtccgctaccgaccgctgggctcagaggacccggaacccaaggaggtgaacggcatccccccgaccaccactcagatcctgctggaggccttggagaagtggacccagtaccgcatcacgactgtcgctcacacagaggtgggaccagggcccgagagctcgcccgtggtcgtccgcaccgacgaggatgtgcccagcgcgccgccgcggaaggtggaggcggaggcgctcaacgccacggccatccgcgtgctgtggcgctcggccctgngcccggccggcagcacggccagatccgcggctaccaggtccactacgtgcgcatggagggcgccgaggnccgcgggccgccgcgcatcaaggacgtcatgctggccgatgcccagtgggagacggatgacacggccgaatatgagatggtcatcacaaacttgcagcctgagaccgcgtactccatcacggtagccgcctacaccatgaagggcgatggcgctcgcagcaaacccaaggtggttgtgaccaagggagcagtgntgggccgcccaaccctgtcggtgcagcagacccccgagggcagcctgctggcacgctgggagcccccggctggcaccgcggaggaccaggtgctgggctaccgcctgcagtttggccgtgaggactcgacgcccctggccaccctggagttcccgccctccgaggaccgctacacggcatcaggcgtgcacaagggggccacgtatgtgttccggcttgcggcccggagccggggcggcctgggcgaggaggcagccgaggtcctgagcatcccggaggacacgccccgtggccacccgcagattctggaggcggccggcaacgcctcggccgggaccgtccttctccgctggctgccacccgtgcccgccgagcgcaacggggccatcgtcaaatacacggtggccgtgcgggaggccggtgccctgggccctgcccgagagactgagctgccggcagcggctgagccgggcgcggagaacgcgctcacgctgcagggcctgaagcccgacacggcctatgacctccaagtgcgagcccacacgcgccggggccctggccccttcagcccccccgtccgctaccggacgttcctgcgggaccaagtctcgcccaagaacttcaaggtgaaaatgatcatgaagacatcagttctgctcagctgggagttccctgacaactacaactcacccacaccctacaagatccagtacaatgggctcacactggatgtggatggccgtaccaccaagaagctcatcacgcacctcaagccccacaccttctacaactttgtgctgaccaatcgcggcagcagcctgggcggcctccagcagacggtcaccgcctggactgccttcaacctgctcaacggcaagcccagcgtcgcccccaagcctgatgctgacggcttcatcatggtgtatcttcctgacggccagagccccgtgcctgtccagagctatttcattgtgatggtgccactgcgcaagtctcgtggaggccaattcctgaccccgctgggtagcccagaggacatggatctggaagagctcatccaggacatctcgtcgacgcggccgcgaatttagtagtagta

SEQ ID NO: 384388 - DNA, 506 bp, Homo sapiens
cactctcaaatgtcagatgtgcaggcaaattctcagagttaaattacttgacaggaacttaagcatccgtatttgttgccaggtagtcttctgtgtggttaaagtacagaatgtactcctacaaaagcagagaggcggcccgttgccacacaaaagtgttttttcagatggcttatggttagaaccaatatatttttctagcatacagtttgagtgataatagctcacattccccgatcacatgccttgtgccaagtaccattctaaatgccttgcatcttgtaactcattaaacctttacagtaacctcatgcaatgtacactcttgttgttcccattttgcaaataagaaaactgatgggcaatattaccttgcccaagtttatacagctggtaagtggcagagtcaggatttgaacccaggctgatggtatagtctgcgtgctcagccacaatcatgaacttaccctcaaactgcctgtgtttgcataatcatgtggatacta

SEQ ID NO: 384389 - DNA, 463 bp, Homo sapiens
ttcgagcctttgacaattttctctgaaatacctcaaaatatttaatgtatagtttatgtgattaaaaaaaaatccttagctagtttttggaatacgtgacttgaagctttataccgttaaattataattttgcagacgatggcatgtcgtttctttgacgagttccgtgggagacgcattgaatgtcagggctggagaccagagggaaagttagagggagcgtgatcgcgagagagactgcggcagaaaggaccagtggcgtttacagatttcttatttaaatgagtcctttaggaaagaaaggaagagagagagagaaggcagaggtatacctttctgttctctggcttgttctgtttcttgttttctggagtcatgtcttataagagtatttattattctctgtgttctgtgttcaaatgtaatttaagaaaaaaaaaggaagaaaaatgcaaaaaaaaaa

SEQ ID NO: 384390 - DNA, 1119 bp, Homo sapiens
  misc_feature (1)..(3): n is a, c, g, or t
nnntgttttattctattaacagttcctaattagaatgcaaattacaagtcacataaagctggttgagaatggaagtactgagtactaatctcctaacttgcttatctttggatgtagacgaacaccaatgaactgagcaaattgtatgtgctctgttttttcttttccaaaggaattggttatctgtcttgtatttggggatatgtatgtatacttactatcaaatgaagaagataataaaataattcattgagtttcatgttaagaaagagtgtgagaaaagaagagagcagtaccataaatgtcagattaaaagaattaggtagctacctctccaggagaaaaaaatatggctaaatgctatctctacagcagaaacaaaaattaatttttgtttcagtgatgtttttgttttagatacttttatagcatgtgttgtagaatcacaaaattgagccctcgatatatataggaagtgtattcggtctagaataattaacttctccaaagtcacttagataataagggagctacaaattataacccagaattcaagattcctagaatagtattgtttcttccattttaaataaagttctgcagggacttaatgattctgcaaatgtacctcagaagctgtctttatttgttttaattattggagttccacgtttgaaaaaagaaaggttgaaaactttttgtactatatggatagtctatttttagacatgatttttgttttacgtactttcaggtcccaatcccaccttagagaaccatatctcttgttttattttagtgaggaaagaaatatacttttgctaaaatttactttatttcatgcgtttcttgaacatagtaaatgaggaattgcttttttgtgtgtttttgtagggtctcgtatagtgatatactagatcttagcaaggtaccaaaaatagctgcctcctgctgaaaagctttgtgaccacaaacaaagttgtgaactttgtcagacacagtgccagctacttggaaggctgaggcaggaagatcacttgagcccaggagttcaaggctacagtgaactatgatattgccaccatactccagcctgggcaacagagcatgactcatctc

SEQ ID NO: 384391 - DNA, 337 bp, Homo sapiens
caccatgccctgcccaaactgtagattcaggagcgaaattagtcattgatgatattttaggccattaagttttggagttacaaagccatagtaacctgaacatctgctaactgggtccaggactgttactattgctccacctcctcctcttcctcctctccgccgtgtgcttgagttgtgatgtgggttgtggtgtggtggtttagtgggtgggcaccgagccacactacctgggctcaaatcctgactctcacatatcaattgtatgactctaaggaagcaacgtagtctctctgtgcctcagttaccgtgtctgtaaaatgggggtgaaagtagt

SEQ ID NO: 384392 - DNA, 573 bp, Homo sapiens
tgggatcatgcttaattgtgttacaatataaagaagtcttcctccatggtatttatgggtatgaaaaaaaaagaagtctttctttgccagatatggattttgtacttccctcccttcaatttcatgtatactgttttttgtttttatttttctgattagttcccttggtatctgccctgccccatccccattcattttggtattcacatacccaataccatagtagcactttatatttactttgtttacgcctaattacagcctgcatattctagataaaacaaacagactcagccaggcacggtggctcatgcctgtaatcccagcactttgggagcccgaggtgggcggatcacgaggtcaggagatggagaccatcctggctaacaaggtgaaacaccatctctactaaaaatacaaaaaaattagccaggcgtggtggcgggcgcctggagtcccagctactcgggaggctgaggcaggagaatggcgtgaaccagggaggcagagcttgcatgagccaagatcgtgcctctctccagcctgggtgacagagtgagactccgtctcaaa

SEQ ID NO: 384393 - DNA, 404 bp, Homo sapiens
ctctacagagtggctggcagaatggtcctaagaaggccctgtccctcttctttacctttttaggactgacattcttttttagttacttctcacctcttctaggatctttgaggtagatgagaaggaaggcttcctcctcctgtcctaatcaggcatggcctcaaccctgtccctgtgtagcattccagatagcttaaagctgggtgcacctttgaaatgtcattttgtctttacacctttaggtatttattaaaactcaccatcagttccctgtgctatcttttctctaaaatagctaaggaaaaagtagtaagcagtggcataaaccagagttgtcactgtttctgaaacctgcatggtttcagaagagtcacaaaagcacaggtggcacctgggggcctgcc

SEQ ID NO: 384394 - DNA, 861 bp, Homo sapiens
gaaaagcaaggccataaagcccaaataaatagaatcaatgcagagaagactcaagctgcagctgatcgaaaagcaaggccataaagcccaagtaaatagaatcgatccagagaagactcgagctgcagctgatcgaaaagcaaggccataaagcccaagtaaatagaatcgatccagagaagagctctagatttgctaatttttccaactccacattcagctactggtgttattgttcaagagcaagatcttgtagaatggctttttcttccacatactaattcatggactctaactccttatttggatcaaattgctactatgataggaaatgggagaacttggattgttaaattacatggatatgatcctgaaaaaattgtccctctcacgaaggcacaaatacagcaagattttttaaatagtcttacttggcaaacccatttagctgactttgtgggtattcttgatattttcctaaaatgaaactgtttcaatttttgaaattagctaattggattctccctaaaataactaaatttaaaccaaatgaagatgcagagaatgtttttacagatgggtctagtaatggtaaagcttcttactctggctcgaaaggtaaagttttctagacaccctatgcttcagctcaaaaagtggagcttgtagctgtaattgaggtattgactgcttttaatatgcttattaatgtgatttctggttcttcatacatggttcattccacacaattaattgaaaatgctgagttacgatttcatacagatgaacaactgatgactttatttatgcaattgcaaacagcagttaggagtagaatgcaccctttttacatcactcaca

SEQ ID NO: 384395 - DNA, 231 bp, Homo sapiens
cattctagtcaatatacccccaaatcttattatatcaacaggtgatcgatataaaactatggacgtattttacattatttaaaaaataagtctttgggctgggcatggtggctcacgcctgtaatcctagcactttgggaggccaaggcgggaggatcacaaggtcaggagatcaagaccatcctggctaacacagtaaaaccccgtctctactaaaaatacaaaaaaaaa

SEQ ID NO: 384396 - DNA, 443 bp, Homo sapiens
gctgggatgacaggcgtgagccccacctgtcattaacctttcttaattaaaactggcccttgaatctttgatgaaggctgctaccatgggctaaaatgataactaaaatccacagaggacccaaaacccaaatcctgcccttttaggagacaagggcagtgagaaaacacttcatcagcaactcacagttaagcatctccaaactttccccaattttttccatctgagtaatcaggagtataattgaacacaatgaagtgttgaaagtttttcaatgtaatatagaagattaactatacaattatcccttacagagctaaaataacactgctcttgcatcacaatgtcttacataagattctttgaacttccttgaggctctgtaatagtttagtaccctatcattattgtcttgcagtccgcccatttttcagatgggaaga

SEQ ID NO: 384397 - DNA, 487 bp, Homo sapiens
caattccattccagctacctctctctggtcacagagaggtagtgctggatatgtgtcttacaaatttgcatgcttttctagaaaagatgatgggatccactaaaaactcagtggtgagatgattcccttagcaagattgctgaagttaggtttagacgtgggagggtgggtatgtgagcaatggtgccaatagcggctctttatttgccttgtcctcattactgccatcaggaaggtgctactggcctcgagccaggtgttcataatctggccttgggttaaccagacaaatagaacttcttttcctagactgttggctttgtggaggttggcagcctctatcacaggataaaatttccaaatccatttacccagtatattcactacattttttcctatcctcccatcataaaagctgttacgctggaatggaatggcaattccattccagcgtataggtttggtcctagcctttctattagctctt

SEQ ID NO: 384398 - DNA, 485 bp, Homo sapiens
ggtgccctgttatctggtaaaagagccacttatgacctcaggtgctacttaacctggggggcaattgtttcttaggcctagcagatgatgggatccactaaaaactcagtggtgagatgattcccttagcaagattgctgaagttaggtttagacgtgggagggtgggtatgtgagcaatggtgccaatagcggctctttatttgccttgtcctcattactgccatcaggaaggtgctactggcctcgagccaggtgttcataatctggccttgggttaaccagacaaatagaacttcttttcctagactgttggctttgtggaggttggcagcctctatcacaggataaaatttccaaatccatttacccagtatattcactacattttttcctatcctcccatcataaaagctgttacgctggaatggaatggcaattccattccagcgtataggtttggtcctagcctttctattagctctt

SEQ ID NO: 384399 - DNA, 386 bp, Homo sapiens
gggcacccaagtgaaggatcctgctgtgtactcaggggctggtgttgctgtcagggatgttagcctagagcctcagcttcctgtaaaatgaggatgatgatatccaacagcttatgggaccttgaagtcccagcatttttcatctttcaatctcacctccttttcctgataatagagaggcaacaagaactcagggcatgcaatggggctcaacttctactctctgccacaatttcatcatgattcccccaaagagcagagccccaggagccagcagggggcagggtgggcatttctggactggattcattcataataagatcaaaatttccaatccgtatgtctcgggtgccatctgctgatagatcggaccagatggtataatt

SEQ ID NO: 384400 - DNA, 388 bp, Homo sapiens
ggtcccaggaggcaacaccgactttgctgagtcccaagcctatcatgggctttcccacccagcctggggcaaggagtggaatacgcttagcccaggcaatggatggaagcaaactcccccaaggaaggtggtattagtctccctggccattcccagttggagttgatttgttcctttaagaaggggaaggattctcgagcactggagttttcaggtcccctcccagtcttgaaagtttgcaaatgactctgttttgcgggagggctgaggctgaagtcctgtccatctctatcctctgactctgaggactgaagactgggctttaggatctctgggtcttgaggaggcttggcacctgcagaatccactccaagactgcctgaagcct

SEQ ID NO: 384401 - DNA, 329 bp, Homo sapiens
gttaagtggagtcactatgtgttcctcttaactggaagatttctttcattcagtgtgaatactgaaacatttattttaccttttttttttttttctccccagcagagacagggtcttgctttgttgcccaggctggtctcaggcttctggccacaagtgatcttcctgcctcagcctcccaaagtgctgggattacaggcatgagcgacttagcctggtcaaacatttctttagttgtttgaaagtcatctgactatatctgtgaaattatgtttatttagaaaacatagcctttaattacaaattctgttattgtgtaaatgatgtgc

SEQ ID NO: 384402 - DNA, 3197 bp, Homo sapiens
taagtaattaagggtagttaaattatttaaagtatacaaagtccaaacagccaggggtaaggtctccaagaggccttcccagggtaagggagtgcggagaggcgccggtcgccacccgcggtgcccatggagcgggtgaagatgatcaacgtgcagcgtctgctggaggctgccgagtttttggagcgccgggagcgagagtgtgaacatggctacgcctcttcattcccgtccatgccgagcccccgactgcagcattcaaagcccccacggaggttgagccgggcacagaaacacagcagcgggagcagcaacaccagcactgccaacagatctacacacaatgagctggaaaagaatcgacgagctcatctgcgcctttgtttagaacgcttaaaagttctgattccactaggaccagactgcacccggcacacaacacttggtttgctcaacaaagccaaagcacacatcaagaaacttgaagaagctgaaagaaaaagccagcaccagctcgagaatttggaacgagaacagagatttttaaagtggcgactggaacagctgcagggtcctcaggagatggaacgaatacgaatggacagcattggatcaactatttcttcagatcgttctgattcagagcgagaggagattgaagtggatgttgaaagcacagagttctcccatggagaagtggacaatataagtaccaccagcatcagtgacattgatgaccacagcagcctgccgagtattgggagtgacgagggttactccagtgccagtgtcaaactttcattcacttcatagaacccagcatgacataacagtgcagggcaaaatattcactgggccaattcaatacaaacaatctcttaaattgggttcatgatgcagtctcctctttaaaacaaaacaaaacaaaacaaaactatacttgaacaaaagggtcagaggacctgtatttaagcaaatacttagcaaaaagtggggcagagcctcccaaggagaacaaatattcagaatattcatattggaaaaatcacaatttttaatggcagcagaaaacttgtgtgaaattttcttgatttgagttgattgagaagaggacattggagatgccatcctctttctcttttctagtttgctcatactacattgagtagacacatttaaggatggggttatgaacccttcctgagctttatggtcctaaaagcaaaataaaaactattcgaatgaaaagacaagaaaatcaggtattaatcttggatagctaataatgagctattaaaactcagcctgggacagtttatcatgaagcctgtggatgatcaatcctttattattatttttttttttttgaaaaaagctcatttcatgctctgcaaaaggagagactcccatgaagccttttgaaagggatcatcatgcagctcaactttctgttggattccatgctaagcaagctaaccttatcctgcattgttagcactaggcacccagctgccacctctccatcctgctgcccttaggccacatgggagcagtccatgcatgacagcctctatcctacaaggcctatgagtatggattgggggggccaaaaggaaaaagctccatgtgcctctttgtctgcgtgggtcagaagagttgtgcacgcagattagcaggccaaggtctgagccacagcagcatttttatttcagattttgataactgtttatatgtgttgaaaaccaaaatgacatctttttaaagcttatccataaaaaaaaatagatgtcttttatagtggaaaaacacatggggaaaaaaatcatctattttgatgcagcatttgataatgataaaacacctcacacctcactctttatagtgcacaaaatgaatgaggtctgggctaggtagaaaaagggtcaatgctatttttgtttttagaatcattaccttttaccagcttttaaccatctgatatctatagtagacacactatcatagttaacatagttaagttcagcacttgtctcattttaatgtaaagatttgcttccattttcctacaggcagtctctctcttcctcacagtcccactgtgcaggtgctattgttactcttacgaatattttcagtaatgttattttcttctaagtgaaatttctagcctgcactttgatgtcatgtgttccctttgtctttcaaactccaaggttcccctgtggccctctcccttaccctgggaaggcctcttggagaccttacccctggctgtttggactttgtatactttaaataatttaactacccttaattacttaaaaaaaaaaaaaaaagctttatgattttcataacttattgctgattttaatggattgttaatttcagtcctgtagttttattttatgtttagatagggctgggcaaggaaaaagaaaataaagacaaccatatttagcagtgcagttgagttgtgtgttaatgttagactatccctttgtgagtgacactttaacagcattcactgcttctatatatagtgtaccatcttggtcatacattacgcctcaacatatacttgtgctcttcctttgcctccagaagaagtttttccttgattgtgctatgtttcagtggaagaaattctttgaagtagatgtgagtgaaaaactgcatgcctttagaagcccagtatcagaacttgctacgtttcaggtgctagggacttaatgaaaaacaggacaaaacaattcctttttgtggcccaggtaaattatttctggtttcacttataattactaatggctgagtcaagatgttgtctctgtgtttgcttactcttgatcaagtgtgagacagtttgaagactgtgctaccatacaaagtgaatgaagccagtgactaagcttctgtttgttttgttattctcatggccttcgcttgcattatttgggccttcattcagatgaacttgaggtgccattttgttgcatatgtacaggattatgggctggaaagcatttgttataaacctatagtgcacattttaactgccccctaaattacccttccctgggtttgttttccttggggtggtgtagattgtatgagtaagaagtattaattttttaaaagacaaatcaactttgaagacacaaaagttaattggaagaaataaaaactgtgaacgaagaata

SEQ ID NO: 384403 - DNA, 3053 bp, Homo sapiens
catcgcccgaggcgtccgccctgcaaatctgccagcccccgagaggggtttggaaccttagcacccaagtctaagtcaacttcatagtgtgaacatggctacgcctcttcattcccgtccatgccgagcccccgactgcagcattcaaagcccccacggaggttgagccgggcacagaaacacagcagcgggagcagcaacaccagcactgccaacagacgagctcatctgcgcctttgtttagaacgcttaaaagttctgattccactaggaccagactgcacccggcacacaacacttggtttgctcaacaaagccaaagcacacatcaagaaacttgaagaagctgaaagaaaaagccagcaccagctcgagaatttggaacgagaacagagatttttaaagtggcgactggaacagctgcagggtcctcaggagatggaacgaatacgaatggacagcattggatcaactatttcttcagatcgttctgattcagagcgagaggagattgaagtggatgttgaaagcacagagttctcccatggagaagtggacaatataagtaccaccagcatcagtgacattgatgaccacagcagcctgccgagtattgggagtgacgagggttactccagtgccagtgtcaaactttcattcacttcatagaacccagcatgacataacagtgcagggcaaaatattcactgggccaattcaatacaaacaatctcttaaattgggttcatgatgcagtctcctctttaaaacaaaacaaaacaaaacaaaactatacttgaacaaaagggtcagaggacctgtatttaagcaaatacttagcaaaaagtggggcagagcctcccaaggagaacaaatattcagaatattcatattggaaaaatcacaatttttaatggcagcagaaaacttgtgtgaaattttcttgatttgagttgattgagaagaggacattggagatgccatcctctttctcttttctagtttgctcatactacattgagtagacacatttaaggatggggttatgaacccttcctgagctttatggtcctaaaagcaaaataaaaactattcgaatgaaaagacaagaaaatcaggtattaatcttggatagctaataatgagctattaaaactcagcctgggacagtttatcatgaagcctgtggatgatcaatcctttattattatttttttttttttgaaaaaagctcatttcatgctctgcaaaaggagagactcccatgaagccttttgaaagggatcatcatgcagctcaactttctgttggattccatgctaagcaagctaaccttatcctgcattgttagcactaggcacccagctgccacctctccatcctgctgcccttaggccacatgggagcagtccatgcatgacagcctctatcctacaaggcctatgagtatggattgggggggccaaaaggaaaaagctccatgtgcctctttgtctgcgtgggtcagaagagttgtgcacgcagattagcaggccaaggtctgagccacagcagcatttttatttcagattttgataactgtttatatgtgttgaaaaccaaaatgacatctttttaaagcttatccataaaaaaaaatagatgtcttttatagtggaaaaacacatggggaaaaaaatcatctattttgatgcagcatttgataatgataaaacacctcacacctcactctttatagtgcacaaaatgaatgaggtctgggctaggtagaaaaagggtcaatgctatttttgtttttagaatcattaccttttaccagcttttaaccatctgatatctatagtagacacactatcatagttaacatagttaagttcagcacttgtctcattttaatgtaaagatttgcttccattttcctacaggcagtctctctcttcctcacagtcccactgtgcaggtgctattgttactcttacgaatattttcagtaatgttattttcttctaagtgaaatttctagcctgcactttgatgtcatgtgttccctttgtctttcaaactccaaggttcccctgtggccctctcccttaccctgggaaggcctcttggagaccttacccctggctgtttggactttgtatactttaaataatttaactacccttaattacttaaaaaaaaaaaaaaaagctttatgattttcataacttattgctgattttaatggattgttaatttcagtcctgtagttttattttatgtttagatagggctgggcaaggaaaaagaaaataaagacaaccatatttagcagtgcagttgagttgtgtgttaatgttagactatccctttgtgagtgacactttaacagcattcactgcttctatatatagtgtaccatcttggtcatacattacgcctcaacatatacttgtgctcttcctttgcctccagaagaagtttttccttgattgtgctatgtttcagtggaagaaattctttgaagtagatgtgagtgaaaaactgcatgcctttagaagcccagtatcagaacttgctacgtttcaggtgctagggacttaatgaaaaacaggacaaaacaattcctttttgtggcccaggtaaattatttctggtttcacttataattactaatggctgagtcaagatgttgtctctgtgtttgcttactcttgatcaagtgtgagacagtttgaagactgtgctaccatacaaagtgaatgaagccagtgactaagcttctgtttgttttgttattctcatggccttcgcttgcattatttgggccttcattcagatgaacttgaggtgccattttgttgcatatgtacaggattatgggctggaaagcatttgttataaacctatagtgcacattttaactgccccctaaattacccttccctgggtttgttttccttggggtggtgtagattgtatgagtaagaagtattaattttttaaaagacaaatcaactttgaagacacaaaagttaattggaagaaataaaaactgtgaacgaagaata

SEQ ID NO: 384404 - DNA, 3556 bp, Homo sapiens
cggtccgatggcgacaggctcgcactaggacccaggcgccagagtgcctccgtctgtcctgtaggttcattcaatctcccatacacacagactcacagcgagaccgacacacactcccatacactcacacacacaactgcaggcagcgaggctcgggaagtcaggccggcttttcgccccggcgccttctctgctccagccggccgggtctccctgggggcccggagctcggccgggccgcgcagccccgttagaggacgagctcggcggacccccgctcctccatgggcaaacgcgggcggccgcgcaaggaggcgcgctgcgagggcgcggggctggcccccgccgcgcccccggctgtgccccccgccgtggccgcgccccagcccccggccctgcccgaggaccccgctggggccaagcccaggtgccccttctcagacattttcaacaccagcgagaactcgatggagaagcacatcaacacttttctgcagaacgtgcagattctgctcgaggccgccagctacctggagcagatcgagaaagaaaacaaaaagtgtgaacatggctacgcctcttcattcccgtccatgccgagcccccgactgcagcattcaaagcccccacggaggttgagccgggcacagaaacacagcagcgggagcagcaacaccagcactgccaacagatctacacacaatgagctggaaaagaatcgacgagctcatctgcgcctttgtttagaacgcttaaaagttctgattccactaggaccagactgcacccggcacacaacacttggtttgctcaacaaagccaaagcacacatcaagaaacttgaagaagctgaaagaaaaagccagcaccagctcgagaatttggaacgagaacagagatttttaaagtggcgactggaacagctgcagggtcctcaggagatggaacgaatacgaatggacagcattggatcaactatttcttcagatcgttctgattcagagcgagaggagattgaagtggatgttgaaagcacagagttctcccatggagaagtggacaatataagtaccaccagcatcagtgacattgatgaccacagcagcctgccgagtattgggagtgacgagggttactccagtgccagtgtcaaactttcattcacttcatagaacccagcatgacataacagtgcagggcaaaatattcactgggccaattcaatacaaacaatctcttaaattgggttcatgatgcagtctcctctttaaaacaaaacaaaacaaaacaaaactatacttgaacaaaagggtcagaggacctgtatttaagcaaatacttagcaaaaagtggggcagagcctcccaaggagaacaaatattcagaatattcatattggaaaaatcacaatttttaatggcagcagaaaacttgtgtgaaattttcttgatttgagttgattgagaagaggacattggagatgccatcctctttctcttttctagtttgctcatactacattgagtagacacatttaaggatggggttatgaacccttcctgagctttatggtcctaaaagcaaaataaaaactattcgaatgaaaagacaagaaaatcaggtattaatcttggatagctaataatgagctattaaaactcagcctgggacagtttatcatgaagcctgtggatgatcaatcctttattattatttttttttttttgaaaaaagctcatttcatgctctgcaaaaggagagactcccatgaagccttttgaaagggatcatcatgcagctcaactttctgttggattccatgctaagcaagctaaccttatcctgcattgttagcactaggcacccagctgccacctctccatcctgctgcccttaggccacatgggagcagtccatgcatgacagcctctatcctacaaggcctatgagtatggattgggggggccaaaaggaaaaagctccatgtgcctctttgtctgcgtgggtcagaagagttgtgcacgcagattagcaggccaaggtctgagccacagcagcatttttatttcagattttgataactgtttatatgtgttgaaaaccaaaatgacatctttttaaagcttatccataaaaaaaaatagatgtcttttatagtggaaaaacacatggggaaaaaaatcatctattttgatgcagcatttgataatgataaaacacctcacacctcactctttatagtgcacaaaatgaatgaggtctgggctaggtagaaaaagggtcaatgctatttttgtttttagaatcattaccttttaccagcttttaaccatctgatatctatagtagacacactatcatagttaacatagttaagttcagcacttgtctcattttaatgtaaagatttgcttccattttcctacaggcagtctctctcttcctcacagtcccactgtgcaggtgctattgttactcttacgaatattttcagtaatgttattttcttctaagtgaaatttctagcctgcactttgatgtcatgtgttccctttgtctttcaaactccaaggttcccctgtggccctctcccttaccctgggaaggcctcttggagaccttacccctggctgtttggactttgtatactttaaataatttaactacccttaattacttaaaaaaaaaaaaaaaagctttatgattttcataacttattgctgattttaatggattgttaatttcagtcctgtagttttattttatgtttagatagggctgggcaaggaaaaagaaaataaagacaaccatatttagcagtgcagttgagttgtgtgttaatgttagactatccctttgtgagtgacactttaacagcattcactgcttctatatatagtgtaccatcttggtcatacattacgcctcaacatatacttgtgctcttcctttgcctccagaagaagtttttccttgattgtgctatgtttcagtggaagaaattctttgaagtagatgtgagtgaaaaactgcatgcctttagaagcccagtatcagaacttgctacgtttcaggtgctagggacttaatgaaaaacaggacaaaacaattcctttttgtggcccaggtaaattatttctggtttcacttataattactaatggctgagtcaagatgttgtctctgtgtttgcttactcttgatcaagtgtgagacagtttgaagactgtgctaccatacaaagtgaatgaagccagtgactaagcttctgtttgttttgttattctcatggccttcgcttgcattatttgggccttcattcagatgaacttgaggtgccattttgttgcatatgtacaggattatgggctggaaagcatttgttataaacctatagtgcacattttaactgccccctaaattacccttccctgggtttgttttccttggggtggtgtagattgtatgagtaagaagtattaattttttaaaagacaaatcaactttgaagacacaaaagttaattggaagaaataaaaactgtgaacgaagaata

SEQ ID NO: 384405 - DNA, 3645 bp, Homo sapiens
gggtgctgggagataagaggaaggaggaacacggatgctggggggggtcaggggaagggacgaggccgggagaacactgagcgggggaaaaccggtggagaggggcctttgaatacctgcggggtgatgagatggggtccctttagcggtggcagcccaaggggctgtagagatggcgcagaaagaccaggaactcggagactgtggtgtcgagagagaaaatgtctttctaagacttgttcgaagtacacaaaaatattgggcttaaagagactctttagaacagagagagttgaaagtaaaggggaatttttgaggcaagcgaagtcaatgaggtgaatggtaactggtcacaaaatttttgttctaaagcatctgaaatctcaagttcttgggagagaaggattttggaaaggggggataaactctttggtttagaggaggtatcaaaacaccttccagctggtggggtgtcacaggattgatgtccaggcgagggacattaattttctaaccaaaaagagtggaaacattttacctcttttcctgctttcaaaaacctgttactgcaaagacctcggattgtgggtcaatggatttgggtactatattcttcttaccgtatctttttttcttgctttcttcagagtgtgaacatggctacgcctcttcattcccgtccatgccgagcccccgactgcagcattcaaagcccccacggaggttgagccgggcacagaaacacagcagcgggagcagcaacaccagcactgccaacagatctacacacaatgagctggaaaagaatcgacgagctcatctgcgcctttgtttagaacgcttaaaagttctgattccactaggaccagactgcacccggcacacaacacttggtttgctcaacaaagccaaagcacacatcaagaaacttgaagaagctgaaagaaaaagccagcaccagctcgagaatttggaacgagaacagagatttttaaagtggcgactggaacagctgcagggtcctcaggagatggaacgaatacgaatggacagcattggatcaactatttcttcagatcgttctgattcagagcgagaggagattgaagtggatgttgaaagcacagagttctcccatggagaagtggacaatataagtaccaccagcatcagtgacattgatgaccacagcagcctgccgagtattgggagtgacgagggttactccagtgccagtgtcaaactttcattcacttcatagaacccagcatgacataacagtgcagggcaaaatattcactgggccaattcaatacaaacaatctcttaaattgggttcatgatgcagtctcctctttaaaacaaaacaaaacaaaacaaaactatacttgaacaaaagggtcagaggacctgtatttaagcaaatacttagcaaaaagtggggcagagcctcccaaggagaacaaatattcagaatattcatattggaaaaatcacaatttttaatggcagcagaaaacttgtgtgaaattttcttgatttgagttgattgagaagaggacattggagatgccatcctctttctcttttctagtttgctcatactacattgagtagacacatttaaggatggggttatgaacccttcctgagctttatggtcctaaaagcaaaataaaaactattcgaatgaaaagacaagaaaatcaggtattaatcttggatagctaataatgagctattaaaactcagcctgggacagtttatcatgaagcctgtggatgatcaatcctttattattatttttttttttttgaaaaaagctcatttcatgctctgcaaaaggagagactcccatgaagccttttgaaagggatcatcatgcagctcaactttctgttggattccatgctaagcaagctaaccttatcctgcattgttagcactaggcacccagctgccacctctccatcctgctgcccttaggccacatgggagcagtccatgcatgacagcctctatcctacaaggcctatgagtatggattgggggggccaaaaggaaaaagctccatgtgcctctttgtctgcgtgggtcagaagagttgtgcacgcagattagcaggccaaggtctgagccacagcagcatttttatttcagattttgataactgtttatatgtgttgaaaaccaaaatgacatctttttaaagcttatccataaaaaaaaatagatgtcttttatagtggaaaaacacatggggaaaaaaatcatctattttgatgcagcatttgataatgataaaacacctcacacctcactctttatagtgcacaaaatgaatgaggtctgggctaggtagaaaaagggtcaatgctatttttgtttttagaatcattaccttttaccagcttttaaccatctgatatctatagtagacacactatcatagttaacatagttaagttcagcacttgtctcattttaatgtaaagatttgcttccattttcctacaggcagtctctctcttcctcacagtcccactgtgcaggtgctattgttactcttacgaatattttcagtaatgttattttcttctaagtgaaatttctagcctgcactttgatgtcatgtgttccctttgtctttcaaactccaaggttcccctgtggccctctcccttaccctgggaaggcctcttggagaccttacccctggctgtttggactttgtatactttaaataatttaactacccttaattacttaaaaaaaaaaaaaaaagctttatgattttcataacttattgctgattttaatggattgttaatttcagtcctgtagttttattttatgtttagatagggctgggcaaggaaaaagaaaataaagacaaccatatttagcagtgcagttgagttgtgtgttaatgttagactatccctttgtgagtgacactttaacagcattcactgcttctatatatagtgtaccatcttggtcatacattacgcctcaacatatacttgtgctcttcctttgcctccagaagaagtttttccttgattgtgctatgtttcagtggaagaaattctttgaagtagatgtgagtgaaaaactgcatgcctttagaagcccagtatcagaacttgctacgtttcaggtgctagggacttaatgaaaaacaggacaaaacaattcctttttgtggcccaggtaaattatttctggtttcacttataattactaatggctgagtcaagatgttgtctctgtgtttgcttactcttgatcaagtgtgagacagtttgaagactgtgctaccatacaaagtgaatgaagccagtgactaagcttctgtttgttttgttattctcatggccttcgcttgcattatttgggccttcattcagatgaacttgaggtgccattttgttgcatatgtacaggattatgggctggaaagcatttgttataaacctatagtgcacattttaactgccccctaaattacccttccctgggtttgttttccttggggtggtgtagattgtatgagtaagaagtattaattttttaaaagacaaatcaactttgaagacacaaaagttaattggaagaaataaaaactgtgaacgaagaata

SEQ ID NO: 384406 - DNA, 3243 bp, Homo sapiens
gggtgctgggagataagaggaaggaggaacacggatgctggggggggtcaggggaagggacgaggccgggagaacactgagcgggggaaaaccggtggagaggggcctttgaatacctgcggggtgatgagatggggtccctttagcggtggcagcccaaggggctgtagagatggcgcagaaagaccaggaactcggagactgtggtgtcgagagagaaaatgtctttctaagacttgttcgaaagtgtgaacatggctacgcctcttcattcccgtccatgccgagcccccgactgcagcattcaaagcccccacggaggttgagccgggcacagaaacacagcagcgggagcagcaacaccagcactgccaacagatctacacacaatgagctggaaaagaatcgacgagctcatctgcgcctttgtttagaacgcttaaaagttctgattccactaggaccagactgcacccggcacacaacacttggtttgctcaacaaagccaaagcacacatcaagaaacttgaagaagctgaaagaaaaagccagcaccagctcgagaatttggaacgagaacagagatttttaaagtggcgactggaacagctgcagggtcctcaggagatggaacgaatacgaatggacagcattggatcaactatttcttcagatcgttctgattcagagcgagaggagattgaagtggatgttgaaagcacagagttctcccatggagaagtggacaatataagtaccaccagcatcagtgacattgatgaccacagcagcctgccgagtattgggagtgacgagggttactccagtgccagtgtcaaactttcattcacttcatagaacccagcatgacataacagtgcagggcaaaatattcactgggccaattcaatacaaacaatctcttaaattgggttcatgatgcagtctcctctttaaaacaaaacaaaacaaaacaaaactatacttgaacaaaagggtcagaggacctgtatttaagcaaatacttagcaaaaagtggggcagagcctcccaaggagaacaaatattcagaatattcatattggaaaaatcacaatttttaatggcagcagaaaacttgtgtgaaattttcttgatttgagttgattgagaagaggacattggagatgccatcctctttctcttttctagtttgctcatactacattgagtagacacatttaaggatggggttatgaacccttcctgagctttatggtcctaaaagcaaaataaaaactattcgaatgaaaagacaagaaaatcaggtattaatcttggatagctaataatgagctattaaaactcagcctgggacagtttatcatgaagcctgtggatgatcaatcctttattattatttttttttttttgaaaaaagctcatttcatgctctgcaaaaggagagactcccatgaagccttttgaaagggatcatcatgcagctcaactttctgttggattccatgctaagcaagctaaccttatcctgcattgttagcactaggcacccagctgccacctctccatcctgctgcccttaggccacatgggagcagtccatgcatgacagcctctatcctacaaggcctatgagtatggattgggggggccaaaaggaaaaagctccatgtgcctctttgtctgcgtgggtcagaagagttgtgcacgcagattagcaggccaaggtctgagccacagcagcatttttatttcagattttgataactgtttatatgtgttgaaaaccaaaatgacatctttttaaagcttatccataaaaaaaaatagatgtcttttatagtggaaaaacacatggggaaaaaaatcatctattttgatgcagcatttgataatgataaaacacctcacacctcactctttatagtgcacaaaatgaatgaggtctgggctaggtagaaaaagggtcaatgctatttttgtttttagaatcattaccttttaccagcttttaaccatctgatatctatagtagacacactatcatagttaacatagttaagttcagcacttgtctcattttaatgtaaagatttgcttccattttcctacaggcagtctctctcttcctcacagtcccactgtgcaggtgctattgttactcttacgaatattttcagtaatgttattttcttctaagtgaaatttctagcctgcactttgatgtcatgtgttccctttgtctttcaaactccaaggttcccctgtggccctctcccttaccctgggaaggcctcttggagaccttacccctggctgtttggactttgtatactttaaataatttaactacccttaattacttaaaaaaaaaaaaaaaagctttatgattttcataacttattgctgattttaatggattgttaatttcagtcctgtagttttattttatgtttagatagggctgggcaaggaaaaagaaaataaagacaaccatatttagcagtgcagttgagttgtgtgttaatgttagactatccctttgtgagtgacactttaacagcattcactgcttctatatatagtgtaccatcttggtcatacattacgcctcaacatatacttgtgctcttcctttgcctccagaagaagtttttccttgattgtgctatgtttcagtggaagaaattctttgaagtagatgtgagtgaaaaactgcatgcctttagaagcccagtatcagaacttgctacgtttcaggtgctagggacttaatgaaaaacaggacaaaacaattcctttttgtggcccaggtaaattatttctggtttcacttataattactaatggctgagtcaagatgttgtctctgtgtttgcttactcttgatcaagtgtgagacagtttgaagactgtgctaccatacaaagtgaatgaagccagtgactaagcttctgtttgttttgttattctcatggccttcgcttgcattatttgggccttcattcagatgaacttgaggtgccattttgttgcatatgtacaggattatgggctggaaagcatttgttataaacctatagtgcacattttaactgccccctaaattacccttccctgggtttgttttccttggggtggtgtagattgtatgagtaagaagtattaattttttaaaagacaaatcaactttgaagacacaaaagttaattggaagaaataaaaactgtgaacgaagaata

SEQ ID NO: 384407 - DNA, 3167 bp, Homo sapiens
taagtaattaagggtagttaaattatttaaagtatacaaagtccaaacagccaggggtaaggtctccaagaggccttcccagggtaagggagtgcggagaggcgccggtcgccacccgcggtgcccatggagcgggtgaagatgatcaacgtgcagcgtctgctggaggctgccgagtttttggagcgccgggagcgagagtgtgaacatggctacgcctcttcattcccgtccatgccgagcccccgactgcagcattcaaagcccccacggaggttgagccgggcacagaaacacagcagcgggagcagcaacaccagcactgccaacagacgagctcatctgcgcctttgtttagaacgcttaaaagttctgattccactaggaccagactgcacccggcacacaacacttggtttgctcaacaaagccaaagcacacatcaagaaacttgaagaagctgaaagaaaaagccagcaccagctcgagaatttggaacgagaacagagatttttaaagtggcgactggaacagctgcagggtcctcaggagatggaacgaatacgaatggacagcattggatcaactatttcttcagatcgttctgattcagagcgagaggagattgaagtggatgttgaaagcacagagttctcccatggagaagtggacaatataagtaccaccagcatcagtgacattgatgaccacagcagcctgccgagtattgggagtgacgagggttactccagtgccagtgtcaaactttcattcacttcatagaacccagcatgacataacagtgcagggcaaaatattcactgggccaattcaatacaaacaatctcttaaattgggttcatgatgcagtctcctctttaaaacaaaacaaaacaaaacaaaactatacttgaacaaaagggtcagaggacctgtatttaagcaaatacttagcaaaaagtggggcagagcctcccaaggagaacaaatattcagaatattcatattggaaaaatcacaatttttaatggcagcagaaaacttgtgtgaaattttcttgatttgagttgattgagaagaggacattggagatgccatcctctttctcttttctagtttgctcatactacattgagtagacacatttaaggatggggttatgaacccttcctgagctttatggtcctaaaagcaaaataaaaactattcgaatgaaaagacaagaaaatcaggtattaatcttggatagctaataatgagctattaaaactcagcctgggacagtttatcatgaagcctgtggatgatcaatcctttattattatttttttttttttgaaaaaagctcatttcatgctctgcaaaaggagagactcccatgaagccttttgaaagggatcatcatgcagctcaactttctgttggattccatgctaagcaagctaaccttatcctgcattgttagcactaggcacccagctgccacctctccatcctgctgcccttaggccacatgggagcagtccatgcatgacagcctctatcctacaaggcctatgagtatggattgggggggccaaaaggaaaaagctccatgtgcctctttgtctgcgtgggtcagaagagttgtgcacgcagattagcaggccaaggtctgagccacagcagcatttttatttcagattttgataactgtttatatgtgttgaaaaccaaaatgacatctttttaaagcttatccataaaaaaaaatagatgtcttttatagtggaaaaacacatggggaaaaaaatcatctattttgatgcagcatttgataatgataaaacacctcacacctcactctttatagtgcacaaaatgaatgaggtctgggctaggtagaaaaagggtcaatgctatttttgtttttagaatcattaccttttaccagcttttaaccatctgatatctatagtagacacactatcatagttaacatagttaagttcagcacttgtctcattttaatgtaaagatttgcttccattttcctacaggcagtctctctcttcctcacagtcccactgtgcaggtgctattgttactcttacgaatattttcagtaatgttattttcttctaagtgaaatttctagcctgcactttgatgtcatgtgttccctttgtctttcaaactccaaggttcccctgtggccctctcccttaccctgggaaggcctcttggagaccttacccctggctgtttggactttgtatactttaaataatttaactacccttaattacttaaaaaaaaaaaaaaaagctttatgattttcataacttattgctgattttaatggattgttaatttcagtcctgtagttttattttatgtttagatagggctgggcaaggaaaaagaaaataaagacaaccatatttagcagtgcagttgagttgtgtgttaatgttagactatccctttgtgagtgacactttaacagcattcactgcttctatatatagtgtaccatcttggtcatacattacgcctcaacatatacttgtgctcttcctttgcctccagaagaagtttttccttgattgtgctatgtttcagtggaagaaattctttgaagtagatgtgagtgaaaaactgcatgcctttagaagcccagtatcagaacttgctacgtttcaggtgctagggacttaatgaaaaacaggacaaaacaattcctttttgtggcccaggtaaattatttctggtttcacttataattactaatggctgagtcaagatgttgtctctgtgtttgcttactcttgatcaagtgtgagacagtttgaagactgtgctaccatacaaagtgaatgaagccagtgactaagcttctgtttgttttgttattctcatggccttcgcttgcattatttgggccttcattcagatgaacttgaggtgccattttgttgcatatgtacaggattatgggctggaaagcatttgttataaacctatagtgcacattttaactgccccctaaattacccttccctgggtttgttttccttggggtggtgtagattgtatgagtaagaagtattaattttttaaaagacaaatcaactttgaagacacaaaagttaattggaagaaataaaaactgtgaacgaagaata

SEQ ID NO: 384408 - DNA, 3250 bp, Homo sapiens
  misc_feature (69)..(69): n is a, c, g, or t
  misc_feature (75)..(75): n is a, c, g, or t
cgcggggaggggtaaacaaaccacgcgcgggctgcccgcggcacggcgggcgcggctggcgcggctggngcggcnggggcggcaggggcggcggagagcgcgccgagccgcggccgagctggcccgcccgcccgtcgcacatgttccggaacggcgcccggccgtagccgcctgcggcgcctcctgtcggcccgagaagggagtgcggagaggcgccggtcgccacccgcggtgcccatggagcgggtgaagatgatcaacgtgcagcgtctgctggaggctgccgagtttttggagcgccgggagcgagagtgtgaacatggctacgcctcttcattcccgtccatgccgagcccccgactgcagcattcaaagcccccacggaggttgagccgggcacagaaacacagcagcgggagcagcaacaccagcactgccaacagatctacacacaatgagctggaaaagaatcgacgagctcatctgcgcctttgtttagaacgcttaaaagttctgattccactaggaccagactgcacccggcacacaacacttggtttgctcaacaaagccaaagcacacatcaagaaacttgaagaagctgaaagaaaaagccagcaccagctcgagaatttggaacgagaacagagatttttaaagtggcgactggaacagctgcagggtcctcaggagatggaacgaatacgaatggacagcattggatcaactatttcttcagatcgttctgattcagagcgagaggagattgaagtggatgttgaaagcacagagttctcccatggagaagtggacaatataagtaccaccagcatcagtgacattgatgaccacagcagcctgccgagtattgggagtgacgagggttactccagtgccagtgtcaaactttcattcacttcatagaacccagcatgacataacagtgcagggcaaaatattcactgggccaattcaatacaaacaatctcttaaattgggttcatgatgcagtctcctctttaaaacaaaacaaaacaaaacaaaactatacttgaacaaaagggtcagaggacctgtatttaagcaaatacttagcaaaaagtggggcagagcctcccaaggagaacaaatattcagaatattcatattggaaaaatcacaatttttaatggcagcagaaaacttgtgtgaaattttcttgatttgagttgattgagaagaggacattggagatgccatcctctttctcttttctagtttgctcatactacattgagtagacacatttaaggatggggttatgaacccttcctgagctttatggtcctaaaagcaaaataaaaactattcgaatgaaaagacaagaaaatcaggtattaatcttggatagctaataatgagctattaaaactcagcctgggacagtttatcatgaagcctgtggatgatcaatcctttattattatttttttttttttgaaaaaagctcatttcatgctctgcaaaaggagagactcccatgaagccttttgaaagggatcatcatgcagctcaactttctgttggattccatgctaagcaagctaaccttatcctgcattgttagcactaggcacccagctgccacctctccatcctgctgcccttaggccacatgggagcagtccatgcatgacagcctctatcctacaaggcctatgagtatggattgggggggccaaaaggaaaaagctccatgtgcctctttgtctgcgtgggtcagaagagttgtgcacgcagattagcaggccaaggtctgagccacagcagcatttttatttcagattttgataactgtttatatgtgttgaaaaccaaaatgacatctttttaaagcttatccatatgatgcagcatttgataatgataaaacacctcacacctcactctttatagtgcacaaaatgaatgaggtctgggctaggtagaaaaagggtcaatgctatttttgtttttagaatcattaccttttaccagcttttaaccatctgatatctatagtagacacactatcatagttaacatagttaagttcagcacttgtctcattttaatgtaaagatttgcttccattttcctacaggcagtctctctcttcctcacagtcccactgtgcaggtgctattgttactcttacgaatattttcagtaatgttattttcttctaagtgaaatttctagcctgcactttgatgtcatgtgttccctttgtctttcaaactccaaggttcccctgtggccctctcccttaccctgggaaggcctcttggagaccttacccctggctgtttggactttgtatactttaaataatttaactacccttaattacttaaaaaaaaaaaaaaaagctttatgattttcataacttattgctgattttaatggattgttaatttcagtcctgtagttttattttatgtttagatagggctgggcaaggaaaaagaaaataaagacaaccatatttagcagtgcagttgagttgtgtgttaatgttagactatccctttgtgagtgacactttaacagcattcactgcttctatatatagtgtaccatcttggtcatacattacgcctcaacatatacttgtgctcttcctttgcctccagaagaagtttttccttgattgtgctatgtttcagtggaagaaattctttgaagtagatgtgagtgaaaaactgcatgcctttagaagcccagtatcagaacttgctacgtttcaggtgctagggacttaatgaaaaacaggacaaaacaattcctttttgtggcccaggtaaattatttctggtttcacttataattactaatggctgagtcaagatgttgtctctgtgtttgcttactcttgatcaagtgtgagacagtttgaagactgtgctaccatacaaagtgaatgaagccagtgactaagcttctgtttgttttgttattctcatggccttcgcttgcattatttgggccttcattcagatgaacttgaggtgccattttgttgcatatgtacaggattatgggctggaaagcatttgttataaacctatagtgcacattttaactgccccctaaattacccttccctgggtttgttttccttggggtggtgtagattgtatgagtaagaagtattaattttttaaaagacaaatcaactttgaagacacaaaagttaattggaagaaataaaaactgtgaacgaagaata

SEQ ID NO: 384409 - DNA, 3255 bp, Homo sapiens
  misc_feature (69)..(69): n is a, c, g, or t
  misc_feature (75)..(75): n is a, c, g, or t
cgcggggaggggtaaacaaaccacgcgcgggctgcccgcggcacggcgggcgcggctggcgcggctggngcggcnggggcggcaggggcggcggagagcgcgccgagccgcggccgagctggcccgcccgcccgtcgcacatgttccggaacggcgcccggccgtagccgcctgcggcgcctcctgtcggcccgagaagggagtgcggagaggcgccggtcgccacccgcggtgcccatggagcgggtgaagatgatcaacgtgcagcgtctgctggaggctgccgagtttttggagcgccgggagcgagagtgtgaacatggctacgcctcttcattcccgtccatgccgagcccccgactgcagcattcaaagcccccacggaggttgagccgggcacagaaacacagcagcgggagcagcaacaccagcactgccaacagatctacacacaatgagctggaaaagaatcgacgagctcatctgcgcctttgtttagaacgcttaaaagttctgattccactaggaccagactgcacccggcacacaacacttggtttgctcaacaaagccaaagcacacatcaagaaacttgaagaagctgaaagaaaaagccagcaccagctcgagaatttggaacgagaacagagatttttaaagtggcgactggaacagctgcagggtcctcaggagatggaacgaatacgaatggacagcattggatcaactatttcttcagatcgttctgattcagagcgagaggagattgaagtggatgttgaaagcacagagttctcccatggagaagtggacaatataagtaccaccagcatcagtgacattgatgaccacagcagcctgccgagtattgggagtgacgagggttactccagtgccagtgtcaaactttcattcacttcatagaacccagcatgacataacagtgcagggcaaaatattcactgggccaattcaatacaaacaatctcttaaattgggttcatgatgcagtctcctctttaaaacaaaacaaaacaaaacaaaactatacttgaacaaaagggtcagaggacctgtatttaagcaaatacttagcaaaaagtggggcagagcctcccaaggagaacaaatattcagaatattcatattggaaaaatcacaatttttaatggcagcagaaaacttgtgtgaaattttcttgatttgagttgattgagaagaggacattggagatgccatcctctttctcttttctagtttgctcatactacattgagtagacacatttaaggatggggttatgaacccttcctgagctttatggtcctaaaagcaaaataaaaactattcgaatgaaaagacaagaaaatcaggtattaatcttggatagctaataatgagctattaaaactcagcctgggacagtttatcatgaagcctgtggatgatcaatcctttattattatttttttttttttgaaaaaagctcatttcatgctctgcaaaaggagagactcccatgaagccttttgaaagggatcatcatgcagctcaactttctgttggattccatgctaagcaagctaaccttatcctgcattgttagcactaggcacccagctgccacctctccatcctgctgcccttaggccacatgggagcagtccatgcatgacagcctctatcctacaaggcctatgagtatggattgggggggccaaaaggaattagcaggccaaggtctgagccacagcagcatttttatttcagattttgataactgtttatatgtgttgaaaaccaaaatgacatctttttaaagcttatccataaaaaaaaatagatgtcttttatagtggaaaaacacatggggaaaaaaatcatctattttgatgcagcatttgataatgataaaacacctcacacctcactctttatagtgcacaaaatgaatgaggtctgggctaggtagaaaaagggtcaatgctatttttgtttttagaatcattaccttttaccagcttttaaccatctgatatctatagtagacacactatcatagttaacatagttaagttcagcacttgtctcattttaatgtaaagatttgcttccattttcctacaggcagtctctctcttcctcacagtcccactgtgcaggtgctattgttactcttacgaatattttcagtaatgttattttcttctaagtgaaatttctagcctgcactttgatgtcatgtgttccctttgtctttcaaactccaaggttcccctgtggccctctcccttaccctgggaaggcctcttggagaccttacccctggctgtttggactttgtatactttaaataatttaactacccttaattacttaaaaaaaaaaaaaaaagctttatgattttcataacttattgctgattttaatggattgttaatttcagtcctgtagttttattttatgtttagatagggctgggcaaggaaaaagaaaataaagacaaccatatttagcagtgcagttgagttgtgtgttaatgttagactatccctttgtgagtgacactttaacagcattcactgcttctatatatagtgtaccatcttggtcatacattacgcctcaacatatacttgtgctcttcctttgcctccagaagaagtttttccttgattgtgctatgtttcagtggaagaaattctttgaagtagatgtgagtgaaaaactgcatgcctttagaagcccagtatcagaacttgctacgtttcaggtgctagggacttaatgaaaaacaggacaaaacaattcctttttgtggcccaggtaaattatttctggtttcacttataattactaatggctgagtcaagatgttgtctctgtgtttgcttactcttgatcaagtgtgagacagtttgaagactgtgctaccatacaaagtgaatgaagccagtgactaagcttctgtttgttttgttattctcatggccttcgcttgcattatttgggccttcattcagatgaacttgaggtgccattttgttgcatatgtacaggattatgggctggaaagcatttgttataaacctatagtgcacattttaactgccccctaaattacccttccctgggtttgttttccttggggtggtgtagattgtatgagtaagaagtattaattttttaaaagacaaatcaactttgaagacacaaaagttaattggaagaaataaaaactgtgaacgaagaata

SEQ ID NO: 384410 - DNA, 2013 bp, Homo sapiens
  misc_feature (14)..(14): n is a, c, g, or t
aaatcgagctcggnacctccttctggcacgcctaaaagcaaaataaaaactattcgaatgaaaagacaagaaaatcaggtattaatcttggatagctaataatgagctattaaaactcagcctgggacagtttatcatgaagcctgtggatgatcaatcctttattattatttttttttttttgaaaaaagctcatttcatgctctgcaaaaggagagactcccatgaagccttttgaaagggatcatcatgcagctcaactttctgttggattccatgctaagcaagctaaccttatcctgcattgttagcactaggcacccagctgccacctctccatcctgctgcccttaggccacatgggagcagtccatgcatgacagcctctatcctacaaggcctatgagtatggattgggggggccaaaaggaaaaagctccatgtgcctctttgtctgcgtgggtcagaagagttgtgcacgcagattagcaggccaaggtctgagccacagcagcatttttatttcagattttgataactgtttatatgtgttgaaaaccaaaatgacatctttttaaagcttatccataaaaaaaaatagatgtcttttatagtggaaaaacacatggggaaaaaaatcatctattttgatgcagcatttgataatgataaaacacctcacacctcactctttatagtgcacaaaatgaatgaggtctgggctaggtagaaaaagggtcaatgctatttttgtttttagaatcattaccttttaccagcttttaaccatctgatatctatagtagacacactatcatagttaacatagttaagttcagcacttgtctcattttaatgtaaagatttgcttccattttcctacaggcagtctctctcttcctcacagtcccactgtgcaggtgctattgttactcttacgaatattttcagtaatgttattttcttctaagtgaaatttctagcctgcactttgatgtcatgtgttccctttgtctttcaaactccaaggttcccctgtggccctctcccttaccctgggaaggcctcttggagaccttacccctggctgtttggactttgtatactttaaataatttaactacccttaattacttaaaaaaaaaaaaaaaagctttatgattttcataacttattgctgattttaatggattgttaatttcagtcctgtagttttattttatgtttagatagggctgggcaaggaaaaagaaaataaagacaaccatatttagcagtgcagttgagttgtgtgttaatgttagactatccctttgtgagtgacactttaacagcattcactgcttctatatatagtgtaccatcttggtcatacattacgcctcaacatatacttgtgctcttcctttgcctccagaagaagtttttccttgattgtgctatgtttcagtggaagaaattctttgaagtagatgtgagtgaaaaactgcatgcctttagaagcccagtatcagaacttgctacgtttcaggtgctagggacttaatgaaaaacaggacaaaacaattcctttttgtggcccaggtaaattatttctggtttcacttataattactaatggctgagtcaagatgttgtctctgtgtttgcttactcttgatcaagtgtgagacagtttgaagactgtgctaccatacaaagtgaatgaagccagtgactaagcttctgtttgttttgttattctcatggccttcgcttgcattatttgggccttcattcagatgaacttgaggtgccattttgttgcatatgtacaggattatgggctggaaagcatttgttataaacctatagtgcacattttaactgccccctaaattacccttccctgggtttgttttccttggggtggtgtagattgtatgagtaagaagtattaattttttaaaagacaaatcaactttgaagacacaaaagttaattggaagaaataaaaactgtgaacgaagaata

SEQ ID NO: 384411 - DNA, 2918 bp, Homo sapiens
  misc_feature (69)..(69): n is a, c, g, or t
  misc_feature (75)..(75): n is a, c, g, or t
cgcggggaggggtaaacaaaccacgcgcgggctgcccgcggcacggcgggcgcggctggcgcggctggngcggcnggggcggcaggggcggcggagagcgcgccgagccgcggccgagctggcccgcccgcccgtcgcacatgttccggaacggcgcccggccgtagccgcctgcggcgcctcctgtcggcccgagaagggagtgcggagaggcgccggtcgccacccgcggtgcccatggagcgggtgaagatgatcaacgtgcagcgtctgctggaggctgccgagtttttggagcgccgggagcgagagtgtgaacatggctacgcctcttcattcccgtccatgccgagcccccgactgcagcattcaaagcccccacggaggttgagccgggcacagaaacacagcagcgggagcagcaacaccagcactgccaacagatctacacacaatgagctggaaaagaatcgacgagctcatctgcgcctttgtttagaacgcttaaaagttctgattccactaggaccagactgcacccggcacacaacacttggtttgctcaacaaagccaaagcacacatcaagaaacttgaagaagctgaaagaaaaagccagcaccagctcgagaatttggaacgagaacagagatttttaaagtggcgactggaacagctgcagggtcctcaggagatggaacgaatacgaatggacagcattggatcaactatttcttcagatcgttctgattcagagcgagaggagattgaagtggatgttgaaagcacagagttctcccatggagaagtggacaatataagtaccaccagcatcagtgacattgatgaccacagcagcctgccgagtattgggagtgacgagggttactccagtgccagtgtcaaactttcattcacttcatagaacccagcatgacataacagtgcagggcaaaatattcactgggccaattcaatacaaacaatctcttaaattgggttcatgatgcagtctcctctttaaaacaaaacaaaacaaaacaaaactatacttgaacaaaagggtcagaggacctgtatttaagcaaatacttagcaaaaagtggggcagagcctcccaaggagaacaaatattcagaatattcatattggaaaaatcacaatttttaatggcagcagaaaacttgtgtgaaattttcttgatttgagttgattgagaagaggacattggagatgccatcctctttctcttttctagtttgctcatactacattgagtagacacatttaaggatggggttatgaacccttcctgagctttatggtcctaaaagcaaaataaaaactattcgaatgaaaagacaagaaaatcaggtattaatcttggatagctaataatgagctattaaaactcagcctgggacagtttatcatgaagcctgtggatgatcaatcctttattattatttttttttttttgaaaaaagctcatttcatgctctgcaaaaggagagactcccatgaagccttttgaaagggatcatcatgcagctcaactttctgttggattccatgctaagcaagctaaccttatcctgcattgttagcaaaaatgaatgaggtctgggctaggtagaaaaagggtcaatgctatttttgtttttagaatcattaccttttaccagcttttaaccatctgatatctatagtagacacactatcatagttaacatagttaagttcagcacttgtctcattttaatgtaaagatttgcttccattttcctacaggcagtctctctcttcctcacagtcccactgtgcaggtgctattgttactcttacgaatattttcagtaatgttattttcttctaagtgaaatttctagcctgcactttgatgtcatgtgttccctttgtctttcaaactccaaggttcccctgtggccctctcccttaccctgggaaggcctcttggagaccttacccctggctgtttggactttgtatactttaaataatttaactacccttaattacttaaaaaaaaaaaaaaaagctttatgattttcataacttattgctgattttaatggattgttaatttcagtcctgtagttttattttatgtttagatagggctgggcaaggaaaaagaaaataaagacaaccatatttagcagtgcagttgagttgtgtgttaatgttagactatccctttgtgagtgacactttaacagcattcactgcttctatatatagtgtaccatcttggtcatacattacgcctcaacatatacttgtgctcttcctttgcctccagaagaagtttttccttgattgtgctatgtttcagtggaagaaattctttgaagtagatgtgagtgaaaaactgcatgcctttagaagcccagtatcagaacttgctacgtttcaggtgctagggacttaatgaaaaacaggacaaaacaattcctttttgtggcccaggtaaattatttctggtttcacttataattactaatggctgagtcaagatgttgtctctgtgtttgcttactcttgatcaagtgtgagacagtttgaagactgtgctaccatacaaagtgaatgaagccagtgactaagcttctgtttgttttgttattctcatggccttcgcttgcattatttgggccttcattcagatgaacttgaggtgccattttgttgcatatgtacaggattatgggctggaaagcatttgttataaacctatagtgcacattttaactgccccctaaattacccttccctgggtttgttttccttggggtggtgtagattgtatgagtaagaagtattaattttttaaaagacaaatcaactttgaagacacaaaagttaattggaagaaataaaaactgtgaacgaagaata

SEQ ID NO: 384412 - DNA, 1687 bp, Homo sapiens
  misc_feature (88)..(88): n is a, c, g, or t
  misc_feature (92)..(92): n is a, c, g, or t
  misc_feature (94)..(94): n is a, c, g, or t
taagtaattaagggtagttaaattatttaaagtatacaaagtccaaacagccaggggtaaggtctccaagaggccttcccagggtaanggananggccaaaaggaaaaagctccatgtgcctctttgtctgcgtgggtcagaagagttgtgcacgcagattagcaggccaaggtctgagccacagcagcatttttatttcagattttgataactgtttatatgtgttgaaaaccaaaatgacatctttttaaagcttatccataaaaaaaaatagatgtcttttatagtggaaaaacacatggggaaaaaaatcatctattttgatgcagcatttgataatgataaaacacctcacacctcactctttatagtgcacaaaatgaatgaggtctgggctaggtagaaaaagggtcaatgctatttttgtttttagaatcattaccttttaccagcttttaaccatctgatatctatagtagacacactatcatagttaacatagttaagttcagcacttgtctcattttaatgtaaagatttgcttccattttcctacaggcagtctctctcttcctcacagtcccactgtgcaggtgctattgttactcttacgaatattttcagtaatgttattttcttctaagtgaaatttctagcctgcactttgatgtcatgtgttccctttgtctttcaaactccaaggttcccctgtggccctctcccttaccctgggaaggcctcttggagaccttacccctggctgtttggactttgtatactttaaataatttaactacccttaattacttaaaaaaaaaaaaaaaagctttatgattttcataacttattgctgattttaatggattgttaatttcagtcctgtagttttattttatgtttagatagggctgggcaaggaaaaagaaaataaagacaaccatatttagcagtgcagttgagttgtgtgttaatgttagactatccctttgtgagtgacactttaacagcattcactgcttctatatatagtgtaccatcttggtcatacattacgcctcaacatatacttgtgctcttcctttgcctccagaagaagtttttccttgattgtgctatgtttcagtggaagaaattctttgaagtagatgtgagtgaaaaactgcatgcctttagaagcccagtatcagaacttgctacgtttcaggtgctagggacttaatgaaaaacaggacaaaacaattcctttttgtggcccaggtaaattatttctggtttcacttataattactaatggctgagtcaagatgttgtctctgtgtttgcttactcttgatcaagtgtgagacagtttgaagactgtgctaccatacaaagtgaatgaagccagtgactaagcttctgtttgttttgttattctcatggccttcgcttgcattatttgggccttcattcagatgaacttgaggtgccattttgttgcatatgtacaggattatgggctggaaagcatttgttataaacctatagtgcacattttaactgccccctaaattacccttccctgggtttgttttccttggggtggtgtagattgtatgagtaagaagtattaattttttaaaagacaaatcaactttgaagacacaaaagttaattggaagaaataaaaactgtgaacgaagaata

SEQ ID NO: 384413 - DNA, 1229 bp, Homo sapiens
cggtccgatggcgacaggctcgcactaggacccaggcgccagagtgcctccgtctgtcctgtaggttcattcaatctcccatacacacagactcacagcgagaccgacacacactcccatacactcacacacacaactgcaggcagcgaggctcgggaagtcaggccggcttttcgccccggcgccttctctgctccagccggccgggtctccctgggggcccggagctcggccgggccgcgcagccccgttagaggacgagctcggcggacccccgctcctccatgggcaaacgcgggcggccgcgcaaggaggcgcgctgcgagggcgcggggctggcccccgccgcgcccccggctgtgccccccgccgtggccgcgccccagcccccggccctgcccgaggaccccgctggggccaagcccaggtgccccttctcagacattttcaacaccagcgagaactcgatggagaagcacatcaacacttttctgcagaacgtgcagattctgctcgaggccgccagctacctggagcagatcgagaaagaaaacaaaaagtgtgaacatggctacgcctcttcattcccgtccatgccgagcccccgactgcagcattcaaagcccccacggaggttgagccgggcacagaaacacagcagcgggagcagcaacaccagcactgccaacaggtagcaagctgggaacgcttagaagagggaactggagggaaggagcacatttctcctgtaatcccaagtctgaaggagcagcacttgatgggttcctttaccactaccctggggatttggcccttttaaaataatgaagtctagaaatcataacctggttttgcatggaaggaaaggaatataatctggaaagacaaccaaagaagttcttgctgggattattaagatggctatgccaagttgagagacttggcagcatgtgtccatgcatgcagccacctgctaaaagtaatcgtgggctggctttcaatattctggccaagttttggacagtccaagaagattaaaaaaaaaatcagaaataggtctggcagggtataaagcagaatcaagggtttgttaaaggaataaaaatatttaggtagaattggtagtgagcggatgtggttatttgtttaaggagaaaagggaagaccatgctgtgaaagttttgcctctttaaatgatgagatcggattggttggtgggctcttaaagc

SEQ ID NO: 384414 - DNA, 252 bp, Homo sapiens
tcttgtctaccatgcccaagagtttagacttcctgagacccatagggagcagttaaataattttaaagtggattatcatatgatcagcctgtgtcttggaaatatcgttttggctacagcttgaagaattggttggttgggagaagggataccagaggcatgaagatgcttttgaaggctattgcagtaatctaggtaagagatgatggtggccactgagatagaagtagacaaagtaaagagtatggaatg

SEQ ID NO: 384415 - DNA, 2460 bp, Homo sapiens
taagtaattaagggtagttaaattatttaaagtatacaaagtccaaacagccaggggtaaggtctccaagaggccttcccagggtaagggagtgcggagaggcgccggtcgccacccgcggtgcccatggagcgggtgaagatgatcaacgtgcagcgtctgctggaggctgccgagtttttggagcgccgggagcgagagtgtgaacatggctacgcctcttcattcccgtccatgccgagcccccgactgcagcattcaaagcccccacggaggttgagccgggcacagaaacacagcagcgggagcagcaacaccagcactgccaacagatctacacacaatgagctggaaaagaatcgacgagctcatctgcgcctttgtttagaacgcttaaaagttctgattccactaggaccagactgcacccggcacacaacacttggtttgctcaacaaagccaaagcacacatcaagaaacttgaagaagctgaaagaaaaagccagcaccagctcgagaatttggaacgagaacagagatttttaaagtggcgactggaacagctgcagggtcctcaggagatggaacgaatacgaatggacagcattggatcaactatttcttcagatcgttctgattcagagcgagaggagattgaagtggatgttgaaagcacagagttctcccatggagaagtggacaatataagtaccaccagcatcagtgacattgatgaccacagcagcctgccgagtattgggagtgacgagggttactccagtgccagtgtcaaactttcattcacttcatagaacccagcatgacataacagtgcagggcaaaatattcactgggccaattcaatacaaacaatctcttaaattgggttcatgatgcagtctcctctttaaaacaaaacaaaacaaaacaaaactatacttgaacaaaagggtcagaggacctgtatttaagcaaatacttagcaaaaagtggggcagagcctcccaaggagaacaaatattcagaatattcatattggaaaaatcacaatttttaatggcagcagaaaacttgtgtgaaattttcttgatttgagttgattgagaagaggacattggagatgccatcctctttctcttttctagtttgctcatactacattgagtagacacatttaaggatggggttatgaacccttcctgagctttatggtcctaaaagcaaaataaaaactattcgaatgaaaagacaagaaaatcaggtattaatcttggatagctaataatgagctattaaaactcagcctgggacagtttatcatgaagcctgtggatgatcaatcctttattattatttttttttttttgaaaaaagctcatttcatgctctgcaaaaggagagactcccatgaagccttttgaaagggatcatcatgcagctcaactttctgttggattccatgctaagcaagctaaccttatcctgcattgttagcactaggcacccagctgccacctctccatcctgctgcccttaggccacatgggagcagtccatgcatgacagcctctatcctacaaggcctatgagtatggattgggggggccaaaaggaaaaagctccatgtgcctctttgtctgcgtgggtcagaagagttgtgcacgcagattagcaggccaaggtctgagccacagcagcatttttatttcagattttgataactgtttatatgtgttgaaaaccaaaatgacatctttttaaagcttatccataaaaaaaaatagatgtcttttatagtggaaaaacacatggggaaaaaaatcatctattttgatgcagcatttgataatgataaaacacctcacacctcactctttatagtgcacaaaatgaatgaggtctgggctaggtagaaaaagggtcaatgctatttttgtttttagaatcattaccttttaccagcttttaaccatctgatatctatagtagacacactatcatagttaacatagttaagttcagcacttgtctcattttaatgtaaagatttgcttccattttcctacaggcagtctctctcttcctcacagtcccactgtgcaggtgctattgttactcttacgaatattttcagtaatgttattttcttctaagtgaaatttctagcctgcactttgatgtcatgtgttccctttgtctttcaaactccaaggttcccctgtggccctctcccttaccctgggaaggcctcttggagaccttacccctggctgtttggactttgtatactttaaataatttaactacccttaattacttaaaaaaaaaaaaaaaagctttatgattttcataacttattgctgattttaatggattgttaatttcagtcctgtagttttattttatgtttagatagggctgggcaaggaaaaagaaaataaagacaaccatatttagca

SEQ ID NO: 384416 - DNA, 3308 bp, Homo sapiens
  misc_feature (69)..(69): n is a, c, g, or t
  misc_feature (75)..(75): n is a, c, g, or t
cgcggggaggggtaaacaaaccacgcgcgggctgcccgcggcacggcgggcgcggctggcgcggctggngcggcnggggcggcaggggcggcggagagcgcgccgagccgcggccgagctggcccgcccgcccgtcgcacatgttccggaacggcgcccggccgtagccgcctgcggcgcctcctgtcggcccgagaagggagtgcggagaggcgccggtcgccacccgcggtgcccatggagcgggtgaagatgatcaacgtgcagcgtctgctggaggctgccgagtttttggagcgccgggagcgagagtgtgaacatggctacgcctcttcattcccgtccatgccgagcccccgactgcagcattcaaagcccccacggaggttgagccgggcacagaaacacagcagcgggagcagcaacaccagcactgccaacagatctacacacaatgagctggaaaagaatcgacgagctcatctgcgcctttgtttagaacgcttaaaagttctgattccactaggaccagactgcacccggcacacaacacttggtttgctcaacaaagccaaagcacacatcaagaaacttgaagaagctgaaagaaaaagccagcaccagctcgagaatttggaacgagaacagagatttttaaagtggcgactggaacagctgcagggtcctcaggagatggaacgaatacgaatggacagcattggatcaactatttcttcagatcgttctgattcagagcgagaggagattgaagtggatgttgaaagcacagagttctcccatggagaagtggacaatataagtaccaccagcatcagtgacattgatgaccacagcagcctgccgagtattgggagtgacgagggttactccagtgccagtgtcaaactttcattcacttcatagaacccagcatgacataacagtgcagggcaaaatattcactgggccaattcaatacaaacaatctcttaaattgggttcatgatgcagtctcctctttaaaacaaaacaaaacaaaacaaaactatacttgaacaaaagggtcagaggacctgtatttaagcaaatacttagcaaaaagtggggcagagcctcccaaggagaacaaatattcagaatattcatattggaaaaatcacaatttttaatggcagcagaaaacttgtgtgaaattttcttgatttgagttgattgagaagaggacattggagatgccatcctctttctcttttctagtttgctcatactacattgagtagacacatttaaggatggggttatgaacccttcctgagctttatggtcctaaaagcaaaataaaaactattcgaatgaaaagacaagaaaatcaggtattaatcttggatagctaataatgagctattaaaactcagcctgggacagtttatcatgaagcctgtggatgatcaatcctttattattatttttttttttttgaaaaaagctcatttcatgctctgcaaaaggagagactcccatgaagccttttgaaagggatcatcatgcagctcaactttctgttggattccatgctaagcaagctaaccttatcctgcattgttagcactaggcacccagctgccacctctccatcctgctgcccttaggccacatgggagcagtccatgcatgacagcctctatcctacaaggcctatgagtatggattgggggggccaaaaggaaaaagctccatgtgcctctttgtctgcgtgggtcagaagagttgtgcacgcagattagcaggccaaggtctgagccacagcagcatttttatttcagattttgataactgtttatatgtgttgaaaaccaaaatgacatctttttaaagcttatccataaaaaaaaatagatgtcttttatagtggaaaaacacatggggaaaaaaatcatctattttgatgcagcatttgataatgataaaacacctcacacctcactctttatagtgcacaaaatgaatgaggtctgggctaggtagaaaaagggtcaatgctatttttgtttttagaatcattaccttttaccagcttttaaccatctgatatctatagtagacacactatcatagttaacatagttaagttcagcacttgtctcattttaatgtaaagatttgcttccattttcctacaggcagtctctctcttcctcacagtcccactgtgcaggtgctattgttactcttacgaatattttcagtaatgttattttcttctaagtgaaatttctagcctgcactttgatgtcatgtgttccctttgtctttcaaactccaaggttcccctgtggccctctcccttaccctgggaaggcctcttggagaccttacccctggctgtttggactttgtatactttaaataatttaactacccttaattacttaaaaaaaaaaaaaaaagctttatgattttcataacttattgctgattttaatggattgttaatttcagtcctgtagttttattttatgtttagatagggctgggcaaggaaaaagaaaataaagacaaccatatttagcagtgcagttgagttgtgtgttaatgttagactatccctttgtgagtgacactttaacagcattcactgcttctatatatagtgtaccatcttggtcatacattacgcctcaacatatacttgtgctcttcctttgcctccagaagaagtttttccttgattgtgctatgtttcagtggaagaaattctttgaagtagatgtgagtgaaaaactgcatgcctttagaagcccagtatcagaacttgctacgtttcaggtgctagggacttaatgaaaaacaggacaaaacaattcctttttgtggcccaggtaaattatttctggtttcacttataattactaatggctgagtcaagatgttgtctctgtgtttgcttactcttgatcaagtgtgagacagtttgaagactgtgctaccatacaaagtgaatgaagccagtgactaagcttctgtttgttttgttattctcatggccttcgcttgcattatttgggccttcattcagatgaacttgaggtgccattttgttgcatatgtacaggattatgggctggaaagcatttgttataaacctatagtgcacattttaactgccccctaaattacccttccctgggtttgttttccttggggtggtgtagattgtatgagtaagaagtattaattttttaaaagacaaatcaactttgaagacacaaaagttaattggaagaaataaaaactgtgaacgaagaata

SEQ ID NO: 384417 - DNA, 3212 bp, Homo sapiens
cgcggggaggggtaaacaaaccacgcgcgggccgcccgtcgcacatgttccggaacggcgcccggccgtagccgcctgcggcgcctcctgtcggcccgagaagggagtgcggagaggcgccggtcgccacccgcggtgcccatggagcgggtgaagatgatcaacgtgcagcgtctgctggaggctgccgagtttttggagcgccgggagcgagagtgtgaacatggctacgcctcttcattcccgtccatgccgagcccccgactgcagcattcaaagcccccacggaggttgagccgggcacagaaacacagcagcgggagcagcaacaccagcactgccaacagatctacacacaatgagctggaaaagaatcgacgagctcatctgcgcctttgtttagaacgcttaaaagttctgattccactaggaccagactgcacccggcacacaacacttggtttgctcaacaaagccaaagcacacatcaagaaacttgaagaagctgaaagaaaaagccagcaccagctcgagaatttggaacgagaacagagatttttaaagtggcgactggaacagctgcagggtcctcaggagatggaacgaatacgaatggacagcattggatcaactatttcttcagatcgttctgattcagagcgagaggagattgaagtggatgttgaaagcacagagttctcccatggagaagtggacaatataagtaccaccagcatcagtgacattgatgaccacagcagcctgccgagtattgggagtgacgagggttactccagtgccagtgtcaaactttcattcacttcatagaacccagcatgacataacagtgcagggcaaaatattcactgggccaattcaatacaaacaatctcttaaattgggttcatgatgcagtctcctctttaaaacaaaacaaaacaaaacaaaactatacttgaacaaaagggtcagaggacctgtatttaagcaaatacttagcaaaaagtggggcagagcctcccaaggagaacaaatattcagaatattcatattggaaaaatcacaatttttaatggcagcagaaaacttgtgtgaaattttcttgatttgagttgattgagaagaggacattggagatgccatcctctttctcttttctagtttgctcatactacattgagtagacacatttaaggatggggttatgaacccttcctgagctttatggtcctaaaagcaaaataaaaactattcgaatgaaaagacaagaaaatcaggtattaatcttggatagctaataatgagctattaaaactcagcctgggacagtttatcatgaagcctgtggatgatcaatcctttattattatttttttttttttgaaaaaagctcatttcatgctctgcaaaaggagagactcccatgaagccttttgaaagggatcatcatgcagctcaactttctgttggattccatgctaagcaagctaaccttatcctgcattgttagcactaggcacccagctgccacctctccatcctgctgcccttaggccacatgggagcagtccatgcatgacagcctctatcctacaaggcctatgagtatggattgggggggccaaaaggaaaaagctccatgtgcctctttgtctgcgtgggtcagaagagttgtgcacgcagattagcaggccaaggtctgagccacagcagcatttttatttcagattttgataactgtttatatgtgttgaaaaccaaaatgacatctttttaaagcttatccataaaaaaaaatagatgtcttttatagtggaaaaacacatggggaaaaaaatcatctattttgatgcagcatttgataatgataaaacacctcacacctcactctttatagtgcacaaaatgaatgaggtctgggctaggtagaaaaagggtcaatgctatttttgtttttagaatcattaccttttaccagcttttaaccatctgatatctatagtagacacactatcatagttaacatagttaagttcagcacttgtctcattttaatgtaaagatttgcttccattttcctacaggcagtctctctcttcctcacagtcccactgtgcaggtgctattgttactcttacgaatattttcagtaatgttattttcttctaagtgaaatttctagcctgcactttgatgtcatgtgttccctttgtctttcaaactccaaggttcccctgtggccctctcccttaccctgggaaggcctcttggagaccttacccctggctgtttggactttgtatactttaaataatttaactacccttaattacttaaaaaaaaaaaaaaaagctttatgattttcataacttattgctgattttaatggattgttaatttcagtcctgtagttttattttatgtttagatagggctgggcaaggaaaaagaaaataaagacaaccatatttagcagtgcagttgagttgtgtgttaatgttagactatccctttgtgagtgacactttaacagcattcactgcttctatatatagtgtaccatcttggtcatacattacgcctcaacatatacttgtgctcttcctttgcctccagaagaagtttttccttgattgtgctatgtttcagtggaagaaattctttgaagtagatgtgagtgaaaaactgcatgcctttagaagcccagtatcagaacttgctacgtttcaggtgctagggacttaatgaaaaacaggacaaaacaattcctttttgtggcccaggtaaattatttctggtttcacttataattactaatggctgagtcaagatgttgtctctgtgtttgcttactcttgatcaagtgtgagacagtttgaagactgtgctaccatacaaagtgaatgaagccagtgactaagcttctgtttgttttgttattctcatggccttcgcttgcattatttgggccttcattcagatgaacttgaggtgccattttgttgcatatgtacaggattatgggctggaaagcatttgttataaacctatagtgcacattttaactgccccctaaattacccttccctgggtttgttttccttggggtggtgtagattgtatgagtaagaagtattaattttttaaaagacaaatcaactttgaagacacaaaagttaattggaagaaataaaaactgtgaacgaagaata

SEQ ID NO: 384418 - DNA, 3721 bp, Homo sapiens
gggtgctgggagataagaggaaggaggaacacggatgctggggggggtcaggggaagggacgaggccgggagaacactgagcgggggaaaaccggtggagaggggcctttgaatacctgcggggtgatgagatggggtccctttagcggtggcagcccaaggggctgtagagatggcgcagaaagaccaggaactcggagactgtggtgtcgagagagaaaatgtctttctaagacttgttcgaagtacacaaaaatattgggcttaaagagactctttagaacagagagagttgaaagtaaaggggaatttttgaggcaagcgaagtcaatgaggtgaatggtaactggtcacaaaatttttgttctaaagcatctgaaatctcaagttcttgggagagaaggattttggaaaggggggataaactctttggtttagaggaggtatcaaaacaccttccagctggtggggtgtcacaggattgatgtccaggcgagggacattaattttctaaccaaaaagagtggaaacattttacctcttttcctgctttcaaaaacctgttactgcaaagacctcggattgtgggtcaatggatttgggtactatattcttcttaccgtatctttttttcttgctttcttcagagtgtgaacatggctacgcctcttcattcccgtccatgccgagcccccgactgcagcattcaaagcccccacggaggttgagccgggcacagaaacacagcagcgggagcagcaacaccagcactgccaacagatctacacacaatgagctggaaaagaatcgcttgaagaattggttggttgggagaagggataccagaggcatgaagatgcttttgaaggctattgcagtaatctagacgagctcatctgcgcctttgtttagaacgcttaaaagttctgattccactaggaccagactgcacccggcacacaacacttggtttgctcaacaaagccaaagcacacatcaagaaacttgaagaagctgaaagaaaaagccagcaccagctcgagaatttggaacgagaacagagatttttaaagtggcgactggaacagctgcagggtcctcaggagatggaacgaatacgaatggacagcattggatcaactatttcttcagatcgttctgattcagagcgagaggagattgaagtggatgttgaaagcacagagttctcccatggagaagtggacaatataagtaccaccagcatcagtgacattgatgaccacagcagcctgccgagtattgggagtgacgagggttactccagtgccagtgtcaaactttcattcacttcatagaacccagcatgacataacagtgcagggcaaaatattcactgggccaattcaatacaaacaatctcttaaattgggttcatgatgcagtctcctctttaaaacaaaacaaaacaaaacaaaactatacttgaacaaaagggtcagaggacctgtatttaagcaaatacttagcaaaaagtggggcagagcctcccaaggagaacaaatattcagaatattcatattggaaaaatcacaatttttaatggcagcagaaaacttgtgtgaaattttcttgatttgagttgattgagaagaggacattggagatgccatcctctttctcttttctagtttgctcatactacattgagtagacacatttaaggatggggttatgaacccttcctgagctttatggtcctaaaagcaaaataaaaactattcgaatgaaaagacaagaaaatcaggtattaatcttggatagctaataatgagctattaaaactcagcctgggacagtttatcatgaagcctgtggatgatcaatcctttattattatttttttttttttgaaaaaagctcatttcatgctctgcaaaaggagagactcccatgaagccttttgaaagggatcatcatgcagctcaactttctgttggattccatgctaagcaagctaaccttatcctgcattgttagcactaggcacccagctgccacctctccatcctgctgcccttaggccacatgggagcagtccatgcatgacagcctctatcctacaaggcctatgagtatggattgggggggccaaaaggaaaaagctccatgtgcctctttgtctgcgtgggtcagaagagttgtgcacgcagattagcaggccaaggtctgagccacagcagcatttttatttcagattttgataactgtttatatgtgttgaaaaccaaaatgacatctttttaaagcttatccataaaaaaaaatagatgtcttttatagtggaaaaacacatggggaaaaaaatcatctattttgatgcagcatttgataatgataaaacacctcacacctcactctttatagtgcacaaaatgaatgaggtctgggctaggtagaaaaagggtcaatgctatttttgtttttagaatcattaccttttaccagcttttaaccatctgatatctatagtagacacactatcatagttaacatagttaagttcagcacttgtctcattttaatgtaaagatttgcttccattttcctacaggcagtctctctcttcctcacagtcccactgtgcaggtgctattgttactcttacgaatattttcagtaatgttattttcttctaagtgaaatttctagcctgcactttgatgtcatgtgttccctttgtctttcaaactccaaggttcccctgtggccctctcccttaccctgggaaggcctcttggagaccttacccctggctgtttggactttgtatactttaaataatttaactacccttaattacttaaaaaaaaaaaaaaaagctttatgattttcataacttattgctgattttaatggattgttaatttcagtcctgtagttttattttatgtttagatagggctgggcaaggaaaaagaaaataaagacaaccatatttagcagtgcagttgagttgtgtgttaatgttagactatccctttgtgagtgacactttaacagcattcactgcttctatatatagtgtaccatcttggtcatacattacgcctcaacatatacttgtgctcttcctttgcctccagaagaagtttttccttgattgtgctatgtttcagtggaagaaattctttgaagtagatgtgagtgaaaaactgcatgcctttagaagcccagtatcagaacttgctacgtttcaggtgctagggacttaatgaaaaacaggacaaaacaattcctttttgtggcccaggtaaattatttctggtttcacttataattactaatggctgagtcaagatgttgtctctgtgtttgcttactcttgatcaagtgtgagacagtttgaagactgtgctaccatacaaagtgaatgaagccagtgactaagcttctgtttgttttgttattctcatggccttcgcttgcattatttgggccttcattcagatgaacttgaggtgccattttgttgcatatgtacaggattatgggctggaaagcatttgttataaacctatagtgcacattttaactgccccctaaattacccttccctgggtttgttttccttggggtggtgtagattgtatgagtaagaagtattaattttttaaaagacaaatcaactttgaagacacaaaagttaattggaagaaataaaaactgtgaacgaagaata

SEQ ID NO: 384419 - DNA, 3496 bp, Homo sapiens
cggtccgatggcgacaggctcgcactaggacccaggcgccagagtgcctccgtctgtcctgtaggttcattcaatctcccatacacacagactcacagcgagaccgacacacactcccatacactcacacacacaactgcaggcagcgaggctcgggaagtcaggccggcttttcgccccggcgccttctctgctccagccggccgggtctccctgggggcccggagctcggccgggccgcgcagccccgttagaggacgagctcggcggacccccgctcctccatgggcaaacgcgggcggccgcgcaaggaggcgcgctgcgagggcgcggggctggcccccgccgcgcccccggctgtgccccccgccgtggccgcgccccagcccccggccctgcccgaggaccccgctggggccaagcccaggtgccccttctcagacattttcaacaccagcgagaactcgatggagaagcacatcaacacttttctgcagaacgtgcagattctgctcgaggccgccagctacctggagcagatcgagaaagaaaacaaaaagtgtgaacatggctacgcctcttcattcccgtccatgccgagcccccgactgcagcattcaaagcccccacggaggttgagccgggcacagaaacacagcagcgggagcagcaacaccagcactgccaacagatctacacacaatgagctggaaaagaatcgacgagctcatctgcgcctttgtttagaacgcttaaaagttctgattccactaggaccagactgcacccggcacacaacacttggtttgctcaacaaagccaaagcacacatcaagagatttttaaagtggcgactggaacagctgcagggtcctcaggagatggaacgaatacgaatggacagcattggatcaactatttcttcagatcgttctgattcagagcgagaggagattgaagtggatgttgaaagcacagagttctcccatggagaagtggacaatataagtaccaccagcatcagtgacattgatgaccacagcagcctgccgagtattgggagtgacgagggttactccagtgccagtgtcaaactttcattcacttcatagaacccagcatgacataacagtgcagggcaaaatattcactgggccaattcaatacaaacaatctcttaaattgggttcatgatgcagtctcctctttaaaacaaaacaaaacaaaacaaaactatacttgaacaaaagggtcagaggacctgtatttaagcaaatacttagcaaaaagtggggcagagcctcccaaggagaacaaatattcagaatattcatattggaaaaatcacaatttttaatggcagcagaaaacttgtgtgaaattttcttgatttgagttgattgagaagaggacattggagatgccatcctctttctcttttctagtttgctcatactacattgagtagacacatttaaggatggggttatgaacccttcctgagctttatggtcctaaaagcaaaataaaaactattcgaatgaaaagacaagaaaatcaggtattaatcttggatagctaataatgagctattaaaactcagcctgggacagtttatcatgaagcctgtggatgatcaatcctttattattatttttttttttttgaaaaaagctcatttcatgctctgcaaaaggagagactcccatgaagccttttgaaagggatcatcatgcagctcaactttctgttggattccatgctaagcaagctaaccttatcctgcattgttagcactaggcacccagctgccacctctccatcctgctgcccttaggccacatgggagcagtccatgcatgacagcctctatcctacaaggcctatgagtatggattgggggggccaaaaggaaaaagctccatgtgcctctttgtctgcgtgggtcagaagagttgtgcacgcagattagcaggccaaggtctgagccacagcagcatttttatttcagattttgataactgtttatatgtgttgaaaaccaaaatgacatctttttaaagcttatccataaaaaaaaatagatgtcttttatagtggaaaaacacatggggaaaaaaatcatctattttgatgcagcatttgataatgataaaacacctcacacctcactctttatagtgcacaaaatgaatgaggtctgggctaggtagaaaaagggtcaatgctatttttgtttttagaatcattaccttttaccagcttttaaccatctgatatctatagtagacacactatcatagttaacatagttaagttcagcacttgtctcattttaatgtaaagatttgcttccattttcctacaggcagtctctctcttcctcacagtcccactgtgcaggtgctattgttactcttacgaatattttcagtaatgttattttcttctaagtgaaatttctagcctgcactttgatgtcatgtgttccctttgtctttcaaactccaaggttcccctgtggccctctcccttaccctgggaaggcctcttggagaccttacccctggctgtttggactttgtatactttaaataatttaactacccttaattacttaaaaaaaaaaaaaaaagctttatgattttcataacttattgctgattttaatggattgttaatttcagtcctgtagttttattttatgtttagatagggctgggcaaggaaaaagaaaataaagacaaccatatttagcagtgcagttgagttgtgtgttaatgttagactatccctttgtgagtgacactttaacagcattcactgcttctatatatagtgtaccatcttggtcatacattacgcctcaacatatacttgtgctcttcctttgcctccagaagaagtttttccttgattgtgctatgtttcagtggaagaaattctttgaagtagatgtgagtgaaaaactgcatgcctttagaagcccagtatcagaacttgctacgtttcaggtgctagggacttaatgaaaaacaggacaaaacaattcctttttgtggcccaggtaaattatttctggtttcacttataattactaatggctgagtcaagatgttgtctctgtgtttgcttactcttgatcaagtgtgagacagtttgaagactgtgctaccatacaaagtgaatgaagccagtgactaagcttctgtttgttttgttattctcatggccttcgcttgcattatttgggccttcattcagatgaacttgaggtgccattttgttgcatatgtacaggattatgggctggaaagcatttgttataaacctatagtgcacattttaactgccccctaaattacccttccctgggtttgttttccttggggtggtgtagattgtatgagtaagaagtattaattttttaaaagacaaatcaactttgaagacacaaaagttaattggaagaaataaaaactgtgaacgaagaata

SEQ ID NO: 384420 - DNA, 2792 bp, Homo sapiens
acagttgactcctgaggaaaaacaaccggcaaccgactttggattgttcaacaaagccaattccacatcaagaaacttgaagaagctgaaagaaaaagccagcaccagctcgagaatttggaacgagaacagagatttttaaagtggcgactggaacagctgcagggtcctcaggagatggaacgaatacgaatggacagcattggatcaactatttcttcagatcgttctgattcagagcgagaggagattgaagtggatgttgaaagcacagagttctcccatggagaagtggacaatataagtaccaccagcatcagtgacattgatgaccacagcagcctgccgagtattgggagtgacgagggttactccagtgccagtgtcaaactttcattcacttcatagaacccagcatgacataacagtgcagggcaaaatattcactgggccaattcaatacaaacaatctcttaaattgggttcatgatgcagtctcctctttaaaacaaaacaaaacaaaacaaaactatacttgaacaaaagggtcagaggacctgtatttaagcaaatacttagcaaaaagtggggcagagcctcccaaggagaacaaatattcagaatattcatattggaaaaatcacaatttttaatggcagcagaaaacttgtgtgaaattttcttgatttgagttgattgagaagaggacattggagatgccatcctctttctcttttctagtttgctcatactacattgagtagacacatttaaggatggggttatgaacccttcctgagctttatggtcctaaaagcaaaataaaaactattcgaatgaaaagacaagaaaatcaggtattaatcttggatagctaataatgagctattaaaactcagcctgggacagtttatcatgaagcctgtggatgatcaatcctttattattatttttttttttttgaaaaaagctcatttcatgctctgcaaaaggagagactcccatgaagccttttgaaagggatcatcatgcagctcaactttctgttggattccatgctaagcaagctaaccttatcctgcattgttagcactaggcacccagctgccacctctccatcctgctgcccttaggccacatgggagcagtccatgcatgacagcctctatcctacaaggcctatgagtatggattgggggggccaaaaggaaaaagctccatgtgcctctttgtctgcgtgggtcagaagagttgtgcacgcagattagcaggccaaggtctgagccacagcagcatttttatttcagattttgataactgtttatatgtgttgaaaaccaaaatgacatctttttaaagcttatccataaaaaaaaatagatgtcttttatagtggaaaaacacatggggaaaaaaatcatctattttgatgcagcatttgataatgataaaacacctcacacctcactctttatagtgcacaaaatgaatgaggtctgggctaggtagaaaaagggtcaatgctatttttgtttttagaatcattaccttttaccagcttttaaccatctgatatctatagtagacacactatcatagttaacatagttaagttcagcacttgtctcattttaatgtaaagatttgcttccattttcctacaggcagtctctctcttcctcacagtcccactgtgcaggtgctattgttactcttacgaatattttcagtaatgttattttcttctaagtgaaatttctagcctgcactttgatgtcatgtgttccctttgtctttcaaactccaaggttcccctgtggccctctcccttaccctgggaaggcctcttggagaccttacccctggctgtttggactttgtatactttaaataatttaactacccttaattacttaaaaaaaaaaaaaaaagctttatgattttcataacttattgctgattttaatggattgttaatttcagtcctgtagttttattttatgtttagatagggctgggcaaggaaaaagaaaataaagacaaccatatttagcagtgcagttgagttgtgtgttaatgttagactatccctttgtgagtgacactttaacagcattcactgcttctatatatagtgtaccatcttggtcatacattacgcctcaacatatacttgtgctcttcctttgcctccagaagaagtttttccttgattgtgctatgtttcagtggaagaaattctttgaagtagatgtgagtgaaaaactgcatgcctttagaagcccagtatcagaacttgctacgtttcaggtgctagggacttaatgaaaaacaggacaaaacaattcctttttgtggcccaggtaaattatttctggtttcacttataattactaatggctgagtcaagatgttgtctctgtgtttgcttactcttgatcaagtgtgagacagtttgaagactgtgctaccatacaaagtgaatgaagccagtgactaagcttctgtttgttttgttattctcatggccttcgcttgcattatttgggccttcattcagatgaacttgaggtgccattttgttgcatatgtacaggattatgggctggaaagcatttgttataaacctatagtgcacattttaactgccccctaaattacccttccctgggtttgttttccttggggtggtgtagattgtatgagtaagaagtattaattttttaaaagacaaatcaactttgaagacacaaaagttaattggaagaaataaaaactgtgaacgaagaata

SEQ ID NO: 384421 - DNA, 3254 bp, Homo sapiens
  misc_feature (69)..(69): n is a, c, g, or t
  misc_feature (75)..(75): n is a, c, g, or t
cgcggggaggggtaaacaaaccacgcgcgggctgcccgcggcacggcgggcgcggctggcgcggctggngcggcnggggcggcaggggcggcggagagcgcgccgagccgcggccgagctggcccgcccgcccgtcgcacatgttccggaacggcgcccggccgtagccgcctgcggcgcctcctgtcggcccgagaagggagtgcggagaggcgccggtcgccacccgcggtgcccatggagcgggtgaagatgatcaacgtgcagcgtctgctggaggctgccgagtttttggagcgccgggagcgagagtgtgaacatggctacgcctcttcattcccgtccatgccgagcccccgactgcagcattcaaagcccccacggaggttgagccgggcacagaaacacagcagcgggagcagcaacaccagcactgccaacagatctacacacaatgagctggaaaagaatcgacgagctcatctgcgcctttgtttagaacgcttaaaagttctgattccactaggaccagactgcacccggcacacaacacttggtttgctcaacaaagccaaagcacacatcaagaaacttgaagaagctgaaagaaaaagccagcaccagctcgagaatttggaacgagaacagagatttttaaagtggcgactggaacagctgcagggtcctcaggagatggaacgaatacgaatggacagcattggatcaactatttcttcagatcgttctgattcagagcgagaggagattgaagtggatgttgaaagcacagagttctcccatggagaagtggacaatataagtaccaccagcatcagtgacattgatgaccacagcagcctgccgagtattgggagtgacgagggttactccagtgccagtgtcaaactttcattcacttcatagaacccagcatgacataacagtgcagggcaaaatattcactgggccaattcaatacaaacaatctcttaaattgggttcatgatgcagtctcctctttaaaacaaaacaaaacaaaacaaaactatacttgaacaaaagggtcagaggacctgtatttaagcaaatacttagcaaaaagtggggcagagcctcccaaggagaacaaatattcagaatattcatattggaaaaatcacaatttttaatggcagcagaaaacttgtgtgaaattttcttgatttgagttgattgagaagaggacattggagatgccatcctctttctcttttctagtttgctcatactacattgagtagacacatttaaggatggggttatgaacccttcctgagctttatggtcctaaaagcaaaataaaaactattcgaatgaaaagacaagaaaatcaggtattaatcttggatagctaataatgagctattaaaactcagcctgggacagtttatcatgaagcctgtggatgatcaatcctttattattatttttttttttttgaaaaaagctcatttcatgctctgcaaaaggagagactcccatgaagccttttgaaagggatcatcatgcagctcaactttctgttggattccatgctaagcaagctaaccttatcctgcattgttagcactaggcacccagctgccacctctccatcctgctgcccttaggccacatgggagcagtccatgcatgacagcctctatcctacaaggcctatgagtatggattgggggggccaaaaggaaaaagctccatgtgcctctttgtctgcgtgggtcagaagagttgtgcacgcagattagcaggccaaggtctgagccacagcagcatttttatttcagattttgataactgtttatatgtgttgaaaaccaaaatgacatctttttaaagcttatccataaaaaaaaatagatgtcttttatagtggaaaaacacatggggaaaaaaatcatctattttgatgcagcatttgataatgataaaacacctcacacctcactctttatagtgcacaaaatgaatgaggtctgggctaggtagaaacatctgatatctatagtagacacactatcatagttaacatagttaagttcagcacttgtctcattttaatgtaaagatttgcttccattttcctacaggcagtctctctcttcctcacagtcccactgtgcaggtgctattgttactcttacgaatattttcagtaatgttattttcttctaagtgaaatttctagcctgcactttgatgtcatgtgttccctttgtctttcaaactccaaggttcccctgtggccctctcccttaccctgggaaggcctcttggagaccttacccctggctgtttggactttgtatactttaaataatttaactacccttaattacttaaaaaaaaaaaaaaaagctttatgattttcataacttattgctgattttaatggattgttaatttcagtcctgtagttttattttatgtttagatagggctgggcaaggaaaaagaaaataaagacaaccatatttagcagtgcagttgagttgtgtgttaatgttagactatccctttgtgagtgacactttaacagcattcactgcttctatatatagtgtaccatcttggtcatacattacgcctcaacatatacttgtgctcttcctttgcctccagaagaagtttttccttgattgtgctatgtttcagtggaagaaattctttgaagtagatgtgagtgaaaaactgcatgcctttagaagcccagtatcagaacttgctacgtttcaggtgctagggacttaatgaaaaacaggacaaaacaattcctttttgtggcccaggtaaattatttctggtttcacttataattactaatggctgagtcaagatgttgtctctgtgtttgcttactcttgatcaagtgtgagacagtttgaagactgtgctaccatacaaagtgaatgaagccagtgactaagcttctgtttgttttgttattctcatggccttcgcttgcattatttgggccttcattcagatgaacttgaggtgccattttgttgcatatgtacaggattatgggctggaaagcatttgttataaacctatagtgcacattttaactgccccctaaattacccttccctgggtttgttttccttggggtggtgtagattgtatgagtaagaagtattaattttttaaaagacaaatcaactttgaagacacaaaagttaattggaagaaataaaaactgtgaacgaagaata

SEQ ID NO: 384422 - DNA, 428 bp, Homo sapiens
acttaagttgctttaacaaactaactccaaatctcagtttcctgataaagatacatttttcatttacatcactgtgcaatgtgactaagggtaggggtataagtctgttccatgcagtcactcagggacccagtctccttttgtctggtgactctgttgatccaggcagtctttctctgccaattcaggatgagatgtttaggtaagtattttatttgtgaaatgattgctatacatactcatttttaaataattcaaaatcagtagcaatgcaaaaatattctgattactttagccttatggatattatgctttgaagtcatgagtgggagttgccttaaatgttaaaatgaaaactttgtggttttaacagctaattcttttgctttctgtaaatgtctactaaagaatctagacttttctctatg

SEQ ID NO: 384423 - DNA, 2453 bp, Homo sapiens
gggtaattagtatatccatcacctcaaacattttttgttcctttgtgttgtcagcattcaaagtccctttttctggctttttgaaaacataaaataaattatagttaaccatattcaccctatagtgccacagaaagtgagaactcattcttcctgtctagctgtaattttgtatttgtgaacccacctccctccatcctctcctcccctacccttcccagcctacagtatccacagttctactctctataataaaaggaaacttgttgacagtacaacatggtatttggcttatataggtggtatttgaggctcattctgaatgtacatttttctataatggttatatatatttatgctaataagtgactcctttcttttaaaatagaatatttcagtgctttagtagtaaaattgctttcagttacatcatcaaaatctttatcattatattttagtgataatacccttgtttttatgctttaatagactgggggagggagagggaaatgtattaaacaccttaagcttagagttaaaactttaaacatcaagtgtattctcttctgactgaaaggtttgtaagagaattttgtgatcagtcttctatcattatttgttctctttgtaagaacactggcagacacatgttgttcttttagaggatatttgaatggtataaatggcatggaaaagtgtttaagaaaacacacacatttctttgaacatttcaaagtaaaatgatcataattgttctaaagtgggtatccataagagtagctggactgggcaaggtggctcacacctataatcttagtactttgggagggcaaagcgggagtatctcttgagcccaggagttccagactagccttggcaacataggaaggccctgtctctacaaaaaaataaaataattggcctggagtaggtagtaagacagtaaacaaactggaaagtccagctatttttaatttccaaccaaactgttgaatcaattaaaaaaaaaaacgagtctatagtgcctttcaaatgcctgaattttgacatttgtacatcagctgatggattaatattttgaattgctatgtgatggctctgcatgggcatggtggccagtgcttcagttttgacagcattaccatccttggtgatgacatggacagcaatgtttctacaattgtttgaaatggtaaatatatttttgattacatgctgccttttaggcatacgcttttattcattccaagtatttatcgaacctgctgttacaggatacagtgcatcctgcataaggatacagtgatgaacaaagcagacaagatccccgcagtcctgtagtttacattcttatgggacaaagactaatagtgaacaagtaaaacatgaaataataatttccatgtagagaagtgtaatgggttgatgtgatagactgacagtatgatttctttaaatcgcatattcagggaaactctttactatgaagctaacatttaactaaagactaaatggggaattggcagtgccacgatcataagaatggcttttccagatagggaagaggttgtgctaagttactaatccaggaatgagtttggcatgtcaaagaacagaaaaaaggggccactaaggctggagcttagagaggaaaggagacaatgttatgagacgggtttggagagactggctgggacctacgtcataaaaggtttttgtaaggtgatctgaagcattggattttatatagtgcgatagaagctttcagagcatttgagatagggaagtattgttacctgataaatatttgagatttttaaacacagtcttttgcatgtgatttataatttggcataaatagaagtttaaatcagtggcaatcagttaaggctgggcaagttcctctctaaatggaggtgtgttacaaaggaaaatcagtaatagtctgtaagtactcaaaactatctcagcaaggtctaggagttggggaggtagaaagacagaggtaaaaccaatctttttggtgggggaggtggggattggaagggttaaggtggaaaaataaaaagattttgaaggtctcatcccattagggatataatataatttgcttgaggaaatcatttgaatcttggtaactgtaataagcattgagagggaaggtaactatattcatttgttaaattcagtaaggaagcaaaagagtatgttgtgcaaacagtgttgtataaaaataggagaaaagaggaaacaaaatgaaataataaacataaatagaaatataaaaagtaatagagtaaaatgaaaacaagtcctatcagtagttataataactgtagtcagtatatttaacaaaagacatgctgatttgattaaacccagctatactacattgtttacaagcatcatactaaaataacaatgtgaaagtaagtttaaagccacaagagatg

SEQ ID NO: 384424 - DNA, 580 bp, Homo sapiens
gctttctgaatactaatgaacttatttgccaaaatttaaatgttcttcttgtcagtgaatgtctgtctctcttaacaggatccaaattgaataatgaagaaaattagactctattgtaccctcaggagaaatcgtggtgaatcgtaatagaatacagagggggaaaggggtcacattttagaaaaaaagagtagataatttggattattaaaaaagggattaactcaggaaaactctgttcttttcaaagaaacgtactcatagtcattcaatgagcaggatttcccactgcacaagcatctatacctttggccagtgtagaaagagagtaaggtcataatcatatggagatgcatgctaggtttcagtagttacaatttactaatctcattcccatataaggcctttatatgcctgtaatggaatgggaaaatcaataagctttgaaaaggaacactattcttcagagaagttcaatgggagatagttgagttggggaaattgccccagttcttcctttaagcatgaaatgaggctgtccctatgtatgtttacttccattgccttggtgttatcactg

SEQ ID NO: 384425 - DNA, 445 bp, Homo sapiens
gttgatagacattggcattggggttgcttccaccttttggctgtcatgaataatattgctatgaacactaatgtacaattctttgcctgaacgtaaatgttttcatttctcttgggtatttatctagaaatgaaattgctgtatgttaaccctttgtttaacctcttgaggaactggcagacttttccaaagcagctgcaccattttaaattctaaccagcagtgtttgagggttccaatttctctatatccttggtaacacttgttatctgcccttttggttagagacatcctagtgagtgtgaagtggcatctcactgtggttttgatgtgcatttccctgatagctaattgtgtggatcccttttgcttttagtgaatgaaatatctggtagtctcgtatgccaaactaaagctaaaaattaaaaatgacttctgaaatgaa

SEQ ID NO: 384426 - DNA, 235 bp, Homo sapiens
aaatatctacagtgaaaattccctccacctaaacgtagcactcttgaaaagctcacacagaaagctttctatgaagactcaggtgctcttccacatttttccaacacatcctctgcttccactgggtggagaacttgtcacccagtgtctgaattactagtgtgcttttctctctcctgctagatccttgaaggacagcactgtgccttggtctccagggaccccagaagcacac

SEQ ID NO: 384427 - DNA, 323 bp, Homo sapiens
gcttagatgcctctatgagcagagaagtcactggccaataagataaccctttctattttggaacctcttttaaaaatagttcttatagtgaactcaaatctaagggactaaaacccagctgcccatgctgaacacctgggaggtacttcagcagagtggctctgatgtgagacggcctgggtctgatcctaactccctcactgacaagctgggtgacctcagacaagttacttaacctccctgggcctccttcctctcacaacaccagcaccagaggaagcagtgtgagggagcaggaatcacatataggaaaagtggaggac

SEQ ID NO: 384428 - DNA, 429 bp, Homo sapiens
  misc_feature (122)..(122): n is a, c, g, or t
  misc_feature (145)..(145): n is a, c, g, or t
  misc_feature (165)..(165): n is a, c, g, or t
  misc_feature (169)..(169): n is a, c, g, or t
  misc_feature (171)..(171): n is a, c, g, or t
  misc_feature (194)..(194): n is a, c, g, or t
  misc_feature (201)..(201): n is a, c, g, or t
  misc_feature (209)..(209): n is a, c, g, or t
  misc_feature (213)..(213): n is a, c, g, or t
  misc_feature (285)..(285): n is a, c, g, or t
  misc_feature (347)..(347): n is a, c, g, or t
  misc_feature (352)..(353): n is a, c, g, or t
  misc_feature (360)..(361): n is a, c, g, or t
  misc_feature (415)..(415): n is a, c, g, or t
  misc_feature (429)..(429): n is a, c, g, or t
acacttcacagggatgaatataaaagatacggtctctgcctttaagtagcttacaatccagtagagggaaagggacaaataaaccccaaatcaaacaattaaataatttcagctagccatcnaatatagtataaagaaaatccangcagggtgcagtggctcatncctntntaatcccagcactttgggaggcnggggtgngtggatcncctnagctcaggagtttgagaccagcctgggcaacatggtgaaaccccatgtctatgaaaaacacaaaatttagcnaggcatggtagcacacacgtgtagtcccagctacacaggaggctgaggcaggagaatcactngagcnntggaggnngaggctgcagtgaactgagattgtgccattgcactccagcctgggcaacacagnaagacttgtctttn

SEQ ID NO: 384429 - DNA, 231 bp, Homo sapiens
ctccagctaatcactgccatccaggttatcagctttgtgctcaagctggctcttcctgtagctgcagagctgtcccagcttttacttctacatgtggcaccttccagagggaaaagaggactgtccgttctggtatgcccttcttaggagcatagatgccctttccagaaaagcctgccagcaactctgctggtttccatgcagcccagctttgagaagggagtgggatac

SEQ ID NO: 384430 - DNA, 270 bp, Homo sapiens
ggtggaggctgcagttgagccgagatttcgtcactgcactccagcctgggtgtcggatagagaccatatctaaaaaaaaaaaaaaaaaaaaaaaaaaaaatagagaaagcaggttgctaacatattcagagctaaaatatggttatcacttttgaaatattaagttctcctcaatcaataagtttaatttccaaagaggaaagtaagttcatttttataaaatcatgttttttcactcattgaaaataataagtttgaaagtagacctct

SEQ ID NO: 384431 - DNA, 972 bp, Homo sapiens
actgaatatccttcaacactttgatctgtagagcagacaatagggcaggtttctgcagtcaggttcatatataatggtccttatatcaggatgtgaatgagtatggcgtttattgagtaccggagaggattactgtagttatgcagacaaattcttttttaatggtatatcagtgttgcacagcagattttttgagtaaatatgtcacttactattactgcgcagtttcatatcagtgttttgttagtgtaggtttcttaacattgagttattgtgtttttttgtttcacttttgtattataattttagacagtttgcaattcggtttatctcttataattaagagataaatcagccatatgtctgtcacaattagatatatatgtgtgtgtgtgtttatctataaatatgaccccaatattggttatggcttatcttgtatatattctttcttagccaattttcagtggttgttttatctcacctaagtgagtagtcatggaaatattttcaccatctcttattttcaccatgtgtttaatgatgatgtttctctcacctttgtgtgagagaaacacttttgtaatttgaaggtaatttttgaaaagatttataaatctgtatttttttcagtttttcctttagaaaaattaattgttgtaaaaacacataatatttaccatcttaaatctatttaggtgtaccttttagggccagacatggtggtggctcacatctgtaatccaggattatttgagctcaaaagtttgagaccaacctgggaaacatatggagagtccctctctacaaaatgttttttaaaaatagccaggcatagtgttgtgcatctgtggttcaggctacttgcaagactgaggtgggagggttacttgagcctcagagtttgaggccgaagtgagccataattgtaccactgcactccagctttttgacagagtgagactgtgtctc

SEQ ID NO: 384432 - DNA, 1959 bp, Homo sapiens
  misc_feature (2)..(2): n is a, c, g, or t
  misc_feature (633)..(633): n is a, c, g, or t
gntgtctttagttttactgtctggagaatcagatgcacaccttcacttagctgtgaatgtcacctccacccagcccagtgcccagaggccaaaatttggcccagatctctccttacctcctagccccagcaccaggtgtattcatcagaggagcccaggtggagggtgcactgggccctctgccaagcttcctgtggggacggcaggcccagtagcctttcggccagcccgtctctgggggcactgcctgctgtggaacggccagagctcctgttcctaggtgggtgaccagaccccacacagcatgggcaacctggcccaggtcccttatctctctgtcccctggtccctttgcccaaggaaaggcccccctctccacaccatctccctatttttggaagccctctttgcagacttctccctgctctgggagtcggagcttgtgggccagccttccatctccccttgcaggtatgtcagtggcacctcccagtgaggagatgggttcaaggggagggactgggttggccttccctttgcatggtactgagtgtggagtgtgtggcaaatgcatcacacaccatgtgtccctggagctgtataaatgaggctggtctagggggtccaggactngctttatccaggaggggagcaacggacctggccacttccatccccacagccctgtttctgtgtttttggcaggatgcaacctgaagatcttcaacaaccaggagttcgctgccctcctggcccagtcggtcaaccagggctttgaggctgtctaccagttgacccgaatgtgcaccatccgcatgagcttcgtcaaaggctggggagcggagtacaggagacagactgtgaccagtaccccctgctggattgagctgcacctgaatgggcctttgcagtggcttgacaaggtcctcacccagatgggctccccaagcatccgctgttccagtgtgtcttagagacatcaagtatggtaggggagggcaggcttggggaaaatggccatgcaggaggtggagaaaattggaactctactcaacccattgttgtcaaggaagaagaaatctttctccctcaactgaaggggtgcacccacctgttttctgaaacacacgagcaaacccagaggtggatgttatgaacagctgtgtctgccaaacacatttaccctttggccccactttgaagggcaagaaatggcgtctgctctggtggcttaagtgagcagaacaggtagtattacaccaccggccccctccccccagactctttttttgagtgacagctttctgggatgtcacagtccaaccagaaacacccctctgtctaggactgcagtgtggagttcaccttggaagggcgttctaggtaggaagagcccgcagggccatgcagacctcatgcccagctctctgacgcttgtgacagtgcctcttccagtgaacattcccagcccagccccgccccgccccgccccaccactccagcagaccttgccccttgtgagctggatagacttgggatggggagggagggagttttgtctgtctccctcccctctcagaacatactgattgggaggtgcgtgttcagcagaacctgcacacaggacagcgggaaaaatcgatgagcgccacctctttaaaaactcacttacgtttgtcctttttcactttgaaaagttggaaggatctgctgaggcccagtgcatatgcaatgtatagtgtctattatcacattaatctcaaagagattcgaatgacggtaagtgttctcatgaagcaggaggcccttgtcgtgggatggcatttggtctcaggcagcaccacactgggtgcgtctccagtcatctgtaagagcttgctccagattctgatgcatacggctatattggtttatgtagtcagttgcattcattaaatcaactttatcatatgctctttt

SEQ ID NO: 384433 - DNA, 316 bp, Homo sapiens
gaagatgatgagctttgcatgtaaactcttcagtatagtgaaaacctgggtatcctgagactgtattcccatggttgctcattgtactgggtcagcaaggaaaagcaatatgaccagctgggggtagaggtcagctctgaatggaggactatgatggaggacagcgggaaaaatcgatgagcgccacctctttaaaaactcacttacgtttgtcctttttcactttgaaaagttggaaggatctgctgaggcccagtgacatgtggcagtgctcaagtgtgatagcctctgggagtgtgtgtctttgtttttacgt

SEQ ID NO: 384434 - DNA, 3888 bp, Homo sapiens
ggttggactttccttcccggaggcggcacccaaacagctaccccgtgcggaaacccaaacttctgctgccacttggagtctcgcggccgccgcctccgccccgcgttcggggccttcccgaccctgcactgctgccgtccgcccgcccggccgctcttctcttcgccgtgggagccgctccgggcgcagggccgcgcgccgagccccgcaggctgcagcgccgcggcccggcccggcgccccggcaacttcgccgagagttgaggcgaagtttgggcgaccgcggcaggccccggccgagctcccctctgcgcccccggcgtcccgtcgagcccagccccgccgggggcgctcctcgccgcccgcgcgccctccccagccatgtcgtccatcctgcctttcactcccccgatcgtgaagcgcctgctgggctggaagaagggcgagcagaacgggcaggaggagaaatggtgcgagaaggcggtcaagagcctggtcaagaaactcaagaagacggggcagctggacgagctggagaaggccatcaccacgcagaacgtcaacaccaagtgcatcaccatccccaggtccctggatggccggttgcaggtgtcccatcggaaggggctccctcatgtcatctactgccgcctgtggcgatggccagacctgcacagccaccacgagctgcgggccatggagctgtgtgagttcgccttcaatatgaagaaggacgaggtctgcgtgaatccctaccactaccagagagtagagacaccagttctacctcctgtgttggtgccacgccacacagagatcccggccgagttccccccactggacgactacagccattccatccccgaaaacactaacttccccgcaggcatcgagccccagagcaatattccagagaccccaccccctggctacctgagtgaagatggagaaaccagtgaccaccagatgaaccacagcatggacgcaggttctccaaacctatccccgaatccgatgtccccagcacataataacttggacctgcagccagttacctactgcgagccggccttctggtgctccatctcctactacgagctgaaccagcgcgtcggggagacattccacgcctcgcagccatccatgactgtggatggcttcaccgacccctccaattcggagcgcttctgcctagggctgctctccaatgtcaacaggaatgcagcagtggagctgacacggagacacatcggaagaggcgtgcggctctactacatcggaggggaggtcttcgcagagtgcctcagtgacagcgctatttttgtccagtctcccaactgtaaccagcgctatggctggcacccggccaccgtctgcaagatcccaccaggatgcaacctgaagatcttcaacaaccaggagttcgctgccctcctggcccagtcggtcaaccagggctttgaggctgtctaccagttgacccgaatgtgcaccatccgcatgagcttcgtcaaaggctggggagcggagtacaggagacagactgtgaccagtaccccctgctggattgagctgcacctgaatgggcctttgcagtggcttgacaaggtcctcacccagatgggctccccaagcatccgctgttccagtgtgtcttagagacatcaagtatggtaggggagggcaggcttggggaaaatggccatgcaggaggtggagaaaattggaactctactcaacccattgttgtcaaggaagaagaaatctttctccctcaactgaaggggtgcacccacctgttttctgaaacacacgagcaaacccagaggtggatgttatgaacagctgtgtctgccaaacacatttaccctttggccccactttgaagggcaagaaatggcgtctgctctggtggcttaagtgagcagaacaggtagtattacaccaccggccccctccccccagactctttttttgagtgacagctttctgggatgtcacagtccaaccagaaacacccctctgtctaggactgcagtgtggagttcaccttggaagggcgttctaggtaggaagagcccgcagggccatgcagacctcatgcccagctctctgacgcttgtgacagtgcctcttccagtgaacattcccagcccagccccgccccgccccgccccaccactccagcagaccttgccccttgtgagctggatagacttgggatggggagggagggagttttgtctgtctccctcccctctcagaacatactgattgggaggtgcgtgttcagcagaacctgcacacaggacagcgggaaaaatcgatgagcgccacctctttaaaaactcacttacgtttgtcctttttcactttgaaaagttggaaggatctgctgaggcccagtgcatatgcaatgtatagtgtctattatcacattaatctcaaagagattcgaatgacggtaagtgttctcatgaagcaggaggcccttgtcgtgggatggcatttggtctcaggcagcaccacactgggtgcgtctccagtcatctgtaagagcttgctccagattctgatgcatacggctatattggtttatgtagtcagttgcattcattaaatcaactttatcatatgctcttttaaatgtttggtttatatattttctttaaaaatcctgggctggcacattgactgggaaacctgagtgagacccagcaactgcttctctcccttctctctcctgaggtgaagcttttccaggttttgttgaagagatacctgccagcacttctgcaagctgaaatttacagaagcaaattcaccagaagggaaacatctcaggccaacataggcaaatgaaaagggctattaaaatatttttacacctttgaaaattgcaggcttggtacaaagaggtctgtcatcttccccctgggatataagatgatctagctcccggtagaggatcaccggtgacaactatagcagttgtattgtgtaacaagtactgctcccagcagcaattagggagaaaactagtctaaattatttcaactggaaaaaagaaaaaagagtcctcttcttttcccagccttttgcagaacacagtagacagaactgccaccttcaattggtactttattctttgctgctgtttttgtataaaatgacctatcccacgtttttgcatgaatttatagcaggaaaaatcaagggatttcctatggaagtcctgctttattccaggtgaagggaaggaagtgtatatacttttggcaagtcatacagctcaaatgtgatgagatttctgatgttagagggagatggagaggcttcctgatgcctcatctgcagggtcctgtgcctctgaagttctagccatgaggtttccaggtaggacagctgctccccaagcctcctgaggacacaggaagagacggaaggagcaccttgacagacttgtgtgagtcttctcgaaggagggttgactcagaacccagagacaatacaaaacccctcacttcctctgagagggccaaatgctgtgagtctgaagtatgtgcctggtgtgaaatgatctatggcctgtttcttacacaggaagccccctgaacctcctgtacatgtgttcatgttcccagccagctctgagacccaggaaccaaatattccattttggcttctgctagagcagtcatggttcctctcctaaaagccatgggcagcagtttccgagggcctgcatgatccacctgctgcacgatcctatgagggcttcctgtggcacacagccctctgggtgcttgggaactagcttcaggcacagcctgattctggtgatccagtgatctatggaagtcgtgtcttactccaggtgaagggggaa

SEQ ID NO: 384435 - DNA, 3483 bp, Homo sapiens
aagcgcactgaccataagagcaacatgtgggcaagagccgcggcactggggtaatttattgccgccgctcgcttcaccaggaaccccacacgctgggttcccacaggatgcgacattcccacaggatgggacaactgcatggaaacccacactcgggcctgtgttgagcaaccacgtttgagtccctggatggccggttgcaggtgtcccatcggaaggggctccctcatgtcatctactgccgcctgtggcgatggccagacctgcacagccaccacgagctgcgggccatggagctgtgtgagttcgccttcaatatgaagaaggacgaggtctgcgtgaatccctaccactaccagagagtagagacaccagttctacctcctgtgttggtgccacgccacacagagatcccggccgagttccccccactggacgactacagccattccatccccgaaaacactaacttccccgcaggcatcgagccccagagcaatattccagagaccccaccccctggctacctgagtgaagatggagaaaccagtgaccaccagatgaaccacagcatggacgcaggttctccaaacctatccccgaatccgatgtccccagcacataataacttggacctgcagccagttacctactgcgagccggccttctggtgctccatctcctactacgagctgaaccagcgcgtcggggagacattccacgcctcgcagccatccatgactgtggatggcttcaccgacccctccaattcggagcgcttctgcctagggctgctctccaatgtcaacaggaatgcagcagtggagctgacacggagacacatcggaagaggcgtgcggctctactacatcggaggggaggtcttcgcagagtgcctcagtgacagcgctatttttgtccagtctcccaactgtaaccagcgctatggctggcacccggccaccgtctgcaagatcccaccaggatgcaacctgaagatcttcaacaaccaggagttcgctgccctcctggcccagtcggtcaaccagggctttgaggctgtctaccagttgacccgaatgtgcaccatccgcatgagcttcgtcaaaggctggggagcggagtacaggagacagactgtgaccagtaccccctgctggattgagctgcacctgaatgggcctttgcagtggcttgacaaggtcctcacccagatgggctccccaagcatccgctgttccagtgtgtcttagagacatcaagtatggtaggggagggcaggcttggggaaaatggccatgcaggaggtggagaaaattggaactctactcaacccattgttgtcaaggaagaagaaatctttctccctcaactgaaggggtgcacccacctgttttctgaaacacacgagcaaacccagaggtggatgttatgaacagctgtgtctgccaaacacatttaccctttggccccactttgaagggcaagaaatggcgtctgctctggtggcttaagtgagcagaacaggtagtattacaccaccggccccctccccccagactctttttttgagtgacagctttctgggatgtcacagtccaaccagaaacacccctctgtctaggactgcagtgtggagttcaccttggaagggcgttctaggtaggaagagcccgcagggccatgcagacctcatgcccagctctctgacgcttgtgacagtgcctcttccagtgaacattcccagcccagccccgccccgccccgccccaccactccagcagaccttgccccttgtgagctggatagacttgggatggggagggagggagttttgtctgtctccctcccctctcagaacatactgattgggaggtgcgtgttcagcagaacctgcacacaggacagcgggaaaaatcgatgagcgccacctctttaaaaactcacttacgtttgtcctttttcactttgaaaagttggaaggatctgctgaggcccagtgcatatgcaatgtatagtgtctattatcacattaatctcaaagagattcgaatgacggtaagtgttctcatgaagcaggaggcccttgtcgtgggatggcatttggtctcaggcagcaccacactgggtgcgtctccagtcatctgtaagagcttgctccagattctgatgcatacggctatattggtttatgtagtcagttgcattcattaaatcaactttatcatatgctcttttaaatgtttggtttatatattttctttaaaaatcctgggctggcacattgactgggaaacctgagtgagacccagcaactgcttctctcccttctctctcctgaggtgaagcttttccaggttttgttgaagagatacctgccagcacttctgcaagctgaaatttacagaagcaaattcaccagaagggaaacatctcaggccaacataggcaaatgaaaagggctattaaaatatttttacacctttgaaaattgcaggcttggtacaaagaggtctgtcatcttccccctgggatataagatgatctagctcccggtagaggatcaccggtgacaactatagcagttgtattgtgtaacaagtactgctcccagcagcaattagggagaaaactagtctaaattatttcaactggaaaaaagaaaaaagagtcctcttcttttcccagccttttgcagaacacagtagacagaactgccaccttcaattggtactttattctttgctgctgtttttgtataaaatgacctatcccacgtttttgcatgaatttatagcaggaaaaatcaagggatttcctatggaagtcctgctttattccaggtgaagggaaggaagtgtatatacttttggcaagtcatacagctcaaatgtgatgagatttctgatgttagagggagatggagaggcttcctgatgcctcatctgcagggtcctgtgcctctgaagttctagccatgaggtttccaggtaggacagctgctccccaagcctcctgaggacacaggaagagacggaaggagcaccttgacagacttgtgtgagtcttctcgaaggagggttgactcagaacccagagacaatacaaaacccctcacttcctctgagagggccaaatgctgtgagtctgaagtatgtgcctggtgtgaaatgatctatggcctgtttcttacacaggaagccccctgaacctcctgtacatgtgttcatgttcccagccagctctgagacccaggaaccaaatattccattttggcttctgctagagcagtcatggttcctctcctaaaagccatgggcagcagtttccgagggcctgcatgatccacctgctgcacgatcctatgagggcttcctgtggcacacagccctctgggtgcttgggaactagcttcaggcacagcctgattctggtgatccagtgatctatggaagtcgtgtcttactccaggtgaagggggaa

SEQ ID NO: 384436 - DNA, 4105 bp, Homo sapiens
ttgacacagctagccatcagaacgtcctccagtcccatctgagtcctgttcctcctcaggcacctcctccaggaagcattcccagatgactggcccatcctgccctttccctcctctgagccgcaccctgcagacggccctctacctgtgaatccatacaggatgtaggcaaaggggaagaggtttgctcatcctctctccttcacccttgtgcatattaatactcacctggcaattagtcatatgcaactcttatattgaccttacatgttccgtgtcttctgtgcccgtctctggagttcctgaagatgaagggctgtgtctgctgcaccttcagactttttgaaattgattggttggtttgtacatccatttattcaccccacccctcatcctactgtacacgcttatggtcagtctattctgtgtcgggctcagggcctttctccccaaagtgcgttcatgtccaaggctagagtggatggctagaggccagaggacagcttaggctgaaagtggtagggagactatcaatgaagctggggggagctgagcttctgaaacttgggaataaattttcagccttgctaatgtgttcctctgaaaaaatatcttatcaggccctcagatatccaccagttctccctttccaacttgcagcctgcacccttggccaggaagttcataggcaacaaaatagaatccaccttccctatcactcaccccttttaaaatgtgactaactctgagctaaccaagcctggccagacgtggatatggttatgcacggactccgttttgtggtccctggatggccggttgcaggtgtcccatcggaaggggctccctcatgtcatctactgccgcctgtggcgatggccagacctgcacagccaccacgagctgcgggccatggagctgtgtgagttcgccttcaatatgaagaaggacgaggtctgcgtgaatccctaccactaccagagagtagagacaccagttctacctcctgtgttggtgccacgccacacagagatcccggccgagttccccccactggacgactacagccattccatccccgaaaacactaacttccccgcaggcatcgagccccagagcaatattccagagaccccaccccctggctacctgagtgaagatggagaaaccagtgaccaccagatgaaccacagcatggacgcaggttctccaaacctatccccgaatccgatgtccccagcacataataacttggacctgcagccagttacctactgcgagccggccttctggtgctccatctcctactacgagctgaaccagcgcgtcggggagacattccacgcctcgcagccatccatgactgtggatggcttcaccgacccctccaattcggagcgcttctgcctagggctgctctccaatgtcaacaggaatgcagcagtggagctgacacggagacacatcggaagaggcgtgcggctctactacatcggaggggaggtcttcgcagagtgcctcagtgacagcgctatttttgtccagtctcccaactgtaaccagcgctatggctggcacccggccaccgtctgcaagatcccaccaggatgcaacctgaagatcttcaacaaccaggagttcgctgccctcctggcccagtcggtcaaccagggctttgaggctgtctaccagttgacccgaatgtgcaccatccgcatgagcttcgtcaaaggctggggagcggagtacaggagacagactgtgaccagtaccccctgctggattgagctgcacctgaatgggcctttgcagtggcttgacaaggtcctcacccagatgggctccccaagcatccgctgttccagtgtgtcttagagacatcaagtatggtaggggagggcaggcttggggaaaatggccatgcaggaggtggagaaaattggaactctactcaacccattgttgtcaaggaagaagaaatctttctccctcaactgaaggggtgcacccacctgttttctgaaacacacgagcaaacccagaggtggatgttatgaacagctgtgtctgccaaacacatttaccctttggccccactttgaagggcaagaaatggcgtctgctctggtggcttaagtgagcagaacaggtagtattacaccaccggccccctccccccagactctttttttgagtgacagctttctgggatgtcacagtccaaccagaaacacccctctgtctaggactgcagtgtggagttcaccttggaagggcgttctaggtaggaagagcccgcagggccatgcagacctcatgcccagctctctgacgcttgtgacagtgcctcttccagtgaacattcccagcccagccccgccccgccccgccccaccactccagcagaccttgccccttgtgagctggatagacttgggatggggagggagggagttttgtctgtctccctcccctctcagaacatactgattgggaggtgcgtgttcagcagaacctgcacacaggacagcgggaaaaatcgatgagcgccacctctttaaaaactcacttacgtttgtcctttttcactttgaaaagttggaaggatctgctgaggcccagtgcatatgcaatgtatagtgtctattatcacattaatctcaaagagattcgaatgacggtaagtgttctcatgaagcaggaggcccttgtcgtgggatggcatttggtctcaggcagcaccacactgggtgcgtctccagtcatctgtaagagcttgctccagattctgatgcatacggctatattggtttatgtagtcagttgcattcattaaatcaactttatcatatgctcttttaaatgtttggtttatatattttctttaaaaatcctgggctggcacattgactgggaaacctgagtgagacccagcaactgcttctctcccttctctctcctgaggtgaagcttttccaggttttgttgaagagatacctgccagcacttctgcaagctgaaatttacagaagcaaattcaccagaagggaaacatctcaggccaacataggcaaatgaaaagggctattaaaatatttttacacctttgaaaattgcaggcttggtacaaagaggtctgtcatcttccccctgggatataagatgatctagctcccggtagaggatcaccggtgacaactatagcagttgtattgtgtaacaagtactgctcccagcagcaattagggagaaaactagtctaaattatttcaactggaaaaaagaaaaaagagtcctcttcttttcccagccttttgcagaacacagtagacagaactgccaccttcaattggtactttattctttgctgctgtttttgtataaaatgacctatcccacgtttttgcatgaatttatagcaggaaaaatcaagggatttcctatggaagtcctgctttattccaggtgaagggaaggaagtgtatatacttttggcaagtcatacagctcaaatgtgatgagatttctgatgttagagggagatggagaggcttcctgatgcctcatctgcagggtcctgtgcctctgaagttctagccatgaggtttccaggtaggacagctgctccccaagcctcctgaggacacaggaagagacggaaggagcaccttgacagacttgtgtgagtcttctcgaaggagggttgactcagaacccagagacaatacaaaacccctcacttcctctgagagggccaaatgctgtgagtctgaagtatgtgcctggtgtgaaatgatctatggcctgtttcttacacaggaagccccctgaacctcctgtacatgtgttcatgttcccagccagctctgagacccaggaaccaaatattccattttggcttctgctagagcagtcatggttcctctcctaaaagccatgggcagcagtttccgagggcctgcatgatccacctgctgcacgatcctatgagggcttcctgtggcacacagccctctgggtgcttgggaactagcttcaggcacagcctgattctggtgatccagtgatctatggaagtcgtgtcttactccaggtgaagggggaa

SEQ ID NO: 384437 - DNA, 3967 bp, Homo sapiens
ttgacacagctagccatcagaacgtcctccagtcccatctgagtcctgttcctcctcaggcacctcctccaggaagcattcccagatgactggcccatcctgccctttccctcctctgagccgcaccctgcagacggccctctacctgtgaatccatacaggatgtaggcaaaggggaagaggtttgctcatcctctctccttcacccttgtgcatattaatactcacctggcaattagtcatatgcaactcttatattgaccttacatgttccgtgtcttctgtgcccgtctctggagttcctgaagatgaagggctgtgtctgctgcaccttcagactttttgaaattgattggttggtttgtacatccatttattcaccccacccctcatcctactgtacacgcttatggtcagtctattctgtgtcgggctcagggcctttctccccaaagtgcgttcatgtccaaggctagagtggatggctagaggccagaggacagcttaggctgaaagtggtagggagactatcaatgaagctggggggagctgagcttctgaaacttgggaataaattttcagccttgctaatgtgttcctctgaaaaaatatcttatcaggccctcagatatccaccagttctccctttccaacttgcagcctgcacccttggccaggaagttcataggcaacaaaatagaatccaccttccctatcactcaccccttttaaaatgtgactaactctgagctaaccaagcctggccagacgtggatatggttatgcacggactccgttttgtggtccctggatggccggttgcaggtgtcccatcggaaggggctccctcatgtcatctactgccgcctgtggcgatggccagacctgcacagccaccacgagctgcgggccatggagctgtgtgagttcgccttcaatatgaagaaggacgaggtctgcgtgaatccctaccactaccagagagtagagacaccagttctacctcctgtgttggtgccacgccacacagagatcccggccgagttccccccactggacgactacagccattccatccccgaaaacactaacttccccgcaggcatcgagccccagagcaatattccagagaccccaccccctggctacctgagtgaagatggagaaaccagtgaccaccagatgaaccacagcatggacgcaggttctccaaacctatccccgaatccgatgtccccagcacataataacttggacctgcagccagttacctactgcgagccggccttctggtgctccatctcctactacgagctgaaccagcgcgtcggggagacattccacgcctcgcagccatccatgactgtggatggcttcaccgacccctccaattcggagcgcttctgcctagggctgctctccaatgtcaacaggaatgcagcagtggagctgacacggagacacatcggatgcaacctgaagatcttcaacaaccaggagttcgctgccctcctggcccagtcggtcaaccagggctttgaggctgtctaccagttgacccgaatgtgcaccatccgcatgagcttcgtcaaaggctggggagcggagtacaggagacagactgtgaccagtaccccctgctggattgagctgcacctgaatgggcctttgcagtggcttgacaaggtcctcacccagatgggctccccaagcatccgctgttccagtgtgtcttagagacatcaagtatggtaggggagggcaggcttggggaaaatggccatgcaggaggtggagaaaattggaactctactcaacccattgttgtcaaggaagaagaaatctttctccctcaactgaaggggtgcacccacctgttttctgaaacacacgagcaaacccagaggtggatgttatgaacagctgtgtctgccaaacacatttaccctttggccccactttgaagggcaagaaatggcgtctgctctggtggcttaagtgagcagaacaggtagtattacaccaccggccccctccccccagactctttttttgagtgacagctttctgggatgtcacagtccaaccagaaacacccctctgtctaggactgcagtgtggagttcaccttggaagggcgttctaggtaggaagagcccgcagggccatgcagacctcatgcccagctctctgacgcttgtgacagtgcctcttccagtgaacattcccagcccagccccgccccgccccgccccaccactccagcagaccttgccccttgtgagctggatagacttgggatggggagggagggagttttgtctgtctccctcccctctcagaacatactgattgggaggtgcgtgttcagcagaacctgcacacaggacagcgggaaaaatcgatgagcgccacctctttaaaaactcacttacgtttgtcctttttcactttgaaaagttggaaggatctgctgaggcccagtgcatatgcaatgtatagtgtctattatcacattaatctcaaagagattcgaatgacggtaagtgttctcatgaagcaggaggcccttgtcgtgggatggcatttggtctcaggcagcaccacactgggtgcgtctccagtcatctgtaagagcttgctccagattctgatgcatacggctatattggtttatgtagtcagttgcattcattaaatcaactttatcatatgctcttttaaatgtttggtttatatattttctttaaaaatcctgggctggcacattgactgggaaacctgagtgagacccagcaactgcttctctcccttctctctcctgaggtgaagcttttccaggttttgttgaagagatacctgccagcacttctgcaagctgaaatttacagaagcaaattcaccagaagggaaacatctcaggccaacataggcaaatgaaaagggctattaaaatatttttacacctttgaaaattgcaggcttggtacaaagaggtctgtcatcttccccctgggatataagatgatctagctcccggtagaggatcaccggtgacaactatagcagttgtattgtgtaacaagtactgctcccagcagcaattagggagaaaactagtctaaattatttcaactggaaaaaagaaaaaagagtcctcttcttttcccagccttttgcagaacacagtagacagaactgccaccttcaattggtactttattctttgctgctgtttttgtataaaatgacctatcccacgtttttgcatgaatttatagcaggaaaaatcaagggatttcctatggaagtcctgctttattccaggtgaagggaaggaagtgtatatacttttggcaagtcatacagctcaaatgtgatgagatttctgatgttagagggagatggagaggcttcctgatgcctcatctgcagggtcctgtgcctctgaagttctagccatgaggtttccaggtaggacagctgctccccaagcctcctgaggacacaggaagagacggaaggagcaccttgacagacttgtgtgagtcttctcgaaggagggttgactcagaacccagagacaatacaaaacccctcacttcctctgagagggccaaatgctgtgagtctgaagtatgtgcctggtgtgaaatgatctatggcctgtttcttacacaggaagccccctgaacctcctgtacatgtgttcatgttcccagccagctctgagacccaggaaccaaatattccattttggcttctgctagagcagtcatggttcctctcctaaaagccatgggcagcagtttccgagggcctgcatgatccacctgctgcacgatcctatgagggcttcctgtggcacacagccctctgggtgcttgggaactagcttcaggcacagcctgattctggtgatccagtgatctatggaagtcgtgtcttactccaggtgaagggggaa

SEQ ID NO: 384438 - DNA, 2611 bp, Homo sapiens
ggttggactttccttcccggaggcggcacccaaacagctaccccgtgcggaaacccaaacttctgctgccacttggagtctcgcggccgccgcctccgccccgcgttcggggccttcccgaccctgcactgctgccgtccgcccgcccggccgctcttctcttcgccgtgggagccgctccgggcgcagggccgcgcgccgagccccgcaggctgcagcgccgcggcccggcccggcgccccggcaacttcgccgagagttgaggcgaagtttgggcgaccgcggcaggccccggccgagctcccctctgcgcccccggcgtcccgtcgagcccagccccgccgggggcgctcctcgccgcccgcgcgccctccccagccatgtcgtccatcctgcctttcactcccccgatcgtgaagcgcctgctgggctggaagaagggcgagcagaacgggcaggaggagaaatggtgcgagaaggcggtcaagagcctggtcaagaaactcaagaagacggggcagctggacgagctggagaaggccatcaccacgcagaacgtcaacaccaagtgcatcaccatccccaggtccctggatggccggttgcaggtgtcccatcggaaggggctccctcatgtcatctactgccgcctgtggcgatggccagacctgcacagccaccacgagctgcgggccatggagctgtgtgagttcgccttcaatatgaagaaggacgaggtctgcgtgaatccctaccactaccagagagtagagacaccagttctacctcctgtgttggtgccacgccacacagagatcccggccgagttccccccactggacgactacagccattccatccccgaaaacactaacttccccgcaggcatcgagccccagagcaatattccagagaccccaccccctggctacctgagtgaagatggagaaaccagtgaccaccagatgaaccacagcatggacgcaggttctccaaacctatccccgaatccgatgtccccagcacataataacttggacctgcagccagttacctactgcgagccggccttctggtgctccatctcctactacgagctgaaccagcgcgtcggggagacattccacgcctcgcagccatccatgactgtggatggcttcaccgacccctccaattcggagcgcttctgcctagggctgctctccaatgtcaacaggaatgcagcagtggagctgacacggagacacatcggaagaggcgtgcggctctactacatcggaggggaggtcttcgcagagtgcctcagtgacagcgctatttttgtccagtctcccaactgtaaccagcgctatggctggcacccggccaccgtctgcaagatcccaccaggatgcaacctgaagatcttcaacaaccaggagttcgctgccctcctggcccagtcggtcaaccagggctttgaggctgtctaccagttgacccgaatgtgcaccatccgcatgagcttcgtcaaaggctggggagcggagtacaggagacagactgtgaccagtaccccctgctggattgagctgcacctgaatgggcctttgcagtggcttgacaaggtcctcacccagatgggctccccaagcatccgctgttccagtgtgtcttagagacatcaagtatggtaggggagggcaggcttggggaaaatggccatgcaggaggtggagaaaattggaactctactcaacccattgttgtcaaggaagaagaaatctttctccctcaactgaaggggtgcacccacctgttttctgaaacacacgagcaaacccagaggtggatgttatgaacagctgtgtctgccaaacacatttaccctttggccccactttgaagggcaagaaatggcgtctgctctggtggcttaagtgagcagaacaggtagtattacaccaccggccccctccccccagactctttttttgagtgacagctttctgggatgtcacagtccaaccagaaacacccctctgtctaggactgcagtgtggagttcaccttggaagggcgttctaggtaggaagagcccgcagggccatgcagacctcatgcccagctctctgacgcttgtgacagtgcctcttccagtgaacattcccagcccagccccgccccgttgtgagctggatagacttgggatggggagggagggagttttgtctgtctccctcccctctcagaacatactgattgggaggtgcgtgttcagcagaacctgcacacaggacagcgggaaaaatcgatgagcgccacctctttaaaaactcacttacgtttgtcctttttcactttgaaaagttggaaggatctgctgaggcccagtgcatatgcaatgtatagtgtctattatcacattaatctcaaagagattcgaatgacggtaagtgttctcatgaagcaggaggcccttgtcgtgggatggcatttggtctcaggcagcaccacactgggtgcgtctccagtcatctgtaagagcttgctccagattctgatgcatacggctatattggtttatgtagtcagttgcattcattaaatcaactttatcatatgctctttt

SEQ ID NO: 384439 - DNA, 2643 bp, Homo sapiens
ggttggactttccttcccggaggcggcacccaaacagctaccccgtgcggaaacccaaacttctgctgccacttggagtctcgcggccgccgcctccgccccgcgttcggggccttcccgaccctgcactgctgccgtccgcccgcccggccgctcttctcttcgccgtgggagccgctccgggcgcagggccgcgcgccgagccccgcaggctgcagcgccgcggcccggcccggcgccccggcaacttcgccgagagttgaggcgaagtttgggcgaccgcggcaggccccggccgagctcccctctgcgcccccggcgtcccgtcgagcccagccccgccgggggcgctcctcgccgcccgcgcgccctccccagccatgtcgtccatcctgcctttcactcccccgatcgtgaagcgcctgctgggctggaagaagggcgagcagaacgggcaggaggagaaatggtgcgagaaggcggtcaagagcctggtcaagaaactcaagaagacggggcagctggacgagctggagaaggccatcaccacgcagaacgtcaacaccaagtgcatcaccatccccaggtccctggatggccggttgcaggtgtcccatcggaaggggctccctcatgtcatctactgccgcctgtggcgatggccagacctgcacagccaccacgagctgcgggccatggagctgtgtgagttcgccttcaatatgaagaaggacgaggtctgcgtgaatccctaccactaccagagagtagagacaccagttctacctcctgtgttggtgccacgccacacagagatcccggccgagttccccccactggacgactacagccattccatccccgaaaacactaacttccccgcaggcatcgagccccagagcaatattccagagaccccaccccctggctacctgagtgaagatggagaaaccagtgaccaccagatgaaccacagcatggacgcaggttctccaaacctatccccgaatccgatgtccccagcacataataacttggacctgcagccagttacctactgcgagccggccttctggtgctccatctcctactacgagctgaaccagcgcgtcggggagacattccacgcctcgcagccatccatgactgtggatggcttcaccgacccctccaattcggagcgcttctgcctagggctgctctccaatgtcaacaggaatgcagcagtggagctgacacggagacacatcggaagaggcgtgcggctctactacatcggaggggaggtcttcgcagagtgcctcagtgacagcgctatttttgtccagtctcccaactgtaaccagcgctatggctggcacccggccaccgtctgcaagatcccaccaggatgcaacctgaagatcttcaacaaccaggagttcgctgccctcctggcccagtcggtcaaccagggctttgaggctgtctaccagttgacccgaatgtgcaccatccgcatgagcttcgtcaaaggctggggagcggagtacaggagacagactgtgaccagtaccccctgctggattgagctgcacctgaatgggcctttgcagtggcttgacaaggtcctcacccagatgggctccccaagcatccgctgttccagtgtgtcttagagacatcaagtatggtaggggagggcaggcttggggaaaatggccatgcaggaggtggagaaaattggaactctactcaacccattgttgtcaaggaagaagaaatctttctccctcaactgaaggggtgcacccacctgttttctgaaacacacgagcaaacccagaggtggatgttatgaacagctgtgtctgccaaacacatttaccctttggccccactttgaagggcaagaaatggcgtctgctctggtggcttaagtgagcagaacaggtagtattacaccaccggccccctccccccagactctttttttgagtgacagctttctgggatgtcacagtccaaccagaaacacccctctgtctaggactgcagtgtggagttcaccttggaagggcgttctaggtaggaagagcccgcagggccatgcagacctcatgcccagctctctgacgcttgtgacagtgcctcttccagtgaacattcccagcccagccccgccccgccccgccccaccactccagcagaccttgccccttgtgagctggatagacttgggatggggagggagggagttttgtctgtctccctcccctctcagaacatactgattgggaggtgcgtgttcagcagaacctgcacacaggacagcgggaaaaatcgatgagcgccacctctttaaaaactcacttacgtttgtcctttttcactttgaaaagttggaaggatctgctgaggcccagtgcatatgcaatgtatagtgtctattatcacattaatctcaaagagattcgaatgacggtaagtgttctcatgaagcaggaggcccttgtcgtgggatggcatttggtctcaggcagcaccacactgggtgcgtctccagtcatctgtaagagcttgctccagattctgatgcatacggctatattggtttatgtagtcagttgcattcattaaatcaactttatcatatgctctttt

SEQ ID NO: 384440 - DNA, 3046 bp, Homo sapiens
ctttgcaaaaggtgtctcagagccaagctgtgaaggccttttaacagaccaccttccttctgattcccagagaccccaccccctggctacctgagtgaagatggagaaaccagtgaccaccagatgaaccacagcatggacgcaggttctccaaacctatccccgaatccgatgtccccagcacataataacttggacctgcagccagttacctactgcgagccggccttctggtgctccatctcctactacgagctgaaccagcgcgtcggggagacattccacgcctcgcagccatccatgactgtggatggcttcaccgacccctccaattcggagcgcttctgcctagggctgctctccaatgtcaacaggaatgcagcagtggagctgacacggagacacatcggaagaggcgtgcggctctactacatcggaggggaggtcttcgcagagtgcctcagtgacagcgctatttttgtccagtctcccaactgtaaccagcgctatggctggcacccggccaccgtctgcaagatcccaccaggatgcaacctgaagatcttcaacaaccaggagttcgctgccctcctggcccagtcggtcaaccagggctttgaggctgtctaccagttgacccgaatgtgcaccatccgcatgagcttcgtcaaaggctggggagcggagtacaggagacagactgtgaccagtaccccctgctggattgagctgcacctgaatgggcctttgcagtggcttgacaaggtcctcacccagatgggctccccaagcatccgctgttccagtgtgtcttagagacatcaagtatggtaggggagggcaggcttggggaaaatggccatgcaggaggtggagaaaattggaactctactcaacccattgttgtcaaggaagaagaaatctttctccctcaactgaaggggtgcacccacctgttttctgaaacacacgagcaaacccagaggtggatgttatgaacagctgtgtctgccaaacacatttaccctttggccccactttgaagggcaagaaatggcgtctgctctggtggcttaagtgagcagaacaggtagtattacaccaccggccccctccccccagactctttttttgagtgacagctttctgggatgtcacagtccaaccagaaacacccctctgtctaggactgcagtgtggagttcaccttggaagggcgttctaggtaggaagagcccgcagggccatgcagacctcatgcccagctctctgacgcttgtgacagtgcctcttccagtgaacattcccagcccagccccgccccgccccgccccaccactccagcagaccttgccccttgtgagctggatagacttgggatggggagggagggagttttgtctgtctccctcccctctcagaacatactgattgggaggtgcgtgttcagcagaacctgcacacaggacagcgggaaaaatcgatgagcgccacctctttaaaaactcacttacgtttgtcctttttcactttgaaaagttggaaggatctgctgaggcccagtgcatatgcaatgtatagtgtctattatcacattaatctcaaagagattcgaatgacggtaagtgttctcatgaagcaggaggcccttgtcgtgggatggcatttggtctcaggcagcaccacactgggtgcgtctccagtcatctgtaagagcttgctccagattctgatgcatacggctatattggtttatgtagtcagttgcattcattaaatcaactttatcatatgctcttttaaatgtttggtttatatattttctttaaaaatcctgggctggcacattgactgggaaacctgagtgagacccagcaactgcttctctcccttctctctcctgaggtgaagcttttccaggttttgttgaagagatacctgccagcacttctgcaagctgaaatttacagaagcaaattcaccagaagggaaacatctcaggccaacataggcaaatgaaaagggctattaaaatatttttacacctttgaaaattgcaggcttggtacaaagaggtctgtcatcttccccctgggatataagatgatctagctcccggtagaggatcaccggtgacaactatagcagttgtattgtgtaacaagtactgctcccagcagcaattagggagaaaactagtctaaattatttcaactggaaaaaagaaaaaagagtcctcttcttttcccagccttttgcagaacacagtagacagaactgccaccttcaattggtactttattctttgctgctgtttttgtataaaatgacctatcccacgtttttgcatgaatttatagcaggaaaaatcaagggatttcctatggaagtcctgctttattccaggtgaagggaaggaagtgtatatacttttggcaagtcatacagctcaaatgtgatgagatttctgatgttagagggagatggagaggcttcctgatgcctcatctgcagggtcctgtgcctctgaagttctagccatgaggtttccaggtaggacagctgctccccaagcctcctgaggacacaggaagagacggaaggagcaccttgacagacttgtgtgagtcttctcgaaggagggttgactcagaacccagagacaatacaaaacccctcacttcctctgagagggccaaatgctgtgagtctgaagtatgtgcctggtgtgaaatgatctatggcctgtttcttacacaggaagccccctgaacctcctgtacatgtgttcatgttcccagccagctctgagacccaggaaccaaatattccattttggcttctgctagagcagtcatggttcctctcctaaaagccatgggcagcagtttccgagggcctgcatgatccacctgctgcacgatcctatgagggcttcctgtggcacacagccctctgggtgcttgggaactagcttcaggcacagcctgattctggtgatccagtgatctatggaagtcgtgtcttactccaggtgaagggggaa

SEQ ID NO: 384441 - DNA, 162 bp, Homo sapiens
ttgtgtcttttctgtttttatttcttgtttacaccagtgtttcctgaaatttattctataaaacatgaattccaaaggacctttcatacaaaaggggttttatggtcaaagaagtttgcacactactttcatgcatattaatataatcaagatgctgagaaa

SEQ ID NO: 384442 - DNA, 759 bp, Homo sapiens
gtgaattccagaagttcacatttctgagcaccattaatttgagatcacttaacagctccttcacatcatactctcattacacttactatttttaagttggtctttttgtctctccttctagttacaagctagaaatgtattggttttttatttgtattttattttctcttttttgaaatagagccttgctctcttgcccaggctggagtgcagtggcacgatcttggctcactgcagcctctgtctctggggttcaagcgattctcctgcctcagcctcctgagtagttggggattacaggcacatgccaccacaccaggctaattttttgtatttttagtagagatggggtttcaccatgttggccaggctaatcttgaacttctgatcactcaggtgatctgcctgcctcggcctcctagagtgatggaatcacaggcgtgagccaccactcttggccagaaatacattggttttttaaaatgttctattattaaaacaattttttcttgcttaaatttggacttgttttgaatacaactgcttggtttcagaaaagggtgtctataaagaataaaggttattttactatgacactgatgtatttctctaaattcaaagatgaatttctagaaatttataactacaactaaaataggtttttgttcctctatttaatatttttttctaatatttttcctctgtttaatcttggatggattttccagttctgtgtttttccagcaaatttctgccaaa

SEQ ID NO: 384443 - DNA, 1295 bp, Homo sapiens
cggggcgggagatttgaaaagtccttggccagggcgcggcgtggcagattcagttgtttgcgggcggccgggagagtagcagtgccttggaccccagctctcctccccctttctctctaaggatggcccagaaggagaactcctacccctggccctacggccgacagacggctccatctggcctgagcaccctgccccagcgagtcctccggaaagagcctgtcaccccatctgcacttgtcctcatgagccgctccaatgtccagcccacagctgcccctggccagaaggtgatggagaatagcagtgggacacccgacatcttaacgcggcacttcacaattgatgactttgagattgggcgtcctctgggcaaaggcaagtttggaaacgtgtacttggctcgggagaagaaaagccatttcatcgtggcgctcaaggtcctcttcaagtcccagatagagaaggagggcgtggagcatcagctgcgcagagagatcgaaatccaggcccacctgcaccatcccaacatcctgcgtctctacaactatttttatgaccggaggaggatctacttgattctagagtatgccccccgcggggagctctacaaggagctgcagaagagctgcacatttgacgagcagcgaacagccacgatcatggaggagttggcagatgctctaatgtactgccatgggaagaaggtgattcacagagacataaagccagaaaatctgctcttagggctcaagggagagctgaagattgctgacttcggctggtctgtgcatgcgccctccctgaggaggaagacaatgtgtggcaccctggactacctgcccccagagatgattgaggggcgcatgcacaatgagaaggtggatctgtggtgcattggagtgctttgctatgagctgctggtggggaacccaccctttgagagtgcatcacacaacgagacctatcgccgcatcgtcaaggtggacctaaagttccccgcttctgtgcccacgggagcccaggacctcatctccaaactgctcaggcataacccctcggaacggctgcccctggcccaggtctcagcccacccttgggtccgggccaactctcggagggtgctgcctccctctgcccttcaatctgtcgcctgatggtccctgtcattcactcgggtgcgtgtgtttgtatgtctgtgtatgtataggggaaagaagggatccctaactgttcccttatctgttttctacctcctcctttgtttaataaaggctgaagctttttgtactcaa

SEQ ID NO: 384444 - DNA, 663 bp, Homo sapiens
gcctcctgtcgcaggccttgcgccgggagtgggcagatgatcaggtagatcagagggtccgttgggctggcctgcgcgcacgccgcagggctggaaggaggtagggacgatagcagggcgggggcggtgagaccagcgcccagattggggctagtgtgctgacctgctcccttttaccagctcgggctagcgcttccggctcgatcggtccaacccctccctctctctctctttttctctgcttctcacggctgtttcccttctccgcccctctcctccccctttctctctaaggatggcccagaaggagaactcctacccctggccctacggccgacagacggtaaggcccttccctccgtccctgcgcccccatgaccccgcatggcgagttcctgctgggaaacttgagatcctgcaatgagcaatcctttaagcactttcttccccgttatgctccaaagtacgggtcccaagtttgacgacagaacccgctctggtcatttgtagccacatcctgtcaggtgctgccaacgtgaatctgaccagccagtgactcccagctggtgaggacctctgcagggctcgtcacatacaaatgatatctgggactgagcaggcagggcctggccttcaggccatgattcccaacccatatcctga

SEQ ID NO: 384445 - DNA, 1567 bp, Homo sapiens
cggggcgggagatttgaaaagtccttggccagggcgcggcgtggcagattcagttgtttgcgggcggccgggagagtagcagtgccttggaccccagctctcctccccctttctctctaaggatggcccagaaggagaactcctacccctggccctacggccgacagacggctccatctggcctgagcaccctgccccagcgagtcctccggaaagagcctgtcaccccatctgcacttgtcctcatgagccgctccaatgtccagcccacagctgcccctggccagaaggtgatggagaatagcagtgggacacccgacatcttaacgcggcacttcacaattgatgactttgagattgggcgtcctctgggcaaaggcaagtttggaaacgtgtacttggctcgggagaagaaaagccatttcatcgtggcgctcaaggtcctcttcaagtcccagatagagaaggagggcgtggagcatcagctgcgcagagagatcgaaatccaggcccacctgcaccatcccaacatcctgcgtctctacaactatttttatgaccggaggaggatctacttgattctagagtatgccccccgcggggagctctacaaggagctgcagaagagctgcacatttgacgagcagcgaacagccacgatcatggaggagttggcagatgctctaatgtactgccatgggaagaaggtgattcacagagacataaagccagaaaatctgctcttagggctcaagggagagctgaagattgctgacttcggctggtctgtgcatgcgccctccctgaggaggaagacaatgtgtggcaccctggactacctgcccccagagatgattgaggggcgcatgcacaatgagaaggtggatctgtggtgcattggagtgctttgctatgagctgctggtggggaacccaccctttgagagtgcatcacacaacgagacctatcgccgcatcgtcaaggtggacctaaagttccccgcttctgtgcccacgggagcccaggacctcatctccaaactgctcaggcataacccctcggaacggctgcccctggcccaggtctcagcccacccttgggtccgggccaactctcggagggtgctgcctccctctgcccttcaatctgtcgcctgatggtccctgtcattcactcgggtgcgtgtgtttgtatgtctgtgtatgtataggggaaagaagggatccctaactgttcccttatctgttttctacctcctcctttgtttaataaaggctgaagctttttgtactcaaaaaaaaaaaacaaaaaacacaaaaaattcggagaggatctacatagcacgggaggcaggaaaaacgaggggactatgtgagacaggtggggaccaatgtgggcacaattagcgcgtgatacaccatggagacccaaaggatactccgtgggtcccaacagcgcgggctaggcactcttggcacggggaccacgccaataatacgtgagagccgcgcactaaaaatctccggaataacggcccagggtttaacccccgggcgtttaagtaacc

SEQ ID NO: 384446 - DNA, 1289 bp, Homo sapiens
cggggcgggagatttgaaaagtccttggccagggcgcggcgtggcagattcagttgtttgcgggcggccgggagagtagcagtgccttggaccccagctctcctccccctttctctctaaggatggcccagaaggagaactcctacccctggccctacggccgacagacggctccatctggcctgagcaccctgccccagcgagtcctccggaaagagcctgtcaccccatctgcacttgtcctcatgagccgctccaatgtccagcccacagctgcccctggccagaaggtgatggagaatagcagtgggacacccgacatcttaacgcggcacttcacaattgatgactttgagattgggcgtcctctgggcaaaggcaagtttggaaacgtgtacttggctcgggagaagaaaagccatttcatcgtggcgctcaaggtcctcttcaagtcccagatagagaaggagggcgtggagcatcagctgcgcagagagatcgaaatccaggcccacctgcaccatcccaacatcctgcgtctctacaactatttttatgaccggaggaggatctacttgattctagagtatgccccccgcggggagctctacaaggagctgcagaagagctgcacatttgacgagcagcgaacagccacgatcatggaggagttggcagatgctctaatgtactgccatgggaagaaggtgattcacagagacataaagccagaaaatctgctcttagggctcaagggagagctgaagattgctgacttcggctggtctgtgcatgcgccctccctgaggaggaagacaatgtgtggcaccctggactacctgcccccagagatgattgaggggcgcatgcacaatgagaaggtggatctgtggtgcattggagtgctttgctatgagctgctggtggggaacccaccctttgagagtgcatcacacaacgagacctatcgccgcatcgtcaaggtggacctaaagttccccgcttctgtgcccacgggagcccaggacctcatctccaaactgctcaggcataacccctcggaacggctgcccctggcccaggtctcagcccacccttgggtccgggccaactctcggagggtgctgcctccctctgcccttcaatctgtcgcctgatggtccctgtcattcactcgggtgcgtgtgtttgtatgtctgtgtatgtataggggaaagaagggatccctaactgttccaaaatataatttctacatcctcaaaagataatcaaaggatgaagaaaatata

SEQ ID NO: 384447 - DNA, 1468 bp, Homo sapiens
gcctcctgtcgcaggccttgcgccgggagtgggcagatgatcaggtagatcagagggtccgttgggctggcctgcgcgcacgccgcagggctggaaggaggtagggacgatagcagggcgggggcggtgagaccagcgcccagattggggctagtgtgctgacctgctcccttttaccagctcgggctagcgcttccggctcgatcggtccaacccctccctctctctctctttttctctgcttctcacggctgtttcccttctccgcccctctcctccccctttctctctaaggatggcccagaaggagaactcctacccctggccctacggccgacagacggctccatctggcctgagcaccctgccccagcgagtcctccggaaagagcctgtcaccccatctgcacttgtcctcatgagccgctccaatgtccagcccacagctgcccctggccagaaggtgatggagaatagcagtgggacacccgacatcttaacgcggcacttcacaattgatgactttgagattgggcgtcctctgggcaaaggcaagtttggaaacgtgtacttggctcgggagaagaaaagccatttcatcgtggcgctcaaggtcctcttcaagtcccagatagagaaggagggcgtggagcatcagctgcgcagagagatcgaaatccaggcccacctgcaccatcccaacatcctgcgtctctacaactatttttatgaccggaggaggatctacttgattctagagtatgccccccgcggggagctctacaaggagctgcagaagagctgcacatttgacgagcagcgaacagccacgatcatggaggagttggcagatgctctaatgtactgccatgggaagaaggtgattcacagagacataaagccagaaaatctgctcttagggctcaagggagagctgaagattgctgacttcggctggtctgtgcatgcgccctccctgaggaggaagacaatgtgtggcaccctggactacctgcccccagagatgattgaggggcgcatgcacaatgagaaggtggatctgtggtgcattggagtgctttgctatgagctgctggtggggaacccaccctttgagagtgcatcacacaacgagacctatcgccgcatcgtcaaggtggacctaaagttccccgcttctgtgcccacgggagcccaggacctcatctccaaactgctcaggcataacccctcggaacggctgcccctggcccaggtctcagcccacccttgggtccgggccaactctcggagggtgctgcctccctctgcccttcaatctgtcgcctgatggtccctgtcattcactcgggtgcgtgtgtttgtatgtctgtgtatgtataggggaaagaagggatccctaactgttcccttatctgttttctacctcctcctttgtttaataaaggctgaagctttttgtactcaa

SEQ ID NO: 384448 - DNA, 1213 bp, Homo sapiens
cggggcgggagatttgaaaagtccttggccagggcgcggcgtggcagattcagttgtttgcgggcggccgggagagtagcagtgccttggaccccagctctcctccccctttctctctaaggatggcccagaaggagaactcctacccctggccctacggccgacagacggctccatctggcctgagcaccctgccccagcgagtcctccggaaagagcctgtcaccccatctgcacttgtcctcatgagccgctccaatgtccagcccacagctgcccctggccagaaggtgatggagaatagcagtgggacacccgacatcttaacgcggcacttcacaattgatgactttgagattgggcgtcctctgggcaaaggcaagtttggaaacgtgtacttggctcgggagaagaaaagccatttcatcgtggcgctcaaggtcctcttcaagtcccagatagagaaggagggcgtggagcatcagctgcgcagagagatcgaaatccaggcccacctgcaccatcccaacatcctgcgtctctacaactatttttatgaccggaggaggatctacttgattctagagtatgccccccgcggggagctctacaaggagctgcagaagagctgcacatttgacgagcagcgaacagccacgatcatggaggagttggcagatgctctaatgtactgccatgggaagaaggtgattcacagagacataaagccagaaaatctgctcttagggctcaagggagagctgaagattgctgacttcggctggtctgtgcatgcgccctccctgaggaggaagacaatgtgtggcaccctggactacctgcccccagagatgattgaggggcgcatgcacaatgagaaggtggatctgtggtgcattggagtgctttgctatgagctgctggtggggaacccaccctttgagagtgcatcacacaacgagacctatcgccgcatcgtcaaggtggacctaaagttccccgcttctgtgcccacgggagcccaggacctcatctccaaactgtgcctccctctgcccttcaatctgtcgcctgatggtccctgtcattcactcgggtgcgtgtgtttgtatgtctgtgtatgtataggggaaagaagggatccctaactgttcccttatctgttttctacctcctcctttgtttaataaaggctgaagctttttgtactcaa

SEQ ID NO: 384449 - DNA, 1347 bp, Homo sapiens
tacaggcaaggtagaggcgcggtgaaatcggacgaggagtgctggacctctcctccccctttctctctaaggatggcccagaaggagaactcctacccctggccctacggccgacagacgtacgggtcccaagtttgacgacagaacccgctctggtcatttgtagccacatcctgtcaggtgctgccaacgtgaatctgaccagccagtgactcccagctggctccatctggcctgagcaccctgccccagcgagtcctccggaaagagcctgtcaccccatctgcacttgtcctcatgagccgctccaatgtccagcccacagctgcccctggccagaaggtgatggagaatagcagtgggacacccgacatcttaacgcggcacttcacaattgatgactttgagattgggcgtcctctgggcaaaggcaagtttggaaacgtgtacttggctcgggagaagaaaagccatttcatcgtggcgctcaaggtcctcttcaagtcccagatagagaaggagggcgtggagcatcagctgcgcagagagatcgaaatccaggcccacctgcaccatcccaacatcctgcgtctctacaactatttttatgaccggaggaggatctacttgattctagagtatgccccccgcggggagctctacaaggagctgcagaagagctgcacatttgacgagcagcgaacagccacgatcatggaggagttggcagatgctctaatgtactgccatgggaagaaggtgattcacagagacataaagccagaaaatctgctcttagggctcaagggagagctgaagattgctgacttcggctggtctgtgcatgcgccctccctgaggaggaagacaatgtgtggcaccctggactacctgcccccagagatgattgaggggcgcatgcacaatgagaaggtggatctgtggtgcattggagtgctttgctatgagctgctggtggggaacccaccctttgagagtgcatcacacaacgagacctatcgccgcatcgtcaaggtggacctaaagttccccgcttctgtgcccacgggagcccaggacctcatctccaaactgctcaggcataacccctcggaacggctgcccctggcccaggtctcagcccacccttgggtccgggccaactctcggagggtgctgcctccctctgcccttcaatctgtcgcctgatggtccctgtcattcactcgggtgcgtgtgtttgtatgtctgtgtatgtataggggaaagaagggatccctaactgttcccttatctgttttctacctcctcctttgtttaataaaggctgaagctttttgtactcaa

SEQ ID NO: 384450 - DNA, 1240 bp, Homo sapiens
taagggagagcgggggcgacggccgaggacagctgaccactgtgtcccctccttaggaggcccagaaggagaaccctacccctggccacggccgacagacggtcccactggcgaggctccatctggcctgagcaccctgccccagcgagtcctccggaaagagcctgtcaccccatctgcacttgtcctcatgagccgctccaatgtccagcccacagctgcccctggccagaaggtgatggagaatagcagtgggacacccgacatcttaacgcggcacttcacaattgatgactttgagattgggcgtcctctgggcaaaggcaagtttggaaacgtgtacttggctcgggagaagaaaagccatttcatcgtggcgctcaaggtcctcttcaagtcccagatagagaaggagggcgtggagcatcagctgcgcagagagatcgaaatccaggcccacctgcaccatcccaacatcctgcgtctctacaactatttttatgaccggaggaggatctacttgattctagagtatgccccccgcggggagctctacaaggagctgcagaagagctgcacatttgacgagcagcgaacagccacgatcatggaggagttggcagatgctctaatgtactgccatgggaagaaggtgattcacagagacataaagccagaaaatctgctcttagggctcaagggagagctgaagattgctgacttcggctggtctgtgcatgcgccctccctgaggaggaagacaatgtgtggcaccctggactacctgcccccagagatgattgaggggcgcatgcacaatgagaaggtggatctgtggtgcattggagtgctttgctatgagctgctggtggggaacccaccctttgagagtgcatcacacaacgagacctatcgccgcatcgtcaaggtggacctaaagttccccgcttctgtgcccacgggagcccaggacctcatctccaaactgctcaggcataacccctcggaacggctgcccctggcccaggtctcagcccacccttgggtccgggccaactctcggagggtgctgcctccctctgcccttcaatctgtcgcctgatggtccctgtcattcactcgggtgcgtgtgtttgtatgtctgtgtatgtataggggaaagaagggatccctaactgttcccttatctgttttctacctcctcctttgtttaataaaggctgaagctttttgtactcaa

SEQ ID NO: 384451 - DNA, 1077 bp, Homo sapiens
cggggcgggagatttgaaaagtccttggccagggcgcggcgtggcagattcagttgtttgcgggcggccgggagagtagcagtgccttggaccccagctctcctccccctttctctctaaggatggcccagaaggagaactcctacccctggccctacggccgacagacggctccatctggcctgagcaccctgccccagccatttcatcgtggcgctcaaggtcctcttcaagtcccagatagagaaggagggcgtggagcatcagctgcgcagagagatcgaaatccaggcccacctgcaccatcccaacatcctgcgtctctacaactatttttatgaccggaggaggatctacttgattctagagtatgccccccgcggggagctctacaaggagctgcagaagagctgcacatttgacgagcagcgaacagccacgatcatggaggagttggcagatgctctaatgtactgccatgggaagaaggtgattcacagagacataaagccagaaaatctgctcttagggctcaagggagagctgaagattgctgacttcggctggtctgtgcatgcgccctccctgaggaggaagacaatgtgtggcaccctggactacctgcccccagagatgattgaggggcgcatgcacaatgagaaggtggatctgtggtgcattggagtgctttgctatgagctgctggtggggaacccaccctttgagagtgcatcacacaacgagacctatcgccgcatcgtcaaggtggacctaaagttccccgcttctgtgcccacgggagcccaggacctcatctccaaactgctcaggcataacccctcggaacggctgcccctggcccaggtctcagcccacccttgggtccgggccaactctcggagggtgctgcctccctctgcccttcaatctgtcgcctgatggtccctgtcattcactcgggtgcgtgtgtttgtatgtctgtgtatgtataggggaaagaagggatccctaactgttcccttatctgttttctacctcctcctttgtttaataaaggctgaagctttttgtactcaa

SEQ ID NO: 384452 - DNA, 941 bp, Homo sapiens
cggggcgggagatttgaaaagtccttggccagggcgcggcgtggcagattcagttgtttgcgggcggccgggagagtagcagtgccttggaccccaggctccatctggcctgagcaccctgccccagcgagtcctccggaaagagcctgtcaccccatctgcacttgtcctcatgagccgctccaatgtccagcccacagctgcccctggccagaaggtgatggagaatagcagtgggacacccgacatcttaacgcggcacttcacaattgatgactttgagattgggcgtcctctgggcaaagatcatggaggagttggcagatgctctaatgtactgccatgggaagaaggtgattcacagagacataaagccagaaaatctgctcttagggctcaagggagagctgaagattgctgacttcggctggtctgtgcatgcgccctccctgaggaggaagacaatgtgtggcaccctggactacctgcccccagagatgattgaggggcgcatgcacaatgagaaggtggatctgtggtgcattggagtgctttgctatgagctgctggtggggaacccaccctttgagagtgcatcacacaacgagacctatcgccgcatcgtcaaggtggacctaaagttccccgcttctgtgcccacgggagcccaggacctcatctccaaactgctcaggcataacccctcggaacggctgcccctggcccaggtctcagcccacccttgggtccgggccaactctcggagggtgctgcctccctctgcccttcaatctgtcgcctgatggtccctgtcattcactcgggtgcgtgtgtttgtatgtctgtgtatgtataggggaaagaagggatccctaactgttcccttatctgttttctacctcctcctttgtttaataaaggctgaagctttttgtactcaa

SEQ ID NO: 384453 - DNA, 1138 bp, Homo sapiens
gcctcctgtcgcaggccttgcgccgggagtgggcagatgatcaggtagatcagagggtccgttgggctggcctgcgcgcacgccgcagggctggaaggaggtagggacgatagcagggcgggggcggtgagaccagcgcccagattggggctagtgtgctgacctgctcccttttaccagctcgggctagcgcttccggctcgatcggtccaacccctccctctctctctctttttctctgcttctcacggctgtttcccttctccgcccctctcctccccctttctctctaaggatggcccagaaggagaactcctacccctggccctacggccgacagacggtaaggcccttccctccgtccctgcgcccccatgaccccgcatggcgagttcctgctgggaaacttgagatcctgcaatgagcaatcctttaagcactttcttccccgttatgctccaaagtacgggtcccaagtttgacgacagaacccgctctggtcatttgtagccacatcctgtcaggtgctgccaacgtgaatctgaccagccagtgactcccagctggctccatctggcctgagcaccctgccccagcgagtcctccggaaagagcctgtcaccccatctgcacttgtcctcatgagccgctccaatgtccagcccacagctgcccctggccagaaggtgatggagaatagcagtgggacacccgacatcttaacgtggatctgtggtgcattggagtgctttgctatgagctgctggtggggaacccaccctttgagagtgcatcacacaacgagacctatcgccgcatcgtcaaggtggacctaaagttccccgcttctgtgcccacgggagcccaggacctcatctccaaactgctcaggcataacccctcggaacggctgcccctggcccaggtctcagcccacccttgggtccgggccaactctcggagggtgctgcctccctctgcccttcaatctgtcgcctgatggtccctgtcattcactcgggtgcgtgtgtttgtatgtctgtgtatgtataggggaaagaagggatccctaactgttcccttatctgttttctacctcctcctttgtttaataaaggctgaagctttttgtactcaa

SEQ ID NO: 384454 - DNA, 1519 bp, Homo sapiens
cggggcgggagatttgaaaagtccttggccagggcgcggcgtggcagattcagttgtttgcgggcggccgggagagtagcagtgccttggaccccagctctcctccccctttctctctaaggatggcccagaaggagaactcctacccctggccctacggccgacagacggctccatctggcctgagcaccctgccccagcgagtcctccggaaagagcctgtcaccccatctgcacttgtcctcatgagccgctccaatgtccagcccacagctgcccctggccagaaggtgatggagaatagcagtgggacacccgacatcttaacgcggcacttcacaattgatgactttgagattgggcgtcctctgggcaaaggcaagtttggaaacgtgtacttggctcgggagaagaaaagccatttcatcgtggcgctcaaggtcctcttcaagtcccagatagagaaggagggcgtggagcatcagctgcgcagagagatcgaaatccaggcccacctgcaccatcccaacatcctgcgtctctacaactatttttatgaccggaggaggatctacttgattctagagtatgccccccgcggggagctctacaaggagctgcagaagagctgcacatttgacgagcagcgaacagccacgatcatggaggagttggcagatgctctaatgtactgccatgggaagaaggtgattcacagagacataaagccagaaaatctgctcttagggctcaagggagagctgaagattgctgacttcggctggtctgtgcatgcgccctccctgaggaggaagacaatgtgtggcaccctggactacctgcccccagagatgattgaggggcgcatgcacaatgagaaggtggatctgtggtgcattggagtgctttgctatgagctgctggtggggaacccaccctttgagagtgcatcacacaacgagacctatcgccgcatcgtcaaggtggacctaaagttccccgcttctgtgcccacgggagcccaggacctcatctccaaactgctcaggcataacccctcggaacggctgcccctggcccaggtctcagcccacccttgggtccgggccaactctcggagggtgctgcctccctctgcccttcaatctgtcgcctgatggtccctgtcattcactcgggtgcgtgtgtttgtatgtctgtgtatgtataggggaaagaagggatccctaactgttcccttatctgttttctacctcctcctttgtttaataaaggctgaagctttttgtactcaaaaaaaagctgaaatctatcaaaaataataaaaaatgggggggggccatcacttaaattatacccgagagggggaacagagagttacgtctaccagcgtttttgttagaaagacggtgcccctaggatgaccgcgatataaaacgatcgaccaggtgccgatgtatacacagtgacaatgtggaaaaagttgtgactatggaacacttgtgtaagcagaccacat

SEQ ID NO: 384455 - DNA, 1264 bp, Homo sapiens
ttaggctctagtagagacggggttaatcggacgaggggcggcgggagagtagcagtgccttggaccctctcctccccctttctctctaaggatggcccagaaggagaactcctacccctggccctacggccgacagacggctccatctggcctgagcaccctgccccagcgagtcctccggaaagagcctgtcaccccatctgcacttgtcctcatgagccgctccaatgtccagcccacagctgcccctggccagaaggtgatggagaatagcagtgggacacccgacatcttaacgcggcacttcacaattgatgactttgagattgggcgtcctctgggcaaaggcaagtttggaaacgtgtacttggctcgggagaagaaaagccatttcatcgtggcgctcaaggtcctcttcaagtcccagatagagaaggagggcgtggagcatcagctgcgcagagagatcgaaatccaggcccacctgcaccatcccaacatcctgcgtctctacaactatttttatgaccggaggaggatctacttgattctagagtatgccccccgcggggagctctacaaggagctgcagaagagctgcacatttgacgagcagcgaacagccacgatcatggaggagttggcagatgctctaatgtactgccatgggaagaaggtgattcacagagacataaagccagaaaatctgctcttagggctcaagggagagctgaagattgctgacttcggctggtctgtgcatgcgccctccctgaggaggaagacaatgtgtggcaccctggactacctgcccccagagatgattgaggggcgcatgcacaatgagaaggtggatctgtggtgcattggagtgctttgctatgagctgctggtggggaacccaccctttgagagtgcatcacacaacgagacctatcgccgcatcgtcaaggtggacctaaagttccccgcttctgtgcccacgggagcccaggacctcatctccaaactgctcaggcataacccctcggaacggctgcccctggcccaggtctcagcccacccttgggtccgggccaactctcggagggtgctgcctccctctgcccttcaatctgtcgcctgatggtccctgtcattcactcgggtgcgtgtgtttgtatgtctgtgtatgtataggggaaagaagggatccctaactgttcccttatctgttttctacctcctcctttgtttaataaaggctgaagctttttgtactcaa

SEQ ID NO: 384456 - DNA, 1271 bp, Homo sapiens
cggggcgggagatttgaaaagtccttggccagggcgcggcgtggcagattcagttgtttgcgggcggccgggagagtagcagtgccttggaccccaggatggcccagaaggagaactcctacccctggccctacggccgacagacggctccatctggcctgagcaccctgccccagcgagtcctccggaaagagcctgtcaccccatctgcacttgtcctcatgagccgctccaatgtccagcccacagctgcccctggccagaaggtgatggagaatagcagtgggacacccgacatcttaacgcggcacttcacaattgatgactttgagattgggcgtcctctgggcaaaggcaagtttggaaacgtgtacttggctcgggagaagaaaagccatttcatcgtggcgctcaaggtcctcttcaagtcccagatagagaaggagggcgtggagcatcagctgcgcagagagatcgaaatccaggcccacctgcaccatcccaacatcctgcgtctctacaactatttttatgaccggaggaggatctacttgattctagagtatgccccccgcggggagctctacaaggagctgcagaagagctgcacatttgacgagcagcgaacagccacgatcatggaggagttggcagatgctctaatgtactgccatgggaagaaggtgattcacagagacataaagccagaaaatctgctcttagggctcaagggagagctgaagattgctgacttcggctggtctgtgcatgcgccctccctgaggaggaagacaatgtgtggcaccctggactacctgcccccagagatgattgaggggcgcatgcacaatgagaaggtggatctgtggtgcattggagtgctttgctatgagctgctggtggggaacccaccctttgagagtgcatcacacaacgagacctatcgccgcatcgtcaaggtggacctaaagttccccgcttctgtgcccacgggagcccaggacctcatctccaaactgctcaggcataacccctcggaacggctgcccctggcccaggtctcagcccacccttgggtccgggccaactctcggagggtgctgcctccctctgcccttcaatctgtcgcctgatggtccctgtcattcactcgggtgcgtgtgtttgtatgtctgtgtatgtataggggaaagaagggatccctaactgttcccttatctgttttctacctcctcctttgtttaataaaggctgaagctttttgtactcaa

SEQ ID NO: 384457 - DNA, 1222 bp, Homo sapiens
cggggcgggagatttgaaaagtccttggccagggcgcggcgtggcagattcagttgtttgcgggcggccgggagagtagcagtgccttggaccccaggctccatctggcctgagcaccctgccccagcgagtcctccggaaagagcctgtcaccccatctgcacttgtcctcatgagccgctccaatgtccagcccacagctgcccctggccagaaggtgatggagaatagcagtgggacacccgacatcttaacgcggcacttcacaattgatgactttgagattgggcgtcctctgggcaaaggcaagtttggaaacgtgtacttggctcgggagaagaaaagccatttcatcgtggcgctcaaggtcctcttcaagtcccagatagagaaggagggcgtggagcatcagctgcgcagagagatcgaaatccaggcccacctgcaccatcccaacatcctgcgtctctacaactatttttatgaccggaggaggatctacttgattctagagtatgccccccgcggggagctctacaaggagctgcagaagagctgcacatttgacgagcagcgaacagccacgatcatggaggagttggcagatgctctaatgtactgccatgggaagaaggtgattcacagagacataaagccagaaaatctgctcttagggctcaagggagagctgaagattgctgacttcggctggtctgtgcatgcgccctccctgaggaggaagacaatgtgtggcaccctggactacctgcccccagagatgattgaggggcgcatgcacaatgagaaggtggatctgtggtgcattggagtgctttgctatgagctgctggtggggaacccaccctttgagagtgcatcacacaacgagacctatcgccgcatcgtcaaggtggacctaaagttccccgcttctgtgcccacgggagcccaggacctcatctccaaactgctcaggcataacccctcggaacggctgcccctggcccaggtctcagcccacccttgggtccgggccaactctcggagggtgctgcctccctctgcccttcaatctgtcgcctgatggtccctgtcattcactcgggtgcgtgtgtttgtatgtctgtgtatgtataggggaaagaagggatccctaactgttcccttatctgttttctacctcctcctttgtttaataaaggctgaagctttttgtactcaa

SEQ ID NO: 384458 - DNA, 1199 bp, Homo sapiens
cggggcgggagatttgaaaagtccttggccagggcgcggcgtggcagattcagttgtttgcgggcggccgggagagtagcagtgccttggaccccagctctcctccccctttctctctaaggatggcccagaaggagaactcctacccctggccctacggccgacagacggctccatctggcctgagcaccctgccccagcgagtcctccggaaagagcctgtcaccccatctgcacttgtcctcatgagccgctccaatgtccagcccacagctgcccctggccagaaggtgatggagaatagcagtgggacacccgacatcttaacgcggcacttcacaattgatgactttgagattgggcgtcctctgggcaaagctcttttatgcctttggcctgaggcctcctctgtctcttcccccagccatcccaacatcctgcgtctctacaactatttttatgaccggaggaggatctacttgattctagagtatgccccccgcggggagctctacaaggagctgcagaagagctgcacatttgacgagcagcgaacagccacgatcatggaggagttggcagatgctctaatgtactgccatgggaagaaggtgattcacagagacataaagccagaaaatctgctcttagggctcaagggagagctgaagattgctgacttcggctggtctgtgcatgcgccctccctgaggaggaagacaatgtgtggcaccctggactacctgcccccagagatgattgaggggcgcatgcacaatgagaaggtggatctgtggtgcattggagtgctttgctatgagctgctggtggggaacccaccctttgagagtgcatcacacaacgagacctatcgccgcatcgtcaaggtggacctaaagttccccgcttctgtgcccacgggagcccaggacctcatctccaaactgctcaggcataacccctcggaacggctgcccctggcccaggtctcagcccacccttgggtccgggccaactctcggagggtgctgcctccctctgcccttcaatctgtcgcctgatggtccctgtcattcactcgggtgcgtgtgtttgtatgtctgtgtatgtataggggaaagaagggatccctaactgttcccttatctgttttctacctcctcctttgtttaataaaggctgaagctttttgtactcaa

SEQ ID NO: 384459 - DNA, 1582 bp, Homo sapiens
cggggcgggagatttgaaaagtccttggccagggcgcggcgtggcagattcagttgtttgcgggcggccgggagagtagcagtgccttggaccccagctctcctccccctttctctctaaggatggcccagaaggagaactcctacccctggccctacggccgacagacggctccatctggcctgagcaccctgccccagcgagtcctccggaaagagcctgtcaccccatctgcacttgtcctcatgagccgctccaatgtccagcccacagctgcccctggccagaaggtgatggagaatagcagtgggacacccgacatcttaacgcggcacttcacaattgatgactttgagattgggcgtcctctgggcaaaggcaagtttggaaacgtgtacttggctcgggagaagaaaagccatttcatcgtggcgctcaaggtcctcttcaagtcccagatagagaaggagggcgtggagcatcagctgcgcagagagatcgaaatccaggcccacctgcagtatgggttgatgccccctgagccgaagcccctctgctccctcacccccagctcctcattcagccccacttcatccagattgctttctctgtagctatggctagtgagccccatttagctcttagtcctggcaagccttgaatccagaaatctgcctccagtttccccttaccactcccagccctggtgtccccggcctgggccacgtctgaccccagtttgctcctatcatcttttccagctcttttatgcctttggcctgaggcctcctctgtctcttcccccagccatcccaacatcctgcgtctctacaactatttttatgaccggaggaggatctacttgattctagagtatgccccccgcggggagctctacaaggagctgcagaagagctgcacatttgacgagcagcgaacagccacgatcatggaggagttggcagatgctctaatgtactgccatgggaagaaggtgattcacagagacataaagccagaaaatctgctcttagggctcaagggagagctgaagattgctgacttcggctggtctgtgcatgcgccctccctgaggaggaagacaatgtgtggcaccctggactacctgcccccagagatgattgaggggcgcatgcacaatgagaaggtggatctgtggtgcattggagtgctttgctatgagctgctggtggggaacccaccctttgagagtgcatcacacaacgagacctatcgccgcatcgtcaaggtggacctaaagttccccgcttctgtgcccacgggagcccaggacctcatctccaaactgctcaggcataacccctcggaacggctgcccctggcccaggtctcagcccacccttgggtccgggccaactctcggagggtgctgcctccctctgcccttcaatctgtcgcctgatggtccctgtcattcactcgggtgcgtgtgtttgtatgtctgtgtatgtataggggaaagaagggatccctaactgttcccttatctgttttctacctcctcctttgtttaataaaggctgaagctttttgtactcaa

SEQ ID NO: 384460 - DNA, 351 bp, Homo sapiens
aaaaaaaaaggagttttcatcaggattgtggtgatggggaatgagcagctcctctcattctaactggaggccaagtgtgacttacaatgctcacgagtaggatgaagacaagcagtggctcagttcgcttttgtggaaacctggagggctgacccattctagctggggcctgggcaaggagaggctggggaaagcagggtagaaggggagggttcctgccacgggaattgtcagctcgcagggcagtagtcgtcaacagaaggaagtcacgttacaggcagggcttctagcctttctcgaggccattagttggccttaaggccagggctgaactttccaggcctctctgaa

SEQ ID NO: 384461 - DNA, 444 bp, Homo sapiens
cctagcttgacatcatggggtttctccctacgtatgtacagatggatattcagccacagacttaaagtcaccccaacataaatttctataatgttttctctgcatattctatatctgtggaaattttagccacttctgcctctctgaaatctgagctctttgactaggctcttccagatcactctcaccccttgccccatgctgctgtctggtaattgcctcaaggtagaaaatgtgaacaattacaaagtttaccatatcgtgtccattctgtctctgccgtcatagccctgcactacctatatagtccaacatatgaaaatagtgtttattttctatctattttttagttttctaattatggcaggagattaattctggattctaatactccttcatgattggaagtggaaatctagttacctgtttatttgggtagctaat

SEQ ID NO: 384462 - DNA, 477 bp, Homo sapiens
tgtgcctcattcatcatcttctattcattgaagtctcatgaattttaagttgaatttgattataacacaaaatcacccatttctgtttaatgttctgttgatcatataactttaatgcctattcaatacctcaaaaagagagaatagtaatgtagttataatattgctgttagtgggttttgacactgagtaacagatgacatgtctaatgaatagtgtgactgcttagattgcataattataggtttgtttgactttaggaaaatcatacgcaggccaacttcacccatttagagactttttgtattatgtaaatattagagcacttcactctaaaaagaaaccccctccttcagtgataatcattctttgtttttccagggtttgccactcagtaggaaaaagcaaaatgaaatagaaaccatctttaaaggatggatttaattcagtagcccttcctggtttgaataacacttc

SEQ ID NO: 384463 - DNA, 272 bp, Homo sapiens
gaagagcaaaggcgggctcttacatggctgctggcaagggcttgttcaggggaccgcccatttataaaaccgtcagatctcgtgagaggtattcactaccatgagaacagcatgggggagccgcccccatgattcaattctctccgcctgggccagcccttgacacgtggggattattacaattcaaggtgagatttgggtatggacacagccaaatcataccaatgagctagagctggctactcacctccaccaaaaccgtttgcattttc

SEQ ID NO: 384464 - DNA, 2321 bp, Homo sapiens
  misc_feature (768)..(768): n is a, c, g, or t
cttaatatggcttagaattacttataaagaatctgattaaatctcatcctaaatatgtagccacaatatcttttttataatgggactataagaaatgtttgcacttagtttctgagtattccttcatagattctcaggaggcatttaaaaagttggaagctatacttggtagtaactatattagaaaagtccaattgacactgatttttattcacccttgttttatttttatccagccatactacctttatcactttttttttttttttggtgcaaagcttaacattctgcaaactttttttccccttgagtatgcattgcatttgtcatgaagagtaaaaagaatgtaataaacacatcagtcataatgtaaattaactgttttgatccacattggttggatacagcatggttaattctaggcttggttaaaaatacataatttggaaagtcttctaatattttaaagacctagtagtttacaaggcctttttttgttgttgttgttagacttttggttcacatttacaaactagccacagggtgttcataaatatttccccaaattagttgagtatttttaattgtaaacaaagaattttctgcccctactacactggtttactgctagggtaaagaccattgtctgaagacactaaacttggtgttaacagtgttgattgtttaatggatatggactacatgccactacctgcaactttgtcatcctggagtttttatttggtttggtttgatttttcgtttttngcttttaaaattcaaagcaaaacaaaaattgaagataccattgagaatcagaattcaagatgacttgattctcactaagatcactgcgctttttaaaaattgctttgagatctagtcagttacatatttaaaatccccgtgttgattagagataaggttttcattattttattttcctaaataggattctcatggagctattgtagataactgtacagaatcacttttgtgtaattgaatgaagcagtttcctctgcatgattgcataatgaaagccttttatatatctatatttttcaatacttagattttacactattaagctgctctagtcatgctatatttgtttttttaatagagtttataaatatttatgctcaaaatacagatcaactgaatatttttggtcttgtttacaagataaatcatactttaaaatgatacaggcccctcaagtgtcttaggaaaaagtcattggtgctataaaacctttcagtatcatttttgaacccattgttcagactttgctaggttttaatctgattccttgtgatttattataatgtagcagcatacttataaaagtggtctgtgctgagtcagatagagagcccagcccattagaaacacatcataatttaagaatatgatgcagaatgcccttacacttatttgtgcccagcttcccaaaaagaaaattgttttgttaagaggaaggcagttaatttggctagaatccaaaaactcattcagcatggctgttttcccttatttcaaatgaaaaacttttctaatactaaaatatgtaatcctgctttgctttaaattcccatgtctgtcactcaacaggaggcatagtgattcttaaatatttacggaacatttggtgagttgtaaagagaagtattattgcattgtaggtttttgcattgatgtgtcgatttttttgttttgtcccaagatttccttccagcaccttaatgaatgttcatatgatagaatgttttaagtatcagcaaagcattcatggatgcctgcttttcattctcagaaggctaaacctgttttgggtatgatgctacttcagaacatattgtctggcacaagatttcttctaataagtggtttatttaaactcaatttcggtggactgttgaattgaaaaacaccaaaggagtcttcttgtctggagactggattgttccagttttaaatacctgtgcccataagtatcccatttcatgaatgtgtgttggcatggggaaaaaatttccctgctctttgagtggagcgaaagcaattggttaagctgtagcagcttttttgtttatttttttaaagtaataataaaacttgaactgaaaaaagataaaacttgaactagaatactactcttgtatgcttagaatgtttatagtgttaaatgtttatgtggggttgtcaacatttttattatttatagttgaattatgttttgttaaatccatattgtttattatttttatattttgaaaatttttaaaataaaagtcttactaaaaacaaaaaaaaac

SEQ ID NO: 384465 - DNA, 1381 bp, Homo sapiens
  misc_feature (768)..(768): n is a, c, g, or t
cttaatatggcttagaattacttataaagaatctgattaaatctcatcctaaatatgtagccacaatatcttttttataatgggactataagaaatgtttgcacttagtttctgagtattccttcatagattctcaggaggcatttaaaaagttggaagctatacttggtagtaactatattagaaaagtccaattgacactgatttttattcacccttgttttatttttatccagccatactacctttatcactttttttttttttttggtgcaaagcttaacattctgcaaactttttttccccttgagtatgcattgcatttgtcatgaagagtaaaaagaatgtaataaacacatcagtcataatgtaaattaactgttttgatccacattggttggatacagcatggttaattctaggcttggttaaaaatacataatttggaaagtcttctaatattttaaagacctagtagtttacaaggcctttttttgttgttgttgttagacttttggttcacatttacaaactagccacagggtgttcataaatatttccccaaattagttgagtatttttaattgtaaacaaagaattttctgcccctactacactggtttactgctagggtaaagaccattgtctgaagacactaaacttggtgttaacagtgttgattgtttaatggatatggactacatgccactacctgcaactttgtcatcctggagtttttatttggtttggtttgatttttcgtttttngcttttaaaattcaaagcaaaacaaaaattgaagataccattgagaatcagaattcaagatgacttgattctcactaagatcactgcgctttttaaaaattgctttgagatctagtcagttacatatttaaaatccccgtgttgattagagataaggttttcattattttattttcctaaataggattctcatggagctattgtagataactgtacagaatcacttttgtgtaattgaatgaagcagtttcctctgcatgattgcataatgaaagccttttatatatctatatttttcaatacttagattttacactattaagctgctctagtcatgctatatttgtttttttaatagagtttataaatatttatgctcaaaatacagatcaactgaatatttttggtcttgtttacaagataaatcatactttaaaatgatacaggcccctcaagtgtcttaggaaaaagtcattggtgctataaaacctttcagtatcatttttgaacccattgttcagactttgctgggctctctatctgactcagcacagaccacttttataagtatgctgctacattataataaatcacaaggaatcagattaaaacc

SEQ ID NO: 384466 - DNA, 493 bp, Homo sapiens
gtatgaggaaaaacaacaacaaactgaagtgcgctttccgtcctttcaaaggacaactgtcgggaagggagagccgagttgcgaggtaggaggggagcactggcagggagagacattcttgactcctctcttccctggtgtgttgtgatccagggaatgaaaagaaatttgaccctggattggttctctccttggacttaaggaatcttaccttttccttccacaaagttctcccaggcaaggaccagctgcccattctgagcccagggcagcctcttcaaccattattggtctaacctggcttgtcaggaaaccaagcccacccttccacattgggcctggctgctctattctgtaccaagtactggagaaaaagcatccagctctatccacccctacagcttccccggccaaccaggttcaaagcccatcagttatatctcactgtgccgctgtcaatgcatgttgtggctgctggcaaagagttggtttg

SEQ ID NO: 384467 - DNA, 575 bp, Homo sapiens
acaattctcatgcctcagcccccctgagtagctgggactacaagtgcgtgccaccatgcccagctaatttatgtatttttagtagagatggggtttcactgtattgcccagactggtcttgaactcctgtgagctctagtttcattaatgttattcacttgttgagtctctggttctagattaaccaagttgttatcttttctttctttcttttcttttatcacagcagatgctactcaggcaagagaagggccttctcgggaaacttctccccgggaagcccctgcatctggctgggcagccctaggtctttcctacaaagtacagtggccactacatattctcttcaccccagctgtcctggaaaagtgagtatttctgagtttctcacaggtaaatatgacccaccttacttgtaagggaagaaactagcaggaacagaattagtgggaaagcaaggtgtggtggcacacacctgtaatcccagctagtccagagcctgagcaggaggatcccttaagcccaggatttcaaatccatcctgggcaacatagtaagacccccatctcataaaa

SEQ ID NO: 384468 - DNA, 2395 bp, Homo sapiens
  misc_feature (1)..(1): n is a, c, g, or t
  misc_feature (8)..(8): n is a, c, g, or t
  misc_feature (10)..(11): n is a, c, g, or t
  misc_feature (15)..(17): n is a, c, g, or t
  misc_feature (19)..(22): n is a, c, g, or t
  misc_feature (24)..(24): n is a, c, g, or t
ngcatcgngnnggcnnngnnnncnactggagtctccgcagagcccgggcgggagtagctggtggaccccgttgagctgccgaacttccgggactcccccgcgaccccttcccagcttcccgtccgctccgccgcagcgattgtctcggtgggttgattcggcacaaaccgcccgacccaggggccggtgcgcgtgtggaaggggaagcactcccctcgtggtcgcctggaggtgcgctggaggagggggtgacataaccagggactcgaggtccgccgtgggaatgatccacgaactgctcttggctctgagcgggtaccctgggtccattttcacctggaacaagcggagtggcctgcaggtatcgcaggacttccctttcctccaccccagtgagaccagtgtcctgaatcgactctgccggctcggcacagactatattcgcttcactgagttcattgaacagtacacgggccatgtgcaacagcaggatcaccatccatctcaacagggccaaggtgggttacatggaatctacctgcgggccttctgcacagggctggattctgttttgcagccttatcgccaagcactgcttgatttggaacaagagttcctgggtgatccccatctctccatatcacatgtcaactacttcctagaccagttccagcttctttttccctctgtgatggttgtagtagaacaaattaaaagtcaaaagattcatggttgtcaaatcctggaaacagtctacaaacacagctgtggggggttgcctcctgttcgaagtgcactggaaaaaatcctggccgtttgtcatggggtcatgtataaacagctctcagcctggatgctccatggactcctcttggaccagcatgaagaattctttatcaaacaggggccatcttctggtaatgtcagtgcccagccagaagaggacgaggaggatctgggcattgggggactgacaggaaaacaactgagagaactgcaggacttgcgcctgattgaggaagagaacatgctggcaccatctctgaagcagttttccctacgagtggagattttgccatcctacattccagtgagggttgctgaaaaaatcctatttgttggagaatctgtccagatgtttgagaatcaaaatgtgaacctgactagaaaaggatccattttgaaaaaccaggaagacacttttgctgcagagctgcaccgtctcaagcagcagccactcttcagcttggtggactttgaacaggtggtggatcgcattcgcagcactgtggctgagcatctctggaagttgatggtagaagaatccgatttactgggtcagctgaagatcattaaagacttttaccttctgggacgtggagaactgtttcaggccttcattgacacagctcaacacatgttgaaaacaccacccactgcagtaactgagcatgatgtgaatgtggcctttcaacagtcagcacacaaggtattgctagatgatgacaaccttctccctctgttgcacttgacaatcgagtatcacggaaaggagcacaaagcagatgctactcaggcaagagaagggccttctcgggaaacttctccccgggaagcccctgcatctggctgggcagccctaggtctttcctacaaagtacagtggccactacatattctcttcaccccagctgtcctggaaaagtacaatgttgtttttaagtacttactgagtgtgcgccgggtgcaagctgagctgcagcactgctgggccctacaaatgcagcgcaagcacctcaagtcgaaccagactgatgcaatcaagtggcgcctaagaaatcacatggcatttttggtggataatcttcagtactatctccaggtagatgtgttggagtctcagttctcccagctgcttcatcagatcaattctacccgagactttgaaagcatccgattggctcatgaccacttcctgagcaatttgctggctcaatcctttatcctattgaaacctgtgtttcactgcctgaatgaaatcctagatctctgtcacagtttttgttcgctggtcagtcagaacctaggcccactggatgagcgtggagccgcccagctgagcattctcgtgaagggctttagccgccagtcttcactcctgttcaagattctctccagtgttcggaatcatcagatcaactcagatttggctcaactactgttacgactagattataacaaatactatacccaggctggtggaactctgggcagtttcgggatgtgaaaatttctggctcataaattgaaataacagccacgttcccaaggttgtaacagaagattcaaaacatcccattctagccacacacaaataaatatctgcggcttagtg

SEQ ID NO: 384469 - DNA, 3545 bp, Homo sapiens
tcatcattaaatatttattgagtgcttactgtatgcaaggcactggggatacaaagaggtataattcatggctctgcccttaaggagctcacaatctagttggaaaaacaagacatatatatatatatacatacaaaaatcagtaacaacacagaggcctgaacaattgccaagtggacaacagtacagataataaagaagcaagaaacgagggttcactaaaggctatagtggggaagggagtgcttcactgagagagtgggacttgaactggtattaaaaacaagagcatcccgggcaaagggaacaacactcacagctcagaggcaggaagacactctgcgggtctaagaaatgaagagttaaatgtggctagattggaggtttggtgcagggctaagagagtaatactcgcttagccaggaaaggatgcatttgttttacgcattttgtgcgtctgaggggctggcaggccttgcacgtggcagtgtctatcctgtcagatttgggaggtcagctattaattagatcagctattaatcagactgttctcctaacactttaacttcatggatgtaccttccttcctttcctaatgccaactctgtttcccgggtaggtgtttcactgcctgaatgaaatcctagatctctgtcacagtttttgttcgctggtcagtcagaacctaggcccactggatgagcgtggagccgcccagctgagcattctcgtgaaggtgcgtctgcctggaagtatgcagccttgccgaaaggacagaggtggttttgccaatggagaattcatgatctttcctctgagtcagtaaagcatttcctcaatacacacacgtacagagataagatacaaagataaaaatgttggtatcagttgattttgaagcaggtaatactgtgccacctcacagtgctcaaaaatagttcagtcctgaatagtttattcagcccatcaaataagcattgggttgttctaacttcctcacatcctcccccctccttacttccttgaactaacccccatctcactgagataattatctgcttgtaatcaaaacgggttctccccaaccccagtacttgacaaaatacattaactggaaaccagctactaaattcctactgatgaaagagtactttcataggaagtcatgcatgtatggatttggtacaagtcattttaggaactaatagaaataggaatgtgggaaggccaggtggttctgtagaattttgaacaaggcttttccaagaaactcctccctccgcccccatcctccatatggagagttggtgagctgaagtggaatgacagctgagtccttctctctgcagggctttagccgccagtcttcactcctgttcaagattctctccagtgttcggaatcatcagatcaactcagatttggctcaactactgttacgactagattataacaaatactatacccaggctggtggaactctgggcaggtaggagcaacccttgggtaactcagtagactttttaaggtggctttttaatgagttgtagaattctagaactggaagaagactttagtccaaataccctcattttataagtaaggcttagagatagaggtgtgaccatctttaataattttaatggaggttattttctagtagaagtcatcatcatcataaaatactaaaaaacctgacagtgagataggtgttaagtcctttgctaggttatgtattgctatgctgggaggcagtgggccttccactcccaattctgatatgaactagctgtgcagccgtgggcaccccgccttgctggtccctagcttccgcatctgtgaaaggaggcgaccaccccttctaactctaaactttaaaaaaaactgataccgagattcagtggtagctggcttcccagaggtctgtcattcccattcagaaaatcacttcattgtcctttctctctaaaatgtctgcaagcagatttttttctaagctattgtagcagaagagtcaaagaaactcttcagttttaagatgacattatttagatcacaggttatcctgattcatatttctttgaaggtagtcttgggaaagcatgacacttaataaggctctttttctcttttgtagtttcgggatgtgaaaatttctggctcataaattgaaataacagccacgttcccaaggttgtaacagaagattcaaaacatcccattctagccacacacaaataaatatctgcggcttagtgataggactctaccttttctcctagaagcagttactgaacatccaggagtacaactccttcccatcattcccatgtggaagggtctctcccatcaaggagaacatgtggcatctctgatcctttacattgagaacatttgttggatatgttcatttattcaatagtcatttattgagcacctactacgtaccttggtactgttcaagctgtgggagatacagcggtaaacaaacaatatagagcagaaagttaaatattttatggttcatatgtgaaaaagtaattatgtttataaatagactaactgctggatgttaccaccaagtaagaaagcaacaggtaagataggctttctctctccctataccaagtaatttatacctacacagattgggcaattctagctaatgaaaatatacttaaaagtatttcttaggccgggcatggtggctcacacctgtaatcccagcactttgggaggccgaggcgggcggatcacctgaagtcaggagtttgagaccagcctgaccaacatgatgaaacctcgattctactaaaaatacaaaaattagccaggtgtggtggcatgtgcctgtaatcccagctactcaggaggctgagacaggagaattgcttgaacctgggaagcagacgctgcagtgagctgagattgtgccattgcattccagcccgggcaacaagagcgaaattccgtctcaaaaaaaaaaaaaaaaaaaaaaaagtattattctccaagaaaaaggtccttaagaaaaaattgagatcaagttgttagatttttaaatactgaagattgcaggcccaattacccatcttacacaaaccataggggttgaagttatcttaatatggcccagccatcactggtaatcaatattcatatcagtgtaagtaaaaagaaatattcactgaacaacgccctccaaactgaaaaagaatgcagtgttctggcatcaggttatagtcactgcatctggttttcatcactacatattctacacacactgggaagctctgacaacttattccctgctattatcaactaaagatcaccctttccactgctgtctctggagcaggagctggcaaactatggcctgctgtctgtttttgtacagttttactgaaacacagccgtgcccatttgtttactcattgtctatggttgctttcatgccctcacagcaaaggcgagtagttgtgatggatcaaatggcccacaaagcctgaaatatttactctttgaccctttacagaaaaaaacct

SEQ ID NO: 384470 - DNA, 2458 bp, Homo sapiens
  misc_feature (1)..(1): n is a, c, g, or t
  misc_feature (8)..(8): n is a, c, g, or t
  misc_feature (10)..(11): n is a, c, g, or t
  misc_feature (15)..(17): n is a, c, g, or t
  misc_feature (19)..(22): n is a, c, g, or t
  misc_feature (24)..(24): n is a, c, g, or t
ngcatcgngnnggcnnngnnnncnactggagtctccgcagagcccgggcgggagtagctggtggaccccgttgagctgccgaacttccgggactcccccgcgaccccttcccagcttcccgtccgctccgccgcagcgattgtctcggtgggttgattcggcacaaaccgcccgacccaggggccggtgcgcgtgtggaaggggaagcactcccctcgtggtcgcctggaggtgcgctggaggagggggtgacataaccagggactcgaggtccgccgtgggaatgatccacgaactgctcttggctctgagcgggtaccctgggtccattttcacctggaacaagcggagtggcctgcaggtatcgcaggacttccctttcctccaccccagtgagaccagtgtcctgaatcgactctgccggctcggcacagactatattcgcttcactgagttcattgaacagtacacgggccatgtgcaacagcaggatcaccatccatctcaacagggccaaggtgggttacatggaatctacctgcgggccttctgcacagggctggattctgttttgcagccttatcgccaagcactgcttgatttggaacaagagttcctgggtgatccccatctctccatatcacatgtcaactacttcctagaccagttccagcttctttttccctctgtgatggttgtagtagaacaaattaaaagtcaaaagattcatggttgtcaaatcctggaaacagtctacaaacacagctgtggggggttgcctcctgttcgaagtgcactggaaaaaatcctggccgtttgtcatggggtcatgtataaacagctctcagcctggatgctccatggactcctcttggaccagcatgaagaattctttatcaaacaggggccatcttctggtaatgtcagtgcccagccagaagaggacgaggaggatctgggcattgggggactgacaggaaaacaactgagagaactgcaggacttgcgcctgattgaggaagagaacatgctggcaccatctctgaagcagttttccctacgagtggagattttgccatcctacattccagtgagggttgctgaaaaaatcctatttgttggagaatctgtccagatgtttgagaatcaaaatgtgaacctgactagaaaaggatccattttgaaaaaccaggaagacacttttgctgcagagctgcaccgtctcaagcagcagccactcttcagcttggtggactttgaacaggtggtggatcgcattcgcagcactgtggctgagcatctctggaagttgatggtagaagaatccgatttactgggtcagctgaagatcattaaagacttttaccttctgggacgtggagaactgtttcaggccttcattgacacagctcaacacatgttgaaaacaccacccactgcagtaactgagcatgatgtgaatgtggcctttcaacagtcagcacacaaggtattgctagatgatgacaaccttctccctctgttgcacttgacaatcgagtatcacggaaaggagcacaaagcagatgctactcaggcaagagaagggccttctcgggaaacttctccccgggaagcccctgcatctggctgggcagccctaggtctttcctacaaagtacagtggccactacatattctcttcaccccagctgtcctggaaaaaaatagacaattttaaaaaccaaacagaatgggactgtcttctgcaagcctacctacaaacaggtacaatgttgtttttaagtacttactgagtgtgcgccgggtgcaagctgagctgcagcactgctgggccctacaaatgcagcgcaagcacctcaagtcgaaccagactgatgcaatcaagtggcgcctaagaaatcacatggcatttttggtggataatcttcagtactatctccaggtagatgtgttggagtctcagttctcccagctgcttcatcagatcaattctacccgagactttgaaagcatccgattggctcatgaccacttcctgagcaatttgctggctcaatcctttatcctattgaaacctgtgtttcactgcctgaatgaaatcctagatctctgtcacagtttttgttcgctggtcagtcagaacctaggcccactggatgagcgtggagccgcccagctgagcattctcgtgaagggctttagccgccagtcttcactcctgttcaagattctctccagtgttcggaatcatcagatcaactcagatttggctcaactactgttacgactagattataacaaatactatacccaggctggtggaactctgggcagtttcgggatgtgaaaatttctggctcataaattgaaataacagccacgttcccaaggttgtaacagaagattcaaaacatcccattctagccacacacaaataaatatctgcggcttagtg

SEQ ID NO: 384471 - DNA, 3725 bp, Homo sapiens
  misc_feature (1)..(1): n is a, c, g, or t
  misc_feature (8)..(8): n is a, c, g, or t
  misc_feature (10)..(11): n is a, c, g, or t
  misc_feature (15)..(17): n is a, c, g, or t
  misc_feature (19)..(22): n is a, c, g, or t
  misc_feature (24)..(24): n is a, c, g, or t
ngcatcgngnnggcnnngnnnncnactggagtctccgcagagcccgggcgggagtagctggtggaccccgttgagctgccgaacttccgggactcccccgcgaccccttcccagcttcccgtccgctccgccgcagcgattgtctcggtgggttgattcggcacaaaccgcccgacccaggggccggtgcgcgtgtggaaggggaagcactcccctcgtggtcgcctggaggtgcgctggaggagggggtgacataaccagggactcgaggtccgccgtgggaatgatccacgaactgctcttggctctgagcgggtaccctgggtccattttcacctggaacaagcggagtggcctgcaggtatcgcaggacttccctttcctccaccccagtgagaccagtgtcctgaatcgactctgccggctcggcacagactatattcgcttcactgagttcattgaacagtacacgggccatgtgcaacagcaggatcaccatccatctcaacagggccaaggtgggttacatggaatctacctgcgggccttctgcacagggctggattctgttttgcagccttatcgccaagcactgcttgatttggaacaagagttcctgggtgatccccatctctccatatcacatgtcaactacttcctagaccagttccagcttctttttccctctgtgatggttgtagtagaacaaattaaaagtcaaaagattcatggttgtcaaatcctggaaacagtctacaaacacagctgtggggggttgcctcctgttcgaagtgcactggaaaaaatcctggccgtttgtcatggggtcatgtataaacagctctcagcctggatgctccatggactcctcttggaccagcatgaagaattctttatcaaacaggggccatcttctggtaatgtcagtgcccagccagaagaggacgaggaggatctgggcattgggggactgacaggaaaacaactgagagaactgcaggacttgcgcctgattgaggaagagaacatgctggcaccatctctgaagcagttttccctacgagtggagattttgccatcctacattccagtgagggttgctgaaaaaatcctatttgttggagaatctgtccagatgtttgagaatcaaaatgtgaacctgactagaaaaggatccattttgaaaaaccaggaagacacttttgctgcagagctgcaccgtctcaagcagcagccactcttcagcttggtggactttgaacaggtggtggatcgcattcgcagcactgtggctgagcatctctggaagttgatggtagaagaatccgatttactgggtcagctgaagatcattaaagacttttaccttctgggacgtggagaactgtttcaggccttcattgacacagctcaacacatgttgaaaacaccacccactgcagtaactgagcatgatgtgaatgtggcctttcaacagtcagcacacaaggtattgctagatgatgacaaccttctccctctgttgcacttgacaatcgagtatcacggaaaggagcacaaagcagatgctactcaggcaagagaagggccttctcgggaaacttctccccgggaagcccctgcatctggctgggcagccctaggtctttcctacaaagtacagtggccactacatattctcttcaccccagctgtcctggaaaagtacaatgttgtttttaagtacttactgagtgtgcgccgggtgcaagctgagctgcagcactgctgggccctacaaatgcagcgcaagcacctcaagtcgaaccagactgatgcaatcaagtggcgcctaagaaatcacatggcatttttggtggataatcttcagtactatctccaggtagatgtgttggagtctcagttctcccagctgcttcatcagatcaattctacccgagactttgaaagcatccgattggctcatgaccacttcctgagcaatttgctggctcaatcctttatcctattgaaacctgtgtttcactgcctgaatgaaatcctagatctctgtcacagtttttgttcgctggtcagtcagaacctaggcccactggatgagcgtggagccgcccagctgagcattctcgtgaaggtgcgtctgcctggaagtatgcagccttgccgaaaggacagagggctttagccgccagtcttcactcctgttcaagattctctccagtgttcggaatcatcagatcaactcagatttggctcaactactgttacgactagattataacaaatactatacccaggctggtggaactctgggcagtttcgggatgtgaaaatttctggctcataaattgaaataacagccacgttcccaaggttgtaacagaagattcaaaacatcccattctagccacacacaaataaatatctgcggcttagtgataggactctaccttttctcctagaagcagttactgaacatccaggagtacaactccttcccatcattcccatgtggaagggtctctcccatcaaggagaacatgtggcatctctgatcctttacattgagaacatttgttggatatgttcatttattcaatagtcatttattgagcacctactacgtaccttggtactgttcaagctgtgggagatacagcggtaaacaaacaatatagagcagaaagttaaatattttatggttcatatgtgaaaaagtaattatgtttataaatagactaactgctggatgttaccaccaagtaagaaagcaacaggtaagataggctttctctctccctataccaagtaatttatacctacacagattgggcaattctagctaatgaaaatatacttaaaagtatttcttaggccgggcatggtggctcacacctgtaatcccagcactttgggaggccgaggcgggcggatcacctgaagtcaggagtttgagaccagcctgaccaacatgatgaaacctcgattctactaaaaatacaaaaattagccaggtgtggtggcatgtgcctgtaatcccagctactcaggaggctgagacaggagaattgcttgaacctgggaagcagacgctgcagtgagctgagattgtgccattgcattccagcccgggcaacaagagcgaaattccgtctcaaaaaaaaaaaaaaaaaaaaaaaagtattattctccaagaaaaaggtccttaagaaaaaattgagatcaagttgttagatttttaaatactgaagattgcaggcccaattacccatcttacacaaaccataggggttgaagttatcttaatatggcccagccatcactggtaatcaatattcatatcagtgtaagtaaaaagaaatattcactgaacaacgccctccaaactgaaaaagaatgcagtgttctggcatcaggttatagtcactgcatctggttttcatcactacatattctacacacactgggaagctctgacaacttattccctgctattatcaactaaagatcaccctttccactgctgtctctggagcaggagctggcaaactatggcctgctgtctgtttttgtacagttttactgaaacacagccgtgcccatttgtttactcattgtctatggttgctttcatgccctcacagcaaaggcgagtagttgtgatggatcaaatggcccacaaagcctgaaatatttactctttgaccctttacagaaaaaaacct

SEQ ID NO: 384472 - DNA, 3453 bp, Homo sapiens
tcgcgaaaccaatacgggcaggtagcgaggcctgggtggttgtgacaatcgagtatcacggaaaggagcacacagatgctactcaggcaagagaagggccttctcgggaaacttctccccgggaagcccctgcatctggctgggcagccctaggtctttcctacaaagtacagtggccactacatattctcttcaccccagctgtcctggaaaagtacaatgttgtttttaagtacttactgagtgtgcgccgggtgcaagctgagctgcagcactgctgggccctacaaatgcagcgcaagcacctcaagtcgaaccagactgatgcaatcaagtggcgcctaagaaatcacatggcatttttggtggataatcttcagtactatctccaggtagatgtgttggagtctcagttctcccagctgcttcatcagatcaattctacccgagactttgaaagcatccgattggctcatgaccacttcctgagcaatttgctggctcaatcctttatcctattgaaacctgtgtttcactgcctgaatgaaatcctagatctctgtcacagtttttgttcgctggtcagtcagaacctaggcccactggatgagcgtggagccgcccagctgagcattctcgtgaaggtgcgtctgcctggaagtatgcagccttgccgaaaggacagaggtggttttgccaatggagaattcatgatctttcctctgagtcagtaaagcatttcctcaatacacacacgtacagagataagatacaaagataaaaatgttggtatcagttgattttgaagcaggtaatactgtgccacctcacagtgctcaaaaatagttcagtcctgaatagtttattcagcccatcaaataagcattgggttgttctaacttcctcacatcctcccccctccttacttccttgaactaacccccatctcactgagataattatctgcttgtaatcaaaacgggttctccccaaccccagtacttgacaaaatacattaactggaaaccagctactaaattcctactgatgaaagagtactttcataggaagtcatgcatgtatggatttggtacaagtcattttaggaactaatagaaataggaatgtgggaaggccaggtggttctgtagaattttgaacaaggcttttccaagaaactcctccctccgcccccatcctccatatggagagttggtgagctgaagtggaatgacagctgagtccttctctctgcagggctttagccgccagtcttcactcctgttcaagattctctccagtgttcggaatcatcagatcaactcagatttggctcaactactgttacgactagattataacaaatactatacccaggctggtggaactctgggcaggtaggagcaacccttgggtaactcagtagactttttaaggtggctttttaatgagttgtagaattctagaactggaagaagactttagtccaaataccctcattttataagtaaggcttagagatagaggtgtgaccatctttaataattttaatggaggttattttctagtagaagtcatcatcatcataaaatactaaaaaacctgacagtgagataggtgttaagtcctttgctaggttatgtattgctatgctgggaggcagtgggccttccactcccaattctgatatgaactagctgtgcagccgtgggcaccccgccttgctggtccctagcttccgcatctgtgaaaggaggcgaccaccccttctaactctaaactttaaaaaaaactgataccgagattcagtggtagctggcttcccagaggtctgtcattcccattcagaaaatcacttcattgtcctttctctctaaaatgtctgcaagcagatttttttctaagctattgtagcagaagagtcaaagaaactcttcagttttaagatgacattatttagatcacaggttatcctgattcatatttctttgaaggtagtcttgggaaagcatgacacttaataaggctctttttctcttttgtagtttcgggatgtgaaaatttctggctcataaattgaaataacagccacgttcccaaggttgtaacagaagattcaaaacatcccattctagccacacacaaataaatatctgcggcttagtgataggactctaccttttctcctagaagcagttactgaacatccaggagtacaactccttcccatcattcccatgtggaagggtctctcccatcaaggagaacatgtggcatctctgatcctttacattgagaacatttgttggatatgttcatttattcaatagtcatttattgagcacctactacgtaccttggtactgttcaagctgtgggagatacagcggtaaacaaacaatatagagcagaaagttaaatattttatggttcatatgtgaaaaagtaattatgtttataaatagactaactgctggatgttaccaccaagtaagaaagcaacaggtaagataggctttctctctccctataccaagtaatttatacctacacagattgggcaattctagctaatgaaaatatacttaaaagtatttcttaggccgggcatggtggctcacacctgtaatcccagcactttgggaggccgaggcgggcggatcacctgaagtcaggagtttgagaccagcctgaccaacatgatgaaacctcgattctactaaaaatacaaaaattagccaggtgtggtggcatgtgcctgtaatcccagctactcaggaggctgagacaggagaattgcttgaacctgggaagcagacgctgcagtgagctgagattgtgccattgcattccagcccgggcaacaagagcgaaattccgtctcaaaaaaaaaaaaaaaaaaaaaaaagtattattctccaagaaaaaggtccttaagaaaaaattgagatcaagttgttagatttttaaatactgaagattgcaggcccaattacccatcttacacaaaccataggggttgaagttatcttaatatggcccagccatcactggtaatcaatattcatatcagtgtaagtaaaaagaaatattcactgaacaacgccctccaaactgaaaaagaatgcagtgttctggcatcaggttatagtcactgcatctggttttcatcactacatattctacacacactgggaagctctgacaacttattccctgctattatcaactaaagatcaccctttccactgctgtctctggagcaggagctggcaaactatggcctgctgtctgtttttgtacagttttactgaaacacagccgtgcccatttgtttactcattgtctatggttgctttcatgccctcacagcaaaggcgagtagttgtgatggatcaaatggcccacaaagcctgaaatatttactctttgaccctttacagaaaaaaacct

SEQ ID NO: 384473 - DNA, 2795 bp, Homo sapiens
tcatcattaaatatttattgagtgcttactgtatgcaaggcactggggatacaaagaggtataattcatggctctgcccttaaggagctcacaatctagttggaaaaacaagacatatatatatatatacatacaaaaatcagtaacaacacagaggcctgaacaattgccaaagtgctcaaaaatagttcagtcctgaatagtttattcagcccatcaaataagcattgggttgttctaacttcctcacatcctcccccctccttacttccttgaactaacccccatctcactgagataattatctgcttgtaatcaaaacgggttctccccaaccccagtacttgacaaaatacattaactggaaaccagctactaaattcctactgatgaaagagtactttcataggaagtcatgcatgtatggatttggtacaagtcattttaggaactaatagaaataggaatgtgggaaggccaggtggttctgtagaattttgaacaaggcttttccaagaaactcctccctccgcccccatcctccatatggagagttggtgagctgaagtggaatgacagctgagtccttctctctgcagggctttagccgccagtcttcactcctgttcaagattctctccagtgttcggaatcatcagatcaactcagatttggctcaactactgttacgactagattataacaaatactatacccaggctggtggaactctgggcaggtaggagcaacccttgggtaactcagtagactttttaaggtggctttttaatgagttgtagaattctagaactggaagaagactttagtccaaataccctcattttataagtaaggcttagagatagaggtgtgaccatctttaataattttaatggaggttattttctagtagaagtcatcatcatcataaaatactaaaaaacctgacagtgagataggtgttaagtcctttgctaggttatgtattgctatgctgggaggcagtgggccttccactcccaattctgatatgaactagctgtgcagccgtgggcaccccgccttgctggtccctagcttccgcatctgtgaaaggaggcgaccaccccttctaactctaaactttaaaaaaaactgataccgagattcagtggtagctggcttcccagaggtctgtcattcccattcagaaaatcacttcattgtcctttctctctaaaatgtctgcaagcagatttttttctaagctattgtagcagaagagtcaaagaaactcttcagttttaagatgacattatttagatcacaggttatcctgattcatatttctttgaaggtagtcttgggaaagcatgacacttaataaggctctttttctcttttgtagtttcgggatgtgaaaatttctggctcataaattgaaataacagccacgttcccaaggttgtaacagaagattcaaaacatcccattctagccacacacaaataaatatctgcggcttagtgataggactctaccttttctcctagaagcagttactgaacatccaggagtacaactccttcccatcattcccatgtggaagggtctctcccatcaaggagaacatgtggcatctctgatcctttacattgagaacatttgttggatatgttcatttattcaatagtcatttattgagcacctactacgtaccttggtactgttcaagctgtgggagatacagcggtaaacaaacaatatagagcagaaagttaaatattttatggttcatatgtgaaaaagtaattatgtttataaatagactaactgctggatgttaccaccaagtaagaaagcaacaggtaagataggctttctctctccctataccaagtaatttatacctacacagattgggcaattctagctaatgaaaatatacttaaaagtatttcttaggccgggcatggtggctcacacctgtaatcccagcactttgggaggccgaggcgggcggatcacctgaagtcaggagtttgagaccagcctgaccaacatgatgaaacctcgattctactaaaaatacaaaaattagccaggtgtggtggcatgtgcctgtaatcccagctactcaggaggctgagacaggagaattgcttgaacctgggaagcagacgctgcagtgagctgagattgtgccattgcattccagcccgggcaacaagagcgaaattccgtctcaaaaaaaaaaaaaaaaaaaaaaaagtattattctccaagaaaaaggtccttaagaaaaaattgagatcaagttgttagatttttaaatactgaagattgcaggcccaattacccatcttacacaaaccataggggttgaagttatcttaatatggcccagccatcactggtaatcaatattcatatcagtgtaagtaaaaagaaatattcactgaacaacgccctccaaactgaaaaagaatgcagtgttctggcatcaggttatagtcactgcatctggttttcatcactacatattctacacacactgggaagctctgacaacttattccctgctattatcaactaaagatcaccctttccactgctgtctctggagcaggagctggcaaactatggcctgctgtctgtttttgtacagttttactgaaacacagccgtgcccatttgtttactcattgtctatggttgctttcatgccctcacagcaaaggcgagtagttgtgatggatcaaatggcccacaaagcctgaaatatttactctttgaccctttacagaaaaaaacct

SEQ ID NO: 384474 - DNA, 366 bp, Homo sapiens
cttgaatatcctgttatttctgtcctaggtacaatgttgtttttaagtacttactgagtgtgcgccgggtgcaagctgagctgcagcactgctgggccctacaaatgcagcgcaagcacctcaagtcgaaccagactgatgcaatcaagtggcgcctaagaaatcacatggcatttttggtggataatcttcagtactatctccaggtctgtgctaagagatgagtagaaggaaggggtacggaaaaacgtctaggaggttggcagggagtattgaatagggactacaagtttctatttgataaaatggtggggtttgggaaaattcaggagttatatcaccaagcatgtttcttaaaataaaaaa

SEQ ID NO: 384475 - DNA, 3682 bp, Homo sapiens
  misc_feature (1)..(1): n is a, c, g, or t
  misc_feature (8)..(8): n is a, c, g, or t
  misc_feature (10)..(11): n is a, c, g, or t
  misc_feature (15)..(17): n is a, c, g, or t
  misc_feature (19)..(22): n is a, c, g, or t
  misc_feature (24)..(24): n is a, c, g, or t
ngcatcgngnnggcnnngnnnncnactggagtctccgcagagcccgggcgggagtagctggtggaccccgttgagctgccgaacttccgggactcccccgcgaccccttcccagcttcccgtccgctccgccgcagcgattgtctcggtgggttgattcggcacaaaccgcccgacccaggggccggtgcgcgtgtggaaggggaagcactcccctcgtggtcgcctggaggtgcgctggaggagggggtgacataaccagggactcgaggtccgccgtgggaatgatccacgaactgctcttggctctgagcgggtaccctgggtccattttcacctggaacaagcggagtggcctgcaggtatcgcaggacttccctttcctccaccccagtgagaccagtgtcctgaatcgactctgccggctcggcacagactatattcgcttcactgagttcattgaacagtacacgggccatgtgcaacagcaggatcaccatccatctcaacagggccaaggtgggttacatggaatctacctgcgggccttctgcacagggctggattctgttttgcagccttatcgccaagcactgcttgatttggaacaagagttcctgggtgatccccatctctccatatcacatgtcaactacttcctagaccagttccagcttctttttccctctgtgatggttgtagtagaacaaattaaaagtcaaaagattcatggttgtcaaatcctggaaacagtctacaaacacagctgtggggggttgcctcctgttcgaagtgcactggaaaaaatcctggccgtttgtcatggggtcatgtataaacagctctcagcctggatgctccatggactcctcttggaccagcatgaagaattctttatcaaacaggggccatcttctggtaatgtcagtgcccagccagaagaggacgaggaggatctgggcattgggggactgacaggaaaacaactgagagaactgcaggacttgcgcctgattgaggaagagaacatgctggcaccatctctgaagcagttttccctacgagtggagattttgccatcctacattccagtgagggttgctgaaaaaatcctatttgttggagaatctgtccagatgtttgagaatcaaaatgtgaacctgactagaaaaggatccattttgaaaaaccaggaagacacttttgctgcagagctgcaccgtctcaagcagcagccactcttcagcttggtggactttgaacaggtggtggatcgcattcgcagcactgtggctgagcatctctggaagttgatggtagaagaatccgatttactgggtcagctgaagatcattaaagacttttaccttctgggacgtggagaactgtttcaggccttcattgacacagctcaacacatgttgaaaacaccacccactgcagtaactgagcatgatgtgaatgtggcctttcaacagtcagcacacaaggtattgctagatgatgacaaccttctccctctgttgcacttgacaatcgagtatcacggaaaggagcacaaagcagatgctactcaggcaagagaagggccttctcgggaaacttctccccgggaagcccctgcatctggctgggcagccctaggtctttcctacaaagtacagtggccactacatattctcttcaccccagctgtcctggaaaagtacaatgttgtttttaagtacttactgagtgtgcgccgggtgcaagctgagctgcagcactgctgggccctacaaatgcagcgcaagcacctcaagtcgaaccagactgatgcaatcaagtggcgcctaagaaatcacatggcatttttggtggataatcttcagtactatctccaggtagatgtgttggagtctcagttctcccagctgcttcatcagatcaattctacccgagactttgaaagcatccgattggctcatgaccacttcctgagcaatttgctggctcaatcctttatcctattgaaacctgtgtttcactgcctgaatgaaatcctagatctctgtcacagtttttgttcgctggtcagtcagaacctaggcccactggatgagcgtggagccgcccagctgagcattctcgtgaagggctttagccgccagtcttcactcctgttcaagattctctccagtgttcggaatcatcagatcaactcagatttggctcaactactgttacgactagattataacaaatactatacccaggctggtggaactctgggcagtttcgggatgtgaaaatttctggctcataaattgaaataacagccacgttcccaaggttgtaacagaagattcaaaacatcccattctagccacacacaaataaatatctgcggcttagtgataggactctaccttttctcctagaagcagttactgaacatccaggagtacaactccttcccatcattcccatgtggaagggtctctcccatcaaggagaacatgtggcatctctgatcctttacattgagaacatttgttggatatgttcatttattcaatagtcatttattgagcacctactacgtaccttggtactgttcaagctgtgggagatacagcggtaaacaaacaatatagagcagaaagttaaatattttatggttcatatgtgaaaaagtaattatgtttataaatagactaactgctggatgttaccaccaagtaagaaagcaacaggtaagataggctttctctctccctataccaagtaatttatacctacacagattgggcaattctagctaatgaaaatatacttaaaagtatttcttaggccgggcatggtggctcacacctgtaatcccagcactttgggaggccgaggcgggcggatcacctgaagtcaggagtttgagaccagcctgaccaacatgatgaaacctcgattctactaaaaatacaaaaattagccaggtgtggtggcatgtgcctgtaatcccagctactcaggaggctgagacaggagaattgcttgaacctgggaagcagacgctgcagtgagctgagattgtgccattgcattccagcccgggcaacaagagcgaaattccgtctcaaaaaaaaaaaaaaaaaaaaaaaagtattattctccaagaaaaaggtccttaagaaaaaattgagatcaagttgttagatttttaaatactgaagattgcaggcccaattacccatcttacacaaaccataggggttgaagttatcttaatatggcccagccatcactggtaatcaatattcatatcagtgtaagtaaaaagaaatattcactgaacaacgccctccaaactgaaaaagaatgcagtgttctggcatcaggttatagtcactgcatctggttttcatcactacatattctacacacactgggaagctctgacaacttattccctgctattatcaactaaagatcaccctttccactgctgtctctggagcaggagctggcaaactatggcctgctgtctgtttttgtacagttttactgaaacacagccgtgcccatttgtttactcattgtctatggttgctttcatgccctcacagcaaaggcgagtagttgtgatggatcaaatggcccacaaagcctgaaatatttactctttgaccctttacagaaaaaaacct

SEQ ID NO: 384476 - DNA, 1077 bp, Homo sapiens
  misc_feature (1)..(1): n is a, c, g, or t
  misc_feature (8)..(8): n is a, c, g, or t
  misc_feature (10)..(11): n is a, c, g, or t
  misc_feature (15)..(17): n is a, c, g, or t
  misc_feature (19)..(22): n is a, c, g, or t
  misc_feature (24)..(24): n is a, c, g, or t
ngcatcgngnnggcnnngnnnncnactggagtctccgcagagcccgggcgggagtagctggtggaccccgttgagctgccgaacttccgggactcccccgcgaccccttcccagcttcccgtccgctccgccgcagcgattgtctcggtgggttgattcggcacaaaccgcccgacccaggggccggtgcgcgtgtggaaggggaagcactcccctcgtggtcgcctggaggtgcgctggaggagggggtgacataaccagggactcgaggtccgccgtgggaatgatccacgaactgctcttggctctgagcgggtaccctgggtccattttcacctggaacaagcggagtggcctgcaggtatcgcaggacttccctttcctccaccccagtgagaccagtgtcctgaatcgactctgccggctcggcacagactatattcgcttcactgagttcattgaacagtacacgggccatgtgcaacagcaggtgggtcctgttctctgtgggtgtacacctctagagggcaggagctatgtcaagctttcacctctagagggcaggagctatgtcaagctttcagtgaatttatcggtaattcatgtgaaataagttatggatttctcatcactagaaatattcaagtgaaggcaaggcctctaattggtttgtttgtataacttttaaaagaaacaagcctgataatgtctttctcaggtttcagggcctgagctgagaagttggcttctgtttgtttgatttcaggatcaccatccatctcaacagggccaaggtgggttacatggaatctacctgcgggccttctgcacagggctggattctgttttgcagccttatcgccaagcactgcttgatttggaacaagaggtaagaaggaggagatataggaaacacctctgggacagtagattagggcatgttcttgaatctgaaatgccctttgataagatcaggtagttaagagtgagcagttgcctgcatggctggaaggtacagtgttctctcagtgattgcccaacctgtgatcagagtggcttacagatcatggcaaagac

SEQ ID NO: 384477 - DNA, 1911 bp, Homo sapiens
  misc_feature (1)..(1): n is a, c, g, or t
  misc_feature (8)..(8): n is a, c, g, or t
  misc_feature (10)..(11): n is a, c, g, or t
  misc_feature (15)..(17): n is a, c, g, or t
  misc_feature (19)..(22): n is a, c, g, or t
  misc_feature (24)..(24): n is a, c, g, or t
ngcatcgngnnggcnnngnnnncnactggagtctccgcagagcccgggcgggagtagctggtggaccccgttgagctgccgaacttccgggactcccccgcgaccccttcccagcttcccgtccgctccgccgcagcgattgtctcggtgggttgattcggcacaaaccgcccgacccaggggccggtgcgcgtgtggaaggggaagcactcccctcgtggtcgcctggaggtgcgctggaggagggggtgacataaccagggactcgaggtccgccgtgggaatgatccacgaactgctcttggctctgagcgggtaccctgggtccattttcacctggaacaagcggagtggcctgcaggtatcgcaggacttccctttcctccaccccagtgagaccagtgtcctgaatcgactctgccggctcggcacagactatattcgcttcactgagttcattgaacagtacacgggccatgtgcaacagcaggatcaccatccatctcaacagggccaaggtgggttacatggaatctacctgcgggccttctgcacagggctggattctgttttgcagccttatcgccaagcactgcttgatttggaacaagagttcctgggtgatccccatctctccatatcacatgtcaactacttcctagaccagttccagcttctttttccctctgtgatggttgtagtagaacaaattaaaagtcaaaagattcatggttgtcaaatcctggaaacagtctacaaacacagctgtggggggttgcctcctgttcgaagtgcactggaaaaaatcctggccgtttgtcatggggtcatgtataaacagctctcagcctggatgctccatggactcctcttggaccagcatgaagaattctttatcaaacaggggccatcttctggtaatgtcagtgcccagccagaagaggacgaggaggatctgggcattgggggactgacaggaaaacaactgagagaactgcaggacttgcgcctgattgaggaagagaacatgctggcaccatctctgaagcagttttccctacgagtggagattttgccatcctacattccagtgagggttgctgaaaaaatcctatttgttggagaatctgtccagatgtttgagaatcaaaatgtgaacctgactagaaaaggatccattttgaaaaaccaggaagacacttttgctgcagagctgcaccgtctcaagcagcagccactcttcagcttggtggactttgaacaggtggtggatcgcattcgcagcactgtggctgagcatctctggaagttgatggtagaagaatccgatttactgggtcagctgaagatcattaaagacttttaccttctgggacgtggagaactgtttcaggccttcattgacacagctcaacacatgttgaaaacaccacccactgcagtaactgagcatgatgtgaatgtggcctttcaacagtcagcacacaaggtattgctagatgatgacaaccttctccctctgttgcacttgacaatcgagtatcacggaaaggagcacaaagcagatgctactcaggcaagagaagggccttctcgggaaacttctccccgggaagcccctgcatctggctgggcagccctaggtctttcctacaaagtacagtggccactacatattctcttcaccccagctgtcctggaaaagtgagtatttctgagtttctcacaggtaaatatgacccaccttacttgtaagggaagaaactagcaggaacagaattagtgggaaagcaaggtgtggtggcacacacctgtaatcccagctagtccagagcctgagcaggaggatcccttaagcccaggatttcaaatccatcctgggcaacatagtaagacccccatctcataaaa

SEQ ID NO: 384478 - DNA, 212 bp, Homo sapiens
ctggaagttgatggtagaagaatccgatttactgggtcagctgaaggtaatggcttagctgttgtaattcttacggtgatgctggtaggcagtgacttgcattctctgatgtttcctgagagcactggttgcctatacccagacttccagagtcaactcatttgttcttatccaagtgagcaaactatacctaatgccacaaatctacgata

SEQ ID NO: 384479 - DNA, 1260 bp, Homo sapiens
ggcagctgcagcaagtgaccacccacccgtcgggttagacacacaaggcaccaggcactggcatctgactaaaataacctttccctacatgggaagaggaaagcttgtaggctggcacatataaacgtccagccgcagccagatggcctgaactaagcagcaggaactctctgggctggggaggagcctcctgcccttctagaaagtgatgcgtcagctttgttctcctgggaaggtgttgctataccccaggaacaaagcagggcccaactgccagtgcagtcagctgggcctgcgctccaggctcaccaccgctaagtggtcaggtaccgggccagcatcctgggagggacctcttgcgactctgagttgcagcttggactagctgaacacatggggacatgctccaggggcttcttccctggcaggattcctgggatttcaaactacctcaccaacaggacgctgaaccaggagcctgccacccaactggcccccttggtgattgtggaaggtgatgtttttcctaaaatgcatccctcctgttctgctccatatacatgtgcttcaaaaaccaccaccaggaaagccttcccagaagagggaaaggattaagggctctcttcctttgggccctgcagaatgtattggagggaggtgttgctgcaaggtccaggagctgggaaactctgggctcggggggagataatgcaccaccagcctcaaaaaggagctgcccaagttgaatatgtagcaaagaccatgggataagttgaatagtggccagacgaatcactaataactcaccatgggaccctctgaagagaggcctgtgctcgtgtaaccatagcaacagcagatgccagcaacctactcattagtaccacccagtgataaggcatcccctgggctagacccaggggccataaagtagcaaagtagcaaatgtagcaataaagggcccgggtctatacggggacagggtccaaatgaccaggacttggccctctccccagccccgatgagggctcagagccagctgctgtcagctgtctggggagggaaggccctgctccataccaggggtccctgttctatactctaagcccactcaccgcatgatcacggactcatcggaatggcctcctcttagtgcatgtggttctctttagtttatttttctggaatttggggattggaccccagaaccaaacatgctggtacagtctaaaaataaatgacttgaacccacttcaatcc

SEQ ID NO: 384480 - DNA, 434 bp, Homo sapiens
tagaagccaattctaaacattcaaatattctaatatgtaaacaaaaaaactggaaaaagaatttgcatttaatttgaccggagaatatgtgcttctcttagctgtgaattttttttcactttattcagtttgctttcagaacataaactgcattctaatcctgttattttgttcttaatatttatcatcctctaaagagaagttagaatgtttatatagaagccagggaagtggtaaagtgatattattcagtgagatttatttatgaagccaataaatcctgcaaaaagatgtcctttgaccatttaaaagtttacagctctattgcaacttattaaatgtccaagagccttgttgacacataaatacatgtatgacacataaagatcactgaaatttcaaacctgtcacctttcattattgttactaaggaa

SEQ ID NO: 384481 - DNA, 596 bp, Homo sapiens
ttggctgctgttatgaatgggaggaatttctttttatagggcttaaatttcttgatacaatgatataggcaagattcttttcaagtttatcccagctcacattgtataattaaataaagtagaaatgcattaacatggcagtaataaatacaattctctttccccatgttgcatacaagatcatataatgtctacttggttagttatttaaactgatcacagagtttgtggtagtgtttgcctaatgttactatatggtataataaatttaaagtaaatttcaagttgaatttaccagtgaaaggactcaaaaattactgaggttgcaaaatttcatttctgtaacacttcgctgtatacttttgcttacagtaaatgtttttgccatgagtatattacatataatcaatgtaggtaactttgcaactgcaataaaactttacaattacttatcactaagaaataatatgttagagcctgtgaatacaaaagccaaatgccttgcctttactattttggattacctttttttttttttaaggatttaaataagcggttatcactgcctgcagacatcagaatacctgatggatatc

SEQ ID NO: 384482 - DNA, 2303 bp, Homo sapiens
agggggcgctgcccccggcgagccgctcaggcgggggtggggtaagctcccgcggccggtcgcttttctccgccgccgctggttggatcgtttcaataaaagtgttttttctcttgcactcgctctcctccggggaacaggcggaggcgtcaatccgcagccgccgagtgtgaaagcgacgcacacgcaaggagcgaacgcggccgcccgcagtctcctgagctccccgcgggccgccgcagagccgcggagaaggagccagcgcccggccagacagtctcagcccgccgtcggcgcccgccgcgctcgcgcccggctgctccgaggggattagtgggccgtccgcgcggctcgtcggcgcgggagccatgttgaccgagggacttggcaacgcgtgagacacccgcggcccctcccgaggctccggacccgcggcgagagccggaaggcggctgtggcggcggaggcctgcgctcggaagcgcctcacgtctgccggccgctgagacccggacttgcatccggtcgccgcgggcgtccgcggagcagcttccccccgcgcctctcttcgcctcgcctcgggacccgcggtccccgctcttgctggatttttcaagccacattcaattgataggatgaaaaaatttaagagaaggctatccctcacactccgaggaagtcagactattgatgaatcattgtctgaattggctgaacaaatgactattgaagaaaacagcagcaaggataatgagcctattgtgaagaatggcaggcctccaacgtctcacagtatgcattccttcctccaccagtacacaggatctttcaagaagcccccattgcggagaccacacagtgttattggagggagccttggctccttcatggcaatgcccagaaatggaagcagattagatattgttcatgaaaatctaaaaatgggatcagatggtgagagtgaccaagcttctgggacatcatctgatgaagtccagtcacctacaggtgtttgtctcagaaatcgtatacatagacggatctcaatggaggatttaaataagcggttatcactgcctgcagacatcagaatacctgatggatatcttgaaaagttgcagataaacagtccaccatttgaccaaccaatgagtcgaaggtctcgtagagcttccttatcagaaattggctttggaaaaatggaaacctacatcaaattggaaaagcttggagagggtacatatgcaacagtatataaaggaagaagtaaattgacagagaatttggtggcattaaaagagatccgattggaacatgaagaaggtgcaccctgcacagctataagagaagtttcactattaaaggatttaaaacatgcaaatatagtaaccttacatgacattgttcacacagataaatccttgactttggtgtttgagtatctggataaagacctgaaacagtacatggatgactgtggaaacatcatgagtatgcacaacgtaaagctgtttctgtaccaaattctacgtggtttggcatattgccatagaagaaaggtattgcatcgagacttgaaaccacagaacctcctcattaatgagaaaggagaattaaagctagcagattttggactagcccgagccaagtcagttcccacaaagacctactcaaatgaagttgtcacactatggtaccggccacctgatgtgcttcttggttcctcggagtacttaacacagattgacatgtggggtgttggttgcattttctttgaaatggcttctggaagacctttatttccaggatcaaccgtggaagatgaactgcacttaattttccgactgctaggaactccatctcaggaaacttggccaggtatttcttcaaatgaggagttcaagaactacaactttccaaaatataaaccagagcctctaattaaccacgcacccaggttagactctgaaggaattgagttgataagaaaatttcttcagtatgaatctaagaaaagggtttcagctgaagaggccatgaaacatgtgtactttcgaagtctgggaccaagaatacatgctttaccagaaagtgtatcaatattcagtttgaaagagattcagttgcaaaaggacccgggttttcgaaattcttcttatccagagacaggacatgggaagaacagaagacagagcatgctcttttaagtctgataacatggtttcaagcccagcccccagcctttcttaccaatcaaggactcagaactgaaggcaattatttcttttggtggacttggaatct

SEQ ID NO: 384483 - DNA, 463 bp, Homo sapiens
cctcgtctctaaaaacaaacatggaaaataaaacttatgacttatttatttctggaattttccatttaatattttcagactgcagttgactgcgggtaactgaaaccatgggtatgggggttggctgtgtttgtggtcaccagtttacagtcccttgctgtagaacagaagaataggctgtgaatctagacgaatgttttccaatcactacctctgacattgggaaggttatgcagttttgccttctgtaaaatgagaaagacattacttaggtcatggacttgctggtttaacagtgataaatctggctgggcatggtggctcatgcctataatcccagcacgttgggaggccaaggtaggaggattgcttgagcttaggacttccagaccagcctgggtaacataacaagacctcagaacaaaaacaaaagacatctcagaaaaaaaaacaaaagaaagaa

SEQ ID NO: 384484 - DNA, 443 bp, Homo sapiens
gagtgaacttcccagagcacttttgtctgggcctctgtgccagtgtaaactgataatagtgatttccctgccccacctctctgccagctatctaagttttctttgttacataatcaggattaatttaagcagcctaggccatccatttagaaatggttagtgaagaaaggtgaatggggaggggtcagagtcccttagggggccaccaggtgcgagtccccttgctctttggggccttggtttcccttctgtgagttggggcagttgaagggaagggctgctcaggtggtcctgccacatcccagtgttgtgtctagtgagtacaggtgagagtgctcccaaccagggcagatcctgctgctaggcagtgagtcaggaaggaattggtaaaaatgacgtcattgctaagaatgacgtcttttttgctgtttatccaaaggaaa

SEQ ID NO: 384485 - DNA, 631 bp, Homo sapiens
gccattgttctgaggtcacaagatttgcaacctccacagttgcccctgtaattaacatcactattgtagaacctaagattggtcttttgagacgttttagcagacttttgcattcaggcaactgactgaccacacctgggcttgcaacttgtgactcaacaggccctgtggccccacccagagggggactcagccaccaggactgttttccacacccctatgagtccatccccaaccgatcaacattccctatttcctagccctctgcccaccaaactatccttgagtattaactccctcttctgcgtggtcggcctcacatcagttacactccctttgctgcaaagctatggcctcagtgaattgatttttgtttgtgctgacagcaggagaaagccactgggcaattacaaaacagcattcattatctcccctagtttctgtgggtctgggctccaggagcagctcagctgaatggttctggctcgaggtctgtcatgaggctgcaggattcactcccagctggctcatggagctactggcaatgaggctccagttccttggcacgtggtcctccctggtgcactaacatggtttcagctagagcaagacagaagacagggatagagaa

SEQ ID NO: 384486 - DNA, 388 bp, Homo sapiens
tggctcatgcctgtaatcccagcactttgggaggttgaggtgggagggttgcttgaggtcaggagttcaaaaccagccttggcaatattgcaagacccctgtctctacaaaaaataaaataaaaattagctgggcatgtgggtgaatacctgtagtgctagctacttgggaggatctcttgagcacaggagtttgaggctgcagtgtactgtaactataccactgcactctagttgagatgacagagggagaccctgtttcttaaaaaagaaaagaaaaagctgcctttggaaactaatcctacttttctgacctcttctgataggtctactgtaaaaaaccaaagtcaactttgaataaacttgacaagctgaaggagaactttagg

SEQ ID NO: 384487 - DNA, 326 bp, Homo sapiens
ggaactccctgacctcagtgatccgcccacctaggcctcccaaagtgctgggatctattataggcatgagccaccacgcccagcccaaagtttttactttggatgtagttcaatttatctattcttttgctgcctgcaagaggtaattctttatttggtattggaacttgttactcaggaatgtgttcttttgaccgggtacagtggctcatgcctgtaatcccaatacttcaggaggctgaggtgggaaaatcatttgatgccaggaacttgagaccagcctgggtaatatagtgagaccttgtctctgaaaaataaaaagaaaa

SEQ ID NO: 384488 - DNA, 409 bp, Homo sapiens
gattttccaagtgacaaagagggcttccttctggagccaattttaagaataggatgctgggcaactgtgaagcgagaagacagtctgggagtagagagcaagcaacattttataacagtacatgaatacccattctaggaaagagtttcctcttctaattttgagtcaaacatgtgactaatcagcatataaagctgacacatgaggtcccagtgaagattgtcgatggccgtgtacattacccataatgtcagctgggactggaaactaagtcacatcacatttaggaattgtgtctaagttctgtcattagttagacacatcacttcagaaagtcgatctttctttgtacgtcaattatgtcatctctaaaataaaaaatttgagttagatgagctttcaatcccta

SEQ ID NO: 384489 - DNA, 347 bp, Homo sapiens
gatgtgcacatgctattgccctgctgactattttaaatggatgataattgggaataatgaccgggtcagaggtagggatgcgtaaaccctggcagagcagccttccaccaagtcaaagcacatggggccctcagagccgggagccggcacttgtaagctgaattgagcacacaatgtatgtggctggccacatacgttgccaaataaatatcacattacacatcccatctcccccacgtgaccttggtgtagacaaagtctaaactcatctaggagatgagaacatttttgttccgagaatgatcccatctgcctcccccaactcccaaatatccttcaacccctct

SEQ ID NO: 384490 - DNA, 1370 bp, Homo sapiens
cagaaagaaggggagaagaagcggggggatgggtggagggtagaggggagaaaaatacgtgacaaagaaaacattctctgcctgggaggagactctctgagggtgtagagctagagggagcattcactggccatgccagtagttaccactgatgctgagtcagaaacaggtatcccaaaatccctttccaatgagcctccctcagaaaccatggaggaaatagagcacacatgcccacagcctcgactgaccctgactgcacctgccccatttgctgatgaaaccaactgccagtgtcaagcaccccatgaaaaactgaccattgctcaggcccgcttaggaacaccagctgacaggcctgtcagagtatacgccgatggaatatttgacctcttccactcaggtcatgcaagagcccttatgcaagcaaaaacactgtttcccaacagctacttgttggtaggagtttgcagtgatgatctcacccacaaattcaaaggtttcaccgtgatgaatgaagccgagagatacgaagctctcagacactgtcgctacgtagacgaagttatcagagatgctccctggacactcacgccagagtttctggaaaaacacaagattgactttgtggctcatgatgacattccgtattcctctgctggctctgatgatgtttacaagcacataaaggaagcagggatgttcgttccaacgcagagaacagaaggcatctcaacatcggacatcattaccagaattgttcgtgactatgatgtttatgcccgacgtaacctccagagagggtatacagccaaggaactgaatgtcagctttataaatgagaagaggtaccgtttccagaaccaagtggacaaaatgaaggaaaaagtcaagaatgtggaggaaagatcaaaggaatttgtgaacagagtggaagaaaagagccatgatctaattcaaaagtgggaagagaagtcaagggaattcattggcaacttcctagaactgtttggacctgatggagcatggaagcagatgttccaggagaggagcagccggatgctgcaggccttatccccgaagcagagccctctgaagagttgggcgaggtgcagagacttctagctggacaacctacacaaaccttagcgtctagagtcactctaaccttgctaaggaaggatgcagagttccctagagagacttgcactgatggggtgacttctgctttggtccttccaccacccccaccaagtaaaccacctgtggcagcggctgttccctcaacctgctacttctgcgtccataagggtcctgcacgttgcctcccaccaccccagctctgccagaataaaattgtttccaataga

SEQ ID NO: 384491 - DNA, 656 bp, Homo sapiens
aactccaaagggtagaggcctctagagaagataaaaagatcaggagcaggcatggtaggccatcaggagtgcatcatggaagaggacaatcgcgctccccaattgtggcgcaagaccctgactgcacctgccccatttgctgatgaaaccaactgccagtgtcaagcaccccatgaaaaactgaccattgctcaggcccgcttaggaacaccagctgacaggcctgtcagagtatacgccgatggaatatttgacctcttcgcacacatcgtacgagcaagcaactctgttgtggggagacacgaagaggacaagatgcgtgtggacgttaggaggaacgcagggaatggataaccacactggatgctggtcgatgacatgctgctatgacctcgagatctgagagatactgaagcctcaatacttggtaggatactctcctgcaaaagtctaaagctcatactcaggagtgacactgtgggaacagcggggctatggtgtgagcaaggcacgacaaagtagtccacctgttgggggcctttgcacttagcccttactgaattgtcccttgtgaacatgcaaaccggtagtatgtgtagccccaaagctgctaaggagcgccctgggcatagaacttggaagggagtcccatcatc

SEQ ID NO: 384492 - DNA, 2008 bp, Homo sapiens
cagaaagaaggggagaagaagcggggggatgggtggagggtagaggggagaaaaatacgtgacaaagaaaacattctctgcctgggaggagactctctgagggtgtagagctagagggagcattcactggccatgccagtagttaccactgatgctgagtcagaaacaggtatcccaaaatccctttccaatgagcctccctcagaaaccatggaggaaatagagcacacatgcccacagcctcgactgaccctgactgcacctgccccatttgctgatgaaaccaactgccagtgtcaagcaccccatgaaaaactgaccattgctcaggcccgcttaggaacaccagctgacaggcctgtcagagtatacgccgatggaatatttgacctcttccactcaggtcatgcaagagcccttatgcaagcaaaaacactgtttcccaacagctacttgttggtaggagtttgcagtgatgatctcacccacaaattcaaaggtttcaccgtgatgaatgaagccgagagatacgaagctctcagacactgtcgctacgtagacgaagttatcagagatgctccctggacactcacgccagagtttctggaaaaacacaagggatgttcgttccaacgcagagaacagaaggcatctcaacatcggacatcattaccagaattgttcgtgactatgatgtttatgcccgacgtaacctccagagagggtatacagccaaggaactgaatgtcagctttataaatgagaagaggtaccgtttccagaaccaagtggacaaaatgaaggaaaaagtcaagaatgtggaggaaagatcaaaggaatttgtgaacagagtggaagaaaagagccatgatctaattcaaaagtgggaagagaagtcaagggaattcattggcaacttcctagaactgtttggacctgatggagcatggaagcagatgttccaggagaggagcagccggatgctgcaggccttatccccgaagcagagccctgtgagcagcccaacccggagccggtccccttcccgctccccatcgcccaccttctcatggcttccactcaaaacctcacccccttcctcacccaaagcagcctcagcctctatcagcagcatgagcgagggggatgaggatgaaaagtagaggctgctgggaggcaagagccgcaccatgcaggatggggaggagggcgagagtcacagggttgcctgggtggtgtttgaagggtaatagtcacaggagctgcagctcagcagagagaccctgaactctgctaagggaaggtcttgggaccagttctctctcactctccgtacagctgaagagttgggcgaggtgcagagacttctagctggacaacctacacaaaccttagcgtctagagtcactctaaccttgctaaggaaggatgcagagttccctagagagacttgcactgatggggtgacttctgctttggtccttccaccacccccaccaagtaaaccacctgtggcagcggctgttccctcaacctgctacttctgcgtccataagggtcctgcacgttgcctcccaccaccccagctctgccagaataaaattgtttccaatagaacaaaaaaaaaaaaaaaaaaacaaaaaacaaaaaaaaagggggggggcggcaaaaaagattccccggggggggcccaaggaaacggggaacacaagaattcaggtggcaacaagggggcccacataaggagcacgagattacaacaaatagagaaggggcgcgaagatcaaaaaaggacgagacggggaaacctgtcaaagggggaccaggggaagaaccaaaatttaaggggggggggcgacaaaaataggtgggggcacacatactaagaagagaattttaaagcctcaagggggaacaatatacaatttataagggttaatagggggtaaaaaaaaggaaatatacacgagatgtaaaatgggctagggagatgcattagacaatttca

SEQ ID NO: 384493 - DNA, 1129 bp, Homo sapiens
cagaaagaaggggagaagaagcggggggatgggtggagggtagaggggagaaaaatacgtgacaaagaaaacattctctgcctgggaggagactctctgagggtgtagagctagagggagcattcactggccatgccagtagttaccactgatgctgagtcagaaacaggtatcccaaaatccctttccaatgagcctccctcagaaaccatggaggaaatagagcacacatgcccacagcctcgactgaccctgactgcacctgccccatttgctgatgaaaccaactgccagtgtcaagcaccccatgaaaaactgaccattgctcaggcccgcttaggaacaccagctgacaggcctgtcagagtatacgccgatggaatatttgacctcttccactcaggtcatgcaagagcccttatgcaagcaaaaacactgtttcccaacagctacttgttggtaggagtttgcagtgatgatctcacccacaaattcaaaggtttcaccgtgatgaatgaagccgagagatacgaagctctcagacactgtcgctacgtagacgaagttatcagagatgctccctggacactcacgccagagtttctggaaaaacacaagattgactttgtggctcatgatgacattccgtattcctctgctggctctgatgatgtttacaagcacataaaggaagcagggatgttcgttccaacgcagagaacagaaggcatctcaacatcggacatcattaccagaattgttcgtgactatgatgtttatgcccgacgtaacctccagagagggtatacagccaaggaactgaatgtcagctttataaatgagaagaggtaccgtttccagaaccaagtggacaaaatgaaggaaaaagtcaagaatgtggaggaaagatcaaaggaatttgtgaacagagtggaagaaaagagccatgatctaattcaaaagtgggaagagaagtcaagggaattcattggcaacttcctagaactgtttggacctgatggagcatggagcggctgttccctcaacctgctacttctgcgtccataagggtcctgcacgttgcctcccaccaccccagctctgccagaataaaattgtttccaataga

SEQ ID NO: 384494 - DNA, 1695 bp, Homo sapiens
cagaaagaaggggagaagaagcggggggatgggtggagggtagaggggagaaaaatacgtgacaaagaaaacattctctgcctgggaggagactctctgagggtgtagagctagagggagcattcactggccatgccagtagttaccactgatgctgagtcagaaacaggtatcccaaaatccctttccaatgagcctccctcagaaaccatggaggaaatagagcacacatgcccacagcctcgactgaccctgactgcacctgccccatttgctgatgaaaccaactgccagtgtcaagcaccccatgaaaaactgaccattgctcaggcccgcttaggaacaccagctgacaggcctgtcagagtatacgccgatggaatatttgacctcttccactcaggtcatgcaagagcccttatgcaagcaaaaacactgtttcccaacagctacttgttggtaggagtttgcagtgatgatctcacccacaaattcaaaggtttcaccgtgatgaatgaagccgagagatacgaagctctcagacactgtcgctacgtagacgaagttatcagagatgctccctggacactcacgccagagtttctggaaaaacacaagattgactttgtggctcatgatgacattccgtattcctctgctggctctgatgatgtttacaagcacataaaggaagcagggatgttcgttccaacgcagagaacagaaggcatctcaacatcggacatcattaccagaattgttcgtgactatgatgtttatgcccgacgtaacctccagagagggtatacagccaaggaactgaatgtcagctttataaatgagaagaggtaccgtttccagaaccaagtggacaaaatgaaggaaaaagtcaagaatgtggaggaaagatcaaaggaatttgtgaacagagtggaagaaaagagccatgatctaattcaaaagtgggaagagaagtcaagggaattcattggcaacttcctagaactgtttggacctgatggagcatggaagcagatgttccaggagaggagcagccggatgctgcaggccttatccccgaagcagagccctgtgagcagcccaacccggagccggtccccttcccgctccccatcgcccaccttctcatggcttccactcaaaacctcacccccttcctcacccaaagcagcctcagcctctatcagcagcatgagcgagggggatgaggatgaaaagtagaggctgctgggaggcaagagccgcaccatgcaggatggggaggagggcgagagtcacagggttgcctgggtggtgtttgaagggtaatagtcacaggagctgcagctcagcagagagaccctgaactctgctaagggaaggtcttgggaccagttctctctcactctccgtacagctgaagagttgggcgaggtgcagagacttctagctggacaacctacacaaaccttagcgtctagagtcactctaaccttgctaaggaaggatgcagagttccctagagagacttgcactgatggggtgacttctgctttggtccttccaccacccccaccaagtaaaccacctgtggcagcggctgttccctcaacctgctacttctgcgtccataagggtcctgcacgttgcctcccaccaccccagctctgccagaataaaattgtttccaataga

SEQ ID NO: 384495 - DNA, 1616 bp, Homo sapiens
cagaaagaaggggagaagaagcggggggatgggtggagggtagaggggagaaaaatacgtgacaaagaaaacattctctgcctgggaggagactctctgagggtgtagagctagagggagcattcactggccatgccagtagttaccactgatgctgagtcagaaacaggtatcccaaaatccctttccaatgagcctccctcagaaaccatggaggaaatagagcacacatgcccacagcctcgactgaccctgactgcacctgccccatttgctgatgaaaccaactgccagtgtcaagcaccccatgaaaaactgaccattgctcaggcccgcttaggaacaccagctgacaggcctgtcagagtatacgccgatggaatatttgacctcttccactcaggtcatgcaagagcccttatgcaagcaaaaacactgtttcccaacagctacttgttggtaggagtttgcagtgatgatctcacccacaaattcaaaggtttcaccgtgatgaatgaagccgagagatacgaagctctcagacactgtcgctacgtagacgaagttatcagagatgctccctggacactcacgccagagtttctggaaaaacacaagggatgttcgttccaacgcagagaacagaaggcatctcaacatcggacatcattaccagaattgttcgtgactatgatgtttatgcccgacgtaacctccagagagggtatacagccaaggaactgaatgtcagctttataaatgagaagaggtaccgtttccagaaccaagtggacaaaatgaaggaaaaagtcaagaatgtggaggaaagatcaaaggaatttgtgaacagagtggaagaaaagagccatgatctaattcaaaagtgggaagagaagtcaagggaattcattggcaacttcctagaactgtttggacctgatggagcatggaagcagatgttccaggagaggagcagccggatgctgcaggccttatccccgaagcagagccctgtgagcagcccaacccggagccggtccccttcccgctccccatcgcccaccttctcatggcttccactcaaaacctcacccccttcctcacccaaagcagcctcagcctctatcagcagcatgagcgagggggatgaggatgaaaagtagaggctgctgggaggcaagagccgcaccatgcaggatggggaggagggcgagagtcacagggttgcctgggtggtgtttgaagggtaatagtcacaggagctgcagctcagcagagagaccctgaactctgctaagggaaggtcttgggaccagttctctctcactctccgtacagctgaagagttgggcgaggtgcagagacttctagctggacaacctacacaaaccttagcgtctagagtcactctaaccttgctaaggaaggatgcagagttccctagagagacttgcactgatggggtgacttctgctttggtccttccaccacccccaccaagtaaaccacctgtggcagcggctgttccctcaacctgctacttctgcgtccataagggtcctgcacgttgcctcccaccaccccagctctgccagaataaaattgtttccaataga

SEQ ID NO: 384496 - DNA, 1907 bp, Homo sapiens
cagaaagaaggggagaagaagcggggggatgggtggagggtagaggggagaaaaatacgtgacaaagaaaacattctctgcctgggaggagactctctgagggtgtagagctagagggagcattcactggccatgccagtagttaccactgatgctgagtcagaaacaggtatcccaaaatccctttccaatgagcctccctcagaaaccatggaggaaatagagcacacatgcccacagcctcgactgaccctgactgcacctgccccatttgctgatgaaaccaactgccagtgtcaagcaccccatgaaaaactgaccattgctcaggcccgcttaggaacaccagctgacaggcctgtcagagtatacgccgatggaatatttgacctcttccactcaggtcatgcaagagcccttatgcaagcaaaaacactgtttcccaacagctacttgttggtaggagtttgcagtgatgatctcacccacaaattcaaaggtttcaccgtgatgaatgaagccgagagatacgaagctctcagacactgtcgctacgtagacgaagttatcagagatgctccctggacactcacgccagagtttctggaaaaacacaagggatgttcgttccaacgcagagaacagaaggcatctcaacatcggacatcattaccagaattgttcgtgactatgatgtttatgcccgacgtaacctccagagagggtatacagccaaggaactgaatgtcagctttataaatgagaagaggtaccgtttccagaaccaagtggacaaaatgaaggaaaaagtcaagaatgtggaggaaagatcaaaggaatttgtgaacagagtggaagaaaagagccatgatctaattcaaaagtgggaagagaagtcaagggaattcattggcaacttcctagaactgtttggacctgatggagcatggaagcagatgttccaggagaggagcagccggatgctgcaggccttatccccgaagcagagccctgtgagcagcccaacccggagccggtccccttcccgctccccatcgcccaccttctcatggcttccactcaaaacctcacccccttcctcacccaaagcagcctcagcctctatcagcagcatgagcgagggggatgaggatgaaaagtagaggctgctgggaggcaagagccgcaccatgcaggatggggaggagggcgagagtcacagggttgcctgggtggtgtttgaagggtaatagtcacaggagctgcagctcagcagagagaccctgaactctgctaagggaaggtcttgggaccagttctctctcactctccgtacagctgaagagttgggcgaggtgcagagacttctagctggacaacctacacaaaccttagcgtctagagtcactctaaccttgctaaggaaggatgcagagttccctagagagacttgcactgatggggtgacttctgctttggtccttccaccacccccaccaagtaaaccacctgtggcagcggctgttccctcaacctgctacttctgcgtccataagggtcctgcacgttgcctcccaccaccccagctctgccagaataaaattgtttccaatagaggtggcaaagtgcttctgaaatagtcgagaaaaagacagattccaacctcctcagtccagccactgagacctgatgttggaacgcatcagctccttccagttccatgaatgtggctcatagacaaagccttgctttaggctggttataaaaggtcatctagtgtgaaccttaactttttattcaaaggacagttttgtcaagaactccacgtaaggcctgatgtgctcctggttgtactttctcatcactggtttgacttcattgttttgcagaaattaccttaatccgtg

SEQ ID NO: 384497 - DNA, 892 bp, Homo sapiens
cagttcagaggaccatctgacatcgatgtttatcggggaccacgttctgctgcctgccaggccgctttatgatatgcctcccctccactctcccaaactgagcccttccttccatgaggcccccatcccgaggaactaggcccttgctgctgcatctgagcatgtgtgcttgccaaagcttggagaagcagctggtggcagacagaccagagggactggacttcctgtgtacctctaacagggagtggggatagccgcagctgctctggatgctgtgctgattagagctcaccaaaggacccagggatgccatcatgagctctctgcactcttggcatttgagaaagggagtgagaagaagggaggaggaagaaggagggtgggagagggcaggagagacagagcagcctcctagttatttcttggaatgcatctgggcagtgaccctcagcgaagagagaggcaggctttcagacctaatgcaataaaagaagagtggtcagtaggcccagttctcagcactccatgcatgttaactccattaccaagtactatgattatccccattgtactgatggggagaccaaaacaaagagaaatgaagcaatttgcctagggtcacacagctggaatgcagcagagtcaagatttgaacccaagcagatggccgtcagcatctttacaaccagctgctgtgggatggagctgggatttgaacctgtgttcatcagagtcctgaaggcttatgcttaactactacagagtcccatgtccctgtgatgtctgcctcagctttctcccaagggtctggggaggaagtgtccacggcgctcggggttgtctgtttctagccccgccccagctggttatttctcactctgctggggagcac

SEQ ID NO: 384498 - DNA, 568 bp, Homo sapiens
aaaaaaaaaaaaaagaaaaaaaaaaagaaagaatgatgggagtggtgttgacgtatgttagcattccttgtcttgcccctttagcaagtttcctatatcaataggagaaacaaacagcagaatcagtagctgaaatgatatgcagtgtgatgaggagagttgtagttagagaccttttaaaaaaacaaaaaaaaaattacaaagtagacaacagccagatgcttctggtcatattcaattaacactgaaggatttctagaaaaacagtccttgagatacctaaggaaatctgagagaaactgcctgaaggaacaaagaaagaacttgtggtgcagtaataccaagccattgttcttgaaaaagagccaaatttcttccctgagaccataaagttgtgaacagaatagatacagttctttcccaaggagagaagaaatgagtcacatgtctgcaacatattgatgaggcattagcgctccatctttctcataattgccactgcctgtaataggtttcatataccaacatacatatgtctgtcttatgaatgagacagagggatatcagt

SEQ ID NO: 384499 - DNA, 1154 bp, Homo sapiens
  misc_feature (954)..(954): n is a, c, g, or t
catgagaccatcttgcatcttcctaagtggacagggaagagcaagtccccaggggagccacccgggaaagtgtggcaggaagatgctcagagctgaatggcagagagactcatgggcctgctctccatgattaaagaagagggatggatctcccaggagagggccaggaggccgcctgaggcagcttctgtgaggaacaggtcgatgtaagaagacttgacaaggagttgaaattaggtgaaagcaaagaaagaaaacaagagaggcagtttcctgctgcatattttatttgtgtgcataaccccaaggcagtggcagggaagtctaataaatgaggcaaaataaaagagcttcaccttttaaaaaaagaagatcgttgccaaaatgtgtcaattccagttttaaaaatcacatgaagccctgactctgtgcctggcaccaagttaagtcctctatggggagtttgtgtttaaatggagtggacagatgcaaacaagatggagcggtaaggccactgccattatcaaggtgcgaattaaggtctgagcaccccagaagatggagcggtcctgatggaagatgcctcagcacataccttgcttggaaaaaggacccctctggaaagactgcagggtcgtatcagcatttgacagaacctatgtggtcgtctctgcctgccctgcctgccctccctctctatcccgcattctccctgcactgcagccatctggagccacaggcagctgccccctgccccacacgcacaaacacacacacacacacacatacacacataaatacacacacacacacacgcttcatgggtctcagcctttggcatgtgctatttcccctcttgcaacaaccacccttattcatcccatttgaggtgtggcttctcatcttcaaaaagtcagctcatactgcatcttgagactttcttagaaacagccncgccctctgggctcccacagccccctagattaactcctagtgtatccccacccccaccccattacaatggccatggttggtcagtcctcctaacatcagggactgcttcaaagacaagaaccttgtttctatcacctgtatccaaacacacagcctgacagtgggtcagcactcaataaatgcttgtatttttcatgaat

SEQ ID NO: 384500 - DNA, 292 bp, Homo sapiens
gaatgaaaaagtgctgaaagaaaaaactcaaggaagaattctctctctggcaaaactatctttcaaaaatgaaggataaattaagacattcacagataaaatctgagaacattcactgccagtagacctgctctcacaagaaatgctaatgggagtccttgggggctgaaatgagaggacactggacagcaaattgaagccatatgaagaaataaagatctctagtaaagataactgcatagattaatataaaaacagtattgttgcatttttggtttgtaactatttccta

SEQ ID NO: 384501 - DNA, 398 bp, Homo sapiens
tgtcacagactgcagaaagctcaagtaagaggagcactgaataatatccattaaatttgaagcctttatatcttttttcccaagaagcaacagtctcatggctggtgtacaactgcttcagaaaatagtttagcattagcagggaagctgaacaggtgcagacctcaacatccagcaactccactcttacgaatatgtggatgcttgctactcagactgtggtccacagacagacagcatcagcatcagcaggaacttgtagaaatgcagaatctggccaggcacggtggctcaacgcctgtaatcccagcactttgggagactgcagtgggcggatcgcttgagcccaggagttagagaccagccttggcaacgtagtgacccggtctcaaattgga

SEQ ID NO: 384502 - DNA, 188 bp, Homo sapiens
tctcccctaaggtgtgaggggtgggagctggggtgggtaatgggggtattgaaagtgctaaccctctaatcacatagttgttcctctagcaactagcactgtccaatccggaagctatgtaagggcccaccaagtcaccttattaccgtaaactgaggtagatttgaaggggcttattttaaataaca

SEQ ID NO: 384503 - DNA, 353 bp, Homo sapiens
tagaaacattctaatgaaaagtctagaactaagaagttataataacaaattaaaaactcagtggatgaatttaaccgcttgttaggtatagccagagagattttgtaaagtggaaattagataaatcaaataaaatatctgaaaatactgaagcatgcagagacaaaatatagaaaaagaacacacacacacacacaaaagacagagaggtgaaaagtggagaagaaacaatatttgaaaagataatgactcaaaatttttcagaattgatgaaagacaattattcacatattcaataagtgctacaagccccttaaaggatagatgcaaccatgcctaggaacattatagta

SEQ ID NO: 384504 - DNA, 420 bp, Homo sapiens
cttctagggttactgattccatctcagtcacaatcccgatcacagcttcctttcattgagggcttgactgtccacaccttggtatagatacttctatacaatagcatagaaggaggatataactgaatccatagctattgtcatcccattttacagatgaggaaactgaggctcagagaggggaagtaacttacccaagactgcacagcagtaagcggcagaacctggacccagcccctggctccagacccccactgctctgctgacctgcaggggcctcgaatcaacataaagcctttcacccctagcctgctcctgtctcaacctcaacctccagagaacatccatcctccatggagcctcccagcctgagccctctgagctgcctcccttcttctctcccctcagcccaggcttccc

SEQ ID NO: 384505 - DNA, 692 bp, Homo sapiens
ctctgaaacagatccaagatgttgtttgagccatgcaactagaagatctcatagaactaaagttatctaatttacagaaaaggttttacgtgacgtctattgtacagattcatatgaaaaccatagttcaaactccaaggtttaagaagtaagaaagatcatgccatttgcaacaaacatgcatgcatatttgaaaagcaactgtaagtatgctattggacattggtaaagattgaatatctgaccatggcatatcaagaaaccatggaatgagtactgcttatcaagatctgggtgtgagaagacttaaaaagtcagatagtcagtgagaaccagctagaatccatgatctgttgtgggaaaactagaagaccaaaaaaagcacgaaagtcaagaaagaagtctcttttcacatgaaagtggcctgaagacaaatactgctatgaatggttacatctaggacttctgaaattagccccagattcaactcatttttttctgcatttgctgagcaatatgacatgtttacaccgattagctaaaaagttatgtgaagaatgggcaacaatatctctaaggcaagatatgttcagatccaatatagttcatatagaccttgtcagagtaaatgaccatgtgcctttcagaacactaaagaataaaatccttccacattagaatgacaaatatgt

SEQ ID NO: 384506 - DNA, 362 bp, Homo sapiens
ctcagattcattccgggaaagcttcgcagtggcctgggaagtgctacataatccaccccgagctcttcctctctcgtcaccactgtgccccctgctccctgcagacccagcatgatggcctctctgttcttcagcaagccaggtgggccctgcctcggcctctgatctccagggaacatttctcccccatacctgtgtggcggttgcccctctccttcaggtctgctcccacagggtgttttatagaaatggcttgaaacagacgcccttcctcagcccttgaccacgcaagctctgaggagccactggtgtccctgtggctttgctgcaaccagatctctctggtcaagggcagccctagg

SEQ ID NO: 384507 - DNA, 456 bp, Homo sapiens
agtgccaggctgccgcacgcggctgcatctggttgcccaaggttgatgtagccgcggtctctcgtcacgacatcgaagctcgggaaacggatggaagcagggctctagagaggcacgattgcatcgacacgtgggcaggtcgcccatgccaagggccatgttggtgggtgggtgcgtgggatctgtcgtatgagtgagtcaaagcctgattttttcccccaaaaagattgaaatgagatatcatattttaacattagttttatggcatcttgaatagcaacacattttagctcaaggaatttttcagctgtccttttgagaaacgtaaattttctttgtttttaagtatttaataagcattctttacaattgcaccacagcgcgaactttccacctgctttattaattatgacatttgtgtccccactattaaaatattccgcagtattataaaaa

SEQ ID NO: 384508 - DNA, 407 bp, Homo sapiens
aaagagacaggttgtcactctgtcacccaggctggagtacagtggtgtgatcatggctcactgtagccttgaacttctgggctcaagtgatacccccgccaccacacccagttaattttttgtattttttgtagagattagtctccctctgtcacccaggctggtctcgcactcctggcctcgagtgatctgcccaccgttgcctcccgaagcactgggattggcctaccatgcccggcctcacaatacattcttcttaaaataactttcaggctgacaggaaatgccaggtgacaactctgaagtttctgaaggatggcttgaaaatgaggccacctggtgccacctcacagggacagaccagcttcacccccaggtgtaactaccatacagccctcagtgcatgg

SEQ ID NO: 384509 - DNA, 525 bp, Homo sapiens
ggtcagcaccgcagtctgtttcctgtgcttctgcctgggtggccaggggctgcccagaaatgacccagattcacaccccagcctcctgctcccctgtagcatgctgggtttctgtccatggtagcatttgctggaaacatctgttgttcctttccatcctggccttcgttccttcacttgctggccttccctgggaggcaggggcagtgagttcttgggttcggagtcccagggcagtcctggggcaggtgtccagtggatggatgtgtgctgggggtgtgtggaggaccctgcagagcatgcatcgaagtccctctgctacactcactcaccctcaaggggagtctgctgcgtgccggcaccgtgccgctgagaactgggtgcacacggccccacttggtccccattgcatctctgccccagaatggaggtgcagagaggccaggtgtgtgcctggcgctgtagggcaatggttccccaggtggggtgtgggcacctagcaagggcagtgataaaagaaaaact

SEQ ID NO: 384510 - DNA, 230 bp, Homo sapiens
agatccatttgtttgaacaaccctctgtaattaattgtgatgaattatgcctgttttagaaagtattttgtacacatatttttaataaaaattttccccccgaatatttaaccagtatgacattaaaagagtcaggaatttgtctctcactttattttctttttgtggatcaccaattatttttggattattcattaaataaagaatcctctcactgaggttaaatctat

SEQ ID NO: 384511 - DNA, 470 bp, Homo sapiens
agttgcaatcaacgcattgactaaagctgcattatctcagagcttgaccaggaaaggatctgctcccaagctcactctgtaggtgttggcaggcctcgggtcttaactggcattggcaggagacatcagttccttgccttgttggtctctttatgggtctaaaatgtggtagcttgcttccctcagagtgaggagagaggagtgagggagaaagggaaggaagttgaaagagagaaagtaaaacaaaagtcaagatctttgtttaagctaatcttgaaagtgacatcatatcacgttaaccatattctatcaattaaaagtgagtccctgggtagagcccacataggtgagacttcataaggacctcataaggtagggatcattgaggttcgtttcagagcttacgtgccacgccattacatcacaccatacacaaaaataacctgaaatgaatcatagacctaagcata

SEQ ID NO: 384512 - DNA, 206 bp, Homo sapiens
aagctaactgggcaggcagaaagacagcaaaggaaaataaagtgaacaatagtttactcaccaggagttttgcactgcagcccaccagcttgtctgcaactaacttgtaactaggtagtgacattaggccaatcacttaacttcttcatctgtaaaaactgtagcaaaagcttattgctaatcatgagtcagctattcaactaagt

SEQ ID NO: 384513 - DNA, 386 bp, Homo sapiens
agagagagagagagagagatctgtcgataattgatgagattgttcttttcagccaaatttgggagaggtaggatggaggtgctagaccctaataaatgaatgtgagggggtaatttgtaatgtaagaatgataaagaagaaggctgggtgtggtggctcatgcctgtaatcccagaattttgggaggccgaggcgggaggatcacgaggtcaagagatagagaccatcctggccaacatggtgaaaccccgtctctattaaaaatacaaaaattagccagcgtggtgacgcgcacctgtagtcccagctattcgggacgctgaggggggagaattacttgaacctggaggtggagtctgtggtgagctgagattgtgccaatgcac

SEQ ID NO: 384514 - DNA, 1843 bp, Homo sapiens
tgaaacaagctaggccaacttggacattggaggatggattagaacatactagctgctccatcatagactatccttactaagcagaagaccttaatagtgcctaaaagtttagttttgaaattggttttttcctaacttttctttgttaaatttatttttattatcttttttaatcttagaagtaatcagagtttgacagctctttagtaactgttaataaaagaatctttcatcacaggataagcaatagattgtgtgggaaataataacacaagagtaaagatgctgaaggactcttctggaactcaaagtgacagttttgaaggttctggcacagtaggaaaggatcacaacccatataaatggctaatgttgaatttctctgaacactgtcacatatggggcatcaatttggaaaactctcaattgaggccccttccctaagattacaacattgataacctgtcctttttctctctcttctttactatccgtccaagtctactattccaagtttaaatattgttcagaaagttgtcagccttgttagtcagaaaaactccatttagagccatccaaactagcataagaaattccttaagcactcaaagcattatctctgttttaagtaagaaactaaatccagagcttttaacaggtacttagaaataagtattgggtaatcactaagaggacattgactgcaccaaaccaaagctatagaaagaaatgattgactttttaaaatatattcacattaactgtcctaggatacttctcttgaggctttggaaaacttcttccttgaaatttgcatatccactccagttctgtcaccaaagattttaatcttcagatcgcaatttcctctctcccagaaaaaagtactacaacaggctcaagggatatgctttggtggtcaagggattacactatggttttccttctgttcacaatggtatttacaggagaccttgtcatcagaggacgtactgaactatctttatgactttggatttgatcagaggtttaaaaaatagaaaaaaataaacaaccactacttgacactgtaaatgatctttaatagagtcatgacctggagactgatggagagaaagaaacttccatggaagagagtgagctaaatcatttagaaccaaacaaaggtcactggtgaaacatagggcagcatgtacacagtgcagatcagggttctgtatggccagagccaacagcagtgaccggtgggagagtcagacaactggccaatgaattcaagtgttgaaaaagccacagtctggattttgttgtgatttctggagtggttgaaacgcccatgcccatggcaaggaaaatgcttggaggctgatctgttgtgatagtgcctttcttgtcgtagtgagtactagattaataatttattcagttacgcttttctgtaccattgcctccagtcttctgaggaggtttgaagggacagtatccacttaggatgaagggacaggatattgctctggaatgctgtgatttgatgatatttgcactagattctaaactctcctttaaactggagcaactgactgagagaaaaaccaaggacagctcaaagttaaaagaaaccaaaagcagtattttctgacagataccatttctttttctccttctttttttcctggaagaaaacttcacactagttggctaccgagctcaactcttaccagttctttctctttattttttgtttccatatggaaccatctgtgtgaattagtcatcagttaggtatagttaacgtaaagagcccctgccattgaaactttgcacaccttctctgctttattga

SEQ ID NO: 384515 - DNA, 253 bp, Homo sapiens
ctaggatcttagtctctctgtcacactcagtcatccacagggatcagcctgtcggggaaaatgctttggcacagatgctgaaatgaatttaaaagcaaagcagccagggctctatgtcaagaatactttctgtagcagaaagtctgaggagcttaatctcagggcttccagaagaatattcttgatgtgagatggaaaagtacatgagagtcaatggcagaatatgttccgttactacaggaacctataatca

SEQ ID NO: 384516 - DNA, 119 bp, Homo sapiens
ctcaggttagcttttacttctttgtgaatatttactgtgtaagcaggaaagggttcatttccgtccattacccctccttgggaatctgaattctgcatcatctctggtacttggcagcc

SEQ ID NO: 384517 - DNA, 359 bp, Homo sapiens
cagactagaaacacattgtatgagctttattactattttaaataagcacatttctacacatattccatatatgtggaatgcagactggctccgtccgttgcagatgttattaaactactgcataacacactcataatcggtcttagtctcaaaaccatttttagcaaaatacgataagcagctgttaatcatcaactaagtttgagaatttttgtgaattgaagtctatggccagatgtatacggccctgtttgatcgttgagaaacacttgctgtatcaatagatataatgagaatctacaattaagtcaagatgcaaaatactgttaatgataataatatctaatatttataatatt

SEQ ID NO: 384518 - DNA, 2403 bp, Homo sapiens
  misc_feature (2)..(2): n is a, c, g, or t
  misc_feature (4)..(4): n is a, c, g, or t
  misc_feature (17)..(17): n is a, c, g, or t
  misc_feature (285)..(285): n is a, c, g, or t
  misc_feature (1202)..(1202): n is a, c, g, or t
  misc_feature (1779)..(1779): n is a, c, g, or t
  misc_feature (1954)..(1954): n is a, c, g, or t
  misc_feature (2357)..(2357): n is a, c, g, or t
  misc_feature (2389)..(2389): n is a, c, g, or t
  misc_feature (2403)..(2403): n is a, c, g, or t
angntatgttcatattnctgcgtggcctccactctagttatatgctgccgcataatagaataccccaaaacttagtgaatttaaacaacaaccgttgtattataactcatcattttttggatgagaaatttgggcaaggctcagctgaatgattcattaacaacagtcagtcattggaattcatctggtagctgggcctgtcttgagggtttaaggcagctttactcacatgtctggtgccttggtgagcaacagctggacaactggattcacctgagccctttngcctgccccatattctctgggcttctccagatgatctttttctgcaggatggttagacttctcatatggcaattcaggactccaagataccaaaatggaatctcccagtcctcttaaagcctgctggcacagtgtcacttcttccatggaccatctgagattcatggggaaaggaaatacaccccacctttcaaggggaggaatttcaaggagcttgtggccatctttaatctgttactacctcctaactggtcaccctgcctcaaatcttttttcatactctggccatatattcccaaaatctcaatttcattctatcttcccccttctcaaaaacctaagatggcttcctctagcctatttggtttaaattcctctccctgacattcataactcattatataaaagggtcctactataataatcttacctaattttgcattagtctctgtttgttaatcattagtctgtttgtcttacatagtcctcgccttcccctactctgttctgtatcacagggaagctgacccctgcaggatgtttttcctaggctccttgtcaacttcagactgggcctggcaaataggagacattggtgggagattagggggtggcagaagtcaagttatttctccttctctctgcttcatgcagatctctggaaatgattgcatttttatacctcctgtgctccagatccaactggttaagccttctctagttccatcatcctctgagtgaccctggtttctgagctccagaaactctgtattctcccttgtcattccaaccaaagcattgctgacagcttcctgaagttgctcatctctaaattgctatactgtctcctgttcatcatcccaggctttgatcacctttaaagtaaattccctgtattaaattccttctatttaaantaaactcaagtagtttctgttctgattagatcccagctgttctcaacacaaagtatccactccaggctgggcaattttgtacctggcccttcagcccctatgtgcctgttatggtatttctggcctggacctctggcctcattcttcaaagcccagctcaagcttcatcttcctcaaaatgcctttcagcatcactccagtttttactcacctgaccctatcattccttggtgactttcaatgtgtctgttttcccagtttgtaagttcattgaggaagcttgtacttgaatcctattccccacagttcccaccacagtgccaatgcacacaaagcactcaataaatattgcttatttgcttcaatataatatcttttaggtctgactaatttctatgagacatcagggctaaaatcatctgtactcctgaatggagtgaatttagggatgcttttttgggttagtgatactcttaagtttttcccatcctggatgaacatgttataatagacagggagagactatttttgttttgcggtggcaggtagtggctgttaggcacacagtataattcantgtcctatatgaagtagatatcaaatatgaaatgaaaagaaaaagcctacaccataactgatggatttgtgtggaaaagccaatgaaaaaaatatttaaatatgacagtctttttgatacttttataaagtaccattaattctggaattaaagaacaaatatgatctacatatanttaaataagatcataataaaggaaaatgccacagaaaataaatataaattaataaatctaaaatccagtctttcatgtctcacatttcttatgccctagatccatattttattctttttcccctgataacaagtgctggaaacatcagagattcaataaacattttaattgtttgaaaatatctaacagatgatgttcctgccatctagtcgcaaaattgtcttaagggattattttatgcaaaattgttcaatttgggggttttgttttgcaaaataaaatactaataagaaagtttgctacagtatttactgttttcaagccaaaaaaacatgtttatttgggaccagaacatggtccagtttgagttcttaagatctgctataactaactaactcagctnctagtatttcaagatgacatcagaagaagctntgcctttttttgcn

SEQ ID NO: 384519 - DNA, 699 bp, Homo sapiens
aatttcctgaatttagcaaaaagaaaaagagagagaaaaaaaccctacagattcaagaagttaagtgaggccgggtgcggtggttcacacctttgggggccaagatgggtggaccgcttgagcccaggagttcaagaccaacctgggcaacacagtgagacccctgtcgagagagagagaggagaaaaattaaatggaaccttaaacatgataaactcaaagaaatccacactaaaacatctttttttttggagacagattattgctgtgtcgcccaggttggagtgcagtggcacgatctcggctcactccaacctctgcctcctgggttcaagagattcttctgcctcaacctccccaagtagctgggactacaagcacatgctgccatgtccagctcattttttttgtatttcagtagagacagggtttcaccgtattgcccaggctgatcttgaactcctgagctcaggtgatctggcctcctcagcctcccaaagtgctaggattacaggcggcagccaccgctccaggcccaaaacatcttaattgaacttctgaaacctaaagacaatgcagctagacagaaaaatgacacctcacctattggagaagaaaatgaatcaaatgacagagaatttctcttcagaaaccagggagaccagaagaaagtagcacattttttaagtgctgaaagaa

SEQ ID NO: 384520 - DNA, 328 bp, Homo sapiens
gaaggaagtccttcttaagcaaggcttacagactcccagggagaacaaaatctctttatctctctggggttttaggaccctcatcaagtcatagaattgaaatagagaacatcaattgttcaactttttaattttaatagtttttgtagtacataaaaatcatgttatgaattattttgtagttttaattataacttttttagcacttttaccatattcttaaaaattaaaaattatgagttctgagaaagcagtgaaatcacatataggtatttgattaacttttatgtgatcttttacctcaagctaatgtttcttaaaatcaagt

SEQ ID NO: 384521 - DNA, 680 bp, Homo sapiens
ggaaagcccaaaaaccacccatgcctacagaaccaagtctcgtgagaaagaagtccctcttcctctgtgccttgatcccttgggggtgcctttggtcatctcttctgtcctttcctgtctctgaaatagtcatcactccccttgactctctctgttcacgtcttctcagtctgcagagttaacttctgtaaggagtttaatctttggcttctttgtggctggaggtgttccaggcctggtgagggggtcccatactgttctctgctgagccctctgcacactttgggggatcctggctggcggtggtagttgggccgaagactcagttgtccgtcagctggccatgtccccattttatggacaggcagcctgaggcccagaggcggaaggatttctccttgccacagctgcatcacacttgaactgtccagacctccaccgctggcctgtttgctccccaccctagtcccgcaggctgatatggtgcctccagcagactccatggcttcccggagggtgcagggtccccagttcaccctccagcaggagtggcagcagctggggtacccctagcagtggcatgtggagaagctggggtatgcagaggatccagttctgtgacaccaggaggcacaccaagttttcctctgtccctaacacagaccagaggggtggcccac

SEQ ID NO: 384522 - DNA, 607 bp, Homo sapiens
  misc_feature (580)..(580): n is a, c, g, or t
ggctgtcaacagtcgacggagactctcggggagccctgctggcagccccgagagccatgccatggcctgcaggagccaggctcctgtgtggatgaagtccctcttcctctgtgccttgatcccttgggggtgcctttggtcatctcttctgtcctttcctgtctctgaaatagtcatcactccccttgactctccattcaatgggtgccaaaaccattgcacccagatcagctgcagacaacagcagggctttcaatgaaaattttaaacaaatgagatcaagctcctgacgcactgctttgaagaattataacaggagctgaaacatgactttaccagtatgatcctgaagacgaagcacaagcaaagcaatggctactgagaagtgaaagtgggccaatcaaaccacaagttgatggtcaagagaaggtctcatgacaacagttttggagattctcaaggcatttttcctattaactttctggaaagcaaaaaaaatgatagcatctgcgtattatgagtgttttgagacactagccaaagctttagcagaaaaatgcttgagagtctccgcgaatgngtacgagccgatagtgggtgaaaaacc

SEQ ID NO: 384523 - DNA, 6923 bp, Homo sapiens
  misc_feature (350)..(350): n is a, c, g, or t
agggcgaacgggcgagtggcagcgaggcggggcgggctgaggccagcgcggaagtctcgcgaggccgggcccgagcagagtgtggcggcggcggcgagatctgggctcgggttgaggagttggtatttgtgtggaaggaggcggaggcgcaggaggaagggggaagcggagcgccggcccggagggcgggaggaggcgcggccagggcgggcggttgcggcgaggcgaggcgaggcggggagccgagacgagcagcggccgagcgagcgcgggcgcgggcgcaccgaggcgagggaggcggggaagccccgccgccgccgcggcgcccgccccttcccccgccgcccgcnccctctccccccgcccgctcgccgccttcctccctctgccttccttccccacggccggccgcctcctcgcccgcccgcccgcagccgaggagccgaggccgccgcggccgtggcggcggagccctcagccatggcctcgggcgacaccctctacatcgccacggacggctcggagatgccggccgagatcgtggagctgcacgagatcgaggtggagaccatcccggtggagaccatcgagaccacagtggtgggcgaggaggaggaggaggacgacgacgacgaggacggcggcggtggcgaccacggcggcgggggcggccacgggcacgccggccaccaccaccaccaccatcaccaccaccaccacccgcccatgatcgctctgcagccgctggtcaccgacgacccgacccaggtgcaccaccaccaggaggtgatcctggtgcagacgcgcgaggaggtggtgggcggcgacgactcggacgggctgcgcgccgaggacggcttcgaggatcagattctcatcccggtgcccgcgccggccggcggcgacgacgactacattgaacaaacgctggtcaccgtggcggcggccggcaagagcggcggcggcggctcgtcgtcgtcgggaggcggccgcgtcaagaagggcggcggcaagaagagcggcaagaagagttacctcagcggcggggccggcgcggcgggcggcggcggcgccgacccgggcaacaagaagtgggagcagaagcaggtgcagatcaagaccctggagggcgagttctcggtcaccatgtggtcctcagatgaaaaaaaagatattgaccatgagacagtggttgaagaacagatcattggagagaactcacctcctgattattcagaatatatgacaggaaagaaacttcctcctggaggaatacctggcattgacctctcagatcccaaacaactggcagaatttgctagaatgaagccaagaaaaattaaagaagatgatgctccaagaacaatagcttgccctcataaaggctgcacaaagatgttcagggataactcggccatgagaaaacatctgcacacccacggtcccagagtccacgtctgtgcagaatgtggcaaagcttttgttgagagttcaaaactaaaacgacaccaactggttcatactggagagaagccctttcagtgcacgttcgaaggctgtgggaaacgcttttcactggacttcaatttgcgcacacatgtgcgaatccataccggagacaggccctatgtgtgccccttcgatggttgtaataagaagtttgctcagtcaactaacctgaaatctcacatcttaacacatgctaaggccaaaaacaaccagtgaaaagaagagagaagacccttctcgaccacgggaagcatcttccagaagtgtgattgggaataaatatgcctctcctttgtatattatttctaggaagaattttaaaaatgaatcctacacacctaagggacatgttttgataaagtagtaaaaattaaaaaaaaaaaactttactaagatgacattgctaagatgctctatcttgctctgtaatctcgtttcaaaaacacagtgtttttgtaaagtgtggtcccaacaggaggacaattcatgaacttcgcatcaaaagacaattctttatacaacagtgctaaaaatgggacttcttttcacattcttataaatatgaagctcacctgttgcttacaatttttttaattttgtattttccaagtgtgcatattgtacacttttttggggatatgcttagtaatgctacgtgtgatttttctggaggttgataactttgcttgcagtagattttctttaaaagaatgggcagttacatgcatacttcaaaagtattttcctgtaaaaaaaaaaaagttatataggttttgtttgctatcttaattttggttgtattctttgatgttaacacattttgtataattgtatcgtatagctgtattgaatcatgtagtatcaaatattagatgtgatttaatagtgttaatcaatttaaacccattttagtcactttttttttccaaaaaaatactgccagatgctgatgttcagtgtaatttctttgcctgttcagttacagaaagtggtgctcagttgtagaatgtattgtaccttttaacacctgatgtgtacatcccatgtaacagaaagggcaacaataaaatagcaatcctaaagcaagaatatggcagaacaagatctgtaagcacagtcttattttcttttgttgtccagaatacttataattcttgagcctcccagaaattggaagctaaataaagcaactcaagtttcctttattttgcactcaattacagtgattattgatgaaagcgatgcatggatattttaatacttcctacatgtcctgacttctgaaagagagtaggtaacaggcatcccgagttcaggaactacctcagaacaccccaggccaggttggtcataggctgtgattttagcccccggcaagtgtgagtgaagcatctgtaccaccgcgcaggctgagcgcctgcgcagggtaaggtgccacctggcagtggggcacacagagggaagaccaggcctgtccatcagccggctgccttcagaggcagctccagcaggaccttggcttgtctgacaggaaatgcttgtggtcgttggttatttggtttgagagcccttgttcctccatctagtggagtccttattaaatgctagcaatgtggcaattgagtgccagtagcttaatttcatgtttctaaatggacactgggtgcaaatcggcaaggtgattagattattagaaaattctgctcaatgagtacctctcacattgtaacctcttaaatgtacgattataatgttggatcttaggtcaaataacagacttgagaatactttataaactgccatgatacagcaaaatctcatttattcaaagtgcaaacatactgtgtgtctttctgttttgtgtatgcttgactgcaagataaatgacaaactagctaatatccgagatttatttacaaatggccagggaccccatcaggtgaaacacatagcccattgtcttagagcttctccatcggtcctgtacaggaggattggtgacctactaacagtgaccctgtggctctgtggaattttgaagtgccttttgtgaatcatgaatgaaacatttaacttgagaccctttaaaaaattcatccagaatctgttaccccttgggtagtttgatggaactgagttaagcagaagaccccagctgttttctgggtaagccaggctttgctgtatctggcagtcaggagagaggtcagcccatggtggaggtcttcagtgccgagggctcggatgagaacgtgtagttctttgacttggacctgggcagcgtcttctatggatgcctgccttgtgagcacccacaccttccctccccactgtcgggttgagtagccccagcgtggctgtgttaggagtcctttgcccaacattgtgctgcactggagcctggccctggcactgtcctcaggaccctgcccaagggcccaccgcagagcacacctatgctatggggagccctgctggcagccccgagagccatgccatggcctgcaggagccaggctcctgtgtggatgaagtccctcttcctctgtgccttgatcccttgggggtgcctttggtcatctcttctgtcctttcctgtctctgaaatagtcatcactccccttgactctctctgttcacgtcttctcagtctgcagagttaacttctgtaaggagtttaatctggggttccaagaaaacaagttccttgttaacatagcactgactttgcaacaatagaaaactaacaaatgagcaacaatataaagagtagaggtagttctcattgggtgtaacttcaacccattctgcttgtggttagaatttataattttgctaacgatgtaatttactaaggtttgaaatggtattctaacagtgagtccattgtcttgaggattaatctgatttataagtaatactgatagacatattttcgtacatctgagcagaaataaatgcatgtttctagcatatgtaatataaaaactccagaggataagtttacacttaacaagatgttgttttctatttttgaatttcttattatttccccctttttggtagtggagttgagagggggagcatactatttgtataaagaactgtcaccccagagtgacatttattttccaagatgaccctgaactcatgctgttggtttcatatggtgtttgtgtgctttgcctagattcaaggcctgaggatttgaggaaaatcgggattttttttttcctatttggttttcatgtaaaagttctaaatgtcacttattttgctaaataagaccctttcacaggatagtgtgcgcaatacctgtccgtgtttccaagcagagttcaagttcatgtcttcacaagtagatgagagtcacttccagtcgggggaagcccgcctgagcagtgttttgagagtgcgtacattggaggactgccccacgtccgtttgcactctgccttgcaaaacttactgtggagacgtgccccagactggtctcagaccagagtttgtggcacaggaaaacctggccccctaaaaagaagttttggaattggaagcctgataatttcgggaggctgaggcaggagaacggcgtgaacccgggaggcggagcttgcagtgagccgagatcgcaccactgcactccagcctgggtgacagagcaagactccgtctccaaaaaaaaaaaaaaaaaaaaaaaaaaaggaaacctgacaattctacccacctccccccacccccgactataggcaaagagagttgatcacttccagggtctctgacttctgtgacctggaaatcagcctggcttgggaaattcatgttgttgatctttaattatttaattattctttaataatccttctattttcttgacatctgacccccagcaagagtaaggatcccagaggtcaaaacagtggtgagagccaagctgctcacagacacccacttgatgccacagccatgccatgaggcttcctcccagctgctctgctggcttgctgaagccagctctgagtcacagggttgccttggaccctcggctgtagggggcacctgtctggctccgggccctttgtcctggatacactgacagtaatgtgagcgcagcacttcagagttcaggcccagcaggtcctggcaagtgcattccacccgaacttttaacccaagcggtggggaaggaagccaaaactccaagctgcactttcttggggttctggccatgcacttcttagccttctctctgactttacaggacaaaaggtaccccacgccttcagaatcatgcttacctgcacggcagcatctgactggatggctggctaggtctcatccaccccaaattactgacccttgatttatgttgttactgctcaggttatgctcagatgccctggttgcctgaagatggtttaagtgcaggcccttcagacaagtcacgtcaggcaagagagggctggcctctaacccacaagagggcagatttgtggccaagaggcttcctggcatccacccccaggcccaagggatcagtgtggtgccagagaggatctttaagctgggactgtactgaggcttgatgggaagtatgggcagcatgtacttgacacgttatcacccagtccccttgtaaaatctggaatggagcgtttaagctgagcgttagcatcaggtcagcaggcaaagcaaacctcccacaaactgggtgccgtaaggtgggaggtgacacatggagagcttcgtcctggccgagcaggcacccagccccatgtcccccgccagcattctggatgtcagaggagggtgcgtgtgatggcgtcacattcatctgaagcacactgattgattttccacaaggtggcaagtttgatcaaattgaccgcttttcatgagacaaccagatgctgtaaaaaaaaaaacagcactgggatgtgttgaggagggggcagtttgctgtgctctgttctgtctgctgctctctctgggggccgcacaatgtccgcacacatcacggaggggagaaaggcatcagtaccaaacggaacaacctcttttttctacattgtccatacccggacatgtgaggctctattatcaacaggtggtgagaaaaattctgtttttattcgctttctggtaacttctgtaggccctggctcaaggacttagcatttcgtctcatgtacatctttttcttaagtgttctttgccatttctggaattgtccttggtttttccttagctcataggtcatagatgcagaaatatagtatttaaggcatccgcatccagcatcagatggctttgcatccagaaaaacattgataactcagtttgaagcaccaagcatgtgtaatatggctctatacaatataataaatgcataatgttaagctttaaaaaaaaaaa

SEQ ID NO: 384524 - DNA, 3321 bp, Homo sapiens
  misc_feature (350)..(350): n is a, c, g, or t
agggcgaacgggcgagtggcagcgaggcggggcgggctgaggccagcgcggaagtctcgcgaggccgggcccgagcagagtgtggcggcggcggcgagatctgggctcgggttgaggagttggtatttgtgtggaaggaggcggaggcgcaggaggaagggggaagcggagcgccggcccggagggcgggaggaggcgcggccagggcgggcggttgcggcgaggcgaggcgaggcggggagccgagacgagcagcggccgagcgagcgcgggcgcgggcgcaccgaggcgagggaggcggggaagccccgccgccgccgcggcgcccgccccttcccccgccgcccgcnccctctccccccgcccgctcgccgccttcctccctctgccttccttccccacggccggccgcctcctcgcccgcccgcccgcagccgaggagccgaggccgccgcggccgtggcggcggagccctcagccatggcctcgggcgacaccctctacatcgccacggacggctcggagatgccggccgagatcgtggagctgcacgagatcgaggtggagaccatcccggtggagaccatcgagaccacagtggtgggcgaggaggaggaggaggacgacgacgacgaggacggcggcggtggcgaccacggcggcgggggcggccacgggcacgccggccaccaccaccaccaccatcaccaccaccaccacccgcccatgatcgctctgcagccgctggtcaccgacgacccgacccaggtgcaccaccaccaggaggtgatcctggtgcagacgcgcgaggaggtggtgggcggcgacgactcggacgggctgcgcgccgaggacggcttcgaggatcagattctcatcccggtgcccgcgccggccggcggcgacgacgactacattgaacaaacgctggtcaccgtggcggcggccggcaagagcggcggcggcggctcgtcgtcgtcgggaggcggccgcgtcaagaagggcggcggcaagaagagcggcaagaagagttacctcagcggcggggccggcgcggcgggcggcggcggcgccgacccgggcaacaagaagtgggagcagaagcaggtgcagatcaagaccctggagggcgagttctcggtcaccatgtggtcctcagatgaaaaaaaagatattgaccatgagacagtggttgaagaacagatcattggagagaactcacctcctgattattcagaatatatgacaggaaagaaacttcctcctggaggaatacctggcattgacctctcagatcccaaacaactggcagaatttgctagaatgaagccaagaaaaattaaagaagatgatgctccaagaacaatagcttgccctcataaaggctgcacaaagatgttcagggataactcggccatgagaaaacatctgcacacccacggtcccagagtccacgtctgtgcagaatgtggcaaagcttttgttgagagttcaaaactaaaacgacaccaactggttcatactggagagaagccctttcagtgcacgttcgaaggctgtgggaaacgcttttcactggacttcaatttgcgcacacatgtgcgaatccataccggagacaggccctatgtgtgccccttcgatggttgtaataagaagtttgctcagtcaactaacctgaaatctcacatcttaacacatgctaaggccaaaaacaaccagtgaaaagaagagagaagacccttctcgaccacgggaagcatcttccagaagtgtgattgggaataaatatgcctctcctttgtatattatttctaggaagaattttaaaaatgaatcctacacacctaagggacatgttttgataaagtagtaaaaattaaaaaaaaaaaactttactaagatgacattgctaagatgctctatcttgctctgtaatctcgtttcaaaaacacagtgtttttgtaaagtgtggtcccaacaggaggacaattcatgaacttcgcatcaaaagacaattctttatacaacagtgctaaaaatgggacttcttttcacattcttataaatatgaagctcacctgttgcttacaatttttttaattttgtattttccaagtgtgcatattgtacacttttttggggatatgcttagtaatgctacgtgtgatttttctggaggttgataactttgcttgcagtagattttctttaaaagaatgggcagttacatgcatacttcaaaagtattttcctgtaaaaaaaaaaaagttatataggttttgtttgctatcttaattttggttgtattctttgatgttaacacattttgtataattgtatcgtatagctgtattgaatcatgtagtatcaaatattagatgtgatttaatagtgttaatcaatttaaacccattttagtcactttttttttccaaaaaaatactgccagatgctgatgttcagtgtaatttctttgcctgttcagttacagaaagtggtgctcagttgtagaatgtattgtaccttttaacacctgatgtgtacatcccatgtaacagaaagggcaacaataaaatagcaatcctaaagcaagaatatggcagaacaagatctgtaagcacagtcttattttcttttgttgtccagaatacttataattcttgagcctcccagaaattggaagctaaataaagcaactcaagtttcctttattttgcactcaattacagtgattattgatgaaagcgatgcatggatattttaatacttcctacatgtcctgacttctgaaagagagtaggtaacaggcatcccgagttcaggaactacctcagaacaccccaggccaggttggtcataggctgtgattttagcccccggcaagtgtgagtgaagcatctgtaccaccgcgcaggctgagcgcctgcgcagggtaaggtgccacctggcagtggggcacacagagggaagaccaggcctgtccatcagccggctgccttcagaggcagctccagcaggaccttggcttgtctgacaggaaatgcttgtggtcgttggttatttggtttgagagcccttgttcctccatctagtggagtccttattaaatgctagcaatgtggcaattgagtgccagtagcttaatttcatgtttctaaatggacactgggtgcaaatcggcaaggtgattagattattagaaaattctgctcaatgagtacctctcacattgtaacctcttaaatgtacgattataatgttggatcttaggtcaaataacagacttgagaatactttataaactgccatgatacagca

SEQ ID NO: 384525 - DNA, 6878 bp, Homo sapiens
  misc_feature (350)..(350): n is a, c, g, or t
agggcgaacgggcgagtggcagcgaggcggggcgggctgaggccagcgcggaagtctcgcgaggccgggcccgagcagagtgtggcggcggcggcgagatctgggctcgggttgaggagttggtatttgtgtggaaggaggcggaggcgcaggaggaagggggaagcggagcgccggcccggagggcgggaggaggcgcggccagggcgggcggttgcggcgaggcgaggcgaggcggggagccgagacgagcagcggccgagcgagcgcgggcgcgggcgcaccgaggcgagggaggcggggaagccccgccgccgccgcggcgcccgccccttcccccgccgcccgcnccctctccccccgcccgctcgccgccttcctccctctgccttccttccccacggccggccgcctcctcgcccgcccgcccgcagccgaggagccgaggccgccgcggccgtggcggcggagccctcagccatggcctcgggcgacaccctctacatcgccacggacggctcggagatgccggccgagatcgtggagctgcacgagatcgaggtggagaccatcccggtggagaccatcgagaccacagtggtgggcgaggaggaggaggaggacgacgacgacgaggacggcggcggtggcgaccacggcggcgggggcggccacgggcacgccggccaccaccaccaccaccatcaccaccaccaccacccgcccatgatcgctctgcagccgctggtcaccgacgacccgacccaggtgcaccaccaccaggaggtgatcctggtgcagacgcgcgaggaggtggtgggcggcgacgactcggacgggctgcgcgccgaggacggcttcgaggatcagattctcatcccggtgcccgcgccggccggcggcgacgacgactacattgaacaaacgctggtcaccgtggcggcggccggcaagagcggcggcggcggctcgtcgtcgtcgggaggcggccgcgtcaagaagggcggcggcaagaagagcggcaagaagagttacctcagcggcggggccggcgcggcgggcggcggcggcgccgacccgggcaacaagaagtgggagcagaagcaggtgcagatcaagaccctggagggcgagttctcggtcaccatgtggtcctcagatgaaaaaaaagatattgaccatgagacagtggttgaagaacagatcattggagagaactcacctcctgattattcagaatatatgacaggaaagaaacttcctcctggaggaatacctggcattgacctctcagatcccaaacaactggcagaatttgctagaatgaagccaagaaaaattaaagaagatgatgctccaagaacaatagcttgccctcataaaggctgcacaaagatgttcagggataactcggccatgagaaaacatctgcacacccacggtcccagagtccacgtctgtgcagaatgtggcaaagcttttgttgagagttcaaaactaaaacgacaccaactggttcatactggagagaagccctttcagtgcacgttcgaaggctgtgggaaacgcttttcactggacttcaatttgcgcacacatgtgcgaatccataccggagacaggccctatgtgtgccccttcgatggttgtaataagaagtttgctcagtcaactaacctgaaatctcacatcttaacacatgctaaggccaaaaacaaccagtgaaaatgtgattgggaataaatatgcctctcctttgtatattatttctaggaagaattttaaaaatgaatcctacacacctaagggacatgttttgataaagtagtaaaaattaaaaaaaaaaaactttactaagatgacattgctaagatgctctatcttgctctgtaatctcgtttcaaaaacacagtgtttttgtaaagtgtggtcccaacaggaggacaattcatgaacttcgcatcaaaagacaattctttatacaacagtgctaaaaatgggacttcttttcacattcttataaatatgaagctcacctgttgcttacaatttttttaattttgtattttccaagtgtgcatattgtacacttttttggggatatgcttagtaatgctacgtgtgatttttctggaggttgataactttgcttgcagtagattttctttaaaagaatgggcagttacatgcatacttcaaaagtattttcctgtaaaaaaaaaaaagttatataggttttgtttgctatcttaattttggttgtattctttgatgttaacacattttgtataattgtatcgtatagctgtattgaatcatgtagtatcaaatattagatgtgatttaatagtgttaatcaatttaaacccattttagtcactttttttttccaaaaaaatactgccagatgctgatgttcagtgtaatttctttgcctgttcagttacagaaagtggtgctcagttgtagaatgtattgtaccttttaacacctgatgtgtacatcccatgtaacagaaagggcaacaataaaatagcaatcctaaagcaagaatatggcagaacaagatctgtaagcacagtcttattttcttttgttgtccagaatacttataattcttgagcctcccagaaattggaagctaaataaagcaactcaagtttcctttattttgcactcaattacagtgattattgatgaaagcgatgcatggatattttaatacttcctacatgtcctgacttctgaaagagagtaggtaacaggcatcccgagttcaggaactacctcagaacaccccaggccaggttggtcataggctgtgattttagcccccggcaagtgtgagtgaagcatctgtaccaccgcgcaggctgagcgcctgcgcagggtaaggtgccacctggcagtggggcacacagagggaagaccaggcctgtccatcagccggctgccttcagaggcagctccagcaggaccttggcttgtctgacaggaaatgcttgtggtcgttggttatttggtttgagagcccttgttcctccatctagtggagtccttattaaatgctagcaatgtggcaattgagtgccagtagcttaatttcatgtttctaaatggacactgggtgcaaatcggcaaggtgattagattattagaaaattctgctcaatgagtacctctcacattgtaacctcttaaatgtacgattataatgttggatcttaggtcaaataacagacttgagaatactttataaactgccatgatacagcaaaatctcatttattcaaagtgcaaacatactgtgtgtctttctgttttgtgtatgcttgactgcaagataaatgacaaactagctaatatccgagatttatttacaaatggccagggaccccatcaggtgaaacacatagcccattgtcttagagcttctccatcggtcctgtacaggaggattggtgacctactaacagtgaccctgtggctctgtggaattttgaagtgccttttgtgaatcatgaatgaaacatttaacttgagaccctttaaaaaattcatccagaatctgttaccccttgggtagtttgatggaactgagttaagcagaagaccccagctgttttctgggtaagccaggctttgctgtatctggcagtcaggagagaggtcagcccatggtggaggtcttcagtgccgagggctcggatgagaacgtgtagttctttgacttggacctgggcagcgtcttctatggatgcctgccttgtgagcacccacaccttccctccccactgtcgggttgagtagccccagcgtggctgtgttaggagtcctttgcccaacattgtgctgcactggagcctggccctggcactgtcctcaggaccctgcccaagggcccaccgcagagcacacctatgctatggggagccctgctggcagccccgagagccatgccatggcctgcaggagccaggctcctgtgtggatgaagtccctcttcctctgtgccttgatcccttgggggtgcctttggtcatctcttctgtcctttcctgtctctgaaatagtcatcactccccttgactctctctgttcacgtcttctcagtctgcagagttaacttctgtaaggagtttaatctggggttccaagaaaacaagttccttgttaacatagcactgactttgcaacaatagaaaactaacaaatgagcaacaatataaagagtagaggtagttctcattgggtgtaacttcaacccattctgcttgtggttagaatttataattttgctaacgatgtaatttactaaggtttgaaatggtattctaacagtgagtccattgtcttgaggattaatctgatttataagtaatactgatagacatattttcgtacatctgagcagaaataaatgcatgtttctagcatatgtaatataaaaactccagaggataagtttacacttaacaagatgttgttttctatttttgaatttcttattatttccccctttttggtagtggagttgagagggggagcatactatttgtataaagaactgtcaccccagagtgacatttattttccaagatgaccctgaactcatgctgttggtttcatatggtgtttgtgtgctttgcctagattcaaggcctgaggatttgaggaaaatcgggattttttttttcctatttggttttcatgtaaaagttctaaatgtcacttattttgctaaataagaccctttcacaggatagtgtgcgcaatacctgtccgtgtttccaagcagagttcaagttcatgtcttcacaagtagatgagagtcacttccagtcgggggaagcccgcctgagcagtgttttgagagtgcgtacattggaggactgccccacgtccgtttgcactctgccttgcaaaacttactgtggagacgtgccccagactggtctcagaccagagtttgtggcacaggaaaacctggccccctaaaaagaagttttggaattggaagcctgataatttcgggaggctgaggcaggagaacggcgtgaacccgggaggcggagcttgcagtgagccgagatcgcaccactgcactccagcctgggtgacagagcaagactccgtctccaaaaaaaaaaaaaaaaaaaaaaaaaaaggaaacctgacaattctacccacctccccccacccccgactataggcaaagagagttgatcacttccagggtctctgacttctgtgacctggaaatcagcctggcttgggaaattcatgttgttgatctttaattatttaattattctttaataatccttctattttcttgacatctgacccccagcaagagtaaggatcccagaggtcaaaacagtggtgagagccaagctgctcacagacacccacttgatgccacagccatgccatgaggcttcctcccagctgctctgctggcttgctgaagccagctctgagtcacagggttgccttggaccctcggctgtagggggcacctgtctggctccgggccctttgtcctggatacactgacagtaatgtgagcgcagcacttcagagttcaggcccagcaggtcctggcaagtgcattccacccgaacttttaacccaagcggtggggaaggaagccaaaactccaagctgcactttcttggggttctggccatgcacttcttagccttctctctgactttacaggacaaaaggtaccccacgccttcagaatcatgcttacctgcacggcagcatctgactggatggctggctaggtctcatccaccccaaattactgacccttgatttatgttgttactgctcaggttatgctcagatgccctggttgcctgaagatggtttaagtgcaggcccttcagacaagtcacgtcaggcaagagagggctggcctctaacccacaagagggcagatttgtggccaagaggcttcctggcatccacccccaggcccaagggatcagtgtggtgccagagaggatctttaagctgggactgtactgaggcttgatgggaagtatgggcagcatgtacttgacacgttatcacccagtccccttgtaaaatctggaatggagcgtttaagctgagcgttagcatcaggtcagcaggcaaagcaaacctcccacaaactgggtgccgtaaggtgggaggtgacacatggagagcttcgtcctggccgagcaggcacccagccccatgtcccccgccagcattctggatgtcagaggagggtgcgtgtgatggcgtcacattcatctgaagcacactgattgattttccacaaggtggcaagtttgatcaaattgaccgcttttcatgagacaaccagatgctgtaaaaaaaaaaacagcactgggatgtgttgaggagggggcagtttgctgtgctctgttctgtctgctgctctctctgggggccgcacaatgtccgcacacatcacggaggggagaaaggcatcagtaccaaacggaacaacctcttttttctacattgtccatacccggacatgtgaggctctattatcaacaggtggtgagaaaaattctgtttttattcgctttctggtaacttctgtaggccctggctcaaggacttagcatttcgtctcatgtacatctttttcttaagtgttctttgccatttctggaattgtccttggtttttccttagctcataggtcatagatgcagaaatatagtatttaaggcatccgcatccagcatcagatggctttgcatccagaaaaacattgataactcagtttgaagcaccaagcatgtgtaatatggctctatacaatataataaatgcataatgttaagctttaaaaaaaaaaa

SEQ ID NO: 384526 - DNA, 2645 bp, Homo sapiens
  misc_feature (350)..(350): n is a, c, g, or t
  misc_feature (2584)..(2584): n is a, c, g, or t
  misc_feature (2601)..(2601): n is a, c, g, or t
agggcgaacgggcgagtggcagcgaggcggggcgggctgaggccagcgcggaagtctcgcgaggccgggcccgagcagagtgtggcggcggcggcgagatctgggctcgggttgaggagttggtatttgtgtggaaggaggcggaggcgcaggaggaagggggaagcggagcgccggcccggagggcgggaggaggcgcggccagggcgggcggttgcggcgaggcgaggcgaggcggggagccgagacgagcagcggccgagcgagcgcgggcgcgggcgcaccgaggcgagggaggcggggaagccccgccgccgccgcggcgcccgccccttcccccgccgcccgcnccctctccccccgcccgctcgccgccttcctccctctgccttccttccccacggccggccgcctcctcgcccgcccgcccgcagccgaggagccgaggccgccgcggccgtggcggcggagccctcagccatggcctcgggcgacaccctctacatcgccacggacggctcggagatgccggccgagatcgtggagctgcacgagatcgaggtggagaccatcccggtggagaccatcgagaccacagtggtgggcgaggaggaggaggaggacgacgacgacgaggacggcggcggtggcgaccacggcggcgggggcggccacgggcacgccggccaccaccaccaccaccatcaccaccaccaccacccgcccatgatcgctctgcagccgctggtcaccgacgacccgacccaggtgcaccaccaccaggaggtgatcctggtgcagacgcgcgaggaggtggtgggcggcgacgactcggacgggctgcgcgccgaggacggcttcgaggatcagattctcatcccggtgcccgcgccggccggcggcgacgacgactacattgaacaaacgctggtcaccgtggcggcggccggcaagagcggcggcggcggctcgtcgtcgtcgggaggcggccgcgtcaagaagggcggcggcaagaagagcggcaagaagagttacctcagcggcggggccggcgcggcgggcggcggcggcgccgacccgggcaacaagaagtgggagcagaagcaggtgcagatcaagaccctggagggcgagttctcggtcaccatgtggtcctcagatgaaaaaaaagatattgaccatgagacagtggttgaagaacagatcattggagagaactcacctcctgattattcagaatatatgacaggaaagaaacttcctcctggaggaatacctggcattgacctctcagatcccaaacaactggcagaatttgctagaatgaagccaagaaaaattaaagaagatgatgctccaagaacaatagcttgccctcataaaggctgcacaaagatgttcagggataactcggccatgagaaaacatctgcacacccacggtcccagagtccacgtctgtgcagaatgtggcaaagcttttgttgagagttcaaaactaaaacgacaccaactggttcatactggagagaagccctttcagtgcacgttcgaaggctgtgggaaacgcttttcactggacttcaatttgcgcacacatgtgcgaatccataccggagacaggccctatgtgtgccccttcgatggttgtaataagaagtttgctcagtcaactaacctgaaatctcacatcttaacacatgctaaggccaaaaacaaccagtgaaaagaagagagaagacccttctcgaccacgggaagcatcttccagaagtgtgattgggaataaatatgcctctcctttgtatattatttctaggaagaattttaaaaatgaatcctacacacctaagggacatgttttgataaagtagtaaaaattaaaaaaaaaaaactttactaagatgacattgctaagatgctctatcttgctctgtaatctcgtttcaaaaacacagtgtttttgtaaagtgtggtcccaacaggaggacaattcatgaacttcgcatcaaaagacaattctttatacaacagtgctaaaaatgggacttcttttcacattcttataaatatgaagctcacctgttgcttacaatttttttaattttgtattttccaagtgtgcatattgtacacttttttggggatatgcttagtaatgctacgtgtgatttttctggaggttgataactttgcttgcagtagattttctttaaaagaatgggcagttacatgcatacttcaaaagtattttcctgtaaaaaaaaaaaagttatataggttttgtttgctatcttaattttggttgtattctttgatgttaacacattttgtataattgtatcgtatagctgtattgaatcatgtagtatcaaatattagatgtgatttaatagtgttaatcaatttaaacccattttagtcactttttttttccaaaaaaatactgccagatgctgatgttcagtgtaatttctttgcctgttcagttacagaaagtggtgctcagttgtagaatgtattgtaccttttaacacctgatgtgtacattcgccattggttttaaactcccccccctccaatanaataggaattctaaagnaagaatatcggtagaacatgatcctgtttgcccccgcccccact

SEQ ID NO: 384527 - DNA, 6862 bp, Homo sapiens
  misc_feature (350)..(350): n is a, c, g, or t
agggcgaacgggcgagtggcagcgaggcggggcgggctgaggccagcgcggaagtctcgcgaggccgggcccgagcagagtgtggcggcggcggcgagatctgggctcgggttgaggagttggtatttgtgtggaaggaggcggaggcgcaggaggaagggggaagcggagcgccggcccggagggcgggaggaggcgcggccagggcgggcggttgcggcgaggcgaggcgaggcggggagccgagacgagcagcggccgagcgagcgcgggcgcgggcgcaccgaggcgagggaggcggggaagccccgccgccgccgcggcgcccgccccttcccccgccgcccgcnccctctccccccgcccgctcgccgccttcctccctctgccttccttccccacggccggccgcctcctcgcccgcccgcccgcagccgaggagccgaggccgccgcggccgtggcggcggagccctcagccatggcctcgggcgacaccctctacatcgccacggacggctcggagatgccggccgagatcgtggagctgcacgagatcgaggtggagaccatcccggtggagaccatcgagaccacagtggtgggcgaggaggaggaggaggacgacgacgacgaggacggcggcggtggcgaccacggcggcgggggcggccacgggcacgccggccaccaccaccaccaccatcaccaccaccaccacccgcccatgatcgctctgcagccgctggtcaccgacgacccgacccaggtgcaccaccaccaggaggtgatcctggtgcagacgcgcgaggaggtggtgggcggcgacgactcggacgggctgcgcgccgaggacggcttcgaggatcagattctcatcccggtgcccgcgccggccggcggcgacgacgactacattgaacaaacgctggtcaccgtggcggcggccggcaagagcggcggcggcggctcgtcgtcgtcgggaggcggccgcgtcaagaagggcggcggcaagaagagcggcaagaagagttacctcagcggcggggccggcgcggcgggcggcggcggcgccgacccgggcaacaagaagtgggagcagaagcaggtgcagatcaagaccctggagggcgagttctcggtcaccatgtggtcctcagatgaaaaaaaagatattgaccatgagacagtggttgaagaacagatcattggagagaactcacctcctgattattcagaatatatgacaggaaagaaacttcctcctggaggaatacctggcattgacctctcagatcccaaacaactggcagaatttgctagggctgcacaaagatgttcagggataactcggccatgagaaaacatctgcacacccacggtcccagagtccacgtctgtgcagaatgtggcaaagcttttgttgagagttcaaaactaaaacgacaccaactggttcatactggagagaagccctttcagtgcacgttcgaaggctgtgggaaacgcttttcactggacttcaatttgcgcacacatgtgcgaatccataccggagacaggccctatgtgtgccccttcgatggttgtaataagaagtttgctcagtcaactaacctgaaatctcacatcttaacacatgctaaggccaaaaacaaccagtgaaaagaagagagaagacccttctcgaccacgggaagcatcttccagaagtgtgattgggaataaatatgcctctcctttgtatattatttctaggaagaattttaaaaatgaatcctacacacctaagggacatgttttgataaagtagtaaaaattaaaaaaaaaaaactttactaagatgacattgctaagatgctctatcttgctctgtaatctcgtttcaaaaacacagtgtttttgtaaagtgtggtcccaacaggaggacaattcatgaacttcgcatcaaaagacaattctttatacaacagtgctaaaaatgggacttcttttcacattcttataaatatgaagctcacctgttgcttacaatttttttaattttgtattttccaagtgtgcatattgtacacttttttggggatatgcttagtaatgctacgtgtgatttttctggaggttgataactttgcttgcagtagattttctttaaaagaatgggcagttacatgcatacttcaaaagtattttcctgtaaaaaaaaaaaagttatataggttttgtttgctatcttaattttggttgtattctttgatgttaacacattttgtataattgtatcgtatagctgtattgaatcatgtagtatcaaatattagatgtgatttaatagtgttaatcaatttaaacccattttagtcactttttttttccaaaaaaatactgccagatgctgatgttcagtgtaatttctttgcctgttcagttacagaaagtggtgctcagttgtagaatgtattgtaccttttaacacctgatgtgtacatcccatgtaacagaaagggcaacaataaaatagcaatcctaaagcaagaatatggcagaacaagatctgtaagcacagtcttattttcttttgttgtccagaatacttataattcttgagcctcccagaaattggaagctaaataaagcaactcaagtttcctttattttgcactcaattacagtgattattgatgaaagcgatgcatggatattttaatacttcctacatgtcctgacttctgaaagagagtaggtaacaggcatcccgagttcaggaactacctcagaacaccccaggccaggttggtcataggctgtgattttagcccccggcaagtgtgagtgaagcatctgtaccaccgcgcaggctgagcgcctgcgcagggtaaggtgccacctggcagtggggcacacagagggaagaccaggcctgtccatcagccggctgccttcagaggcagctccagcaggaccttggcttgtctgacaggaaatgcttgtggtcgttggttatttggtttgagagcccttgttcctccatctagtggagtccttattaaatgctagcaatgtggcaattgagtgccagtagcttaatttcatgtttctaaatggacactgggtgcaaatcggcaaggtgattagattattagaaaattctgctcaatgagtacctctcacattgtaacctcttaaatgtacgattataatgttggatcttaggtcaaataacagacttgagaatactttataaactgccatgatacagcaaaatctcatttattcaaagtgcaaacatactgtgtgtctttctgttttgtgtatgcttgactgcaagataaatgacaaactagctaatatccgagatttatttacaaatggccagggaccccatcaggtgaaacacatagcccattgtcttagagcttctccatcggtcctgtacaggaggattggtgacctactaacagtgaccctgtggctctgtggaattttgaagtgccttttgtgaatcatgaatgaaacatttaacttgagaccctttaaaaaattcatccagaatctgttaccccttgggtagtttgatggaactgagttaagcagaagaccccagctgttttctgggtaagccaggctttgctgtatctggcagtcaggagagaggtcagcccatggtggaggtcttcagtgccgagggctcggatgagaacgtgtagttctttgacttggacctgggcagcgtcttctatggatgcctgccttgtgagcacccacaccttccctccccactgtcgggttgagtagccccagcgtggctgtgttaggagtcctttgcccaacattgtgctgcactggagcctggccctggcactgtcctcaggaccctgcccaagggcccaccgcagagcacacctatgctatggggagccctgctggcagccccgagagccatgccatggcctgcaggagccaggctcctgtgtggatgaagtccctcttcctctgtgccttgatcccttgggggtgcctttggtcatctcttctgtcctttcctgtctctgaaatagtcatcactccccttgactctctctgttcacgtcttctcagtctgcagagttaacttctgtaaggagtttaatctggggttccaagaaaacaagttccttgttaacatagcactgactttgcaacaatagaaaactaacaaatgagcaacaatataaagagtagaggtagttctcattgggtgtaacttcaacccattctgcttgtggttagaatttataattttgctaacgatgtaatttactaaggtttgaaatggtattctaacagtgagtccattgtcttgaggattaatctgatttataagtaatactgatagacatattttcgtacatctgagcagaaataaatgcatgtttctagcatatgtaatataaaaactccagaggataagtttacacttaacaagatgttgttttctatttttgaatttcttattatttccccctttttggtagtggagttgagagggggagcatactatttgtataaagaactgtcaccccagagtgacatttattttccaagatgaccctgaactcatgctgttggtttcatatggtgtttgtgtgctttgcctagattcaaggcctgaggatttgaggaaaatcgggattttttttttcctatttggttttcatgtaaaagttctaaatgtcacttattttgctaaataagaccctttcacaggatagtgtgcgcaatacctgtccgtgtttccaagcagagttcaagttcatgtcttcacaagtagatgagagtcacttccagtcgggggaagcccgcctgagcagtgttttgagagtgcgtacattggaggactgccccacgtccgtttgcactctgccttgcaaaacttactgtggagacgtgccccagactggtctcagaccagagtttgtggcacaggaaaacctggccccctaaaaagaagttttggaattggaagcctgataatttcgggaggctgaggcaggagaacggcgtgaacccgggaggcggagcttgcagtgagccgagatcgcaccactgcactccagcctgggtgacagagcaagactccgtctccaaaaaaaaaaaaaaaaaaaaaaaaaaaggaaacctgacaattctacccacctccccccacccccgactataggcaaagagagttgatcacttccagggtctctgacttctgtgacctggaaatcagcctggcttgggaaattcatgttgttgatctttaattatttaattattctttaataatccttctattttcttgacatctgacccccagcaagagtaaggatcccagaggtcaaaacagtggtgagagccaagctgctcacagacacccacttgatgccacagccatgccatgaggcttcctcccagctgctctgctggcttgctgaagccagctctgagtcacagggttgccttggaccctcggctgtagggggcacctgtctggctccgggccctttgtcctggatacactgacagtaatgtgagcgcagcacttcagagttcaggcccagcaggtcctggcaagtgcattccacccgaacttttaacccaagcggtggggaaggaagccaaaactccaagctgcactttcttggggttctggccatgcacttcttagccttctctctgactttacaggacaaaaggtaccccacgccttcagaatcatgcttacctgcacggcagcatctgactggatggctggctaggtctcatccaccccaaattactgacccttgatttatgttgttactgctcaggttatgctcagatgccctggttgcctgaagatggtttaagtgcaggcccttcagacaagtcacgtcaggcaagagagggctggcctctaacccacaagagggcagatttgtggccaagaggcttcctggcatccacccccaggcccaagggatcagtgtggtgccagagaggatctttaagctgggactgtactgaggcttgatgggaagtatgggcagcatgtacttgacacgttatcacccagtccccttgtaaaatctggaatggagcgtttaagctgagcgttagcatcaggtcagcaggcaaagcaaacctcccacaaactgggtgccgtaaggtgggaggtgacacatggagagcttcgtcctggccgagcaggcacccagccccatgtcccccgccagcattctggatgtcagaggagggtgcgtgtgatggcgtcacattcatctgaagcacactgattgattttccacaaggtggcaagtttgatcaaattgaccgcttttcatgagacaaccagatgctgtaaaaaaaaaaacagcactgggatgtgttgaggagggggcagtttgctgtgctctgttctgtctgctgctctctctgggggccgcacaatgtccgcacacatcacggaggggagaaaggcatcagtaccaaacggaacaacctcttttttctacattgtccatacccggacatgtgaggctctattatcaacaggtggtgagaaaaattctgtttttattcgctttctggtaacttctgtaggccctggctcaaggacttagcatttcgtctcatgtacatctttttcttaagtgttctttgccatttctggaattgtccttggtttttccttagctcataggtcatagatgcagaaatatagtatttaaggcatccgcatccagcatcagatggctttgcatccagaaaaacattgataactcagtttgaagcaccaagcatgtgtaatatggctctatacaatataataaatgcataatgttaagctttaaaaaaaaaaa

SEQ ID NO: 384528 - DNA, 6764 bp, Homo sapiens
  misc_feature (350)..(350): n is a, c, g, or t
agggcgaacgggcgagtggcagcgaggcggggcgggctgaggccagcgcggaagtctcgcgaggccgggcccgagcagagtgtggcggcggcggcgagatctgggctcgggttgaggagttggtatttgtgtggaaggaggcggaggcgcaggaggaagggggaagcggagcgccggcccggagggcgggaggaggcgcggccagggcgggcggttgcggcgaggcgaggcgaggcggggagccgagacgagcagcggccgagcgagcgcgggcgcgggcgcaccgaggcgagggaggcggggaagccccgccgccgccgcggcgcccgccccttcccccgccgcccgcnccctctccccccgcccgctcgccgccttcctccctctgccttccttccccacggccggccgcctcctcgcccgcccgcccgcagccgaggagccgaggccgccgcggccgtggcggcggagccctcagccatggcctcgggcgacaccctctacatcgccacggacggctcggagatgccggccgagatcgtggagctgcacgagatcgaggtggagaccatcccggtggagaccatcgagaccacagtggtgggcgaggaggaggaggaggacgacgacgacgaggacggcggcggtggcgaccacggcggcgggggcggccacgggcacgccggccaccaccaccaccaccatcaccaccaccaccacccgcccatgatcgctctgcagccgctggtcaccgacgacccgacccaggtgcaccaccaccaggaggtgatcctggtgcagacgcgcgaggaggtggtgggcggcgacgactcggacgggctgcgcgccgaggacggcttcgaggatcagattctcatcccggtgcccgcgccggccggcggcgacgacgactacattgaacaaacgctggtcaccgtggcggcggccggcaagagcggcggcggcggctcgtcgtcgtcgggaggcggccgcgtcaagaagggcggcggcaagaagagcggcaagaagagttacctcagcggcggggccggcgcggcgggcggcggcggcgccgacccgggcaacaagaagtgggagcagaagcaggtgcagatcaagaccctggagggcgagttctcggtcaccatgtggtcctcagatgaaaaaaaagatattgaccatgagacagtggttgaagaacagatcattggagagaactcacctcctgattattcagaatatatgacaggaaagaaacttcctcctggaggaatacctggcattgacctctcagatcccaaacaactggcagaatttgctagaatgaagccaagaaaaattaaagaagatgatgctccaagaacaatagcttgccctcataaatgcacgttcgaaggctgtgggaaacgcttttcactggacttcaatttgcgcacacatgtgcgaatccataccggagacaggccctatgtgtgccccttcgatggttgtaataagaagtttgctcagtcaactaacctgaaatctcacatcttaacacatgctaaggccaaaaacaaccagtgaaaagaagagagaagacccttctcgaccacgggaagcatcttccagaagtgtgattgggaataaatatgcctctcctttgtatattatttctaggaagaattttaaaaatgaatcctacacacctaagggacatgttttgataaagtagtaaaaattaaaaaaaaaaaactttactaagatgacattgctaagatgctctatcttgctctgtaatctcgtttcaaaaacacagtgtttttgtaaagtgtggtcccaacaggaggacaattcatgaacttcgcatcaaaagacaattctttatacaacagtgctaaaaatgggacttcttttcacattcttataaatatgaagctcacctgttgcttacaatttttttaattttgtattttccaagtgtgcatattgtacacttttttggggatatgcttagtaatgctacgtgtgatttttctggaggttgataactttgcttgcagtagattttctttaaaagaatgggcagttacatgcatacttcaaaagtattttcctgtaaaaaaaaaaaagttatataggttttgtttgctatcttaattttggttgtattctttgatgttaacacattttgtataattgtatcgtatagctgtattgaatcatgtagtatcaaatattagatgtgatttaatagtgttaatcaatttaaacccattttagtcactttttttttccaaaaaaatactgccagatgctgatgttcagtgtaatttctttgcctgttcagttacagaaagtggtgctcagttgtagaatgtattgtaccttttaacacctgatgtgtacatcccatgtaacagaaagggcaacaataaaatagcaatcctaaagcaagaatatggcagaacaagatctgtaagcacagtcttattttcttttgttgtccagaatacttataattcttgagcctcccagaaattggaagctaaataaagcaactcaagtttcctttattttgcactcaattacagtgattattgatgaaagcgatgcatggatattttaatacttcctacatgtcctgacttctgaaagagagtaggtaacaggcatcccgagttcaggaactacctcagaacaccccaggccaggttggtcataggctgtgattttagcccccggcaagtgtgagtgaagcatctgtaccaccgcgcaggctgagcgcctgcgcagggtaaggtgccacctggcagtggggcacacagagggaagaccaggcctgtccatcagccggctgccttcagaggcagctccagcaggaccttggcttgtctgacaggaaatgcttgtggtcgttggttatttggtttgagagcccttgttcctccatctagtggagtccttattaaatgctagcaatgtggcaattgagtgccagtagcttaatttcatgtttctaaatggacactgggtgcaaatcggcaaggtgattagattattagaaaattctgctcaatgagtacctctcacattgtaacctcttaaatgtacgattataatgttggatcttaggtcaaataacagacttgagaatactttataaactgccatgatacagcaaaatctcatttattcaaagtgcaaacatactgtgtgtctttctgttttgtgtatgcttgactgcaagataaatgacaaactagctaatatccgagatttatttacaaatggccagggaccccatcaggtgaaacacatagcccattgtcttagagcttctccatcggtcctgtacaggaggattggtgacctactaacagtgaccctgtggctctgtggaattttgaagtgccttttgtgaatcatgaatgaaacatttaacttgagaccctttaaaaaattcatccagaatctgttaccccttgggtagtttgatggaactgagttaagcagaagaccccagctgttttctgggtaagccaggctttgctgtatctggcagtcaggagagaggtcagcccatggtggaggtcttcagtgccgagggctcggatgagaacgtgtagttctttgacttggacctgggcagcgtcttctatggatgcctgccttgtgagcacccacaccttccctccccactgtcgggttgagtagccccagcgtggctgtgttaggagtcctttgcccaacattgtgctgcactggagcctggccctggcactgtcctcaggaccctgcccaagggcccaccgcagagcacacctatgctatggggagccctgctggcagccccgagagccatgccatggcctgcaggagccaggctcctgtgtggatgaagtccctcttcctctgtgccttgatcccttgggggtgcctttggtcatctcttctgtcctttcctgtctctgaaatagtcatcactccccttgactctctctgttcacgtcttctcagtctgcagagttaacttctgtaaggagtttaatctggggttccaagaaaacaagttccttgttaacatagcactgactttgcaacaatagaaaactaacaaatgagcaacaatataaagagtagaggtagttctcattgggtgtaacttcaacccattctgcttgtggttagaatttataattttgctaacgatgtaatttactaaggtttgaaatggtattctaacagtgagtccattgtcttgaggattaatctgatttataagtaatactgatagacatattttcgtacatctgagcagaaataaatgcatgtttctagcatatgtaatataaaaactccagaggataagtttacacttaacaagatgttgttttctatttttgaatttcttattatttccccctttttggtagtggagttgagagggggagcatactatttgtataaagaactgtcaccccagagtgacatttattttccaagatgaccctgaactcatgctgttggtttcatatggtgtttgtgtgctttgcctagattcaaggcctgaggatttgaggaaaatcgggattttttttttcctatttggttttcatgtaaaagttctaaatgtcacttattttgctaaataagaccctttcacaggatagtgtgcgcaatacctgtccgtgtttccaagcagagttcaagttcatgtcttcacaagtagatgagagtcacttccagtcgggggaagcccgcctgagcagtgttttgagagtgcgtacattggaggactgccccacgtccgtttgcactctgccttgcaaaacttactgtggagacgtgccccagactggtctcagaccagagtttgtggcacaggaaaacctggccccctaaaaagaagttttggaattggaagcctgataatttcgggaggctgaggcaggagaacggcgtgaacccgggaggcggagcttgcagtgagccgagatcgcaccactgcactccagcctgggtgacagagcaagactccgtctccaaaaaaaaaaaaaaaaaaaaaaaaaaaggaaacctgacaattctacccacctccccccacccccgactataggcaaagagagttgatcacttccagggtctctgacttctgtgacctggaaatcagcctggcttgggaaattcatgttgttgatctttaattatttaattattctttaataatccttctattttcttgacatctgacccccagcaagagtaaggatcccagaggtcaaaacagtggtgagagccaagctgctcacagacacccacttgatgccacagccatgccatgaggcttcctcccagctgctctgctggcttgctgaagccagctctgagtcacagggttgccttggaccctcggctgtagggggcacctgtctggctccgggccctttgtcctggatacactgacagtaatgtgagcgcagcacttcagagttcaggcccagcaggtcctggcaagtgcattccacccgaacttttaacccaagcggtggggaaggaagccaaaactccaagctgcactttcttggggttctggccatgcacttcttagccttctctctgactttacaggacaaaaggtaccccacgccttcagaatcatgcttacctgcacggcagcatctgactggatggctggctaggtctcatccaccccaaattactgacccttgatttatgttgttactgctcaggttatgctcagatgccctggttgcctgaagatggtttaagtgcaggcccttcagacaagtcacgtcaggcaagagagggctggcctctaacccacaagagggcagatttgtggccaagaggcttcctggcatccacccccaggcccaagggatcagtgtggtgccagagaggatctttaagctgggactgtactgaggcttgatgggaagtatgggcagcatgtacttgacacgttatcacccagtccccttgtaaaatctggaatggagcgtttaagctgagcgttagcatcaggtcagcaggcaaagcaaacctcccacaaactgggtgccgtaaggtgggaggtgacacatggagagcttcgtcctggccgagcaggcacccagccccatgtcccccgccagcattctggatgtcagaggagggtgcgtgtgatggcgtcacattcatctgaagcacactgattgattttccacaaggtggcaagtttgatcaaattgaccgcttttcatgagacaaccagatgctgtaaaaaaaaaaacagcactgggatgtgttgaggagggggcagtttgctgtgctctgttctgtctgctgctctctctgggggccgcacaatgtccgcacacatcacggaggggagaaaggcatcagtaccaaacggaacaacctcttttttctacattgtccatacccggacatgtgaggctctattatcaacaggtggtgagaaaaattctgtttttattcgctttctggtaacttctgtaggccctggctcaaggacttagcatttcgtctcatgtacatctttttcttaagtgttctttgccatttctggaattgtccttggtttttccttagctcataggtcatagatgcagaaatatagtatttaaggcatccgcatccagcatcagatggctttgcatccagaaaaacattgataactcagtttgaagcaccaagcatgtgtaatatggctctatacaatataataaatgcataatgttaagctttaaaaaaaaaaa

SEQ ID NO: 384529 - DNA, 6058 bp, Homo sapiens
tttctctgtcaagaaggggaaagaggcaaagagagaagagggaacagtaggcgatggagaatgacagtccattgttgcagcacagaatatggggccaccaaaggtagtggtggactaccgtcattttaactccatttgcttagcagtgcttctgttacttcattttgggggacatagtcgggtgaggtggctgtggtagagctggaagccagggtgttgggttctattcccagtttggctactactagtagtgtgaccttgggcaagtctacttaaagacatctctaagcctcagtttcctcatctgtaaaactagggtttgcattgaatgatgactttttcagctgtctgctttttgtcttaaatgatattaatgttctaccgtaatactaagtaaaattaaaatggggggttggggaggtggttttgttttaatatgtcagtaaaggctgttaaatggttgaatcctttctaacagtttgcaatgtgaacttctaagctgctttctctgttttaagggctgcacaaagatgttcagggataactcggccatgagaaaacatctgcacacccacggtcccagagtccacgtctgtgcagaatgtggcaaagcttttgttgagagttcaaaactaaaacgacaccaactggttcatactggagagaagccctttcagtgcacgttcgaaggctgtgggaaacgcttttcactggacttcaatttgcgcacacatgtgcgaatccataccggagacaggccctatgtgtgccccttcgatggttgtaataagaagtttgctcagtcaactaacctgaaatctcacatcttaacacatgctaaggccaaaaacaaccagtgaaaagaagagagaagacccttctcgaccacgggaagcatcttccagaagtgtgattgggaataaatatgcctctcctttgtatattatttctaggaagaattttaaaaatgaatcctacacacctaagggacatgttttgataaagtagtaaaaattaaaaaaaaaaaactttactaagatgacattgctaagatgctctatcttgctctgtaatctcgtttcaaaaacacagtgtttttgtaaagtgtggtcccaacaggaggacaattcatgaacttcgcatcaaaagacaattctttatacaacagtgctaaaaatgggacttcttttcacattcttataaatatgaagctcacctgttgcttacaatttttttaattttgtattttccaagtgtgcatattgtacacttttttggggatatgcttagtaatgctacgtgtgatttttctggaggttgataactttgcttgcagtagattttctttaaaagaatgggcagttacatgcatacttcaaaagtattttcctgtaaaaaaaaaaaagttatataggttttgtttgctatcttaattttggttgtattctttgatgttaacacattttgtataattgtatcgtatagctgtattgaatcatgtagtatcaaatattagatgtgatttaatagtgttaatcaatttaaacccattttagtcactttttttttccaaaaaaatactgccagatgctgatgttcagtgtaatttctttgcctgttcagttacagaaagtggtgctcagttgtagaatgtattgtaccttttaacacctgatgtgtacatcccatgtaacagaaagggcaacaataaaatagcaatcctaaagcaagaatatggcagaacaagatctgtaagcacagtcttattttcttttgttgtccagaatacttataattcttgagcctcccagaaattggaagctaaataaagcaactcaagtttcctttattttgcactcaattacagtgattattgatgaaagcgatgcatggatattttaatacttcctacatgtcctgacttctgaaagagagtaggtaacaggcatcccgagttcaggaactacctcagaacaccccaggccaggttggtcataggctgtgattttagcccccggcaagtgtgagtgaagcatctgtaccaccgcgcaggctgagcgcctgcgcagggtaaggtgccacctggcagtggggcacacagagggaagaccaggcctgtccatcagccggctgccttcagaggcagctccagcaggaccttggcttgtctgacaggaaatgcttgtggtcgttggttatttggtttgagagcccttgttcctccatctagtggagtccttattaaatgctagcaatgtggcaattgagtgccagtagcttaatttcatgtttctaaatggacactgggtgcaaatcggcaaggtgattagattattagaaaattctgctcaatgagtacctctcacattgtaacctcttaaatgtacgattataatgttggatcttaggtcaaataacagacttgagaatactttataaactgccatgatacagcaaaatctcatttattcaaagtgcaaacatactgtgtgtctttctgttttgtgtatgcttgactgcaagataaatgacaaactagctaatatccgagatttatttacaaatggccagggaccccatcaggtgaaacacatagcccattgtcttagagcttctccatcggtcctgtacaggaggattggtgacctactaacagtgaccctgtggctctgtggaattttgaagtgccttttgtgaatcatgaatgaaacatttaacttgagaccctttaaaaaattcatccagaatctgttaccccttgggtagtttgatggaactgagttaagcagaagaccccagctgttttctgggtaagccaggctttgctgtatctggcagtcaggagagaggtcagcccatggtggaggtcttcagtgccgagggctcggatgagaacgtgtagttctttgacttggacctgggcagcgtcttctatggatgcctgccttgtgagcacccacaccttccctccccactgtcgggttgagtagccccagcgtggctgtgttaggagtcctttgcccaacattgtgctgcactggagcctggccctggcactgtcctcaggaccctgcccaagggcccaccgcagagcacacctatgctatggggagccctgctggcagccccgagagccatgccatggcctgcaggagccaggctcctgtgtggatgaagtccctcttcctctgtgccttgatcccttgggggtgcctttggtcatctcttctgtcctttcctgtctctgaaatagtcatcactccccttgactctctctgttcacgtcttctcagtctgcagagttaacttctgtaaggagtttaatctggggttccaagaaaacaagttccttgttaacatagcactgactttgcaacaatagaaaactaacaaatgagcaacaatataaagagtagaggtagttctcattgggtgtaacttcaacccattctgcttgtggttagaatttataattttgctaacgatgtaatttactaaggtttgaaatggtattctaacagtgagtccattgtcttgaggattaatctgatttataagtaatactgatagacatattttcgtacatctgagcagaaataaatgcatgtttctagcatatgtaatataaaaactccagaggataagtttacacttaacaagatgttgttttctatttttgaatttcttattatttccccctttttggtagtggagttgagagggggagcatactatttgtataaagaactgtcaccccagagtgacatttattttccaagatgaccctgaactcatgctgttggtttcatatggtgtttgtgtgctttgcctagattcaaggcctgaggatttgaggaaaatcgggattttttttttcctatttggttttcatgtaaaagttctaaatgtcacttattttgctaaataagaccctttcacaggatagtgtgcgcaatacctgtccgtgtttccaagcagagttcaagttcatgtcttcacaagtagatgagagtcacttccagtcgggggaagcccgcctgagcagtgttttgagagtgcgtacattggaggactgccccacgtccgtttgcactctgccttgcaaaacttactgtggagacgtgccccagactggtctcagaccagagtttgtggcacaggaaaacctggccccctaaaaagaagttttggaattggaagcctgataatttcgggaggctgaggcaggagaacggcgtgaacccgggaggcggagcttgcagtgagccgagatcgcaccactgcactccagcctgggtgacagagcaagactccgtctccaaaaaaaaaaaaaaaaaaaaaaaaaaaggaaacctgacaattctacccacctccccccacccccgactataggcaaagagagttgatcacttccagggtctctgacttctgtgacctggaaatcagcctggcttgggaaattcatgttgttgatctttaattatttaattattctttaataatccttctattttcttgacatctgacccccagcaagagtaaggatcccagaggtcaaaacagtggtgagagccaagctgctcacagacacccacttgatgccacagccatgccatgaggcttcctcccagctgctctgctggcttgctgaagccagctctgagtcacagggttgccttggaccctcggctgtagggggcacctgtctggctccgggccctttgtcctggatacactgacagtaatgtgagcgcagcacttcagagttcaggcccagcaggtcctggcaagtgcattccacccgaacttttaacccaagcggtggggaaggaagccaaaactccaagctgcactttcttggggttctggccatgcacttcttagccttctctctgactttacaggacaaaaggtaccccacgccttcagaatcatgcttacctgcacggcagcatctgactggatggctggctaggtctcatccaccccaaattactgacccttgatttatgttgttactgctcaggttatgctcagatgccctggttgcctgaagatggtttaagtgcaggcccttcagacaagtcacgtcaggcaagagagggctggcctctaacccacaagagggcagatttgtggccaagaggcttcctggcatccacccccaggcccaagggatcagtgtggtgccagagaggatctttaagctgggactgtactgaggcttgatgggaagtatgggcagcatgtacttgacacgttatcacccagtccccttgtaaaatctggaatggagcgtttaagctgagcgttagcatcaggtcagcaggcaaagcaaacctcccacaaactgggtgccgtaaggtgggaggtgacacatggagagcttcgtcctggccgagcaggcacccagccccatgtcccccgccagcattctggatgtcagaggagggtgcgtgtgatggcgtcacattcatctgaagcacactgattgattttccacaaggtggcaagtttgatcaaattgaccgcttttcatgagacaaccagatgctgtaaaaaaaaaaacagcactgggatgtgttgaggagggggcagtttgctgtgctctgttctgtctgctgctctctctgggggccgcacaatgtccgcacacatcacggaggggagaaaggcatcagtaccaaacggaacaacctcttttttctacattgtccatacccggacatgtgaggctctattatcaacaggtggtgagaaaaattctgtttttattcgctttctggtaacttctgtaggccctggctcaaggacttagcatttcgtctcatgtacatctttttcttaagtgttctttgccatttctggaattgtccttggtttttccttagctcataggtcatagatgcagaaatatagtatttaaggcatccgcatccagcatcagatggctttgcatccagaaaaacattgataactcagtttgaagcaccaagcatgtgtaatatggctctatacaatataataaatgcataatgttaagctttaaaaaaaaaaa

SEQ ID NO: 384530 - DNA, 5602 bp, Homo sapiens
tgtctagaggatccctggtgtgcctgtatgctctcatgacaagtagctatgccctccataaaggctgcacaaagatgttcagggataactcggccatgagaaaacatctgcacacccacggtcccagagtccacgtctgtgcagaatgtggcaaagcttttgttgagagttcaaaactaaaacgacaccaactggttcatactggagagaagccctttcagtgcacgttcgaaggctgtgggaaacgcttttcactggacttcaatttgcgcacacatgtgcgaatccataccggagacaggccctatgtgtgccccttcgatggttgtaataagaagtttgctcagtcaactaacctgaaatctcacatcttaacacatgctaaggccaaaaacaaccagtgaaaagaagagagaagacccttctcgaccacgggaagcatcttccagaagtgtgattgggaataaatatgcctctcctttgtatattatttctaggaagaattttaaaaatgaatcctacacacctaagggacatgttttgataaagtagtaaaaattaaaaaaaaaaaactttactaagatgacattgctaagatgctctatcttgctctgtaatctcgtttcaaaaacacagtgtttttgtaaagtgtggtcccaacaggaggacaattcatgaacttcgcatcaaaagacaattctttatacaacagtgctaaaaatgggacttcttttcacattcttataaatatgaagctcacctgttgcttacaatttttttaattttgtattttccaagtgtgcatattgtacacttttttggggatatgcttagtaatgctacgtgtgatttttctggaggttgataactttgcttgcagtagattttctttaaaagaatgggcagttacatgcatacttcaaaagtattttcctgtaaaaaaaaaaaagttatataggttttgtttgctatcttaattttggttgtattctttgatgttaacacattttgtataattgtatcgtatagctgtattgaatcatgtagtatcaaatattagatgtgatttaatagtgttaatcaatttaaacccattttagtcactttttttttccaaaaaaatactgccagatgctgatgttcagtgtaatttctttgcctgttcagttacagaaagtggtgctcagttgtagaatgtattgtaccttttaacacctgatgtgtacatcccatgtaacagaaagggcaacaataaaatagcaatcctaaagcaagaatatggcagaacaagatctgtaagcacagtcttattttcttttgttgtccagaatacttataattcttgagcctcccagaaattggaagctaaataaagcaactcaagtttcctttattttgcactcaattacagtgattattgatgaaagcgatgcatggatattttaatacttcctacatgtcctgacttctgaaagagagtaggtaacaggcatcccgagttcaggaactacctcagaacaccccaggccaggttggtcataggctgtgattttagcccccggcaagtgtgagtgaagcatctgtaccaccgcgcaggctgagcgcctgcgcagggtaaggtgccacctggcagtggggcacacagagggaagaccaggcctgtccatcagccggctgccttcagaggcagctccagcaggaccttggcttgtctgacaggaaatgcttgtggtcgttggttatttggtttgagagcccttgttcctccatctagtggagtccttattaaatgctagcaatgtggcaattgagtgccagtagcttaatttcatgtttctaaatggacactgggtgcaaatcggcaaggtgattagattattagaaaattctgctcaatgagtacctctcacattgtaacctcttaaatgtacgattataatgttggatcttaggtcaaataacagacttgagaatactttataaactgccatgatacagcaaaatctcatttattcaaagtgcaaacatactgtgtgtctttctgttttgtgtatgcttgactgcaagataaatgacaaactagctaatatccgagatttatttacaaatggccagggaccccatcaggtgaaacacatagcccattgtcttagagcttctccatcggtcctgtacaggaggattggtgacctactaacagtgaccctgtggctctgtggaattttgaagtgccttttgtgaatcatgaatgaaacatttaacttgagaccctttaaaaaattcatccagaatctgttaccccttgggtagtttgatggaactgagttaagcagaagaccccagctgttttctgggtaagccaggctttgctgtatctggcagtcaggagagaggtcagcccatggtggaggtcttcagtgccgagggctcggatgagaacgtgtagttctttgacttggacctgggcagcgtcttctatggatgcctgccttgtgagcacccacaccttccctccccactgtcgggttgagtagccccagcgtggctgtgttaggagtcctttgcccaacattgtgctgcactggagcctggccctggcactgtcctcaggaccctgcccaagggcccaccgcagagcacacctatgctatggggagccctgctggcagccccgagagccatgccatggcctgcaggagccaggctcctgtgtggatgaagtccctcttcctctgtgccttgatcccttgggggtgcctttggtcatctcttctgtcctttcctgtctctgaaatagtcatcactccccttgactctctctgttcacgtcttctcagtctgcagagttaacttctgtaaggagtttaatctggggttccaagaaaacaagttccttgttaacatagcactgactttgcaacaatagaaaactaacaaatgagcaacaatataaagagtagaggtagttctcattgggtgtaacttcaacccattctgcttgtggttagaatttataattttgctaacgatgtaatttactaaggtttgaaatggtattctaacagtgagtccattgtcttgaggattaatctgatttataagtaatactgatagacatattttcgtacatctgagcagaaataaatgcatgtttctagcatatgtaatataaaaactccagaggataagtttacacttaacaagatgttgttttctatttttgaatttcttattatttccccctttttggtagtggagttgagagggggagcatactatttgtataaagaactgtcaccccagagtgacatttattttccaagatgaccctgaactcatgctgttggtttcatatggtgtttgtgtgctttgcctagattcaaggcctgaggatttgaggaaaatcgggattttttttttcctatttggttttcatgtaaaagttctaaatgtcacttattttgctaaataagaccctttcacaggatagtgtgcgcaatacctgtccgtgtttccaagcagagttcaagttcatgtcttcacaagtagatgagagtcacttccagtcgggggaagcccgcctgagcagtgttttgagagtgcgtacattggaggactgccccacgtccgtttgcactctgccttgcaaaacttactgtggagacgtgccccagactggtctcagaccagagtttgtggcacaggaaaacctggccccctaaaaagaagttttggaattggaagcctgataatttcgggaggctgaggcaggagaacggcgtgaacccgggaggcggagcttgcagtgagccgagatcgcaccactgcactccagcctgggtgacagagcaagactccgtctccaaaaaaaaaaaaaaaaaaaaaaaaaaaggaaacctgacaattctacccacctccccccacccccgactataggcaaagagagttgatcacttccagggtctctgacttctgtgacctggaaatcagcctggcttgggaaattcatgttgttgatctttaattatttaattattctttaataatccttctattttcttgacatctgacccccagcaagagtaaggatcccagaggtcaaaacagtggtgagagccaagctgctcacagacacccacttgatgccacagccatgccatgaggcttcctcccagctgctctgctggcttgctgaagccagctctgagtcacagggttgccttggaccctcggctgtagggggcacctgtctggctccgggccctttgtcctggatacactgacagtaatgtgagcgcagcacttcagagttcaggcccagcaggtcctggcaagtgcattccacccgaacttttaacccaagcggtggggaaggaagccaaaactccaagctgcactttcttggggttctggccatgcacttcttagccttctctctgactttacaggacaaaaggtaccccacgccttcagaatcatgcttacctgcacggcagcatctgactggatggctggctaggtctcatccaccccaaattactgacccttgatttatgttgttactgctcaggttatgctcagatgccctggttgcctgaagatggtttaagtgcaggcccttcagacaagtcacgtcaggcaagagagggctggcctctaacccacaagagggcagatttgtggccaagaggcttcctggcatccacccccaggcccaagggatcagtgtggtgccagagaggatctttaagctgggactgtactgaggcttgatgggaagtatgggcagcatgtacttgacacgttatcacccagtccccttgtaaaatctggaatggagcgtttaagctgagcgttagcatcaggtcagcaggcaaagcaaacctcccacaaactgggtgccgtaaggtgggaggtgacacatggagagcttcgtcctggccgagcaggcacccagccccatgtcccccgccagcattctggatgtcagaggagggtgcgtgtgatggcgtcacattcatctgaagcacactgattgattttccacaaggtggcaagtttgatcaaattgaccgcttttcatgagacaaccagatgctgtaaaaaaaaaaacagcactgggatgtgttgaggagggggcagtttgctgtgctctgttctgtctgctgctctctctgggggccgcacaatgtccgcacacatcacggaggggagaaaggcatcagtaccaaacggaacaacctcttttttctacattgtccatacccggacatgtgaggctctattatcaacaggtggtgagaaaaattctgtttttattcgctttctggtaacttctgtaggccctggctcaaggacttagcatttcgtctcatgtacatctttttcttaagtgttctttgccatttctggaattgtccttggtttttccttagctcataggtcatagatgcagaaatatagtatttaaggcatccgcatccagcatcagatggctttgcatccagaaaaacattgataactcagtttgaagcaccaagcatgtgtaatatggctctatacaatataataaatgcataatgttaagctttaaaaaaaaaaa

SEQ ID NO: 384531 - DNA, 5537 bp, Homo sapiens
ctgattctagactatatccacaaagttcacccagggcaggaatgaaaagtgtttggtaaaataaataggctgttctctagcaaagcagtgagctcctgactcccagggtctggtcagagttgctgagtgggttgatctctggtctttccttgacagtgcacgttcgaaggctgtgggaaacgcttttcactggacttcaatttgcgcacacatgtgcgaatccataccggagacaggccctatgtgtgccccttcgatggttgtaataagaagtttgctcagtcaactaacctgaaatctcacatcttaacacatgctaaggccaaaaacaaccagtgaaaagaagagagaagacccttctcgaccacgggaagcatcttccagaagtgtgattgggaataaatatgcctctcctttgtatattatttctaggaagaattttaaaaatgaatcctacacacctaagggacatgttttgataaagtagtaaaaattaaaaaaaaaaaactttactaagatgacattgctaagatgctctatcttgctctgtaatctcgtttcaaaaacacagtgtttttgtaaagtgtggtcccaacaggaggacaattcatgaacttcgcatcaaaagacaattctttatacaacagtgctaaaaatgggacttcttttcacattcttataaatatgaagctcacctgttgcttacaatttttttaattttgtattttccaagtgtgcatattgtacacttttttggggatatgcttagtaatgctacgtgtgatttttctggaggttgataactttgcttgcagtagattttctttaaaagaatgggcagttacatgcatacttcaaaagtattttcctgtaaaaaaaaaaaagttatataggttttgtttgctatcttaattttggttgtattctttgatgttaacacattttgtataattgtatcgtatagctgtattgaatcatgtagtatcaaatattagatgtgatttaatagtgttaatcaatttaaacccattttagtcactttttttttccaaaaaaatactgccagatgctgatgttcagtgtaatttctttgcctgttcagttacagaaagtggtgctcagttgtagaatgtattgtaccttttaacacctgatgtgtacatcccatgtaacagaaagggcaacaataaaatagcaatcctaaagcaagaatatggcagaacaagatctgtaagcacagtcttattttcttttgttgtccagaatacttataattcttgagcctcccagaaattggaagctaaataaagcaactcaagtttcctttattttgcactcaattacagtgattattgatgaaagcgatgcatggatattttaatacttcctacatgtcctgacttctgaaagagagtaggtaacaggcatcccgagttcaggaactacctcagaacaccccaggccaggttggtcataggctgtgattttagcccccggcaagtgtgagtgaagcatctgtaccaccgcgcaggctgagcgcctgcgcagggtaaggtgccacctggcagtggggcacacagagggaagaccaggcctgtccatcagccggctgccttcagaggcagctccagcaggaccttggcttgtctgacaggaaatgcttgtggtcgttggttatttggtttgagagcccttgttcctccatctagtggagtccttattaaatgctagcaatgtggcaattgagtgccagtagcttaatttcatgtttctaaatggacactgggtgcaaatcggcaaggtgattagattattagaaaattctgctcaatgagtacctctcacattgtaacctcttaaatgtacgattataatgttggatcttaggtcaaataacagacttgagaatactttataaactgccatgatacagcaaaatctcatttattcaaagtgcaaacatactgtgtgtctttctgttttgtgtatgcttgactgcaagataaatgacaaactagctaatatccgagatttatttacaaatggccagggaccccatcaggtgaaacacatagcccattgtcttagagcttctccatcggtcctgtacaggaggattggtgacctactaacagtgaccctgtggctctgtggaattttgaagtgccttttgtgaatcatgaatgaaacatttaacttgagaccctttaaaaaattcatccagaatctgttaccccttgggtagtttgatggaactgagttaagcagaagaccccagctgttttctgggtaagccaggctttgctgtatctggcagtcaggagagaggtcagcccatggtggaggtcttcagtgccgagggctcggatgagaacgtgtagttctttgacttggacctgggcagcgtcttctatggatgcctgccttgtgagcacccacaccttccctccccactgtcgggttgagtagccccagcgtggctgtgttaggagtcctttgcccaacattgtgctgcactggagcctggccctggcactgtcctcaggaccctgcccaagggcccaccgcagagcacacctatgctatggggagccctgctggcagccccgagagccatgccatggcctgcaggagccaggctcctgtgtggatgaagtccctcttcctctgtgccttgatcccttgggggtgcctttggtcatctcttctgtcctttcctgtctctgaaatagtcatcactccccttgactctctctgttcacgtcttctcagtctgcagagttaacttctgtaaggagtttaatctggggttccaagaaaacaagttccttgttaacatagcactgactttgcaacaatagaaaactaacaaatgagcaacaatataaagagtagaggtagttctcattgggtgtaacttcaacccattctgcttgtggttagaatttataattttgctaacgatgtaatttactaaggtttgaaatggtattctaacagtgagtccattgtcttgaggattaatctgatttataagtaatactgatagacatattttcgtacatctgagcagaaataaatgcatgtttctagcatatgtaatataaaaactccagaggataagtttacacttaacaagatgttgttttctatttttgaatttcttattatttccccctttttggtagtggagttgagagggggagcatactatttgtataaagaactgtcaccccagagtgacatttattttccaagatgaccctgaactcatgctgttggtttcatatggtgtttgtgtgctttgcctagattcaaggcctgaggatttgaggaaaatcgggattttttttttcctatttggttttcatgtaaaagttctaaatgtcacttattttgctaaataagaccctttcacaggatagtgtgcgcaatacctgtccgtgtttccaagcagagttcaagttcatgtcttcacaagtagatgagagtcacttccagtcgggggaagcccgcctgagcagtgttttgagagtgcgtacattggaggactgccccacgtccgtttgcactctgccttgcaaaacttactgtggagacgtgccccagactggtctcagaccagagtttgtggcacaggaaaacctggccccctaaaaagaagttttggaattggaagcctgataatttcgggaggctgaggcaggagaacggcgtgaacccgggaggcggagcttgcagtgagccgagatcgcaccactgcactccagcctgggtgacagagcaagactccgtctccaaaaaaaaaaaaaaaaaaaaaaaaaaaggaaacctgacaattctacccacctccccccacccccgactataggcaaagagagttgatcacttccagggtctctgacttctgtgacctggaaatcagcctggcttgggaaattcatgttgttgatctttaattatttaattattctttaataatccttctattttcttgacatctgacccccagcaagagtaaggatcccagaggtcaaaacagtggtgagagccaagctgctcacagacacccacttgatgccacagccatgccatgaggcttcctcccagctgctctgctggcttgctgaagccagctctgagtcacagggttgccttggaccctcggctgtagggggcacctgtctggctccgggccctttgtcctggatacactgacagtaatgtgagcgcagcacttcagagttcaggcccagcaggtcctggcaagtgcattccacccgaacttttaacccaagcggtggggaaggaagccaaaactccaagctgcactttcttggggttctggccatgcacttcttagccttctctctgactttacaggacaaaaggtaccccacgccttcagaatcatgcttacctgcacggcagcatctgactggatggctggctaggtctcatccaccccaaattactgacccttgatttatgttgttactgctcaggttatgctcagatgccctggttgcctgaagatggtttaagtgcaggcccttcagacaagtcacgtcaggcaagagagggctggcctctaacccacaagagggcagatttgtggccaagaggcttcctggcatccacccccaggcccaagggatcagtgtggtgccagagaggatctttaagctgggactgtactgaggcttgatgggaagtatgggcagcatgtacttgacacgttatcacccagtccccttgtaaaatctggaatggagcgtttaagctgagcgttagcatcaggtcagcaggcaaagcaaacctcccacaaactgggtgccgtaaggtgggaggtgacacatggagagcttcgtcctggccgagcaggcacccagccccatgtcccccgccagcattctggatgtcagaggagggtgcgtgtgatggcgtcacattcatctgaagcacactgattgattttccacaaggtggcaagtttgatcaaattgaccgcttttcatgagacaaccagatgctgtaaaaaaaaaaacagcactgggatgtgttgaggagggggcagtttgctgtgctctgttctgtctgctgctctctctgggggccgcacaatgtccgcacacatcacggaggggagaaaggcatcagtaccaaacggaacaacctcttttttctacattgtccatacccggacatgtgaggctctattatcaacaggtggtgagaaaaattctgtttttattcgctttctggtaacttctgtaggccctggctcaaggacttagcatttcgtctcatgtacatctttttcttaagtgttctttgccatttctggaattgtccttggtttttccttagctcataggtcatagatgcagaaatatagtatttaaggcatccgcatccagcatcagatggctttgcatccagaaaaacattgataactcagtttgaagcaccaagcatgtgtaatatggctctatacaatataataaatgcataatgttaagctttaaaaaaaaaaa

SEQ ID NO: 384532 - DNA, 5235 bp, Homo sapiens
  misc_feature (6)..(6): n is a, c, g, or t
  misc_feature (11)..(11): n is a, c, g, or t
tctaancggcngccctactactaaattcgcggccgctcgagaagagagaagacccttctcgaccacgggaagcatcttccagaagtgtgattgggaataaatatgcctctcctttgtatattatttctaggaagaattttaaaaatgaatcctacacacctaagggacatgttttgataaagtagtaaaaattaaaaaaaaaaaactttactaagatgacattgctaagatgctctatcttgctctgtaatctcgtttcaaaaacacagtgtttttgtaaagtgtggtcccaacaggaggacaattcatgaacttcgcatcaaaagacaattctttatacaacagtgctaaaaatgggacttcttttcacattcttataaatatgaagctcacctgttgcttacaatttttttaattttgtattttccaagtgtgcatattgtacacttttttggggatatgcttagtaatgctacgtgtgatttttctggaggttgataactttgcttgcagtagattttctttaaaagaatgggcagttacatgcatacttcaaaagtattttcctgtaaaaaaaaaaaagttatataggttttgtttgctatcttaattttggttgtattctttgatgttaacacattttgtataattgtatcgtatagctgtattgaatcatgtagtatcaaatattagatgtgatttaatagtgttaatcaatttaaacccattttagtcactttttttttccaaaaaaatactgccagatgctgatgttcagtgtaatttctttgcctgttcagttacagaaagtggtgctcagttgtagaatgtattgtaccttttaacacctgatgtgtacatcccatgtaacagaaagggcaacaataaaatagcaatcctaaagcaagaatatggcagaacaagatctgtaagcacagtcttattttcttttgttgtccagaatacttataattcttgagcctcccagaaattggaagctaaataaagcaactcaagtttcctttattttgcactcaattacagtgattattgatgaaagcgatgcatggatattttaatacttcctacatgtcctgacttctgaaagagagtaggtaacaggcatcccgagttcaggaactacctcagaacaccccaggccaggttggtcataggctgtgattttagcccccggcaagtgtgagtgaagcatctgtaccaccgcgcaggctgagcgcctgcgcagggtaaggtgccacctggcagtggggcacacagagggaagaccaggcctgtccatcagccggctgccttcagaggcagctccagcaggaccttggcttgtctgacaggaaatgcttgtggtcgttggttatttggtttgagagcccttgttcctccatctagtggagtccttattaaatgctagcaatgtggcaattgagtgccagtagcttaatttcatgtttctaaatggacactgggtgcaaatcggcaaggtgattagattattagaaaattctgctcaatgagtacctctcacattgtaacctcttaaatgtacgattataatgttggatcttaggtcaaataacagacttgagaatactttataaactgccatgatacagcaaaatctcatttattcaaagtgcaaacatactgtgtgtctttctgttttgtgtatgcttgactgcaagataaatgacaaactagctaatatccgagatttatttacaaatggccagggaccccatcaggtgaaacacatagcccattgtcttagagcttctccatcggtcctgtacaggaggattggtgacctactaacagtgaccctgtggctctgtggaattttgaagtgccttttgtgaatcatgaatgaaacatttaacttgagaccctttaaaaaattcatccagaatctgttaccccttgggtagtttgatggaactgagttaagcagaagaccccagctgttttctgggtaagccaggctttgctgtatctggcagtcaggagagaggtcagcccatggtggaggtcttcagtgccgagggctcggatgagaacgtgtagttctttgacttggacctgggcagcgtcttctatggatgcctgccttgtgagcacccacaccttccctccccactgtcgggttgagtagccccagcgtggctgtgttaggagtcctttgcccaacattgtgctgcactggagcctggccctggcactgtcctcaggaccctgcccaagggcccaccgcagagcacacctatgctatggggagccctgctggcagccccgagagccatgccatggcctgcaggagccaggctcctgtgtggatgaagtccctcttcctctgtgccttgatcccttgggggtgcctttggtcatctcttctgtcctttcctgtctctgaaatagtcatcactccccttgactctctctgttcacgtcttctcagtctgcagagttaacttctgtaaggagtttaatctggggttccaagaaaacaagttccttgttaacatagcactgactttgcaacaatagaaaactaacaaatgagcaacaatataaagagtagaggtagttctcattgggtgtaacttcaacccattctgcttgtggttagaatttataattttgctaacgatgtaatttactaaggtttgaaatggtattctaacagtgagtccattgtcttgaggattaatctgatttataagtaatactgatagacatattttcgtacatctgagcagaaataaatgcatgtttctagcatatgtaatataaaaactccagaggataagtttacacttaacaagatgttgttttctatttttgaatttcttattatttccccctttttggtagtggagttgagagggggagcatactatttgtataaagaactgtcaccccagagtgacatttattttccaagatgaccctgaactcatgctgttggtttcatatggtgtttgtgtgctttgcctagattcaaggcctgaggatttgaggaaaatcgggattttttttttcctatttggttttcatgtaaaagttctaaatgtcacttattttgctaaataagaccctttcacaggatagtgtgcgcaatacctgtccgtgtttccaagcagagttcaagttcatgtcttcacaagtagatgagagtcacttccagtcgggggaagcccgcctgagcagtgttttgagagtgcgtacattggaggactgccccacgtccgtttgcactctgccttgcaaaacttactgtggagacgtgccccagactggtctcagaccagagtttgtggcacaggaaaacctggccccctaaaaagaagttttggaattggaagcctgataatttcgggaggctgaggcaggagaacggcgtgaacccgggaggcggagcttgcagtgagccgagatcgcaccactgcactccagcctgggtgacagagcaagactccgtctccaaaaaaaaaaaaaaaaaaaaaaaaaaaggaaacctgacaattctacccacctccccccacccccgactataggcaaagagagttgatcacttccagggtctctgacttctgtgacctggaaatcagcctggcttgggaaattcatgttgttgatctttaattatttaattattctttaataatccttctattttcttgacatctgacccccagcaagagtaaggatcccagaggtcaaaacagtggtgagagccaagctgctcacagacacccacttgatgccacagccatgccatgaggcttcctcccagctgctctgctggcttgctgaagccagctctgagtcacagggttgccttggaccctcggctgtagggggcacctgtctggctccgggccctttgtcctggatacactgacagtaatgtgagcgcagcacttcagagttcaggcccagcaggtcctggcaagtgcattccacccgaacttttaacccaagcggtggggaaggaagccaaaactccaagctgcactttcttggggttctggccatgcacttcttagccttctctctgactttacaggacaaaaggtaccccacgccttcagaatcatgcttacctgcacggcagcatctgactggatggctggctaggtctcatccaccccaaattactgacccttgatttatgttgttactgctcaggttatgctcagatgccctggttgcctgaagatggtttaagtgcaggcccttcagacaagtcacgtcaggcaagagagggctggcctctaacccacaagagggcagatttgtggccaagaggcttcctggcatccacccccaggcccaagggatcagtgtggtgccagagaggatctttaagctgggactgtactgaggcttgatgggaagtatgggcagcatgtacttgacacgttatcacccagtccccttgtaaaatctggaatggagcgtttaagctgagcgttagcatcaggtcagcaggcaaagcaaacctcccacaaactgggtgccgtaaggtgggaggtgacacatggagagcttcgtcctggccgagcaggcacccagccccatgtcccccgccagcattctggatgtcagaggagggtgcgtgtgatggcgtcacattcatctgaagcacactgattgattttccacaaggtggcaagtttgatcaaattgaccgcttttcatgagacaaccagatgctgtaaaaaaaaaaacagcactgggatgtgttgaggagggggcagtttgctgtgctctgttctgtctgctgctctctctgggggccgcacaatgtccgcacacatcacggaggggagaaaggcatcagtaccaaacggaacaacctcttttttctacattgtccatacccggacatgtgaggctctattatcaacaggtggtgagaaaaattctgtttttattcgctttctggtaacttctgtaggccctggctcaaggacttagcatttcgtctcatgtacatctttttcttaagtgttctttgccatttctggaattgtccttggtttttccttagctcataggtcatagatgcagaaatatagtatttaaggcatccgcatccagcatcagatggctttgcatccagaaaaacattgataactcagtttgaagcaccaagcatgtgtaatatggctctatacaatataataaatgcataatgttaagctttaaaaaaaaaaa

SEQ ID NO: 384533 - DNA, 2086 bp, Homo sapiens
  misc_feature (6)..(6): n is a, c, g, or t
  misc_feature (11)..(11): n is a, c, g, or t
tctaancggcngccctactactaaattcgcggccgctcgatcacttccagtcgggggaagcccgcctgagcagtgttttgagagtgcgtacattggaggactgccccacgtccgtttgcactctgccttgcaaaacttactgtggagacgtgccccagactggtctcagaccagagtttgtggcacaggaaaacctggccccctaaaaagaagttttggaattggaagcctgataatttcgggaggctgaggcaggagaacggcgtgaacccgggaggcggagcttgcagtgagccgagatcgcaccactgcactccagcctgggtgacagagcaagactccgtctccaaaaaaaaaaaaaaaaaaaaaaaaaaaggaaacctgacaattctacccacctccccccacccccgactataggcaaagagagttgatcacttccagggtctctgacttctgtgacctggaaatcagcctggcttgggaaattcatgttgttgatctttaattatttaattattctttaataatccttctattttcttgacatctgacccccagcaagagtaaggatcccagaggtcaaaacagtggtgagagccaagctgctcacagacacccacttgatgccacagccatgccatgaggcttcctcccagctgctctgctggcttgctgaagccagctctgagtcacagggttgccttggaccctcggctgtagggggcacctgtctggctccgggccctttgtcctggatacactgacagtaatgtgagcgcagcacttcagagttcaggcccagcaggtcctggcaagtgcattccacccgaacttttaacccaagcggtggggaaggaagccaaaactccaagctgcactttcttggggttctggccatgcacttcttagccttctctctgactttacaggacaaaaggtaccccacgccttcagaatcatgcttacctgcacggcagcatctgactggatggctggctaggtctcatccaccccaaattactgacccttgatttatgttgttactgctcaggttatgctcagatgccctggttgcctgaagatggtttaagtgcaggcccttcagacaagtcacgtcaggcaagagagggctggcctctaacccacaagagggcagatttgtggccaagaggcttcctggcatccacccccaggcccaagggatcagtgtggtgccagagaggatctttaagctgggactgtactgaggcttgatgggaagtatgggcagcatgtacttgacacgttatcacccagtccccttgtaaaatctggaatggagcgtttaagctgagcgttagcatcaggtcagcaggcaaagcaaacctcccacaaactgggtgccgtaaggtgggaggtgacacatggagagcttcgtcctggccgagcaggcacccagccccatgtcccccgccagcattctggatgtcagaggagggtgcgtgtgatggcgtcacattcatctgaagcacactgattgattttccacaaggtggcaagtttgatcaaattgaccgcttttcatgagacaaccagatgctgtaaaaaaaaaaacagcactgggatgtgttgaggagggggcagtttgctgtgctctgttctgtctgctgctctctctgggggccgcacaatgtccgcacacatcacggaggggagaaaggcatcagtaccaaacggaacaacctcttttttctacattgtccatacccggacatgtgaggctctattatcaacaggtggtgagaaaaattctgtttttattcgctttctggtaacttctgtaggccctggctcaaggacttagcatttcgtctcatgtacatctttttcttaagtgttctttgccatttctggaattgtccttggtttttccttagctcataggtcatagatgcagaaatatagtatttaaggcatccgcatccagcatcagatggctttgcatccagaaaaacattgataactcagtttgaagcaccaagcatgtgtaatatggctctatacaatataataaatgcataatgttaagctttaaaaaaaaaaa

SEQ ID NO: 384534 - DNA, 2671 bp, Homo sapiens
cctggatgttgtttctccccacagaattgggcccccctctggagattctcatacacagttctgttggggtgtttaccacaaaaaaggggggtttttctctctgtgggcttcttttggccctcaagagatttctcaacagtgcctctcgcaggtgaatattttttgagcgtggaaaaatcttcgcgggagatctctgttttgttttgccccccacttatggcgtgtgtgttcaacactgctgacaaaaagttgtttttgtaagataaggtgccaccccgtcgatatatttggcgttcaaaatattaaagagcccctcctttttccacacccggagaatatatagtgatgtgggcgcgccacaaaaaccctcgtggccgctgggtgttgttttccccacaccacagagggtgtttcacacgggttgtcacaacgttgtctttctcaccccacgtgagagatatgagggagagttccaactctccccaccctctccggggggggagaatcccgctccctctgaggcccacgcgggtttttcgagagagagtggggcgtgacacactctggagaggaactcgtcccccaccacgctcccccctttgtcacacttctcttcccctctgtccaaaaacttcattctctctggagagaacctgtcccccacgcagatcggttctcacgagaccacgaagtttttgtgggcacaccagggaaacctcgtgcccccctctacaaagaaagtgtttggagatatggagagccctcgataatattttcgcggagggccttgatggccacggaagaaacgcggcgttagaaccccggagggccggaggcctttgcacgttgaagcccagtggttcgcacccccttgcacactcccacaccctctgggtgtgaccacagaagccaaatccctttcccaaagtctccaaaaaaaaaaaaaaaaaaaaaaaaaaaggaaacctgacaattctacccacctccccccacccccgactataggcaaagagagttgatcacttccagggtctctgacttctgtgacctggaaatcagcctggcttgggaaattcatgttgttgatctttaattatttaattattctttaataatccttctattttcttgacatctgacccccagcaagagtaaggatcccagaggtcaaaacagtggtgagagccaagctgctcacagacacccacttgatgccacagccatgccatgaggcttcctcccagctgctctgctggcttgctgaagccagctctgagtcacagggttgccttggaccctcggctgtagggggcacctgtctggctccgggccctttgtcctggatacactgacagtaatgtgagcgcagcacttcagagttcaggcccagcaggtcctggcaagtgcattccacccgaacttttaacccaagcggtggggaaggaagccaaaactccaagctgcactttcttggggttctggccatgcacttcttagccttctctctgactttacaggacaaaaggtaccccacgccttcagaatcatgcttacctgcacggcagcatctgactggatggctggctaggtctcatccaccccaaattactgacccttgatttatgttgttactgctcaggttatgctcagatgccctggttgcctgaagatggtttaagtgcaggcccttcagacaagtcacgtcaggcaagagagggctggcctctaacccacaagagggcagatttgtggccaagaggcttcctggcatccacccccaggcccaagggatcagtgtggtgccagagaggatctttaagctgggactgtactgaggcttgatgggaagtatgggcagcatgtacttgacacgttatcacccagtccccttgtaaaatctggaatggagcgtttaagctgagcgttagcatcaggtcagcaggcaaagcaaacctcccacaaactgggtgccgtaaggtgggaggtgacacatggagagcttcgtcctggccgagcaggcacccagccccatgtcccccgccagcattctggatgtcagaggagggtgcgtgtgatggcgtcacattcatctgaagcacactgattgattttccacaaggtggcaagtttgatcaaattgaccgcttttcatgagacaaccagatgctgtaaaaaaaaaaacagcactgggatgtgttgaggagggggcagtttgctgtgctctgttctgtctgctgctctctctgggggccgcacaatgtccgcacacatcacggaggggagaaaggcatcagtaccaaacggaacaacctcttttttctacattgtccatacccggacatgtgaggctctattatcaacaggtggtgagaaaaattctgtttttattcgctttctggtaacttctgtaggccctggctcaaggacttagcatttcgtctcatgtacatctttttcttaagtgttctttgccatttctggaattgtccttggtttttccttagctcataggtcatagatgcagaaatatagtatttaaggcatccgcatccagcatcagatggctttgcatccagaaaaacattgataactcagtttgaagcaccaagcatgtgtaatatggctctatacaatataataaatgcataatgttaagctttaaaaaaaaaaa

SEQ ID NO: 384535 - DNA, 162 bp, Homo sapiens
atgatttatgccagttgagtctacccactcctacaaatctgtctgtctctctttttcttttgataagaatgaagccaagaaaaattaaagaagatgatgctccaagaacaatagcttgccctcataaagtaagtaatgctagagggagagtgttcattaaac

SEQ ID NO: 384536 - DNA, 193 bp, Homo sapiens
ctcgtcaaagcagactttattggggcgacagggccgccccgcacgcgccagccgctccccgcgcggcccccgggcaacaagaagtgggagcagaagcaggtgcagatcaagaccctggagggcgagttctcggtcaccatgtggtcctcaggtgagcgccggccgcgcgccccggccccgggatgtttttgtt

SEQ ID NO: 384537 - DNA, 4669 bp, Homo sapiens
  misc_feature (350)..(350): n is a, c, g, or t
agggcgaacgggcgagtggcagcgaggcggggcgggctgaggccagcgcggaagtctcgcgaggccgggcccgagcagagtgtggcggcggcggcgagatctgggctcgggttgaggagttggtatttgtgtggaaggaggcggaggcgcaggaggaagggggaagcggagcgccggcccggagggcgggaggaggcgcggccagggcgggcggttgcggcgaggcgaggcgaggcggggagccgagacgagcagcggccgagcgagcgcgggcgcgggcgcaccgaggcgagggaggcggggaagccccgccgccgccgcggcgcccgccccttcccccgccgcccgcnccctctccccccgcccgctcgccgccttcctccctctgccttccttccccacggccggccgcctcctcgcccgcccgcccgcagccgaggagccgaggccgccgcggccgtggcggcggagccctcagccatggcctcgggcgacaccctctacatcgccacggacggctcggagatgccggccgagatcgtggagctgcacgagatcgaggtggagaccatcccggtggagaccatcgagaccacagtggtgggcgaggaggaggaggaggacgacgacgacgaggacggcggcggtggcgaccacggcggcgggggcggccacgggcacgccggccaccaccaccaccaccatcaccaccaccaccacccgcccatgatcgctctgcagccgctggtcaccgacgacccgacccaggtgcaccaccaccaggaggtgatcctggtgcagacgcgcgaggaggtggtgggcggcgacgactcggacgggctgcgcgccgaggacggcttcgaggatcagattctcatcccggtgcccgcgccggccggcggcgacgacgactacattgaacaaacgctggtcaccgtggcggcggccggcaagagcggcggcggcggctcgtcgtcgtcgggaggcggccgcgtcaagaagggcggcggcaagaagagcggcaagaagagttacctcagcggcggggccggcgcggcgggcggcggcggcgccgacccgggcaacaagaagtgggagcagaagcaggtgcagatcaagaccctggagggcgagttctcggtcaccatgtggtcctcagatgaaaaaaaagatattgaccatgagacagtggttgaagaacagatcattggagagaactcacctcctgattattcagaatatatgacaggaaagaaacttcctcctggaggaatacctggcattgacctctcagatcccaaacaactggcagaatttgctagaatgaagccaagaaaaattaaagaagatgatgctccaagaacaatagcttgccctcataaaggctgcacaaagatgttcagggataactcggccatgagaaaacatctgcacacccacggtcccagagtccacgtctgtgcagaatgtggcaaagcttttgttgagagttcaaaactaaaacgacaccaactggttcatactggagagaagccctttcagtgcacgttcgaaggctgtgggaaacgcttttcactggacttcaatttgcgcacacatgtgcgaatccataccggagacaggccctatgtgtgccccttcgatggttgtaataagaagtttgctcagtcaactaacctgaaatctcacatcttaacacatgctaaggccaaaaacaaccagtgaaaagaagagagaagacccttctcgaccacgggaagcatcttccagaagtgtgattgggaataaatatgcctctcctttgtatattatttctaggaagaattttaaaaatgaatcctacacacctaagggacatgttttgataaagtagtaaaaattaaaaaaaaaaaactttactaagatgacattgctaagatgctctatcttgctctgtaatctcgtttcaaaaacacagtgtttttgtaaagtgtggtcccaacaggaggacaattcatgaacttcgcatcaaaagacaattctttatacaacagtgctaaaaatgggacttcttttcacattcttataaatatgaagctcacctgttgcttacaatttttttaattttgtattttccaagtgtgcatattgtacacttttttggggatatgcttagtaatgctacgtgtgatttttctggaggttgataactttgcttgcagtagattttctttaaaagaatgggcagttacatgcatacttcaaaagtattttcctgtaaaaaaaaaaaagttatataggttttgtttgctatcttaattttggttgtattctttgatgttaacacattttgtataattgtatcgtatagctgtattgaatcatgtagtatcaaatattagatgtgatttaatagtgttaatcaatttaaacccattttagtcactttttttttccaaaaaaatactgccagatgctgatgttcagtgtaatttctttgcctgttcagttacagaaagtggtgctcagttgtagaatgtattgtaccttttaacacctgatgtgtacatcccatgtaacagaaagggcaacaataaaatagcaatcctaaagcaagaatatggcagaacaagatctgtaagcacagtcttattttcttttgttgtccagaatacttataattcttgagcctcccagaaattggaagctaaataaagcaactcaagtttcctttattttgcactcaattacagtgattattgatgaaagcgatgcatggatattttaatacttcctacatgtcctgacttctgaaagagagtaggtaacaggcatcccgagttcaggaactacctcagaacaccccaggccaggttggtcataggctgtgattttagcccccggcaagtgtgagtgaagcatctgtaccaccgcgcaggctgagcgcctgcgcagggtaaggtgccacctggcagtggggcacacagagggaagaccaggcctgtccatcagccggctgccttcagaggcagctccagcaggaccttggcttgtctgacaggaaatgcttgtggtcgttggttatttggtttgagagcccttgttcctccatctagtggagtccttattaaatgctagcaatgtggcaattgagtgccagtagcttaatttcatgtttctaaatggacactgggtgcaaatcggcaaggtgattagattattagaaaattctgctcaatgagtacctctcacattgtaacctcttaaatgtacgattataatgttggatcttaggtcaaataacagacttgagaatactttataaactgccatgatacagcaaaatctcatttattcaaagtgcaaacatactgtgtgtctttctgttttgtgtatgcttgactgcaagataaatgacaaactagctaatatccgagatttatttacaaatggccagggaccccatcaggtgaaacacatagcccattgtcttagagcttctccatcggtcctgtacaggaggattggtgacctactaacagtgaccctgtggctctgtggaattttgaagtgccttttgtgaatcatgaatgaaacatttaacttgagaccctttaaaaaattcatccagaatctgttaccccttgggtagtttgatggaactgagttaagcagaagaccccagctgttttctgggtaagccaggctttgctgtatctggcagtcaggagagaggtcagcccatggtggaggtcttcagtgccgagggctcggatgagaacgtgtagttctttgacttggacctgggcagcgtcttctatggatgcctgccttgtgagcacccacaccttccctccccactgtcgggttgagtagccccagcgtggctgtgttaggagtcctttgcccaacattgtgctgcactggagcctggccctggcactgtcctcaggaccctgcccaagggcccaccgcagagcacacctatgctatggggagccctgctggcagccccgagagccatgccatggcctgcaggagccaggctcctgtgtggatgaagtccctcttcctctgtgccttgatcccttgggggtgcctttggtcatctcttctgtcctttcctgtctctgaaatagtcatcactccccttgactctctctgttcacgtcttctcagtctgcagagttaacttctgtaaggagtttaatctttggcttctttgtggctggaggtgttccaggcctggtgagggggtcccatactgttctctgctgagccctctgcacactttgggggatcctggctggcggtggtagttgggccgaagactcagttgtccgtcagctggccatgtccccattttatggacaggcagcctgaggcccagaggcggaaggatttctccttgccacagctgcatcacacttgaactgtccagacctccaccgctggcctgtttgctccccaccctagtcccgcaggctgatatggtgcctccagcagactccatggcttcccggagggtgcagggtccccagttcaccctccagcaggagtggcagcagctggggtacccctagcagtggcatgtggagaagctggggtatgcagaggatccagttctgtgacaccaggaggcacaccaagttttcctctgtccctaacacagaccagaggggtggcccac

SEQ ID NO: 384538 - DNA, 2714 bp, Homo sapiens
  misc_feature (350)..(350): n is a, c, g, or t
agggcgaacgggcgagtggcagcgaggcggggcgggctgaggccagcgcggaagtctcgcgaggccgggcccgagcagagtgtggcggcggcggcgagatctgggctcgggttgaggagttggtatttgtgtggaaggaggcggaggcgcaggaggaagggggaagcggagcgccggcccggagggcgggaggaggcgcggccagggcgggcggttgcggcgaggcgaggcgaggcggggagccgagacgagcagcggccgagcgagcgcgggcgcgggcgcaccgaggcgagggaggcggggaagccccgccgccgccgcggcgcccgccccttcccccgccgcccgcnccctctccccccgcccgctcgccgccttcctccctctgccttccttccccacggccggccgcctcctcgcccgcccgcccgcagccgaggagccgaggccgccgcggccgtggcggcggagccctcagccatggcctcgggcgacaccctctacatcgccacggacggctcggagatgccggccgagatcgtggagctgcacgagatcgaggtggagaccatcccggtggagaccatcgagaccacagtggtgggcgaggaggaggaggaggacgacgacgacgaggacggcggcggtggcgaccacggcggcgggggcggccacgggcacgccggccaccaccaccaccaccatcaccaccaccaccacccgcccatgatcgctctgcagccgctggtcaccgacgacccgacccaggtgcaccaccaccaggaggtgatcctggtgcagacgcgcgaggaggtggtgggcggcgacgactcggacgggctgcgcgccgaggacggcttcgaggatcagattctcatcccggtgcccgcgccggccggcggcgacgacgactacattgaacaaacgctggtcaccgtggcggcggccggcaagagcggcggcggcggctcgtcgtcgtcgggaggcggccgcgtcaagaagggcggcggcaagaagagcggcaagaagagttacctcagcggcggggccggcgcggcgggcggcggcggcgccgacccgggcaacaagaagtgggagcagaagcaggtgcagatcaagaccctggagggcgagttctcggtcaccatgtggtcctcagatgaaaaaaaagatattgaccatgagacagtggttgaagaacagatcattggagagaactcacctcctgattattcagaatatatgacaggaaagaaacttcctcctggaggaatacctggcattgacctctcagatcccaaacaactggcagaatttgctagaatgaagccaagaaaaattaaagaagatgatgctccaagaacaatagcttgccctcataaaggctgcacaaagatgttcagggataactcggccatgagaaaacatctgcacacccacggtcccagagtccacgtctgtgcagaatgtggcaaagcttttgttgagagttcaaaactaaaacgacaccaactggttcatactggagagaagccctttcagtgcacgttcgaaggctgtgggaaacgcttttcactggacttcaatttgcgcacacatgtgcgaatccataccggagacaggccctatgtgtgccccttcgatggttgtaataagaagtttgctcagtcaactaacctgaaatctcacatcttaacacatgctaaggccaaaaacaaccagtgaaaagaagagagaagacccttctcgaccacgggaagcatcttccagaagtgtgattgggaataaatatgcctctcctttgtatattatttctaggaagaattttaaaaatgaatcctacacacctaagggacatgttttgataaagtagtaaaaattaaaaaaaaaaaactttactaagatgacattgctaagatgctctatcttgctctgtaatctcgtttcaaaaacacagtgtttttgtaaagtgtggtcccaacaggaggacaattcatgaacttcgcatcaaaagacaattctttatacaacagtgctaaaaatgggacttcttttcacattcttataaatatgaagctcacctgttgcttacaatttttttaattttgtattttccaagtgtgcatattgtacacttttttggggatatgcttagtaatgctacgtgtgatttttctggaggttgataactttgcttgcagtagattttctttaaaagaatgggcagttacatgcatacttcaaaagtattttcctgtaaaaaaaaaaaagttatataggttttgtttgctatcttaattttggttgtattctttgatgttaacacattttgtataattgtatcgtatagctgtattgaatcatgtagtatcaaatattagatgtgatttaatagtgttaatcaatttaaacccattttagtcactttttttttccaaaaaaatactgccagatgctgatgttcagtgtaatttctttgcctgttcagttacagaaagtggtgctcagttgtagaatgtattgtaccttttaacacctgatgtgtacatcccatgtaacagaaagggcaacaataaaatagcaatcctaaagcaagaatatggcagaacaagatctgtaagcacagtcttattttcttttgttgtccagaatacttataattcttgagcctcccagaaattggaagctaaataaagcaactcaagtttccttta

SEQ ID NO: 384539 - DNA, 3464 bp, Homo sapiens
  misc_feature (350)..(350): n is a, c, g, or t
agggcgaacgggcgagtggcagcgaggcggggcgggctgaggccagcgcggaagtctcgcgaggccgggcccgagcagagtgtggcggcggcggcgagatctgggctcgggttgaggagttggtatttgtgtggaaggaggcggaggcgcaggaggaagggggaagcggagcgccggcccggagggcgggaggaggcgcggccagggcgggcggttgcggcgaggcgaggcgaggcggggagccgagacgagcagcggccgagcgagcgcgggcgcgggcgcaccgaggcgagggaggcggggaagccccgccgccgccgcggcgcccgccccttcccccgccgcccgcnccctctccccccgcccgctcgccgccttcctccctctgccttccttccccacggccggccgcctcctcgcccgcccgcccgcagccgaggagccgaggccgccgcggccgtggcggcggagccctcagccatggcctcgggcgacaccctctacatcgccacggacggctcggagatgccggccgagatcgtggagctgcacgagatcgaggtggagaccatcccggtggagaccatcgagaccacagtggtgggcgaggaggaggaggaggacgacgacgacgaggacggcggcggtggcgaccacggcggcgggggcggccacgggcacgccggccaccaccaccaccaccatcaccaccaccaccacccgcccatgatcgctctgcagccgctggtcaccgacgacccgacccaggtgcaccaccaccaggaggtgatcctggtgcagacgcgcgaggaggtggtgggcggcgacgactcggacgggctgcgcgccgaggacggcttcgaggatcagattctcatcccggtgcccgcgccggccggcggcgacgacgactacattgaacaaacgctggtcaccgtggcggcggccggcaagagcggcggcggcggctcgtcgtcgtcgggaggcggccgcgtcaagaagggcggcggcaagaagagcggcaagaagagttacctcagcggcggggccggcgcggcgggcggcggcggcgccgacccgggcaacaagaagtgggagcagaagcaggtgcagatcaagaccctggagggcgagttctcggtcaccatgtggtcctcagatgaaaaaaaagatattgaccatgagacagtggttgaagaacagatcattggagagaactcacctcctgattattcagaatatatgacaggaaagaaacttcctcctggaggaatacctggcattgacctctcagatcccaaacaactggcagaatttgctagaatgaagccaagaaaaattaaagaagatgatgctccaagaacaatagcttgccctcataaaggctgcacaaagatgttcagggataactcggccatgagaaaacatctgcacacccacggtcccagagtccacgtctgtgcagaatgtggcaaagcttttgttgagagttcaaaactaaaacgacaccaactggttcatactggagagaagccctttcagtgcacgttcgaaggctgtgggaaacgcttttcactggacttcaatttgcgcacacatgtgcgaatccataccggagacaggccctatgtgtgccccttcgatggttgtaataagaagtttgctcagtcaactaacctgaaatctcacatcttaacacatgctaaggccaaaaacaaccagtgaaaagaagagagaagacccttctcgaccacgggaagcatcttccagaagtgtgattgggaataaatatgcctctcctttgtatattatttctaggaagaattttaaaaatgaatcctacacacctaagggacatgttttgataaagtagtaaaaattaaaaaaaaaaaactttactaagatgacattgctaagatgctctatcttgctctgtaatctcgtttcaaaaacacagtgtttttgtaaagtgtggtcccaacaggaggacaattcatgaacttcgcatcaaaagacaattctttatacaacagtgctaaaaatgggacttcttttcacattcttataaatatgaagctcacctgttgcttacaatttttttaattttgtattttccaagtgtgcatattgtacacttttttggggatatgcttagtaatgctacgtgtgatttttctggaggttgataactttgcttgcagtagattttctttaaaagaatgggcagttacatgcatacttcaaaagtattttcctgtaaaaaaaaaaaagttatataggttttgtttgctatcttaattttggttgtattctttgatgttaacacattttgtataattgtatcgtatagctgtattgaatcatgtagtatcaaatattagatgtgatttaatagtgttaatcaatttaaacccattttagtcactttttttttccaaaaaaatactgccagatgctgatgttcagtgtaatttctttgcctgttcagttacagaaagtggtgctcagttgtagaatgtattgtaccttttaacacctgatgtgtacatcccatgtaacagaaagggcaacaataaaatagcaatcctaaagcaagaatatggcagaacaagatctgtaagcacagtcttattttcttttgttgtccagaatacttataattcttgagcctcccagaaattggaagctaaataaagcaactcaagtttcctttattttgcactcaattacagtgattattgatgaaagcgatgcatggatattttaatacttcctacatgtcctgacttctgaaagagagtaggtaacaggcatcccgagttcaggaactacctcagaacaccccaggccaggttggtcataggctgtgattttagcccccggcaagtgtgagtgaagcatctgtaccaccgcgcaggctgagcgcctgcgcagggtaaggtgccacctggcagtggggcacacagagggaagaccaggcctgtccatcagccggctgccttcagaggcagctccagcaggaccttggcttgtctgacaggaaatgcttgtggtcgttggttatttggtttgagagcccttgttcctccatctagtggagtccttattaaatgctagcaatgtggcaaaaaacaaaacacaaaaaaaaagggggggcccgcttaaaaaattaccccctggggggcccccagagtttaacgggcgtgttcatcccccaggcttttcctgtggtcacccaaagggggggtcgccccttataagagcaaggtccagtaaattaataaacagcataagggacttggcggcccgagtccttttttaacacaagcgtcttcttagcatcgtgggaaaacacccctgcggttaaccttcggagcaactccttcgggagacgaaggaacccctttaacttcctcgtgggtgttacacaataattttgggccaaacactatcaccttacaggg

SEQ ID NO: 384540 - DNA, 2160 bp, Homo sapiens
  misc_feature (350)..(350): n is a, c, g, or t
agggcgaacgggcgagtggcagcgaggcggggcgggctgaggccagcgcggaagtctcgcgaggccgggcccgagcagagtgtggcggcggcggcgagatctgggctcgggttgaggagttggtatttgtgtggaaggaggcggaggcgcaggaggaagggggaagcggagcgccggcccggagggcgggaggaggcgcggccagggcgggcggttgcggcgaggcgaggcgaggcggggagccgagacgagcagcggccgagcgagcgcgggcgcgggcgcaccgaggcgagggaggcggggaagccccgccgccgccgcggcgcccgccccttcccccgccgcccgcnccctctccccccgcccgctcgccgccttcctccctctgccttccttccccacggccggccgcctcctcgcccgcccgcccgcagccgaggagccgaggccgccgcggccgtggcggcggagccctcagccatggcctcgggcgacaccctctacatcgccacggacggctcggagatgccggccgagatcgtggagctgcacgagatcgaggtggagaccatcccggtggagaccatcgagaccacagtggtgggcgaggaggaggaggaggacgacgacgacgaggacggcggcggtggcgaccacggcggcgggggcggccacgggcacgccggccaccaccaccaccaccatcaccaccaccaccacccgcccatgatcgctctgcagccgctggtcaccgacgacccgacccaggtgcaccaccaccaggaggtgatcctggtgcagacgcgcgaggaggtggtgggcggcgacgactcggacgggctgcgcgccgaggacggcttcgaggatcagattctcatcccggtgcccgcgccggccggcggcgacgacgactacattgaacaaacgctggtcaccgtggcggcggccggcaagagcggcggcggcggctcgtcgtcgtcgggaggcggccgcgtcaagaagggcggcggcaagaagagcggcaagaagagttacctcagcggcggggccggcgcggcgggcggcggcggcgccgacccgggcaacaagaagtgggagcagaagcaggtgcagatcaagaccctggagggcgagttctcggtcaccatgtggtcctcagatgaaaaaaaagatattgaccatgagacagtggttgaagaacagatcattggagagaactcacctcctgattattcagaatatatgacaggaaagaaacttcctcctggaggaatacctggcattgacctctcagatcccaaacaactggcagaatttgctagaatgaagccaagaaaaattaaagaagatgatgctccaagaacaatagcttgccctcataaaggctgcacaaagatgttcagggataactcggccatgagaaaacatctgcacacccacggtcccagagtccacgtctgtgcagaatgtggcaaagcttttgttgagagttcaaaactaaaacgacaccaactggttcatactggagagaagccctttcagtgcacgttcgaaggctgtgggaaacgcttttcactggacttcaatttgcgcacacatgtgcgaatccataccggagacaggccctatgtgtgccccttcgatggttgtaataagaagtttgctcagtcaactaacctgaaatctcacatcttaacacatgctaaggccaaaaacaaccagtgaaaagaagagagaagacccttctcgaccacgggaagcatcttccagaagtgtgattgggaataaatatgcctctcctttgtatattatttctaggaagaattttaaaaatgaatcctacacacctaagggacatgttttgataaagtagtaaaaattaaaaaaaaaaaactttactaagatgacattgctaagatgctctatcttgctctgtaatctcgtttcaaaaacacagtgtttttgtaaagtgtggtcccaacaggaggacaattcatgaacttcgcatcaaaagacaattctttatacaacagtgctaaaaatgggacttcttttcacattcttataaatatgaagctcacctttttggctttaccaaattttttttttaaatttttggtttttttcccaaagttgttgcattatttgttaccccttttt

SEQ ID NO: 384541 - DNA, 1576 bp, Homo sapiens
  misc_feature (350)..(350): n is a, c, g, or t
  misc_feature (1498)..(1498): n is a, c, g, or t
  misc_feature (1501)..(1501): n is a, c, g, or t
  misc_feature (1505)..(1505): n is a, c, g, or t
agggcgaacgggcgagtggcagcgaggcggggcgggctgaggccagcgcggaagtctcgcgaggccgggcccgagcagagtgtggcggcggcggcgagatctgggctcgggttgaggagttggtatttgtgtggaaggaggcggaggcgcaggaggaagggggaagcggagcgccggcccggagggcgggaggaggcgcggccagggcgggcggttgcggcgaggcgaggcgaggcggggagccgagacgagcagcggccgagcgagcgcgggcgcgggcgcaccgaggcgagggaggcggggaagccccgccgccgccgcggcgcccgccccttcccccgccgcccgcnccctctccccccgcccgctcgccgccttcctccctctgccttccttccccacggccggccgcctcctcgcccgcccgcccgcagccgaggagccgaggccgccgcggccgtggcggcggagccctcagccatggcctcgggcgacaccctctacatcgccacggacggctcggagatgccggccgagatcgtggagctgcacgagatcgaggtggagaccatcccggtggagaccatcgagaccacagtggtgggcgaggaggaggaggaggacgacgacgacgaggacggcggcggtggcgaccacggcggcgggggcggccacgggcacgccggccaccaccaccaccaccatcaccaccaccaccacccgcccatgatcgctctgcagccgctggtcaccgacgacccgacccaggtgcaccaccaccaggaggtgatcctggtgcagacgcgcgaggaggtggtgggcggcgacgactcggacgggctgcgcgccgaggacggcttcgaggatcagattctcatcccggtgcccgcgccggccggcggcgacgacgactacattgaacaaacgctggtcaccgtggcggcggccggcaagagcggcggcggcggctcgtcgtcgtcgggaggcggccgcgtcaagaagggcggcggcaagaagagcggcaagaagagttacctcagcggcggggccggcgcggcgggcggcggcggcgccgacccgggcaacaagaagtgggagcagaagcaggtgcagatcaagaccctggagggcgagttctcggtcaccatgtggtcctcagatgaaaaaaaagatattgaccatgagacagtggttgaagaacagatcattggagagaactcacctcctgattattcagaatatatgacaggaaagaaacttcctcctggaggaatacctggcattgacctctcagatcccaaacaactggcagaatttgctagaatgaagccaagaaaaattaaagaagatgatgctccaagaacaatagcttgccctcataaaggctgcacaaagatgttcagggataactcggccatgagaaaacatctgcacacccacggtcccagagtccacgtctgtgcagaatgtggcaaagcttttgttgagagttcaactnaanggancactggtcatatgggagaccttcagggccgcgagcggtgaaggctcctggctcattggcctggcatctcgg

SEQ ID NO: 384542 - DNA, 314 bp, Homo sapiens
ggaaaactagagaaaagagaggagaattaattgctgatgatgcaagggccttccaagtcatgttaagaagttctggctacagcatggaagtcttaagactggagctatggagaccagttaagagacagctgcgtccatgggatgcttgatagaaacctacactagagcatggtggtagtcacactcaaaagatatttaggagactcaattgacctcatctggtgattgatcagatgggagtggagatggtgaggacagacatgaatcaagaataactagatttctgccatgggcattaggtggaaggtttaata

SEQ ID NO: 384543 - DNA, 876 bp, Homo sapiens
  misc_feature (100)..(100): n is a, c, g, or t
  misc_feature (249)..(249): n is a, c, g, or t
  misc_feature (267)..(267): n is a, c, g, or t
  misc_feature (572)..(572): n is a, c, g, or t
  misc_feature (757)..(757): n is a, c, g, or t
  misc_feature (815)..(815): n is a, c, g, or t
ctgcctctgggctgtgatctgcctcaggcccacagcgtgggtaacaggagggccttcatactcctgacacaaatgaggagaatctctcctttttcttacntgaaggacagacatgactttgattttccatcatcaggtgtttcatggcaaccacttccagaaggttcaagctatcttccttttccatgagatgatgcagcagaccttcaacctcttcagcacaaaggactcatctgatacttgggatgngacccttttagacaaatnctacactgaactttaccagcagctgaatgacctggaagcctgtgtgatgtagaaggttggagtggaagagactcccctgaggaatgtggactccatcctggctgtgagaaaatactttcaaagaatcactctttatctgacaaagaagaagtatagcccttgttcctgggaggctgtcagagcagaaatcatgagatccttctctttatgaacgaacttgcaggaaagattaaggaggaaggaatgaaaactggttcaacatggaaatgagaaacatttccatgattaatacatcatctcacacnttcatgaattctgccatttctcatttttgctatatccatgacatgagttgaatcaaaattttaaaatgttttcaggaatgttaagcagcatcatgttcagctgtacaggcactagttccttacggatgatcatgctgatggatctgtttatctatttgtctaaataattatttaactatttatantatttaaaatcttcttttcatgtatcatgtatttttactttgtggttaatataacaanacatgttctttatatttagtcaatatattactttgcttttttcattaaatttttactatgg

SEQ ID NO: 384544 - DNA, 234 bp, Homo sapiens
gttgtgggagggacccggtgggaggtaactgaatcataggagcagtttcccccatgcagctgtcgtgatagtgagtttctcatgagatctgctggttttataagcttctagtgtttcccctgctggcactcattctctctcctgccaccctgtgaagaggtgccttctgccatgattgtaagtttcctgaggcttccccagccatgcaaaactgtgagtcaattaaacctcttt

SEQ ID NO: 384545 - DNA, 259 bp, Homo sapiens
cactccctagtgagatgaacccggtacctcctaaaataaaagttgaaagtataaaagaaggaaaaagagaaaataaaaaacaatgatatgttaatttttaccatcagaattaatctgcagagataatctgtagtgaatttgtgtatgtgtacacattgtgactcttgagaaaaatcattctacatatacacaaagagattgtccagaattgttaatcaaatcaaagagtgcgaaacaatgtaaatgtctgtaaataggg

SEQ ID NO: 384546 - DNA, 268 bp, Homo sapiens
tgcagtggcgcgatctgtaaaatcactgtgagcactgacttagcacatactggaccgttgctcctaggagaaatacagggttgcgttcctgtgagctttggtcgtgatattttcatcagctgatcaatatgtaatcttgttttatgtgtatttctgtttaaagattcatatatatatgtgtatatatatatatggttgagttgttaccgttgaactcacagcccacaggactagaacacatgcctaaataaagtttatctaacatact

SEQ ID NO: 384547 - DNA, 247 bp, Homo sapiens
tgcagtggcgcgatctgtaaaatcactgtgagcactgacttagcacatactggaccgttgctcctaggagaaatacagggttgcgttcctgtgagctttggtcgtgatattttcatcagctgatcaatatgtaatcttgttttatgtgtatttctgtttaaagattcatatatatatgtgtatatatatatatggttgagttgttaccgttgaactcaccacctgagcatacagggtcctctgagga

SEQ ID NO: 384548 - DNA, 2627 bp, Homo sapiens
  misc_feature (2571)..(2571): n is a, c, g, or t
  misc_feature (2573)..(2574): n is a, c, g, or t
  misc_feature (2627)..(2627): n is a, c, g, or t
cgaatattaaaatgattgtctaatgtcacacagtagttttaaaagaattagaaaaagaattcaggtcttttgaactcctacccagtacaattgtcaaaatgaatgctaaaatttgtggattgaaaaaatatggtgtctgtatataagtgtaatagtgtgtcagcagcagcagcagcagtagaaatagtaatggtagatagcatctagcaaaagcagatcttcggagaataatataaaagtagcatactatgcaatctgaaaagcattgcccttgagtggcagcccttttggagggatgcgataacttgtctcctgagattaacatagatactaacttttttaacgttagcttaattggtattattttgggaagtactaatttgttctgcacactaaactgagagagcaaatggctccttaagggcctccatgtctgccaatagactaattctaagcaattggaaaagcaaattagattttctcagaaaatgtatggaataaaattcttttagtactagataccataaggaaaaaaaggacaaaatctgcttgacagagtaaatatatcagagtcaatgatgaagagattctggaccaaatacttactgtggtaaattgggaaaaagagtggtagtgataatgattcaaaattggcaatatataacgtgattattccagagtcatatgattcgaccaaattttgatcctgagcaatttgtttcagttgctcagtgaatgtgtttatgcacagaagcatttattagtagtagtttctacttttcatagtttgctagtagaaaccatgccatataaatgaaagtgatttaccatgaaaaagttataattagctattgccttcctaaccaatgttttggcatcaaataaatcatatatatatatacccaacaatgtcataaaaccaaagttattagaattatataagtctgaataattttccccactaaaattatgccagcaaatattgtaaaatgaacacaggttcaatatgcatatgttcttcagtggtttctaatttaaagtttggataatagctcataaatatacagtttgactacactgaacaagtaaccccaaactgttatgtttcttataaataacattaaacatttaattaacaattctatttgccatgatagaacttagaaaagctttgttgaaaagttattaattagaaatatatcttttcaaataaaattggtattttctttgtgctcaatctacatctaaatttcaaagtacatattcacagtatctccagtcacttcaacgctcccatcattattcttgtcaaagataatatttctcttccaaaatgtttttaaatattagaactaagccaatttatatccctttctttttatcctttcttacctcctcattttatgcaaagctgctcaatctcattctaagagaaggttccagtgaacaataaatggtacaaagccttggttgaatgagctatcagaaaactttacacttaagctatgatagcaaagatcaagtcatcatcaaaggattttagaacttaaaaataaatcttagtgaattacctctataggaataatatattatcattgggctgcaaaactgctttaaaatttatataagagaaaaagataaataaaacattcaaatatttggggtatggatgttaagcattaagtgtagttcttgcacagctattaaaaacaaatcactgtgaaaattaaatggtgtgggacttctgttccagacaagtatatctggtatagacctgcttcttcttgctcctccctgctaagcacagctgtaagctggaaataatgcaaccaacaaccaaagaagaactctggaaggtgacaagagaacagaccggtttgggatcccagggttggaggaaaaacagagtagcggggaatgtcttacatttaccccaaccaagaggagaaaatgaagtcagaccaggcatttgctgattccaacctagcaacagaaggcagcccacatattctaatttctcttctgagatcaattaagagtacctctgagaacactggacaagtctgacaccaataaaaggaggatcaatcaacaagtaatcccatcaatttaaatcagccatgaagcactcccctttcccacttgattgagattctcttcccctccaagagatactggaaacaatgattggaagcagcaggagggactcagtcacaacaattggcttggtcttggatgcctctttggacctgagacacccattttctacccaccaacactgggtaggcaagagaagccagcagaaccttctagagggaccaagccatagcaagaattcctgcctgaggatctcttttacgcaacttcctttgaggaagaattatgtcagatgggcaaaagaggcaagaggactcaacaatggtaattacccaggcctagaaaactcctctctgtccagggtcactagcgctggtggcagaatcagcaatagggacccagtaacaacaagctgccagacctaggacatctcttttacactcctgacctgagaatcatcttccctactcaganannctgtccttctgtagctggcagacccaggcctacttgaggcacttcatcttggn

SEQ ID NO: 384549 - DNA, 369 bp, Homo sapiens
aaattgagtagcttataaacaatggaaatttatggcttatagttctggaggctgtaatgtccagggtcaggctgctgacagatttggtgcctggcgagggcccactttctggttcatagatggcttgtcttttcactgtatcctcacctgggggagggcactaatgccattcatgaaggctccacattcatgacctaattgtctcccaacatctccaactcttaatacagctctttctccgtatccacaggggattggttccaggagccctgtagattccaaagtctgtgaatgctcaagtcccttatgtaaaatggcatacttccaacctgagcatcatagtgagaccccacctcctcaaaaaaaata

SEQ ID NO: 384550 - DNA, 1206 bp, Homo sapiens
ctttatttacaaaaacaagagcgtgaggaggaaagatggcggacgaggagaaactgccgcctggctgggaaaagcgcatgagccgcccctcaggccgagggtactacttcaaccacatcactaaccccagccagtgggagcggcccagcgggaacagcagcagtggcggcaaaatctggcagggggagcccgccagggtccgccgctcgcacctgctagtgaagccagtcaaggcggccctcgacctggcggcaggaaatcacccggaccaaggaggaggccctggagctgatcagcggctacatccagaagatcaaggcaggagagaaggactttgagtctccggcctcacaattcagcgactgcagctcggccaaggccaggggagacctgggtgccttcagcaaaggtcagatgcagaagccatttgaagacccctggtttgcgcggcggacgggggagatgagcgggacagtgttcacggattccggcatccacgtcattgtccgcacggagtgaggattgggggcccaggcctggcctcggggttcccccgctgcctgctggccagtggccgaaccccccactccctgccactgtcacacagtatttattgttaccaaaatggctgggagggggcccttccagactgggggcccttccagactgggggccctggggttccccactccctgtcagtccccagttggggctgcgacctccagactctccattaaggagttgacttcagcatgggagggaggctcgcagacccagggcaatgtggtgggaggagtgttccaaagagaagatctggtcagcagagccgccccatgtcccaccaggtcctggaggcagatgcgagggcccagagttgtttgtagttaggccacgcttctctgttcagtagcaaaagcaaacactcgtgggcccagctgtgggccctctgagcaactttgcagcaccctttcacccccaattaaatccggaaccactaaaaaaaaaaaaaccaccaaggatgccagatagacttgagcatgctctgttttggaaaataaacattggcaaattttagtaagtctaaattgaataatcagtgtgtttaggagtctggaaacactattatacaagggatttaagagatcattaatatttatcctatacaaagataagtcctattactaataaaatattccttaatacact

SEQ ID NO: 384551 - DNA, 441 bp, Homo sapiens
ctcacaacaaccctgtaaagtagggttttaaaattaaggaaattgaggctctgaaaggttaagtgacttgcctaaggtcacatacccaagaaatagtggagcaggaattcagcttaaaactggctacactatgctgcctcctattaataaacttgcattaaacatattcggccgggtgcgatggctcacgcttgtaatcccagcactttgggaggccgaggtgggtggatcacctcagctcaggagattgagaccagcctggacaacatggcaagaccccgtctctggaaaaaagaaaaacaaaaaaactagccaggcatggagacgagcacctgtagtcccagctactcggtgggaggcttgcttgagcctgggaggcgcaggtcgcagtgagccgaaatgtcgccagtgcacgccagtctgagaatgagaccgtgtctc

SEQ ID NO: 384552 - DNA, 390 bp, Homo sapiens
cttcatggagagacttggcaacagtctctttccagaggtcaggcatcagatagctgtaggtcttggagatggcatcaaaggtagccttggtaaagttgcctagggtggcagtgcagccctgatcaaggtgtagcagtcattgacactggccatcatcagtagcttcttaggcaaaggggcagagacattgccagtgcatctgagggcagagatgaggcacaccagcacagggccaaagtggtcagtcactccacaaggaatgatgtggagcataccaatcttattccccaatagcttctgcatggggaaaatggagagcttggccagggtgatggaccctcagatggcagtggctacctccctgaaacatttaacacccagatgatgtgg

SEQ ID NO: 384553 - DNA, 497 bp, Homo sapiens
tgaagatcaaaggggatctgttgtaatgcctggcatgcagtaggtacttaatagtagctcttgttgcaaaaccaagcagtgaacatgtatctgactttctataacccccttccttggggcctccactcatgaggcatgggaaggtgttttttttctttgtttgtttgtttgtttgaatgcagttgactttttttttgttgtattgttgcaaaagtaatccatgtgattgatgtttattatgaagaaaacatttaatacagatgaaccaggagaagaaaatgaagttcatccttaatcccagcacccagagataaaccactgttaacattttggaatgtgtcctgtcaggcattcgtttatacacacatatatcttatttgcaaattggggttactggtgcaatttttctaacctgctttttctcccccatttaacagcgtagtgtatccatgtttccatttcaataaatattcttctacaacatcaatttcagtgcc

SEQ ID NO: 384554 - DNA, 325 bp, Homo sapiens
acttagaaatttatatgaacttttgtataaacttacctttgtggatgctgttacagaatttattacaatttcttatggagtttaacaactccgactcatgaaattgctataactctcatttcccaaaccaaaagatcaaattgaaatgatatttatgagcttattttatattgctggagctttctaggtctgctccgtcctccagcagaactactcctgaattcatctgcaaagaatagtaagccttatctgttcttttctctctctttttaaagctttcctgctccttacaatatttgcagtttcaacttgtgtcacataggaa

SEQ ID NO: 384555 - DNA, 356 bp, Homo sapiens
agatgtttggatgtgatttaataagaatgtggttgcaataagcactcagaatatgtttgcaatcaatttgctgtatacacaatatgctaccagagcaatcttttgtgtacgtagttgacctttatctctggcaatcttgtcctataaagaagagtgaaatcctccattgcaaatcattagcactcaggaaatagctttaatttgcatgctgacaaagatattaacttggtggttggcgggggggagaataatacaacacatccttttgtctgaaaggcagttcaaaatctgtgttgtgactacagttgactgaagttcaattactgtaataaatgtattccaaatttcatctcaat

SEQ ID NO: 384556 - DNA, 442 bp, Homo sapiens
gaggcctccccagccatgtggagctgtgagtccattaaacctctttcctttataaattacccagtctcaggtatgtctttattagcagtgcgagaacagattaatacacctgtatacctaattgctgttgtgaaacacatttctgcacaaattttaggttataggttttctgtgttgatgaggtgaaaaaaaaaagcctaaactaaatttaagtgaagttatataaacattacatctgccattattctacttaatgccacctaagtgtatccatgaaactcagtatataaacctggtatagaccaagtgtagggtcagaggctggctgagggagcaatgggatgacgtgaagctgaaagcaagacactgctgcaaaatatcctacactctagcctgctgactcctcccattatttgagatactcctttagaaagaatggaag

SEQ ID NO: 384557 - DNA, 436 bp, Homo sapiens
  misc_feature (29)..(32): n is a, c, g, or t
  misc_feature (35)..(35): n is a, c, g, or t
ggcgaagaaggggcgcaagctcattgcgnnnnagncgggacccctgttggagagactatggcgctcaacaagaatcactcggagggcggcggagtgatcgccaatggaatgtacccctgccctcctggctacccctattccaccgcccccacctgagttctatccaggaccccccatgatggacggggccatgggatacgtgcagcccccaccaccgccctaccctgggcccatggaacctccggtcagcggccccgatgtcccctccactcctgcagccgaagccaaggccgcagaagcagccgccagcgcctattacaacccaggcaatcctcacaacgtctacatgcccacgaggccagccgccgccacctccctactacccaccggaagataagaagacccagtagcgcctcctgcctccctgcctcccacc

SEQ ID NO: 384558 - DNA, 810 bp, Homo sapiens
  misc_feature (29)..(32): n is a, c, g, or t
  misc_feature (35)..(35): n is a, c, g, or t
ggcgaagaaggggcgcaagctcattgcgnnnnagncgggacccctgttggagagactatggcgctcaacaagaatcactcggagggcggcggagtgatcgtcaataacaccgagagcatcctaatgtcctatgatcacgtggaactcacattcaatgacatgaagaacgtgccagaagccttcaaagggaccaagaaaggcactgtctaccttaccccttaccgggtcatctttctgtccaagggcaaggatgccatgcagtccttcatgatgccattttatctcatgaaagactgtgagatcaagcagcccgtatttggtgcaaactacatcaagggaacagtgaaggcggaagcgggaggtggctgggaaggctctgcttcctacaagttgactttcacggcagggggcgccattgagttcggacagcggatgctccaggtggcatctcaagcctccagaggtgaagtccccagtggagcctatggtactcttacatgcccagcgggccttatgtctatcccccgccagtcgccaatggaatgtacccctgccctcctggctacccctattccaccgcccccacctgagttctatccaggaccccccatgatggacggggccatgggatacgtgcagcccccaccaccgccctaccctgggcccatggaacctccggtcagcggccccgatgtcccctccactcctgcagccgaagccaaggccgcagaagcagccgccagcgcctattacaacccaggcaatcctcacaacgtctacatgcccacgagccaaccgcatcacccgttc

SEQ ID NO: 384559 - DNA, 349 bp, Homo sapiens
gtcaagctgatacgagggtgaaggcggaaggggaggtggctgggaaggctctgcttcctacaagttgactttcacggcagggggcgccattgagttcggacagcggatgctccaggtggcatctcaagagttctatccaggaccccccatgatggacggggccatgggatacgtgcagcccccaccaccgccctaccctgggcccatggaacctccggtcagcggccccgatgtcccctccactcctgcagccgaagccaaggccgcagaagcagccgccagcgcctattacaacccaggcaatcctcacaacgtctacatgcccacgagccaaccgcatcacccgttc

SEQ ID NO: 384560 - DNA, 870 bp, Homo sapiens
  misc_feature (29)..(32): n is a, c, g, or t
  misc_feature (35)..(35): n is a, c, g, or t
ggcgaagaaggggcgcaagctcattgcgnnnnagncgggacccctgttggagagactatggcgctcaacaagaatcactcggagggcggcggagtgatcgtcaataacaccgagagcatcctaatgtcctatgatcacgtggaactcacattcaatgacatgaagaacgtgccagaagccttcaaagggaccaagaaaggcactgtctaccttaccccttaccgggtcatctttctgtccaagggcaaggatgccatgcagtccttcatgatgccattttatctcatgaaagactgtgagatcaagcagcccgtatttggtgcaaactacatcaagggaacagtgaaggcggaagcgggaggtggctgggaaggctctgcttcctacaagttgactttcacggcagggggcgccattgagttcggacagcggatgctccaggtggcatctcaagcctccagaggtgaagtccccagtggagcctatggtactcttacatgcccagcgggccttatgtctatcccccgccagtcgccaatggaatgtacccctgccctcctggctacccctattccaccgcccccacctgagttctatccaggaccccccatgatggacggggccatgggatacgtgcagcccccaccaccgccctaccctgggcccatggaacctccggtcagcggccccgatgtcccctccactcctgcagccgaagccaaggccgcagaagcagccgccagcgcctattacaacccaggcaatcctcacaacgtctacatgcccacgaggccagccgccgccacctccctactacccaccggaagataagaagacccagtagcgcctcctgcctccctgcctcccacc

SEQ ID NO: 384561 - DNA, 804 bp, Homo sapiens
  misc_feature (29)..(32): n is a, c, g, or t
  misc_feature (35)..(35): n is a, c, g, or t
ggcgaagaaggggcgcaagctcattgcgnnnnagncgggacccctgttggagagactatggcgctcaacaagaatcactcggagggcggcggagtgatcgtcaataacaccgagagcatcctaatgtcctatgatcacgtggaactcacattcaatgacatgaagaacgtgccagaagccttcaaagggaccaagaaaggcactgtctaccttaccccttaccgggtcatctttctgtccaagggcaaggatgccatgcagtccttcatgatgccattttatctcatgaaagactgtgagatcaagcagcccgtatttggtgcaaactacatcaagggaacagtgaaggcggaagcgggaggtggctgggaaggctctgcttcctacaagttgactttcacggcagggggcgccattgagttcggacagcggatgctccaggtggcatctcaaggtatccaggctccgaagattaggggctaaagacacactaaacatgtaggggtttggtatgagtttgcttccttttcgttttgctttttcaagaactcaagaggtaagtgtttgggcaccaggctgaccaggcctaggagttgggaaggaaagctgtcattggcatcagctctgtcctgtacctcagagactgcgtttccctgcctggggcaggtggatgacgttttgacaaagctgtttggactcaaggacactttactatggcctcataaaacaaacactaaaccaaccattcgactgcggttccgcagccattgaaaatgaccgagggatgggccagcagacatcctc

SEQ ID NO: 384562 - DNA, 1008 bp, Homo sapiens
accctggacctggccactcttctctggcggaagcaggttccgtgcgggccctacagcagcatccaagcccctgtcctctcggcacctgagttcttgtttggcatccaggaagaattaggtcacccacacggattgaaaggatatggacaacgaccagtctttccgttgtttaacgaaagcggcagttggattcctcccagaagtctacccaaggatccccagcgaaagggagccatagtccgaggctctggctgcctgcctgtttggagctttgatggcctcgaggcccccagatgagacaggattgttcccttcatcttaacccccttcgtgggcgggaactggagcagctcatttcactcagctcgcctcctgccactcctggcggcagagcgtgcgagtgcgggaaccggagcgaccgaatgctggaaccggccggtcactcctctctggcgggaataggctctgtgcgggcctcacagcagcgtccaagccctggcctctcggcaccggggtacctgtccggcgtccaggaagaattaggtcatatgaacggattgaagagtagtgtatgcggaagatttgattgagtggtggctcctggtgggatgggaactggaaagcagacggtgaaagagggtcatctttccctgaagccgcaccatctgaagttagctgcgtctatctgtagtcttcaacactcttgctgcttctctgctcaccgctcagccgcttgtgttgctctgccagctgaagtcttttttatggccacaggataggggcgtggcaggccaaaaaaacaacatttgggcagaaaaacagggtcagctgttttcaaggccgtgattccaggcttaagggtggggtttagctgggaacccagccattctgtatcagtgatagttgcacaactataaatatactaacaaccattgaattgtgtactttaagtagattaaccgtatgatatatgaattacatctcagtaaagttgttttttaaaaaata

SEQ ID NO: 384563 - DNA, 266 bp, Homo sapiens
  misc_feature (260)..(260): n is a, c, g, or t
atttctttgacgtgatacagaacaaggacatcctccatgatcctcccttctgctgcccaagacttgagagtcatttccttgtcgccaatcacacacaggcacacaccctctggcccctgcctccctctctcagccttccccaccctgtgttcgtgtgttctcattgttcaactcccacttatgagtgagaacatgtggtgtttggttttctgttcctatgttagtttgctgagaatgatagtttccagcttcatccatgntcctgc

SEQ ID NO: 384564 - DNA, 208 bp, Homo sapiens
atttctttgacgtgatacagaacaaggacatcctccatgatcctcccttctgctgcccaagacttgagagtcatttccttgtcgccaatcacacacaggcacacaccctctggcccctgcctccctctctcagccttccccaccccctctctacccttccaactctgtcttgagctcttgaaagctcaaaataaagccaccctttctc

SEQ ID NO: 384565 - DNA, 3381 bp, Homo sapiens
gcctggcgttccaggggcggccggatgtggcctgcctttgcggagggtgcgctccggccacgaaaagcggactgtggatctgccacctgcaagcagctcggccatgtggctccggagccatcgtcagctctgcctggccttcctgctagtctgtgtcctctctgtaatcttcttcctccatatccatcaagacagctttccacatggcctaggcctgtcgatcctgtgtccagaccgccgcctggtgacacccccagtggccatcttctgcctgccgggtactgcgatgggccccaacgcctcctcttcctgtccccagcaccctgcttccctctccggcacctggactgtctaccccaatggccggtttggtaatcagatgggacagtatgccacgctgctggctctggcccagctcaacggccgccgggcctttatcctgcctgccatgcatgccgccctggccccggtattccgcatcaccctgcccgtgctggccccagaagtggacagccgcacgccgtggcgggagctgcagcttcacgactggatgtcggaggagtacgcggacttgagagatcctttcctgaagctctctggcttcccctgctcttggactttcttccaccatctccgggaacagatccgcagagagttcaccctgcacgaccaccttcgggaagaggcgcagagtgtgctgggtcagctccgcctgggccgcacaggggaccgcccgcgcacctttgtcggcgtccacgtgcgccgtggggactatctgcaggttatgcctcagcgctggaagggtgtggtgggcgacagcgcctacctccggcaggccatggactggttccgggcacggcacgaagcccccgttttcgtggtcaccagcaacggcatggagtggtgtaaagaaaacatcgacacctcccagggcgatgtgacgtttgctggcgatggacaggaggctacaccgtggaaagactttgccctgctcacacagtgcaaccacaccattatgaccattggcaccttcggcttctgggctgcctacctggctggcggagacactgtctacctggccaacttcaccctgccagactctgagttcctgaagatctttaagccggaggcggccttcctgcccgagtgggtgggcattaatgcagacttgtctccactctggacattggctaagccttgagagccagggagactttctgaagtagcctgatctttctagagccagcagtacgtggcttcagaggcctggcatcttctggagaagcttgtggtgttcctgaagcaaatgggtgcccgtatccagagtgattctagttgggagagttggagagaagggggacgtttctggaactgtctgaatattctagaactagcaaaacatcttttcctgatggctggcaggcagttctagaagccacagtgcccacctgctcttcccagcccatatctacagtacttccagatggctgcccccaggaatggggaactctccctctggtctactctagaagaggggttacttctcccctgggtcctccaaagactgaaggagcatatgattgctccagagcaagcattcaccaagtccccttctgtgtttctggagtgattctagagggagacttgttctagagaggaccaggtttgatgcctgtgaagaaccctgcagggcccttatggacaggatggggttctggaaatccagataactaaggtgaagaatctttttagttttttttttttttttttggagacagggtctcgctctgttgcccaggctggagtgcagtggcgtgatcttggctcactgcaacttccgcctcctgtgttcaagcgattctcctgtctcagcctcctgagtagatgggactacaggcacaggccattatgcctggctaatttttgtatttttagtagagacagggtttcaccatgttggccgggatggtctcgatctcctgaccttgtcatccacctgtcttggcctcccaaagtgctgggattactggcatgagccactgtgcccagcccggatatttttttttaattatttatttatttatttatttattgagacggagtcttgctctgtagcccaggccagagtgcagtggcgcgatctcagctcactgcaagctctgcctcccgggttcatgccattctgcctcagcctcctgagtagctgggactacaggcgcccgccaccacgcccggctaattttttttgtatttttagtagagacggggtttcatcgtgttaaccaggatggtctcgatctcctgacctcgtgatctgcccacctcggcctcccacagtgctgggattaccggcgtgagccaccatgcctggcccggataattttttttaatttttgtagagacgaggtcttgtgatattgcccaggctgttcttcaactcctgggctcaagcagtcctcccaccttggcctcccagaatgctgggtttatagatgtgagccagcacaccgggccaagtgaagaatctaatgaatgtgcaacctaattgtagcatctaatgaatgttccaccattgctggaaaaattgagatggaaaacaaaccatctctagttggccagcgtcttgctctgttcacagtctctggaaaagctggggtagttggtgagcagagcgggactctgtccaacaagccccacagcccctcaaagacttttttttgtttgttttgagcagacaggctaaaatgtgaacgtggggtgagggatcactgccaaaatggtacagcttctggagcagaactttccagggatccagggacacttttttttaaagctcataaactgccaagagctccatatattgggtgtgagttcaggttgcctctcacaatgaaggaagttggtctttgtctgcaggtgggctgctgagggtctgggatctgttttctggaagtgtgcaggtataaacacaccctctgtgcttgtgacaaactggcaggtaccgtgctcattgctaaccactgtctgtccctgaactcccagaaccactacatctggctttgggcaggtctgagataaaacgatctaaaggtaggcagaccctggacccagcctcagatccaggcaggagcacgaggtctggccaaggtggacggggttgtcgagatctcaggagccccttgctgttttttggagggtgaaagaagaaaccttaaacatagtcagctctgatcacatcccctgtctactcatccagaccccatgcctgtaggcttatcagggagttacagttacaattgttacagtactgttcccaactcagctgccacgggtgagagagcaggaggtatgaattaaaagtctacagcactaaaaaaaaac

SEQ ID NO: 384566 - DNA, 1473 bp, Homo sapiens
gcctggcgttccaggggcggccggatgtggcctgcctttgcggagggtgcgctccggccacgaaaagcggactgtggatctgccacctgcaagcagctcggccatgtggctccggagccatcgtcagctctgcctggccttcctgctagtctgtgtcctctctgtaatcttcttcctccatatccatcaagacagctttccacatggcctaggcctgtcgatcctgtgtccagaccgccgcctggtgacacccccagtggccatcttctgcctgccgggtactgcgatgggccccaacgcctcctcttcctgtccccagcaccctgcttccctctccggcacctggactgtctaccccaatggccggtttggtaatcagatgggacagtatgccacgctgctggctctggcccagctcaacggccgccgggcctttatcctgcctgccatgcatgccgccctggccccggtattccgcatcaccctgcccgtgctggccccagaagtggacagccgcacgccgtggcgggagctgcagcttcacgactggatgtcggaggagtacgcggacttgagagatcctttcctgaagctctctggcttcccctgctcttggactttcttccaccatctccgggaacagatccgcagagagttcaccctgcacgaccaccttcgggaagaggcgcagagtgtgctgggtcagctccgcctgggccgcacaggggaccgcccgcgcacctttgtcggcgtccacgtgcgccgtggggactatctgcaggttatgcctcagcgctggaagggtgtggtgggcgacagcgcctacctccggcaggccatggactggttccgggcacggcacgaagcccccgttttcgtggtcaccagcaacggcatggagtggtgtaaagaaaacatcgacacctcccagggcgatgtgacgtttgctggcgatggacaggaggctacaccgtggaaagactttgccctgctcacacagtgcaaccacaccattatgaccattggcaccttcggcttctgggctgcctacctggctggcggagacactgtctacctgacaaactggcaggtaccgtgctcattgctaaccactgtctgtccctgaactcccagaaccactacatctggctttgggcaggtctgagataaaacgatctaaaggtaggcagaccctggacccagcctcagatccaggcaggagcacgaggtctggccaaggtggacggggttgtcgagatctcaggagccccttgctgttttttggagggtgaaagaagaaaccttaaacatagtcagctctgatcacatcccctgtctactcatccagaccccatgcctgtaggcttatcagggagttacagttacaattgttacagtactgttcccaactcagctgccacgggtgagagagcaggaggtatgaattaaaagtctacagcactaaaaaaaaac

SEQ ID NO: 384567 - DNA, 2893 bp, Homo sapiens
gcctggcgttccaggggcggccggatgtggcctgcctttgcggagggtgcgctccggccacgaaaagcggactgtggatctgccacctgcaagcagctcggccatgtggctccggagccatcgtcagctctgcctggccttcctgctagtctgtgtcctctctgtaatcttcttcctccatatccatcaagacagctttccacatggcctaggcctgtcgatcctgtgtccagaccgccgcctggtgacacccccagtggccatcttctgcctgccgggtactgcgatgggccccaacgcctcctcttcctgtccccagcaccctgcttccctctccggcacctggactgtctaccccaatggccggtttggtaatcagatgggacagtatgccacgctgctggctctggcccagctcaacggccgccgggcctttatcctgcctgccatgcatgccgccctggccccggtattccgcatcaccctgcccgtgctggccccagaagtggacagccgcacgccgtggcgggagctgcagcttcacgactggatgtcggaggagtacgcggacttgagagatcctttcctgaagctctctggcttcccctgctcttggactttcttccaccatctccgggaacagatccgcagagagttcaccctgcacgaccaccttcgggaagaggcgcagagtgtgctgggtcagctccgcctgggccgcacaggggaccgcccgcgcacctttgtcggcgtccacgtgcgccgtggggactatctgcaggttatgcctcagcgctggaagggtgtggtgggcgacagcgcctacctccggcaggccatggactggttccgggcacggcacgaagcccccgttttcgtggtcaccagcaacggcatggagtggtgtaaagaaaacatcgacacctcccagggcgatgtgacgtttgctggcgatggacaggaggctacaccgtggaaagactttgccctgctcacacagtgcaaccacaccattatgaccattggcaccttcggcttctgggctgcctacctggctggcggagacactgtctacctggccaacttcaccctgccagactctgagttcctgaagatctttaagccggaggcggccttcctgcccgagtgggtgggcattaatgcagacttgtctccactctggacattggctaagccttgagagccagggagactttctgaagtagcctgatctttctagagccagcagtacgtggcttcagaggcctggcatcttctggagaagcttgtggtgttcctgaagcaaatgggtgcccgtatccagagtgattctagttgggagagttggagagaagggggacgtttctggaactgtctgaatattctagaactagcaaaacatcttttcctgatggctggcaggcagttctagaagccacagtgcccacctgctcttcccagcccatatctacagtacttccagatggctgcccccaggaatggggaactctccctctggtctactctagaagaggggttacttctcccctgggtcctccaaagactgaaggagcatatgattgctccagagcaagcattcaccaagtccccttctgtgtttctggagtgattctagagggagacttgttctagagaggaccaggtttgatgcctgtgaagaaccctgcagggcccttatggacaggatggggttctggaaatccagataactaaggtgaagaatctttttattttttttgtatttttagtagagacggggtttcatcgtgttaaccaggatggtctcgatctcctgacctcgtgatctgcccacctcggcctcccacagtgctgggattaccggcgtgagccaccatgcctggcccggataattttttttaatttttgtagagacgaggtcttgtgatattgcccaggctgttcttcaactcctgggctcaagcagtcctcccaccttggcctcccagaatgctgggtttatagatgtgagccagcacaccgggccaagtgaagaatctaatgaatgtgcaacctaattgtagcatctaatgaatgttccaccattgctggaaaaattgagatggaaaacaaaccatctctagttggccagcgtcttgctctgttcacagtctctggaaaagctggggtagttggtgagcagagcgggactctgtccaacaagccccacagcccctcaaagacttttttttgtttgttttgagcagacaggctaaaatgtgaacgtggggtgagggatcactgccaaaatggtacagcttctggagcagaactttccagggatccagggacacttttttttaaagctcataaactgccaagagctccatatattgggtgtgagttcaggttgcctctcacaatgaaggaagttggtctttgtctgcaggtgggctgctgagggtctgggatctgttttctggaagtgtgcaggtataaacacaccctctgtgcttgtgacaaactggcaggtaccgtgctcattgctaaccactgtctgtccctgaactcccagaaccactacatctggctttgggcaggtctgagataaaacgatctaaaggtaggcagaccctggacccagcctcagatccaggcaggagcacgaggtctggccaaggtggacggggttgtcgagatctcaggagccccttgctgttttttggagggtgaaagaagaaaccttaaacatagtcagctctgatcacatcccctgtctactcatccagaccccatgcctgtaggcttatcagggagttacagttacaattgttacagtactgttcccaactcagctgccacgggtgagagagcaggaggtatgaattaaaagtctacagcactaaaaaaaaac

SEQ ID NO: 384568 - DNA, 579 bp, Homo sapiens
aacgaccccctttcaagcactctgtgggttttgtggcatctctacttgccagagtaaaatggaagtcatgtggtctttttgcacatttacgttaaggaaagagaaccctaaggttgacctgcaaactgtaatgttcctaggtccccttttcctctattttcttttccacctactttaaatctgctgttacttttctattaagataaaaaaccactgtttggatctaacaggttttatttttttccaaacttgtgaatttgtatttatctcatggctaaagtactgaactaaaagctatagaatctttgtgtgtctgtatgtgtgtatgtgtatgtgtgtgtatatatatatttaaaggcctttataatagacttctacaattttatgttcaattggcaattatatctgttttaatttccctctagctcaccagactttctcttcgtaccttataatgtaaatttttctatctgattttcacctgagttgtttcctctaatatgcagatttagggctatttagctgacaactgctgcagtaaggaagcaggttatcaagagtctgcaagtctaagagagg

SEQ ID NO: 384569 - DNA, 447 bp, Homo sapiens
aggctcttccgtgccagctgctttctgtgcattctctcccatccccgcaagatcttgcaaggtaggaggttttattccctgcgtgcctcctttatttttttcaaatgaggcctctaaggctcaaaaacactaagtaacttgcccagtcaaggtacacagcttataagtagtcaggctgaaattttaaaccaagtctgcagtattttgttaagatactttaagaaaagaggtaaaaggacagaactcaacattgttgtttttaaataaatgtttcattatagcagaagcctcttaggaatttccattggtgatgaatttttaaaaggggttactgaaaatgtgttttaccaaaaaggcaagctcacttttttttctcctgtgctctccggcagtcttcagtaggcattcaaagtaaggatttttaaatatgtatatatttcagtgacc

SEQ ID NO: 384570 - DNA, 154 bp, Homo sapiens
cacccccctcagcctcccaaagtgctgagattacaggcgtgagccactgcccctggcccagatttgaaattttttaaaaataaaacatgattcttggttattgtaggtatttaataaatgttaaataaatatatacatagaacaaagtagtgcc

SEQ ID NO: 384571 - DNA, 331 bp, Homo sapiens
  misc_feature (189)..(189): n is a, c, g, or t
  misc_feature (191)..(191): n is a, c, g, or t
  misc_feature (268)..(268): n is a, c, g, or t
  misc_feature (296)..(296): n is a, c, g, or t
ttaagtgactggaattttaagttataactcctattataaaaagttaacttgactataacttgtaaagtcaactcctcaatcctcttaatcatttggtagacttctgactttatattcaatgagataatcatattatttttattagaaaagagtcagttttaatatgtctgaaagaaaataaatctgggngngtgtgtgtgtatgtatatatatatatatatacacacaatatatatatacacacacacatatatatacacacacacgnatatacacacacatatattatacacggngtatattatatacccaccatatataccacgggggg

SEQ ID NO: 384572 - DNA, 127 bp, Homo sapiens
ctcagggaaggaatctgagcttgtattgttggtaggcaaaggtttataaggcagagaggagtgtggtagttctattagatgtgtagtacacctggaagtagacaattaaaaacttggaacacttctc

SEQ ID NO: 384573 - DNA, 3324 bp, Homo sapiens
agccgggccccgcccgccgcagcgcggggctcctgcgtcccgagtgcgcggcggccggaccgggcgggcggagccgggcccgcggggctgctgcggggcgatcgggccgggccgctgccgcgccatggactcccgtgtccagcctgagttccagcctcactgagtggccacccccaaagtgctgccagccgaggaagcccccagcactgaccatgtctattatggaccacagccccaccacgggcgtggtcacagtcatcgtcatcctcattgccatcgcggccctgggggccttgatcctgggctgctggtgctacctgcggctgcagcgcatcagccagtcagaggacgaggagagcatcgtgggggatggggagaccaaggaacccttcctgctggtgcagtattcggccaagggaccgtgcgtggagagaaaggccaagctgatgactcccaacggcccggaagtccacggctgagccaggatgcaaggctcctggtcctgtttgcagccggccaagaggcgctgggaggggcaaaaccatacggatgcgctgctgtctgagaggaagggctgacacttgctggcatggcctctgcgggcttcgtcatcgcatgcactgatgcccggggacctggctgtcctgggcttcccctcggcctccaggtgaggctgcccattgcaggcactgggcaggcctgaccttgctggggctcatggccctgtagcgcttttgttacttgaatgtctagctgagcctgtttttgatggagctactactgtaatgcgtgaactaacaaacctgtgaactgtaaataggcccctggaagcacgtgcttaagcccttttgctgatttttaaaaatatcatctagcgcacacgggactggtattctggctgtactaatgacaagctgagtcaagaccctggagggtcataggcttgtaaaggcccacgccacactcggcaggggtctctcatgtgtgtccatctgcgtgtatgtcaaggaagtgagatgccaatttggggtcttgaggctgaccagttggggtgcttgggtgatctctgcttcattagtcatgggtggaagaaaaaccacaccccccgcacccctccgttctttctgcatagactcacttgttaaatagcagttctgttgagagtggagttactgcagggaagctaccggacctgcctgggagccagtgaagggcgagtcagggcacgcgtcctggaggctgccagcgtccttgtagcagagcagtttcttgccgcttgggtcttcagcacgccaagccccccaccaaccctccaccccgagtgaaggcttcgctgaaattgctttggtcctcatagagcctgtggtggctacttttggtctgaaacccacttggcccaggaaagagaaaaggttgtatgttttgtgttggtgtttcctattttctgcactggaggggaggggactgttgaggttctgtcttttttcttcttttcctcttccctcttcacatcacttggcttcctttcctctctgatgaccgtccgcctatggggttctgacttcactttcctcagcgggtctccagtcccctgacccagctctaaaggcacttaggacccagggaacatttctcacgtgcacattcccctaagagccaccagactgcttcctgccagcctgtgcttgcggcagggagccggggcagggcagaggtgaacttgaagttcaggacttgactctcccacaggtggtgagctggtggctctctggtgagctagtgtctccacagcctgtctccaaggcctcccctatgtacatttcagtgagctcactttgatttttaatcccaccacaagcacatactaattttatttatgattcaaatgtgactcgtgcctgcccatccctgtaatagatggaaggtcagccccggcttaaccacagagcactggcccttcatggctgagctcagagctctggcctcctgctcagactaaaggcacctcctctggcctcacccaagcctcttctaaaaaccatgttgaatgaatccacgttctggaaccccgaggcgggagaagtagggagctgttcgtttaagcagcatacacctaaattgggggtttaaacattaagtaggagcttggggtggaagagggacagccggctgggccacctgagcagaaggtggtaatgaaacacctcagctgggctcttgggagaccttaggaagcaggagaggcaacacctctggctactgatggtgtggcaagttcagaagaggtggtggtggggtaggcgtgatgtcagcagaagccctgcaggctgggtgggcaggacacgtggtgggggccactgaaaccaggcctaggagggagaacaagttccaaaggtgccgactggaagaagggggtaaaagtttgctttggtgagtgagaaaaggctggggcgtgtgatccatcccctcacgtttcagaacttccaggctttctacctcgactctcaccacagccagcacatacacctaggctgtttttccttcctccacacctgagggacgcagcaacagctaggatctgcattttcaggttccgagcctgacccctggaactgaccagcgctcgattgtcagccttggcctggggttttgaccttgccagtgaagtttcggttttgaagtgattaaatgtcacttcctcatcagtttcacttctggaggttttcttatcctactccctggtgccagggacgtacctgggagtttgaatcaggcccatttgagcgtggcagccgtgttgggtgaaggtccggggctcggtgaggcactgggggggttttcgggaggaaaatgaaaatgcttctagaatgagtgaaccacatcatagctctcactgttctgatttttcaatagctactttttttagcagacaccagagccacactcaaatggctaagtaggttatgacctctctggattatttttgaatgcccaactgttgcattcaagttttctgactaataagaaattaagcattcatccttcgtatcactgcagaagcaacagtgggggcacagggagggaactcttgacactgagccactaaaatatggactaattttttggacaaatcttcaaacggactgtgctactgtatttgtctcaaagctaccaagtttgtgcaataagtggaagggatgtcatccttcttcaataaatgctgaatgacattcaagctgattttctagaccactgagaaaatctttatttacaataaatttcaataaaatttgcataaatatattcccaatgtaaaaaaaaaaa

SEQ ID NO: 384574 - DNA, 439 bp, Homo sapiens
tcggttttgaagtgattaaatgtcacttcctcatcagtttcacttctggaggttttcttatcctactccctggtgccagggacgtacctgggagtttgaatcaggcccatttgagcgtggtgggggccactgaaaccaggcctaggagggagaacaagttccaaaggtgccgactggaagaagggggtaaaagtttgctttggtgagtgagaaaaggctggggcgtgtgatccatcccctcacgtttcagaacttccaggctttctacctcgactctcaccacagccagcacatacacctaggctgtttttccttcctccacacctgagggacgcagcaacagctaggatctgcattttcaggttccgagcctgacccctggcctcctgctcagactaaaggcacctcctctggcctcacccaagcctcttctaaaaag

SEQ ID NO: 384575 - DNA, 3267 bp, Homo sapiens
agcgcgtgtcccgactccggtgctttttcgcaaggtcgtgctactgcgccttctgaactacgagtcccaggactcccgtgtccagcctgagttccagcctcactgagtggccacccccaaagtgctgccagccgaggaagcccccagcactgaccatgtctattatggaccacagccccaccacgggcgtggtcacagtcatcgtcatcctcattgccatcgcggccctgggggccttgatcctgggctgctggtgctacctgcggctgcagcgcatcagccagtcagaggacgaggagagcatcgtgggggatggggagaccaaggaacccttcctgctggtgcagtattcggccaagggaccgtgcgtggagagaaaggccaagctgatgactcccaacggcccggaagtccacggctgagccaggatgcaaggctcctggtcctgtttgcagccggccaagaggcgctgggaggggcaaaaccatacggatgcgctgctgtctgagaggaagggctgacacttgctggcatggcctctgcgggcttcgtcatcgcatgcactgatgcccggggacctggctgtcctgggcttcccctcggcctccaggtgaggctgcccattgcaggcactgggcaggcctgaccttgctggggctcatggccctgtagcgcttttgttacttgaatgtctagctgagcctgtttttgatggagctactactgtaatgcgtgaactaacaaacctgtgaactgtaaataggcccctggaagcacgtgcttaagcccttttgctgatttttaaaaatatcatctagcgcacacgggactggtattctggctgtactaatgacaagctgagtcaagaccctggagggtcataggcttgtaaaggcccacgccacactcggcaggggtctctcatgtgtgtccatctgcgtgtatgtcaaggaagtgagatgccaatttggggtcttgaggctgaccagttggggtgcttgggtgatctctgcttcattagtcatgggtggaagaaaaaccacaccccccgcacccctccgttctttctgcatagactcacttgttaaatagcagttctgttgagagtggagttactgcagggaagctaccggacctgcctgggagccagtgaagggcgagtcagggcacgcgtcctggaggctgccagcgtccttgtagcagagcagtttcttgccgcttgggtcttcagcacgccaagccccccaccaaccctccaccccgagtgaaggcttcgctgaaattgctttggtcctcatagagcctgtggtggctacttttggtctgaaacccacttggcccaggaaagagaaaaggttgtatgttttgtgttggtgtttcctattttctgcactggaggggaggggactgttgaggttctgtcttttttcttcttttcctcttccctcttcacatcacttggcttcctttcctctctgatgaccgtccgcctatggggttctgacttcactttcctcagcgggtctccagtcccctgacccagctctaaaggcacttaggacccagggaacatttctcacgtgcacattcccctaagagccaccagactgcttcctgccagcctgtgcttgcggcagggagccggggcagggcagaggtgaacttgaagttcaggacttgactctcccacaggtggtgagctggtggctctctggtgagctagtgtctccacagcctgtctccaaggcctcccctatgtacatttcagtgagctcactttgatttttaatcccaccacaagcacatactaattttatttatgattcaaatgtgactcgtgcctgcccatccctgtaatagatggaaggtcagccccggcttaaccacagagcactggcccttcatggctgagctcagagctctggcctcctgctcagactaaaggcacctcctctggcctcacccaagcctcttctaaaaaccatgttgaatgaatccacgttctggaaccccgaggcgggagaagtagggagctgttcgtttaagcagcatacacctaaattgggggtttaaacattaagtaggagcttggggtggaagagggacagccggctgggccacctgagcagaaggtggtaatgaaacacctcagctgggctcttgggagaccttaggaagcaggagaggcaacacctctggctactgatggtgtggcaagttcagaagaggtggtggtggggtaggcgtgatgtcagcagaagccctgcaggctgggtgggcaggacacgtggtgggggccactgaaaccaggcctaggagggagaacaagttccaaaggtgccgactggaagaagggggtaaaagtttgctttggtgagtgagaaaaggctggggcgtgtgatccatcccctcacgtttcagaacttccaggctttctacctcgactctcaccacagccagcacatacacctaggctgtttttccttcctccacacctgagggacgcagcaacagctaggatctgcattttcaggttccgagcctgacccctggaactgaccagcgctcgattgtcagccttggcctggggttttgaccttgccagtgaagtttcggttttgaagtgattaaatgtcacttcctcatcagtttcacttctggaggttttcttatcctactccctggtgccagggacgtacctgggagtttgaatcaggcccatttgagcgtggcagccgtgttgggtgaaggtccggggctcggtgaggcactgggggggttttcgggaggaaaatgaaaatgcttctagaatgagtgaaccacatcatagctctcactgttctgatttttcaatagctactttttttagcagacaccagagccacactcaaatggctaagtaggttatgacctctctggattatttttgaatgcccaactgttgcattcaagttttctgactaataagaaattaagcattcatccttcgtatcactgcagaagcaacagtgggggcacagggagggaactcttgacactgagccactaaaatatggactaattttttggacaaatcttcaaacggactgtgctactgtatttgtctcaaagctaccaagtttgtgcaataagtggaagggatgtcatccttcttcaataaatgctgaatgacattcaagctgattttctagaccactgagaaaatctttatttacaataaatttcaataaaatttgcataaatatattcccaatgtaaaaaaaaaaa

SEQ ID NO: 384576 - DNA, 3240 bp, Homo sapiens
agccgggccccgcccgccgcagcgcggggctcctgcgtcccgagtgcgcggcggccggaccgggcgggcggagccgggcccgcggggctgctgcggggcgatcgggccgggccgctgccgcgccatggactcccgtgtccagcctgagttccagcctcactgagtggccacccccaaagtgctgccagccgaggaagcccccagcactgaccatgtctattatggaccacagccccaccacgggcgtggtcacagtcatcgtcatcctcattgccatcgcggccctgggggccttgatcctgggctgctggtgctacctgcggctgcagcgcatcagccagtcagaggacgaggagagcatcgtgggggatggggagaccaaggaacccttcctgctggtgcagtattcggccaagggaccgtgcgtggagagaaaggccaagctgatgactcccaacggcccggaagtccacggctgagccaggatgcaaggctcctggtcctgtttgcagccggccaagaggcgctgggaggggcaaaaccatacggatgcgctgctgtctgagaggaagggctgacacttgctggcatggcctctgcgggcttcgtcatcgcatgcactgatgcccggggacctggctgtcctgggcttcccctcggcctccaggtgaggctgcccattgcaggcactgggcaggcctgaccttgctggggctcatggccctgtagcgcttttgttacttgaatgtctagctgagcctgtttttgatggagctactactgtaatgcgtgaactaacaaacctgtgaactgtaaataggcccctggaagcacgtgcttaagcccttttgctgatttttaaaaatatcatctagcgcacacgggactggtattctggctgtactaatgacaagctgagtcaagaccctggagggtcataggcttgtaaaggcccacgccacactcggcaggggtctctcatgtgtgtccatctgcgtgtatgtcaaggaagtgagatgccaatttggggtcttgaggctgaccagttggggtgcttgggtgatctctgcttcattagtcatgggtggaagaaaaaccacaccccccgcacccctccgttctttctgcatagactcacttgttaaatagcagttctgttgagagtggagttactgcagggaagctaccggacctgcctgggagccagtgaagggcgagtcagggcacgcgtcctggaggctgccagcgtccttgtagcagagcagtttcttgccgcttgggtcttcagcacgccaagccccccaccaaccctccaccccgagtgaaggcttcgctgaaattgctttggtcctcatagagcctgtggtggctacttttggtctgaaacccacttggcccaggaaagagaaaaggttgtatgttttgtgttggtgtttcctattttctgcactggaggggaggggactgttgaggttctgtcttttttcttcttttcctcttccctcttcacatcacttggcttcctttcctctctgatgaccgtccgcctatggggttctgacttcactttcctcagcgggtctccagtcccctgacccagctctaaaggcacttaggacccagggaacatttctcacgtgcacattcccctaagagccaccagactgcttcctgccagcctgtgcttgcggcagggagccggggcagggcagaggtgaacttgaagttcaggacttgactctcccacaggtggtgagctggtggctctctggtgagctagtgtctccacagcctgtctccaaggcctcccctatgtacatttcagtgagctcactttgatttttaatcccaccacaagcacatactaattttatttatgattcaaatgtgactcgtgcctgcccatccctgtaatagatggaaggtcagccccggcttaaccacagagcactggcccttcatggctgagctcagagctctggcctcctgctcagactaaaggcacctcctctggcctcacccaagcctcttctaaaaaccatgttgaatgaatccacgttctggaaccccgaggcgggagaagtagggagctgttcgtttaagcagcatacacctaaattgggggtttaaacattaagtaggagcttggggtggaagagggacagccggctgggccacctgagcagaaggtggtaatgaaacacctcagctgggctcttgggagaccttaggaagcaggagaggcaacacctctggctactgatggtgtggcaagttcagaagaggtggtggtggggtaggcgtgatgtcagcagaagccctgcaggctgggtgggcaggacacgtggtgggggccactgaaaccaggcctaggagggagaacaagttccaaaggtgccgactggaagaagggggtaaaagtttgctttggtgagtgagaaaaggctggggcgtgtgatccatcccctcacgtttcagaacttccaggctttctacctcgactctcaccacagccagcacatacacctaggctgtttttccttcctccacacctgagggacgcagcaacagctaggatctgcattttcaggttccgagcctgacccctggaactgaccagcgctcgattgtcagccttggcctggggttttgaccttgccagtgaagtttcggttttgaagtgattaaatgtcacttcctcatcagtttcacttctggaggttttcttatcctactccctggtgccagggacgtacctgggagtttgaatcaggcccatttgagcgtggcagccgtgttgggtgaaggtccggggctcggtgaggcactgggggggttttcgggaggaaaatgaaaatgcttctagaatgagtgaaccacatcatagctctcactgttctgatttttcaatagctactttttttagcagacaccagagccacactcaaatggctaagtaggttatgacctctctggattatttttgaatgcccaactgttgcattcaagttttctgactaataagaaattaagcattcatccttcgtatcactgcagaagcaacagtgggggcacagggagggaactcttgacactgagccactaaaatatggactaattttttggacaaatcttcaaacggactgtgctactgtatttgtctcaaagctaccaagtttgtgcaataagtggaagggatgtcatccttcttcaataaatgctgaatgacattcaagctga

SEQ ID NO: 384577 - DNA, 2917 bp, Homo sapiens
gctggtacggccggaattttgggatgaaaggccaagctgatgactcccaacggcccggaagtccacggctgagccaggatgcaaggctcctggtcctgtttgcagccggccaagaggcgctgggaggggcaaaaccatacggatgcgctgctgtctgagaggaagggctgacacttgctggcatggcctctgcgggcttcgtcatcgcatgcactgatgcccggggacctggctgtcctgggcttcccctcggcctccaggtgaggctgcccattgcaggcactgggcaggcctgaccttgctggggctcatggccctgtagcgcttttgttacttgaatgtctagctgagcctgtttttgatggagctactactgtaatgcgtgaactaacaaacctgtgaactgtaaataggcccctggaagcacgtgcttaagcccttttgctgatttttaaaaatatcatctagcgcacacgggactggtattctggctgtactaatgacaagctgagtcaagaccctggagggtcataggcttgtaaaggcccacgccacactcggcaggggtctctcatgtgtgtccatctgcgtgtatgtcaaggaagtgagatgccaatttggggtcttgaggctgaccagttggggtgcttgggtgatctctgcttcattagtcatgggtggaagaaaaaccacaccccccgcacccctccgttctttctgcatagactcacttgttaaatagcagttctgttgagagtggagttactgcagggaagctaccggacctgcctgggagccagtgaagggcgagtcagggcacgcgtcctggaggctgccagcgtccttgtagcagagcagtttcttgccgcttgggtcttcagcacgccaagccccccaccaaccctccaccccgagtgaaggcttcgctgaaattgctttggtcctcatagagcctgtggtggctacttttggtctgaaacccacttggcccaggaaagagaaaaggttgtatgttttgtgttggtgtttcctattttctgcactggaggggaggggactgttgaggttctgtcttttttcttcttttcctcttccctcttcacatcacttggcttcctttcctctctgatgaccgtccgcctatggggttctgacttcactttcctcagcgggtctccagtcccctgacccagctctaaaggcacttaggacccagggaacatttctcacgtgcacattcccctaagagccaccagactgcttcctgccagcctgtgcttgcggcagggagccggggcagggcagaggtgaacttgaagttcaggacttgactctcccacaggtggtgagctggtggctctctggtgagctagtgtctccacagcctgtctccaaggcctcccctatgtacatttcagtgagctcactttgatttttaatcccaccacaagcacatactaattttatttatgattcaaatgtgactcgtgcctgcccatccctgtaatagatggaaggtcagccccggcttaaccacagagcactggcccttcatggctgagctcagagctctggcctcctgctcagactaaaggcacctcctctggcctcacccaagcctcttctaaaaaccatgttgaatgaatccacgttctggaaccccgaggcgggagaagtagggagctgttcgtttaagcagcatacacctaaattgggggtttaaacattaagtaggagcttggggtggaagagggacagccggctgggccacctgagcagaaggtggtaatgaaacacctcagctgggctcttgggagaccttaggaagcaggagaggcaacacctctggctactgatggtgtggcaagttcagaagaggtggtggtggggtaggcgtgatgtcagcagaagccctgcaggctgggtgggcaggacacgtggtgggggccactgaaaccaggcctaggagggagaacaagttccaaaggtgccgactggaagaagggggtaaaagtttgctttggtgagtgagaaaaggctggggcgtgtgatccatcccctcacgtttcagaacttccaggctttctacctcgactctcaccacagccagcacatacacctaggctgtttttccttcctccacacctgagggacgcagcaacagctaggatctgcattttcaggttccgagcctgacccctggaactgaccagcgctcgattgtcagccttggcctggggttttgaccttgccagtgaagtttcggttttgaagtgattaaatgtcacttcctcatcagtttcacttctggaggttttcttatcctactccctggtgccagggacgtacctgggagtttgaatcaggcccatttgagcgtggcagccgtgttgggtgaaggtccggggctcggtgaggcactgggggggttttcgggaggaaaatgaaaatgcttctagaatgagtgaaccacatcatagctctcactgttctgatttttcaatagctactttttttagcagacaccagagccacactcaaatggctaagtaggttatgacctctctggattatttttgaatgcccaactgttgcattcaagttttctgactaataagaaattaagcattcatccttcgtatcactgcagaagcaacagtgggggcacagggagggaactcttgacactgagccactaaaatatggactaattttttggacaaatcttcaaacggactgtgctactgtatttgtctcaaagctaccaagtttgtgcaataagtggaagggatgtcatccttcttcaataaatgctgaatgacattcaagctgattttctagaccactgagaaaatctttatttacaataaatttcaataaaatttgcataaatatattcccaatgtaaaaaaaaaaa

SEQ ID NO: 384578 - DNA, 2269 bp, Homo sapiens
acccagaactgctatttaacaagtgagtctatgcagaaaaaccacaccccccgcacccctccgttctttctgcatagactcacttgttaaatagcagttctgttgagagtggagttactgcagggaagctaccggacctgcctgggagccagtgaagggcgagtcagggcacgcgtcctggaggctgccagcgtccttgtagcagagcagtttcttgccgcttgggtcttcagcacgccaagccccccaccaaccctccaccccgagtgaaggcttcgctgaaattgctttggtcctcatagagcctgtggtggctacttttggtctgaaacccacttggcccaggaaagagaaaaggttgtatgttttgtgttggtgtttcctattttctgcactggaggggaggggactgttgaggttctgtcttttttcttcttttcctcttccctcttcacatcacttggcttcctttcctctctgatgaccgtccgcctatggggttctgacttcactttcctcagcgggtctccagtcccctgacccagctctaaaggcacttaggacccagggaacatttctcacgtgcacattcccctaagagccaccagactgcttcctgccagcctgtgcttgcggcagggagccggggcagggcagaggtgaacttgaagttcaggacttgactctcccacaggtggtgagctggtggctctctggtgagctagtgtctccacagcctgtctccaaggcctcccctatgtacatttcagtgagctcactttgatttttaatcccaccacaagcacatactaattttatttatgattcaaatgtgactcgtgcctgcccatccctgtaatagatggaaggtcagccccggcttaaccacagagcactggcccttcatggctgagctcagagctctggcctcctgctcagactaaaggcacctcctctggcctcacccaagcctcttctaaaaaccatgttgaatgaatccacgttctggaaccccgaggcgggagaagtagggagctgttcgtttaagcagcatacacctaaattgggggtttaaacattaagtaggagcttggggtggaagagggacagccggctgggccacctgagcagaaggtggtaatgaaacacctcagctgggctcttgggagaccttaggaagcaggagaggcaacacctctggctactgatggtgtggcaagttcagaagaggtggtggtggggtaggcgtgatgtcagcagaagccctgcaggctgggtgggcaggacacgtggtgggggccactgaaaccaggcctaggagggagaacaagttccaaaggtgccgactggaagaagggggtaaaagtttgctttggtgagtgagaaaaggctggggcgtgtgatccatcccctcacgtttcagaacttccaggctttctacctcgactctcaccacagccagcacatacacctaggctgtttttccttcctccacacctgagggacgcagcaacagctaggatctgcattttcaggttccgagcctgacccctggaactgaccagcgctcgattgtcagccttggcctggggttttgaccttgccagtgaagtttcggttttgaagtgattaaatgtcacttcctcatcagtttcacttctggaggttttcttatcctactccctggtgccagggacgtacctgggagtttgaatcaggcccatttgagcgtggcagccgtgttgggtgaaggtccggggctcggtgaggcactgggggggttttcgggaggaaaatgaaaatgcttctagaatgagtgaaccacatcatagctctcactgttctgatttttcaatagctactttttttagcagacaccagagccacactcaaatggctaagtaggttatgacctctctggattatttttgaatgcccaactgttgcattcaagttttctgactaataagaaattaagcattcatccttcgtatcactgcagaagcaacagtgggggcacagggagggaactcttgacactgagccactaaaatatggactaattttttggacaaatcttcaaacggactgtgctactgtatttgtctcaaagctaccaagtttgtgcaataagtggaagggatgtcatccttcttcaataaatgctgaatgacattcaagctgattttctagaccactgagaaaatctttatttacaataaatttcaataaaatttgcataaatatattcccaatgtaaaaaaaaaaa

SEQ ID NO: 384579 - DNA, 2190 bp, Homo sapiens
gtcgagtgaagtcctacaaattaccatgtctcctgacaagcctaatttcaggtaatgtactgatggaaacgcaggaagttcccaccctagactatcccaaagattgtgatttgatggaagcagttcatagtaatcagacccaagtcaacagagacaagatttccgtcactcgcaacccgggtttcgactgaaggcttcgctgaaattgctttggtcctcatagagcctgtggtggctacttttggtctgaaacccacttggcccaggaaagagaaaaggttgtatgttttgtgttggtgtttcctattttctgcactggaggggaggggactgttgaggttctgtcttttttcttcttttcctcttccctcttcacatcacttggcttcctttcctctctgatgaccgtccgcctatggggttctgacttcactttcctcagcgggtctccagtcccctgacccagctctaaaggcacttaggacccagggaacatttctcacgtgcacattcccctaagagccaccagactgcttcctgccagcctgtgcttgcggcagggagccggggcagggcagaggtgaacttgaagttcaggacttgactctcccacaggtggtgagctggtggctctctggtgagctagtgtctccacagcctgtctccaaggcctcccctatgtacatttcagtgagctcactttgatttttaatcccaccacaagcacatactaattttatttatgattcaaatgtgactcgtgcctgcccatccctgtaatagatggaaggtcagccccggcttaaccacagagcactggcccttcatggctgagctcagagctctggcctcctgctcagactaaaggcacctcctctggcctcacccaagcctcttctaaaaaccatgttgaatgaatccacgttctggaaccccgaggcgggagaagtagggagctgttcgtttaagcagcatacacctaaattgggggtttaaacattaagtaggagcttggggtggaagagggacagccggctgggccacctgagcagaaggtggtaatgaaacacctcagctgggctcttgggagaccttaggaagcaggagaggcaacacctctggctactgatggtgtggcaagttcagaagaggtggtggtggggtaggcgtgatgtcagcagaagccctgcaggctgggtgggcaggacacgtggtgggggccactgaaaccaggcctaggagggagaacaagttccaaaggtgccgactggaagaagggggtaaaagtttgctttggtgagtgagaaaaggctggggcgtgtgatccatcccctcacgtttcagaacttccaggctttctacctcgactctcaccacagccagcacatacacctaggctgtttttccttcctccacacctgagggacgcagcaacagctaggatctgcattttcaggttccgagcctgacccctggaactgaccagcgctcgattgtcagccttggcctggggttttgaccttgccagtgaagtttcggttttgaagtgattaaatgtcacttcctcatcagtttcacttctggaggttttcttatcctactccctggtgccagggacgtacctgggagtttgaatcaggcccatttgagcgtggcagccgtgttgggtgaaggtccggggctcggtgaggcactgggggggttttcgggaggaaaatgaaaatgcttctagaatgagtgaaccacatcatagctctcactgttctgatttttcaatagctactttttttagcagacaccagagccacactcaaatggctaagtaggttatgacctctctggattatttttgaatgcccaactgttgcattcaagttttctgactaataagaaattaagcattcatccttcgtatcactgcagaagcaacagtgggggcacagggagggaactcttgacactgagccactaaaatatggactaattttttggacaaatcttcaaacggactgtgctactgtatttgtctcaaagctaccaagtttgtgcaataagtggaagggatgtcatccttcttcaataaatgctgaatgacattcaagctgattttctagaccactgagaaaatctttatttacaataaatttcaataaaatttgcataaatatattcccaatgtaaaaaaaaaaa

SEQ ID NO: 384580 - DNA, 1730 bp, Homo sapiens
tcggaattccgggtcgaaccacgcgttcgggaacatttctcacgtgcacattcccctaagagccaccagactgcttcctgccagcctgtgcttgcggcagggagccggggcagggcagaggtgaacttgaagttcaggacttgactctcccacaggtggtgagctggtggctctctggtgagctagtgtctccacagcctgtctccaaggcctcccctatgtacatttcagtgagctcactttgatttttaatcccaccacaagcacatactaattttatttatgattcaaatgtgactcgtgcctgcccatccctgtaatagatggaaggtcagccccggcttaaccacagagcactggcccttcatggctgagctcagagctctggcctcctgctcagactaaaggcacctcctctggcctcacccaagcctcttctaaaaaccatgttgaatgaatccacgttctggaaccccgaggcgggagaagtagggagctgttcgtttaagcagcatacacctaaattgggggtttaaacattaagtaggagcttggggtggaagagggacagccggctgggccacctgagcagaaggtggtaatgaaacacctcagctgggctcttgggagaccttaggaagcaggagaggcaacacctctggctactgatggtgtggcaagttcagaagaggtggtggtggggtaggcgtgatgtcagcagaagccctgcaggctgggtgggcaggacacgtggtgggggccactgaaaccaggcctaggagggagaacaagttccaaaggtgccgactggaagaagggggtaaaagtttgctttggtgagtgagaaaaggctggggcgtgtgatccatcccctcacgtttcagaacttccaggctttctacctcgactctcaccacagccagcacatacacctaggctgtttttccttcctccacacctgagggacgcagcaacagctaggatctgcattttcaggttccgagcctgacccctggaactgaccagcgctcgattgtcagccttggcctggggttttgaccttgccagtgaagtttcggttttgaagtgattaaatgtcacttcctcatcagtttcacttctggaggttttcttatcctactccctggtgccagggacgtacctgggagtttgaatcaggcccatttgagcgtggcagccgtgttgggtgaaggtccggggctcggtgaggcactgggggggttttcgggaggaaaatgaaaatgcttctagaatgagtgaaccacatcatagctctcactgttctgatttttcaatagctactttttttagcagacaccagagccacactcaaatggctaagtaggttatgacctctctggattatttttgaatgcccaactgttgcattcaagttttctgactaataagaaattaagcattcatccttcgtatcactgcagaagcaacagtgggggcacagggagggaactcttgacactgagccactaaaatatggactaattttttggacaaatcttcaaacggactgtgctactgtatttgtctcaaagctaccaagtttgtgcaataagtggaagggatgtcatccttcttcaataaatgctgaatgacattcaagctgattttctagaccactgagaaaatctttatttacaataaatttcaataaaatttgcataaatatattcccaatgtaaaaaaaaaaa

SEQ ID NO: 384581 - DNA, 1598 bp, Homo sapiens
tcgagccggtccactctagtcaggtggtgagctggtggctctctggtgagctagtgtctccacagcctgtctccaaggcctcccctatgtacatttcagtgagctcactttgatttttaatcccaccacaagcacatactaattttatttatgattcaaatgtgactcgtgcctgcccatccctgtaatagatggaaggtcagccccggcttaaccacagagcactggcccttcatggctgagctcagagctctggcctcctgctcagactaaaggcacctcctctggcctcacccaagcctcttctaaaaaccatgttgaatgaatccacgttctggaaccccgaggcgggagaagtagggagctgttcgtttaagcagcatacacctaaattgggggtttaaacattaagtaggagcttggggtggaagagggacagccggctgggccacctgagcagaaggtggtaatgaaacacctcagctgggctcttgggagaccttaggaagcaggagaggcaacacctctggctactgatggtgtggcaagttcagaagaggtggtggtggggtaggcgtgatgtcagcagaagccctgcaggctgggtgggcaggacacgtggtgggggccactgaaaccaggcctaggagggagaacaagttccaaaggtgccgactggaagaagggggtaaaagtttgctttggtgagtgagaaaaggctggggcgtgtgatccatcccctcacgtttcagaacttccaggctttctacctcgactctcaccacagccagcacatacacctaggctgtttttccttcctccacacctgagggacgcagcaacagctaggatctgcattttcaggttccgagcctgacccctggaactgaccagcgctcgattgtcagccttggcctggggttttgaccttgccagtgaagtttcggttttgaagtgattaaatgtcacttcctcatcagtttcacttctggaggttttcttatcctactccctggtgccagggacgtacctgggagtttgaatcaggcccatttgagcgtggcagccgtgttgggtgaaggtccggggctcggtgaggcactgggggggttttcgggaggaaaatgaaaatgcttctagaatgagtgaaccacatcatagctctcactgttctgatttttcaatagctactttttttagcagacaccagagccacactcaaatggctaagtaggttatgacctctctggattatttttgaatgcccaactgttgcattcaagttttctgactaataagaaattaagcattcatccttcgtatcactgcagaagcaacagtgggggcacagggagggaactcttgacactgagccactaaaatatggactaattttttggacaaatcttcaaacggactgtgctactgtatttgtctcaaagctaccaagtttgtgcaataagtggaagggatgtcatccttcttcaataaatgctgaatgacattcaagctgattttctagaccactgagaaaatctttatttacaataaatttcaataaaatttgcataaatatattcccaatgtaaaaaaaaaaa

SEQ ID NO: 384582 - DNA, 1426 bp, Homo sapiens
atgagatcctatctgttgctgtgtcctcaggtgtggaggaaggaaaaacagcgaggatctgcattttcaggctcagagctctggcctcctgctcagactaaaggcacctcctctggcctcacccaagcctcttctaaaaaccatgttgaatgaatccacgttctggaaccccgaggcgggagaagtagggagctgttcgtttaagcagcatacacctaaattgggggtttaaacattaagtaggagcttggggtggaagagggacagccggctgggccacctgagcagaaggtggtaatgaaacacctcagctgggctcttgggagaccttaggaagcaggagaggcaacacctctggctactgatggtgtggcaagttcagaagaggtggtggtggggtaggcgtgatgtcagcagaagccctgcaggctgggtgggcaggacacgtggtgggggccactgaaaccaggcctaggagggagaacaagttccaaaggtgccgactggaagaagggggtaaaagtttgctttggtgagtgagaaaaggctggggcgtgtgatccatcccctcacgtttcagaacttccaggctttctacctcgactctcaccacagccagcacatacacctaggctgtttttccttcctccacacctgagggacgcagcaacagctaggatctgcattttcaggttccgagcctgacccctggaactgaccagcgctcgattgtcagccttggcctggggttttgaccttgccagtgaagtttcggttttgaagtgattaaatgtcacttcctcatcagtttcacttctggaggttttcttatcctactccctggtgccagggacgtacctgggagtttgaatcaggcccatttgagcgtggcagccgtgttgggtgaaggtccggggctcggtgaggcactgggggggttttcgggaggaaaatgaaaatgcttctagaatgagtgaaccacatcatagctctcactgttctgatttttcaatagctactttttttagcagacaccagagccacactcaaatggctaagtaggttatgacctctctggattatttttgaatgcccaactgttgcattcaagttttctgactaataagaaattaagcattcatccttcgtatcactgcagaagcaacagtgggggcacagggagggaactcttgacactgagccactaaaatatggactaattttttggacaaatcttcaaacggactgtgctactgtatttgtctcaaagctaccaagtttgtgcaataagtggaagggatgtcatccttcttcaataaatgctgaatgacattcaagctgattttctagaccactgagaaaatctttatttacaataaatttcaataaaatttgcataaatatattcccaatgtaaaaaaaaaaa

SEQ ID NO: 384583 - DNA, 3269 bp, Homo sapiens
agccgggccccgcccgccgcagcgcggggctcctgcgtcccgagtgcgcggcggccggaccgggcgggcggagccgggcccgcggggctgctgcggggcgatcgggccgggccgctgccgcgccatggactcccgtgtccagcctgagttccagcctcactgagtggccacccccaaagtgctgccagccgaggaagcccccagcactgaccatgtctattatggaccacagccccaccacgggcgtggtcacagtcatcgtcatcctcattgccatcgcggccctgggggccttgatcctgggctgctggtgctacctgcggctgcagcgcatcagccagtcagaggacgaggagagcatcgtgggggatggggagaccaaggaacccttcctgctggtgcagtattcggccaagggaccgtgcgtggagagaaaggccaagctgatgactcccaacggcccggaagtccacggctgagccaggatgcaaggctcctggtcctgtttgcagccggccaagaggcgctgggaggggcaaaaccatacggatgcgctgctgtctgagaggaagggctgacacttgctggcatggcctctgcgggcttcgtcatcgcatgcactgatgcccggggacctggctgtcctgggcttcccctcggcctccaggtgaggctgcccattgcaggcactgggcaggcctgaccttgctggggctcatggccctgtagcgcttttgttacttgaatgtctagctgagcctgtttttgatggagctactactgtaatgcgtgaactaacaaacctgtgaactgtaaataggcccctggaagcacgtgcttaagcccttttgctgatttttaaaaatatcatctagcgcacacgggactggtattctggctgtactaatgacaagctgagtcaagaccctggagggtcataggcttgtaaaggcccacgccacactcggcaggggtctctcatgtgtgtccatctgcgtgtatgtcaaggaagtgagatgccaatttggggtcttgaggctgaccagttggggtgcttgggtgatctctgcttcattagtcatgggtggaagaaaaaccacaccccccgcacccctccgttctttctgcatagactcacttgttaaatagcagttctgttgagagtggagttactgcagggaagctaccggacctgcctgggagccagtgaagggcgagtcagggcacgcgtcctggaggctgccagcgtccttgtagcagagcagtttcttgccgcttgggtcttcagcacgccaagccccccaccaaccctccaccccgagtgaaggcttcgctgaaattgctttggtcctcatagagcctgtggtggctacttttggtctgaaacccacttggcccaggaaagagaaaaggttgtatgttttgtgttggtgtttcctattttctgcactggaggggaggggactgttgaggttctgtcttttttcttcttttcctcttccctcttcacatcacttggcttcctttcctctctgatgaccgtccgcctatggggttctgacttcactttcctcagcgggtctccagtcccctgacccagctctaaaggcacttaggacccagggaacatttctcacgtgcacattcccctaagagccaccagactgcttcctgccagcctgtgcttgcggcagggagccggggcagggcagaggtgaacttgaagttcaggacttgactctcccacaggtggtgagctggtggctctctggtgagctagtgtctccacagcctgtctccaaggcctcccctatgtacatttcagtgagctcactttgatttttaatcccaccacaagcacatactaattttatttatgattcaaatgtgactcgtgcctgcccatccctgtaatagatggaaggtcagccccggcttaaccacagagcactggcccttcatggctgagctcagagctctggcctcctgctcagactaaaggcacctcctctggcctcacccaagcctcttctaaaaaccatgttgaatgaatccacgttctggaaccccgaggcgggagaagtagggagctgttcgtttaagcagcatacacctaaattgggggtttaaacattaagtaggagcttggggtggaagagggacagccggctgggccacctgagcagaaggtggtaatgaaacacctcagctgggctcttgggagaccttaggaagcaggagaggcaacacctctggctactgatggtgtggcaagttcagaagaggtggtggtggggtaggcgtgatgtcagcagaagccctgcaggctgggtgggcaggacacgtggtgggggccactgaaaccaggcctaggagggagaacaagttccaaaggtgccgactggaagaagggggtaaaagtttgctttggtgagtgagaaaaggctggggcgtgtgatccatcccctcacgtttcagaacttccaggctttctacctcgactctcaccacagccagcacatacacctaggctgtttttccttcctccacacctgagggacgcagcaacagctaggatctgcattttcaggttccgagcctgacccctggaactgaccagcgctcgattgtcagccttggcctggggttttgaccttgccagtgaagtttcggttttgaagtgattaaatgtcacttcctcatcagtttcacttctggaggttttcttatcctactccctggtgccagggacgtacctgggagtttgaatcaggcccatttgagcgtggcagccgtgttgggtgaaggtccggggctcggtgaggcactgggggggttttcgggaggaaaatgaaaatctactttttttagcagacaccagagccacactcaaatggctaagtaggttatgacctctctggattatttttgaatgcccaactgttgcattcaagttttctgactaataagaaattaagcattcatccttcgtatcactgcagaagcaacagtgggggcacagggagggaactcttgacactgagccactaaaatatggactaattttttggacaaatcttcaaacggactgtgctactgtatttgtctcaaagctaccaagtttgtgcaataagtggaagggatgtcatccttcttcaataaatgctgaatgacattcaagctgattttctagaccactgagaaaatctttatttacaataaatttcaataaaatttgcataaatatattcccaatgtaaaaaaaaaaa

SEQ ID NO: 384584 - DNA, 238 bp, Homo sapiens
cttttgtgcatagaaatctaaatagctagtcgtggtatgtatgctggctgccaagaaagaaggaaaattaataaatgctacagggatttggatgaactgaagggtttgtggaagaggcgggatgtgagatgatcagtgggaggtcaggacaatcaaggggcatggctggggcatctcaggcagagggaacaggcaggaattcacatgccaatgtttccagaaagcgggcagtgagatc

SEQ ID NO: 384585 - DNA, 189 bp, Homo sapiens
tttctatgcctttgcttaattaagacactgtgatagactgggcagacatttcctggcaatttatgatcagctggaggagcttaagtcttaaagcaaagctgtgaaaatatgcgttatgtttatataaaaagtagtgaaattataacttttcatgtcttagctaaagttgaaaggcacattgctgtggtt

SEQ ID NO: 384586 - DNA, 479 bp, Homo sapiens
accaggcctgtggaaggattttggtctcaacaggctagactctttccagttcagagcatagaagcacagatctcactcttcgccaccttacaccataggaattcgcttctcaggaatcagggaaagatggagactagaagctttcttcctgccttctcaataactttactatcccttggaaatcctccttgatctgggagactggctgcctggtgacaagagaagagaatgaccctagtgatatcttttaggacccagcctgagctctgcttttaagggttgctggggaagcccccactgaggcatgagaaaaggaggtgctacccagctagagtggaaagggatgaggctttctctccaagcagggagcatgcctgtcctagctaactatgggggaccagccggcaaggccaagtaggccttgcaatctaggtggcgctatttctctactttttaggtcaagttcctgcaggaacttc

SEQ ID NO: 384587 - DNA, 505 bp, Homo sapiens
gatgcttccctgtgtggtcccttgtggcatagagtgccccctcttctcaggaactgtgagtaataaactatctttttagtgatggtcattcctgacctgttgggcttcaccatacctacattatttatttatttatttatttatttatttatttatttatttatttattgtgacagagcaagactccatctcaacaacaaaaaaagaagagattaggacatagacacacacagaaatgaagaccatgtaaagacatggggagaagatggccgtctataaaccagggagagaggcttgagacagatccctcccttatgaccctcagaagaaaccaaccccacccgcaccttgatcttggccttctggcctccagaactgtaagatatgaaattgatgttgtttaaggcactcagtgtgtgagactttgttatggcagccccagcaaacgaatacagagggggcctgcttccatcccagcctgggtgacagagcaagactccatctc

SEQ ID NO: 384588 - DNA, 2400 bp, Homo sapiens
gggaaacggccagagacctcgatctaagaccggggtttggagactggcgggcctcggaacagcagagctagcggacttccggtctggccctccgctcacggccgagggaaggcgggttaggtcacttgctgaggaaagagctcaatatgtcacgtgttcctctcccaatgacgtggacctcagttccctctccagtgaagtgggcacagtgttgcccgaaaaagggtgctctggggcttgcctgagacgggacgcgtggaaatgccctgccgaatatgaatggggcgatggcctcgcgggacggagcagcccaggaaagctgaccgtgggctgggttgtggagcggaccccagggcctcggctgacttagcggccagtcgtacatagtgggtatgcggcgggcccgacgccagtcgttgtggaccactgacttgtaatctttacgacctcagtgagggtcagaagtgtccgcgagccctgtaggcgaggagaggcctggctgagggcgcacagcctggaaggggagaaactagagctggactctgcttgaccctggaggccggggccctggcttctcagtcagggtctcctccccatggcggcagagctgtctggcgttttgagccctttacaccaggggcaagagggctgcaggccagagccagcaaaagagaagaagcagagggaatgagaaacctagaaggtggaacgggaaggagggagtgaaatgggcaaaggcctccaaaaaaaacaacttccgcctcctaagtttagtgcatttaactctataaatatctattgaacacctactggatgccaggcacttttctaggcactgggcagctagcattaaacaggaggcagaaacccctgccttcaacaaaatctatgctgtgttgaataagtgatacagggaaaagctaaagatggggagagaggtgggaagggtatagaggatgggaagaaatttacaaaagaggcagggagggctttactgagaaggtgacgatgaaggaagtgaaggaagggcattgcaggccaggggctcatcgtgtgcaagggccctggggtggaagggatcatgcagtggcgtgagtgtgggttgagcagcaggtgatggtcagaggtaatacgtgagccaccacgcccggcctatagtcatgattttatttatttatttattttgagacacagtctccctctgttgcccaggctggagtgcagtggtgtgacctcagctcatcgcagtgccccctgggttcaagcgattcttgtgcctcagcctcccaagtagctgggattacaggcatgcaccaccacactcagctaatttttgtgtttttagtagagatggggtttcgctatgttggctagactggtcttgaactcctgtcatcaagtgatccgcctgcctataattttttttaagtgatggggtcctgttctctcacccaggcttgagtacagtggcatgaatatggctcactgcatccttgacctcctgggctcaagcgatcctcctgccttggcccaggagttgctcgcatgagccaccacgcccagtgtattcagattttcttcgtgtttcttttctcttccgggatcccatgcaggacaccacgtcgcatttagttgtccaccacggtttttttgtttgtttgtttttttccgagacggagtctcgctctgtcacccaggctggagtgcagtggtgtgatctcagctcactgcagcctccgcctaccgggttcacgccattctcctgcctcagcctcccgagtagctgggactacaggcgcctgcccccacgcccggctaattttttgtatttttagtagagacggggtttcaccgcgttagccaggatggtcccgatctcctgacattgtgatccacccgcctcggcctcccaaagtgctgggattacgggcatgagccaccgcgcctggcccaccacagttttaattctgaagatgcagtattaagagaggaggctaaagaagcacacacttgcttaatttttccttcgttatatgctggggatggcagcagcagcttgtggctgagtttcggtgttctgcctgacgggtgacagctgagcaggcactaggtccttgcaaaacgcaggatgctggggagggtcttcaccttgcatggtgtcctgtcccacactgctcctcaggttgggagtggtggggagttactgtttaatgtgtacagaatttctctttgggatgacaaaaatgtctggaaatggatggtggtgatggtcgtagagctttacagatttacttaatgccactgaattatacacttcaaatgattaaaatggtaaattttatttatcttttgccacaattttttttaaaacctcagtaaataaaatgcaacttaaggctt

SEQ ID NO: 384589 - DNA, 2539 bp, Homo sapiens
gggaaacggccagagacctcgatctaagaccggggtttggagactggcgggcctcggaacagcagagctagcggacttccggtctggccctccgctcacggccgagggaaggcgggttaggtcacttgctgaggaaagagctcaatatgtcacgtgttcctctcccaatgacgtggacctcagttccctctccagtgaagtgggcacagtgttgcccgaaaaagggtgctctggggcttgcctgagacgggacgcgtggaaatgccctgccgaatatgaatggggcgatggcctcgcgggacggagcagcccaggaaagctgaccgtgggctgggttgtggagcggaccccagggcctcggctgacttagcggccagtcgtacatagtgggtatgcggcgggcccgacgccagtcgttgtggaccactgacttgtaatctttacgacctcagtgagggtcagaagtgtccgcgagccctgtaggcgaggagaggcctggctgagggcgcacagcctggaaggggagaaactagagctggactctgcttgacccacagaccctccgccaggttgcctttgcgaggcaagaagcgaaggttggcgagccagctgggagtacccaccccctccatgcctggtggagtcacccaagccccagcgacaccccggcctgcccaaggtactggtgaccctggaggccggggccctggcttctcagtcagggtctcctccccatggcggcagagctgtctggcgttttgagccctttacaccaggggcaagagggctgcaggccagagccagcaaaagagaagaagcagagggaatgagaaacctagaaggtggaacgggaaggagggagtgaaatgggcaaaggcctccaaaaaaaacaacttccgcctcctaagtttagtgcatttaactctataaatatctattgaacacctactggatgccaggcacttttctaggcactgggcagctagcattaaacaggaggcagaaacccctgccttcaacaaaatctatgctgtgttgaataagtgatacagggaaaagctaaagatggggagagaggtgggaagggtatagaggatgggaagaaatttacaaaagaggcagggagggctttactgagaaggtgacgatgaaggaagtgaaggaagggcattgcaggccaggggctcatcgtgtgcaagggccctggggtggaagggatcatgcagtggcgtgagtgtgggttgagcagcaggtgatggtcagaggtaatacgtgagccaccacgcccggcctatagtcatgattttatttatttatttattttgagacacagtctccctctgttgcccaggctggagtgcagtggtgtgacctcagctcatcgcagtgccccctgggttcaagcgattcttgtgcctcagcctcccaagtagctgggattacaggcatgcaccaccacactcagctaatttttgtgtttttagtagagatggggtttcgctatgttggctagactggtcttgaactcctgtcatcaagtgatccgcctgcctataattttttttaagtgatggggtcctgttctctcacccaggcttgagtacagtggcatgaatatggctcactgcatccttgacctcctgggctcaagcgatcctcctgccttggcccaggagttgctcgcatgagccaccacgcccagtgtattcagattttcttcgtgtttcttttctcttccgggatcccatgcaggacaccacgtcgcatttagttgtccaccacggtttttttgtttgtttgtttttttccgagacggagtctcgctctgtcacccaggctggagtgcagtggtgtgatctcagctcactgcagcctccgcctaccgggttcacgccattctcctgcctcagcctcccgagtagctgggactacaggcgcctgcccccacgcccggctaattttttgtatttttagtagagacggggtttcaccgcgttagccaggatggtcccgatctcctgacattgtgatccacccgcctcggcctcccaaagtgctgggattacgggcatgagccaccgcgcctggcccaccacagttttaattctgaagatgcagtattaagagaggaggctaaagaagcacacacttgcttaatttttccttcgttatatgctggggatggcagcagcagcttgtggctgagtttcggtgttctgcctgacgggtgacagctgagcaggcactaggtccttgcaaaacgcaggatgctggggagggtcttcaccttgcatggtgtcctgtcccacactgctcctcaggttgggagtggtggggagttactgtttaatgtgtacagaatttctctttgggatgacaaaaatgtctggaaatggatggtggtgatggtcgtagagctttacagatttacttaatgccactgaattatacacttcaaatgattaaaatggtaaattttatttatcttttgccacaattttttttaaaacctcagtaaataaaatgcaacttaaggctt

SEQ ID NO: 384590 - DNA, 711 bp, Homo sapiens
atctatcaaatcttattgtactttttaatggaaaatgttcatatttatggtgttaagataatagtcttatgttggcatagcatttttctttttacaaagcttccttcttccctcccctcccctcccctcccctcttcttcccttcccttccctccttctttccttccttctctttattaaattgagatggagtctcactctgtcacccatgctggagtgcagtggcacaatcttggctcactgcaacctccacctcccaggttcaagtaattctcctgcctcagtctcccgagtaggtgggactgcaggtgtgcagcaccatgcctggctaatttttgtatgtttaggagagatgaggtttcaccgtattgctcaggctgttctcaaactcctgacctgaggtgacctgcctgcctcggcctcccgaagtgctgggattacagtcgtgagccactgcgcccggccttacaaagcactttcatgggtgctgctcattcagtggtgtggtttagatgtcttttgtattcacctgttactttcattttttttttgtttgagacggagttttgctcttgtttccaggctgcagtgcaatggtgcgatctcagctcaccacaacctctgcctcccgggttcaagcgattctcctgcctcagcctcactagtagctgggattacaggtgcccgccaccatgcccggctaattttttt

SEQ ID NO: 384591 - DNA, 449 bp, Homo sapiens
tcccagctactcgggaggctgaggcaggagaatcgcttgaacccgggaggtggaggttacagtgagccgagattgcgccattgcgctccagcttggcgacagagcaagactccacctcaaaaaaaaaaaaaaataaaccacaacagactgtcatgataggttcacttcaccctgtggttaatgagttaatccatataaagcagtggtctccaacctttttggcaccagggaccagttccgtggaagacattctgaaaggggctggggattgtgtagggggttgtgtgttgtgccactccagcctgggcaacatgagcaaaagtctgtctaaaaaaaaaaaaaattactgcactatgccagattgttcaataaaagccatagagattatgaaaaattggagttaggtgtgcaaaaactgcattagttactcatcaccaaaaaaaaaaaaa

SEQ ID NO: 384592 - DNA, 769 bp, Homo sapiens
gggagaccactgggagcagctcatccctggcccctgctttgcacgtggcagagccctcctgcacagccagctcctcacccccgtggcgcgcacccccaacgaaagtggctgtgatgagccccacagccctggcgttgcccactccttctgccacgtcccagggcccacgggcccacatggtgtgtgacatcccagtgccccgcgtgcaggcaaggcacacctgaagcgtgccatcctggggcaggaggaggcgctgcggctgcacgccctgtgccgcgtcctgcgcgaggtggacctgcttcgggctgtgatctcccagacgctgcagcgctcactggccaagtatgcggagctcgaccgtgaggatgacttctgtgaggctgccgaggccccggacatccagcgtgagcagccagggcctgtctgggtggctgcatccctggccagggtgggggccttcgtcctggagaaagggaggctgattgcattaaagatgcagtcaccacgatgaattaaacagcagtagcactttccaggccacgatcacagggacccacagagctgctgggcccttcaggggcctgggggatgaccacgctcctcagcacctccctccctgcactggcctcctaccctgaggggaagcccacagacccaggacaggcatggctgggacttcagggagggattttgggagccacttggggcagagggggccgtgtgttcagggcacacctggggcagctcctcccaccattgcagagtggcc

SEQ ID NO: 384593 - DNA, 473 bp, Homo sapiens
cttcaagccttcttttcctccattatgaaatggggaaagtaatagtatctacttacagtagatatcccatgagcatttgttggaaaaaattgtgtctactaagtgagaatcttaataagtaaaatgaagttacatttattgatctcctcctctatgccaggcacggagcttagtgtttcacatacattattttcatttctacaacaactgtcaaggtgggggaaacaagcagttataatacaacgtggtaagagctatactagtggcacctgcaaactgtgatgagaacacagtggggaggcattagctttttctagggaaccccatagagacttcacagagaagatagggaagatttcataacaacaataataataacagcagtagctaacagccatggagaactcattcagcaccaggccctgagccacaatacacgccttcagtcaacgagcactccctgagccttcctc

SEQ ID NO: 384594 - DNA, 980 bp, Homo sapiens
tgggtgtgatctcagctcactgcaacctcctgggttcaagtgactctccggcctctgcctcccgagtagctgagattacaggcacccatcacaatacctggcaaatttttgtatttaaaaatacagccaggctcggtggctcacgcctgtaatcccagcactttgggaggccaaggctggcggatcacctgaggtcaggagttcgagaccagcctgaccaacatggtgaaaccccgtctctactttaaaatacagaattagctgggcgtggtggctcatgtctgtaatcccagcactttgggaggccaaggtgggtagattgcctgaggtcagttcgagaccagcctgaccaatatggtgaaacctcatctctactaaaaatacaaaaattagctgggcatggtggtatgctcctgtagtcccagctactcaggaggctgaggtgggagaattgtttgaattcgggaggtggatgttgcagtgagctgagatcgcgccactgcactccagccgggcgacagagcgacactccgtctcaaaaaaacaaaaacatacaattttaaaaatttagtcttagcttttcaataagagggattaaaatatattattttagtctgctcagcatccattctcccttccttttggcaaagaaccctaaattttttgggggatgatatagtttggctgtgtccccaacccaaatctcatcctgaattgtagctcctataattcccatgtgtcatgggagggacctggtgggaggtaattgaatcatgggggtggttaccttcatgctgttctcatgatagtgagtgagttctcaggagatctgatggtttcataaggggcttttccccttttgctttgcacttctccttcctgccatcatgtgaagaaggatgtatttgcttccccttctgccatgattgtaagcttcctgaggcctccccagccatacacaactgtgagtcaattaaacc

SEQ ID NO: 384595 - DNA, 416 bp, Homo sapiens
aatctgaaatttattccactgaaaaatatatggctgtatgtggaaatgctaactatgaggaaataataaaaaataatctaaatattaacacaaacatattaaaataatgtactcaacattataatgttgcaattaaaatataaagtattagtaactgtagtattgttagtagataaatgcctcacttgttatacctgcttatgagcaataatcatggaagtgatttgtgtttgttttttttttagtcaacttaaaatgtggaaattcaactatgtttgctttgccagctagcacctgttagaataatttaggagttttggtggcaggcctatagtctcagatgctgagaggctgaggtgggaggagcccaggagtttgagtccaggagtttgagtccagcctggcaacatagcaag

SEQ ID NO: 384596 - DNA, 458 bp, Homo sapiens
agcagggattctaaacactttttctgtatgaattcactaaatcctcatagccaccctaagacagagctactacttttatccccattttcatatgagtaaactgaggcacagcaaagttaagtaacttggctaataaccagaggatgggaagaagaggagctgctgtggagaccttgccattttggctccaggctttggctcttaatcccttagacgagcctcttttaagtctcctccctgctcattgtcctctcagtttcttgccaggcacggtggcttatgcctataatcccagctctttgggaggccgagacatgtggatcacttgaggtcaggagttctacaccagcctggccaacatggtgaaaccctatctctactaaaaatacaataattagccgggtatggtggtgcatgcctgtaatcccagctactcgggaggctgaagcatgagaatt

SEQ ID NO: 384597 - DNA, 4207 bp, Homo sapiens
gggcaatcatggtgccgctggggaggggagaagctgctgctgccgccgttgccgggagccgcggagacaagtcattacgttttcatttctcacaactgggctgagcacaactgaaccatgggggaacacagtccagacaacaacatcatctactttgaggcagaggaagatgagctgacccccgatgataaaatgctcaggtttgtggataaaaacggactggtgccttcctcatctggaactgtttatgataggaccactgttcttattgagcaggaccctggcactttggaggatgaagatgacgacggacagtgcggagaacacttgccttttctagtagggggtgaagagggctttcacctgatagatcatgaagcaatgtcccagggttatgtgcagcacattatctcaccagatcagattcatttgacaataaaccctggttccacacccatgccaagaaatattgaaggtgcaaccctcactctgcagtcggaatgtccggaaacaaaacgtaaagaagtaaagcggtaccaatgtacctttgagggctgtccccgcacctacagcacagcaggcaacctgcgaacccaccagaagactcaccgaggagagtacacctttgtctgtaatcaggagggctgtggcaaagccttccttacctcttacagcctcaggatccacgtgcgagtgcacacgaaggagaagccatttgagtgtgacgtgcagggctgtgagaaggcattcaacacactgtacaggctgaaagcacatcagaggcttcacacagggaaaacgtttaactgtgaatctgaaggctgcagcaaatacttcaccacactcagtgatctgaggaagcacattcgaactcatacaggggaaaagccatttcggtgcgatcacgatggctgtggaaaagcatttgcagcaagccaccaccttaaaactcacgttcgtacacatactggtgaaagacccttcttctgccccagtaatggctgtgagaaaacattcagcactcaatacagtctcaaaagtcacatgaaaggtcatgataacaaaggacactcatacaatgcacttccacaacacaatggatcagaggatacaaatcactcactttgtctaagtgacttgagccttctgtccacagattctgaattgcgagaaaattccagtacgacccagggccaggacctcagcacaatttcaccagcaatcatctttgaatcaatgttccagaattcagatgatacggcaattcaggaagatcctcaacagacagcttccttgactgaaagttttaatggtgatgcagagtcagtcagtgatgttccgccatccacaggaaattcagcatctttatctcttccacttgtactgcaacctggcctctccgagccaccccagcctctactacctgcctcagctccgtctgctcctccgcctgctccctccctaggacctggctcccagcaagctgcatttggcaacccccctgctctcttacaacctccagaagtgcctgttccccacagcacacagtttgctgctaatcatcaagagtttcttccgcacccccaggcaccgcagcccattgtaccaggactttctgttgttgctggggcttctgcatcagcagcggcagtggcatcagctgtggcagcaccagccccaccacaaagtactactgagcccctgccagccatggtccagactctgcccctgggtgccaactctgtcctaactaataatcccacaataaccatcaccccaactcccaacacagctatcctgcagtccagcctagtcatgggagaacagaacttacaatggatattaaatggtgccaccagttctccacaaaaccaagaacaaattcagcaagcatctaaagttgagaaggtgttttttaccactgcagtaccagtagccagtagcccagggagctctgtccagcagattggcctcagtgttcctgtgatcatcatcaaacaagaagaggcatgtcagtgtcagtgtgcatgccgggactctgcaaaggagcgggcatccagcaggagaaagggctgctcctccccaccccctccagagccgagcccccaggctcctgatgggcccagcctgcagctcccagcgcagactttctcttcagcccctgttcccgggtcatcatcctctaccttgccctcctcctgtgagcaaagccgacaagcagagactccttcagaccctcagacagaaacattaagtgccatggatgtgtcagagtttctatccctccagagcctggacaccccgtccaatctgattcccattgaagcactactgcagggggaggaggagatgggcctcaccagcagcttctccaagtgaagggcccatgtgtgctcacctctgggaaaagcgggtgagcaggaggcatgaggtacaatgcctgccatcatgggtcagaaatttgaaggatgaagaaatctactgtttgaaatcctcacctttcagacgtattttctttattcacatcccaggagcatccattttaaggaactattctttggaaaaaaacaaaaaacaaaaaaaacaacaaaaaaagctaagttataagtgaactgtttggctgcactgtatgtcacttttgcttgttgtcatgtgaacttggaaactaaggttactcgtgtgcataaaaattctaaatgaaagggtgtggtttccatcaatctgatgctgcccatcgcttgcactggggtctttgtggatcgggcaggagttttcagtgtgttgggtgttgctccttcctatgtgtcttttgaatctgaggctgacatttgcttggaaggccagacccttgctccatcagagagggcagtggcaaaggccagtgaggcagctgtgagttggacagggttcaggtgagatggtgttgtcatttgtgcttagtgttggtggtgctcagggtggataacacgggtcgttctgcagcccgcttcagcacaaataggcagcttaaggcctggctcacaggctgtggggttgatctggctctgcagaggccctaggcagcttgttgactgctgtctgttgatgacgtgtgtgcaaagcaggctctagcaacatgatcactgtccttgccttcctggttctttctctcggttggttgccagggcttgcagatcgcagtgaattttccttggggaacatcgctgttttgtcctagagtgaacttgtggcttatggccagtgctgtttggtggtctgccttctttttaatggtattttcttcctcagagcagaagggctgcattttgcttatcagaagaaggtgcagatttaagggaattcatatgaggtggcatgtaattggcaggccaggtgtcctggttccaggttccagccaggctttgggttgccccctccatctctgcccccctctggattttgcatacagcctcatacagtgcaaacaaggatgtgacttgctcagcttagtcatgtgatttatttaaaaaaaaaaaaaaaagaaacacaaaacgatgatcttctactcagggtatagcaaaacaaaaaaattccctttccaccaaaaagcctgaaatgttgcaataagttatctcatttggaatgtttcattaagttgtgttataggaaaaaattgtgtgtgtgtgttatagaattatatccatatgtctgcctttggctccaagtcattgcctcttaaaataaaagatacaatccatactagcatgaaaagtttccctcaacaggctatattaacatagtcatgagtgctgaccaaactcaccgagctcagaggccaggcatggcctgaggtgcagaataggcctctgcctcccaagagccctttccttgccctgagcaaggagtggtgttccacaaacaaggctgctcttctaagccaacagtgtcaggcaggaagcagccataattttgccttgcattttcattccctaatgtaaagggatctgcattggtcactctcctgttctctgagccattgctcagggccagccaagatattattgagaacagataatttaccttggagccagaggccctccctgcctttagcaaggatgttcagggacagacaaagagggcagtggtggtgaatgttgttactgccatgaggagaaatggcagtaagaaatcttaactacaagcagccaatttctcattccaggaccct

SEQ ID NO: 384598 - DNA, 470 bp, Homo sapiens
aacttcccattagtcagaaagtatagtcactagtcatgtcaaaaaaaggatgtttagtctcttttccagaaaagccttaagacacttttttaaatggttagaactatattgggtcttcacatttaggaagtgaggttgatggtgaaacgtgatactttgaccagaggtgtcactaaatgaaaatgacagaaagctggcctgctagctatgaagagatcagctcagtggacttcagctgtgttttgtttagcccataatgactgtttttgtggctcatctaaggcttgggatatgtatatatatttctatttctttttcttgccagcttccttgactgaaagttttaatggtgatgcagagtcagtcagtgatgttccgccatccacaggaaattcagcatctttatctcttccacttgtactgcaacctggcctctccgagccaccccagcctctactacctgcctcagc

SEQ ID NO: 384599 - DNA, 4202 bp, Homo sapiens
gttgtttgtgcctgattgaggaatagcccttccacccagaaggttgaaacatctgttctagacaagtcattacgttttcatttctcacaactgggctgagcacaactgaaccatgggggaacacagtccagacaacaacatcatctactttgaggcagaggaagatgagctgacccccgatgataaaatgctcaggtttgtggataaaaacggactggtgccttcctcatctggaactgtttatgataggaccactgttcttattgagcaggaccctggcactttggaggatgaagatgacgacggacagtgcggagaacacttgccttttctagtagggggtgaagagggctttcacctgatagatcatgaagcaatgtcccagggttatgtgcagcacattatctcaccagatcagattcatttgacaataaaccctggttccacacccatgccaagaaatattgaaggtgcaaccctcactctgcagtcggaatgtccggaaacaaaacgtaaagaagtaaagcggtaccaatgtacctttgagggctgtccccgcacctacagcacagcaggcaacctgcgaacccaccagaagactcaccgaggagagtacacctttgtctgtaatcaggagggctgtggcaaagccttccttacctcttacagcctcaggatccacgtgcgagtgcacacgaaggagaagccatttgagtgtgacgtgcagggctgtgagaaggcattcaacacactgtacaggctgaaagcacatcagaggcttcacacagggaaaacgtttaactgtgaatctgaaggctgcagcaaatacttcaccacactcagtgatctgaggaagcacattcgaactcatacaggggaaaagccatttcggtgcgatcacgatggctgtggaaaagcatttgcagcaagccaccaccttaaaactcacgttcgtacacatactggtgaaagacccttcttctgccccagtaatggctgtgagaaaacattcagcactcaatacagtctcaaaagtcacatgaaaggtcatgataacaaaggacactcatacaatgcacttccacaacacaatggatcagaggatacaaatcactcactttgtctaagtgacttgagccttctgtccacagattctgaattgcgagaaaattccagtacgacccagggccaggacctcagcacaatttcaccagcaatcatctttgaatcaatgttccagaattcagatgatacggcaattcaggaagatcctcaacagacagcttccttgactgaaagttttaatggtgatgcagagtcagtcagtgatgttccgccatccacaggaaattcagcatctttatctcttccacttgtactgcaacctggcctctccgagccaccccagcctctactacctgcctcagctccgtctgctcctccgcctgctccctccctaggacctggctcccagcaagctgcatttggcaacccccctgctctcttacaacctccagaagtgcctgttccccacagcacacagtttgctgctaatcatcaagagtttcttccgcacccccaggcaccgcagcccattgtaccaggactttctgttgttgctggggcttctgcatcagcagcggcagtggcatcagctgtggcagcaccagccccaccacaaagtactactgagcccctgccagccatggtccagactctgcccctgggtgccaactctgtcctaactaataatcccacaataaccatcaccccaactcccaacacagctatcctgcagtccagcctagtcatgggagaacagaacttacaatggatattaaatggtgccaccagttctccacaaaaccaagaacaaattcagcaagcatctaaagttgagaaggtgttttttaccactgcagtaccagtagccagtagcccagggagctctgtccagcagattggcctcagtgttcctgtgatcatcatcaaacaagaagaggcatgtcagtgtcagtgtgcatgccgggactctgcaaaggagcgggcatccagcaggagaaagggctgctcctccccaccccctccagagccgagcccccaggctcctgatgggcccagcctgcagctcccagcgcagactttctcttcagcccctgttcccgggtcatcatcctctaccttgccctcctcctgtgagcaaagccgacaagcagagactccttcagaccctcagacagaaacattaagtgccatggatgtgtcagagtttctatccctccagagcctggacaccccgtccaatctgattcccattgaagcactactgcagggggaggaggagatgggcctcaccagcagcttctccaagtgaagggcccatgtgtgctcacctctgggaaaagcgggtgagcaggaggcatgaggtacaatgcctgccatcatgggtcagaaatttgaaggatgaagaaatctactgtttgaaatcctcacctttcagacgtattttctttattcacatcccaggagcatccattttaaggaactattctttggaaaaaaacaaaaaacaaaaaaaacaacaaaaaaagctaagttataagtgaactgtttggctgcactgtatgtcacttttgcttgttgtcatgtgaacttggaaactaaggttactcgtgtgcataaaaattctaaatgaaagggtgtggtttccatcaatctgatgctgcccatcgcttgcactggggtctttgtggatcgggcaggagttttcagtgtgttgggtgttgctccttcctatgtgtcttttgaatctgaggctgacatttgcttggaaggccagacccttgctccatcagagagggcagtggcaaaggccagtgaggcagctgtgagttggacagggttcaggtgagatggtgttgtcatttgtgcttagtgttggtggtgctcagggtggataacacgggtcgttctgcagcccgcttcagcacaaataggcagcttaaggcctggctcacaggctgtggggttgatctggctctgcagaggccctaggcagcttgttgactgctgtctgttgatgacgtgtgtgcaaagcaggctctagcaacatgatcactgtccttgccttcctggttctttctctcggttggttgccagggcttgcagatcgcagtgaattttccttggggaacatcgctgttttgtcctagagtgaacttgtggcttatggccagtgctgtttggtggtctgccttctttttaatggtattttcttcctcagagcagaagggctgcattttgcttatcagaagaaggtgcagatttaagggaattcatatgaggtggcatgtaattggcaggccaggtgtcctggttccaggttccagccaggctttgggttgccccctccatctctgcccccctctggattttgcatacagcctcatacagtgcaaacaaggatgtgacttgctcagcttagtcatgtgatttatttaaaaaaaaaaaaaaaagaaacacaaaacgatgatcttctactcagggtatagcaaaacaaaaaaattccctttccaccaaaaagcctgaaatgttgcaataagttatctcatttggaatgtttcattaagttgtgttataggaaaaaattgtgtgtgtgtgttatagaattatatccatatgtctgcctttggctccaagtcattgcctcttaaaataaaagatacaatccatactagcatgaaaagtttccctcaacaggctatattaacatagtcatgagtgctgaccaaactcaccgagctcagaggccaggcatggcctgaggtgcagaataggcctctgcctcccaagagccctttccttgccctgagcaaggagtggtgttccacaaacaaggctgctcttctaagccaacagtgtcaggcaggaagcagccataattttgccttgcattttcattccctaatgtaaagggatctgcattggtcactctcctgttctctgagccattgctcagggccagccaagatattattgagaacagataatttaccttggagccagaggccctccctgcctttagcaaggatgttcagggacagacaaagagggcagtggtggtgaatgttgttactgccatgaggagaaatggcagtaagaaatcttaactacaagcagccaatttctcattccaggaccct

SEQ ID NO: 384600 - DNA, 265 bp, Homo sapiens
gccctcactcgctaccagatgctcttcaggcacatgttctactgcaagcacgtggagcggcagctctgcagcgtctggatcagcaacaaaaccgccaagcagcactcgctgcactccgcccagtggtttgctggggctttcactctgcggcagcgaatgctcaacttcgtccagaatattcaatactacatgatgtttgaagtgatggaaccgacctggcacatcctggagaaaaacctgaaatccgtgagttttagctccacag

SEQ ID NO: 384601 - DNA, 283 bp, Homo sapiens
aagatttttcaaggaattttcttctctataatataattaatgatctcctacttggacttctgtaaaagattacagtaaatcgtgaagtcttatggaggtttttgcgggagtgggtgggagtagttgtctattactgcgtctttgaatctaaaacagtaccaggatggggccagagggcatctgggctcttcacggattatataggcttgaccttgttagtactgcatgctgtcagagcctcatccaaaaaccactgagatgtttttgtgcaggggaaataaaa

SEQ ID NO: 384602 - DNA, 459 bp, Homo sapiens
aaagagcgccggaccgcttagggaacggcaaggaggcagaggagcagatgaggttggtcactttggcttttcctccgatttgtttaattctcatgttgtatttccctcctaaatgtcagctttggggctgtagctctgcttgtctttactgcagtgacccccctgcaacactgtctggcacacactaggcgctcaaacattatttgttgaatatgtgaacgaagggatgcagagatggttggaaccctccagtcgggcctgggtgccaggtcctgggggcagtcgttccagggatagactgaggcctcggcagcccctggaacctcatttcggtccttgtcccggagtcgcacgtcccgggatagcgccgctgcagcgggtgccgcccgtgcatcgcgtcggggggatttccgacggagcccggagtccaggggcaggaccgcccgcgccccgcccggc

SEQ ID NO: 384603 - DNA, 773 bp, Homo sapiens
cagcgttagccgccgcgcgagggcgcccgggaggctggggccggaaagcggaaccgagagcgctttccgccgtgcggcgatgaacctccgggaaagacgctgggaggcccagggatgcccggcgcaactggacgctcatcgggagtcacggggtcggccctcaggggaacggggactatccgtatcaactcggtgtttgttcgttttcttcaccttgcggtttgtgccctctccacatttcctctctgtgtctaccattctcctgggggacgtggcaaaccgtgagccgctgcgtttgagttttgggaaaccctgcggaaacgccctggcgccggtggttttgcgcgtcctaccctgtgtcacctcagggttatgatctggcccctggcaaggctccccaagtgtgatgcctccccccgtccagatgactgcattttgaggatggagtcagtctggtggcattttttgcttaagtaaacaattgtaaccgtttgtgtagcatcagcgttcaacagctgcctgtgcaaatcgaaaaaagcgaaactttggaaactaggaagcatcagatgaataattctgaagacttgatgtcaacgggagtatcttgtttttaaacttttggttttctgttctggagacaaacagttcatatgcactaaagaaaaaagtgtcattatttcagatgctcattgccagcaaagagaactgtattgcaagtcaggcttcactcccagtattttctgaatgtttcaataaaatgaaatatatacgtc

SEQ ID NO: 384604 - DNA, 585 bp, Homo sapiens
cacccagctaatttttgtatttttttttagtagagacggggtttcaccatgttggccacattgatctcgatctcctgacctcatgatctgcccacctctctttgcatttgaagttcatgacgaaattaaaatattttaaaaatctaagtatgtaataagaaataaaaactggtttttatttaggaatttatgaaaattagtcttgataatgtatactgtttattattaagtagggtcttaggtttctaagtgtatttatgaaaaccttttatagtaaaaagtcctcaatatatcttttattttaatgtaaccattaattcatttgtttagtaaccatttagaccaaactgtgactcaaaagaataagacaaattcactgttaaaaacctcacttactaccaggagataaagtaggcaagccagtggctgagaaaatgtagtgtggttcttttgaatatgtgacattgaacgtcccaaggatgttggacaccatcctttatatggagcttggtaatgtaatttggtaatatagtttgggaatgtaatttggttcaaggtgatggtggggcttgagggtaagaccaa

SEQ ID NO: 384605 - DNA, 447 bp, Homo sapiens
tgctcagagtatttgatataacttggccaattggtttctgcgtctttcatttccacagcattcttgctgaatagtcagatttctaccatatttccctaatttctcttatacctctctccacttgaaactatttacaagcatgactagcataatcttgtaaatatactttggtcatgttaccacatcataaatcttcactggttcttgttcattagaaggtaaattctaaagttcttggcttgctattcaaggttcctccttcctgttttgcaagctacttttttatccttatcatctctgcactacagatcctctgcttctaccaggattataccagagtgctagaattccttgtccctcagggattacgactgaaagaaatttaagaaagttgaaaaaattgaggagtgacttttttctaggttaaatagcataatcaggtctcct

SEQ ID NO: 384606 - DNA, 1221 bp, Homo sapiens
tcaattttatttctgtgtatgtaaaaagaaaggcttcatatctaaaataactttacctaagtatacaaagttgtttcagggtaacaaaagagcgaaaaacaaaactgtaaaagggccaaggacagaggaatgggcaaatgaaggaagggcggagaggcagaacaagagctgaaggagaaaattctgtggaggggtgtgggaaaggggtggagctggcaaccttgccttaaaagctgagtgatagcccatactaaagactggttgagccgggtagggaaagcagcctaaagcccgggacaggcacacaggcccaggtgtgtaggccacagcagccgcagtcctgaaaggctgcaacacccagacctccaggagagaccaggcccaggatgcctcgcctgttcttgttccacctgctagaattctgtttactactgaaccaattttccagagcagtcgcggccaaatggaaggacgatgttattaaattatgcggccgcgaattagttcgcgcgcagattgccatttgcggcatgagcacctggagcaaaaggtctctgagccaggaagatgctcctcagacacctagaccagtggcagaaattgtaccatccttcatcaacaaagatacagaaactataattatcatgttggaattcattgctaatttgccaccggagctgaaggcagccctatctgagaggcaaccatcattaccagagctacagcagtatgtacctgcattaaaggattccaatcttagctttgaagaatttaagaaacttattcgcaataggcaaagtgaagccgcagacagcaatccttcagaattaaaatacttaggcttggatactcattctcaaaaaaagagacgaccctacgtggcactgtttgagaaatgttgcctaattggttgtaccaaaaggtctcttgctaaatattgctgagatgaagctaattgtgcacatcttgtctaattttcacacatagtcttgatgacatttcactgatgcttctgtcaggtcccactaattattagaatataagaaatctttattaatgtttagatttttcatttggtgtgtaagaaaatattctttgtatgattgtagtttctgtaaatgacactttctatgctgaagtctttttgtctttttattaacagtataattgtgttgattctttttaatgctgttaacttaaaattacaataaaacctttgcc

SEQ ID NO: 384607 - DNA, 1285 bp, Homo sapiens
tcaattttatttctgtgtatgtaaaaagaaaggcttcatatctaaaataactttacctaagtatacaaagttgtttcagggtaacaaaagagcgaaaaacaaaactgtaaaagggccaaggacagaggaatgggcaaatgaaggaagggcggagaggcagaacaagagctgaaggagaaaattctgtggaggggtgtgggaaaggggtggagctggcaaccttgccttaaaagctgagtgatagcccatactaaagactggttgagccgggtagggaaagcagcctaaagcccgggacaggcacacaggcccaggtgtgtaggccacagcagccgcagtcctgaaaggctgcaacacccagacctccaggagagaccaggcccaggatgcctcgcctgttcttgttccacctgctagaattctgtttactactgaaccaattttccagagcagtcgcggccaaatggaaggacgatgttattaaattatgcggccgcgaattagttcgcgcgcagattgccatttgcggcatgagcacctggagcaaaaggtctctgagccaggaagatgctcctcagacacctagaccagtggcaggtgattttattcaaacagtctcactgggaatctcaccggacggagggaaagcactgagaacaggaagctgcttcacccgagagttccttggtgccctttccaaattgtgccatccttcatcaacaaagatacagaaaccataaatatgatgtcagaatttgttgctaatttgccacaggagctgaagttaaccctgtctgagatgcagccagcattaccacagctacaacaacatgtacctgtattaaaagattccagtcttctctttgaagaatttaagaaacttattcgcaatagacaaagtgaagccgcagacagcagtccttcagaattaaaatacttaggcttggatactcattctcgaaaaaagagacaactctacagtgcattggctaataaatgttgccatgttggttgtaccaaaagatctcttgctagattttgctgagatgaagctaattgtgcacatctcgtataatattcacacatattcttaatgacatttcactgatgcttctatcaggtcccatcaattcttagaatatctaagaatctttgttagatattaggtcccatcaattcttagaatatctaaacatctttgttgatgtttagatttttttatttgatgtgtaagaaaatgttctttgtgtgattaaatgacacatttttttgctgaaaagccttt

SEQ ID NO: 384608 - DNA, 1040 bp, Homo sapiens
cttaaagtaatatctttttcaagggttactattacaactcataatatcataaatcatagcaatggaagaaaatgacttaactaagaagaatccaagaaaatgaccactagctgtggtcaaactgttttcagtgacttacatgacttcagaaagatgacagattaatgtcagggagagtcaaaagtactatgataaaagcactgaggggatcatgaagagagacgagagaggaccaatggggtaaagcagagccttggtaaaattatggtactttaaggtgtccaactgtaagtaagctaagtgtttagatattaggatgcttgcttattttgtttcaatgtttaatttatactgaggcaatgcttttttgtctatgcaaacattcatagtttttctgagtgctctttgacatgaatataccctcacatacacctttttttttaaatttaacagaaattgtgccatccttcatcaacaaagatacagaaaccataaatatgatgtcagaatttgttgctaatttgccacaggagctgaagttaaccctgtctgagatgcagccagcattaccacagctacaacaacatgtacctgtattaaaagattccagtcttctctttgaagaatttaagaaacttattcgcaatagacaaagtgaagccgcagacagcagtccttcagaattaaaatacttaggcttggatactcattctcgaaaaaagagacaactctacagtgcattggctaataaatgttgccatgttggttgtaccaaaagatctcttgctagattttgctgagatgaagctaattgtgcacatctcgtataatattcacacatattcttaatgacatttcactgatgcttctatcaggtcccatcaattcttagaatatctaagaatctttgttagatattaggtcccatcaattcttagaatatctaaacatctttgttgatgtttagatttttttatttgatgtgtaagaaaatgttctttgtgtgattaaatgacacatttttttgctgaaaagccttt

SEQ ID NO: 384609 - DNA, 916 bp, Homo sapiens
tcaattttatttctgtgtatgtaaaaagaaaggcttcatatctaaaataactttacctaagtatacaaagttgtttcagggtaacaaaagagcgaaaaacaaaactgtaaaagggccaaggacagaggaatgggcaaatgaaggaagggcggagaggcagaacaagagctgaaggagaaaattctgtggaggggtgtgggaaaggggtggagctggcaaccttgccttaaaagctgagtgatagcccatactaaagactggttgagccgggtagggaaagcagcctaaagcccgggacaggcacacaggcccaggtgtgtaggccacagcagccgcagtcctgaaaggctgcaacacccagacctccaggagagaccaggcccaggatgcctcgcctgttcttgttccacctgctagaattctgtttactactgaaccaattttccagagcagtcgcggccaaatggaaggacgatgttattaaattatgcggccgcgaattagttcgcgcgcagattgccatttgcggcatgagcacctggagcaaaaggtctctgagccaggaagatgctcctcagacacctagaccagtggcaggtatttccagcagtttgctgagaagaagactttttgaagatcacgatggcccttcatttcttgtttgattcttctggataaagcagcatgataacctgaaaggaaagcataaacatctggagcagttccaaaggcatctggggagagtcagcactggaggcttgaataaaagtgtttacttcttcttattctccaaatctcaatgaaataataatttaaaaaaaaaactagaaaaaaaacagatccaatgtagcaccgactgtcattgggatcaggtatgagttgcctgttgttgacagatcatgggaaacaataagaa

SEQ ID NO: 384610 - DNA, 801 bp, Homo sapiens
ctggtccctaaagtttgggcttttcctttgccaggtgattttattcaaacagtctcactgggaatctcaccggacggagggaaagcactgagaacaggaagctgcttcacccgagagttccttggtgccctttccaaattgtaccatccttcatcaacaaagatacagaaactataattatcatgttggaattcattgctaatttgccaccggagctgaaggcagccctatctgagaggcaaccatcattaccagagctacagcagtatgtacctgcattaaaggattccaatcttagctttgaagaatttaagaaacttattcgcaataggcaaagtgaagccgcagacagcaatccttcagaattaaaatacttaggcttggatactcattctcaaaaaaagagacgaccctacgtggcactgtttgagaaatgttgcctaattggttgtaccaaaaggtctcttgctaaatattgctgagatgaagctaattgtgcacatcttgtctaattttcacacatagtcttgatgacatttcactgatgcttctgtcaggtcccactaattattagaatataagaaatctttattaatgtttagatttttcatttggtgtgtaagaaaatattctttgtatgattgtagtttctgtaaatgacactttctatgctgaagtctttttgtctttttattaacagtataattgtgttgattctttttaatgctgttaacttaaaattacaataaaacctttgccactttaaccatacataataacaatacagtacctaacaacagt

SEQ ID NO: 384611 - DNA, 1263 bp, Homo sapiens
tcaattttatttctgtgtatgtaaaaagaaaggcttcatatctaaaataactttacctaagtatacaaagttgtttcagggtaacaaaagagcgaaaaacaaaactgtaaaagggccaaggacagaggaatgggcaaatgaaggaagggcggagaggcagaacaagagctgaaggagaaaattctgtggaggggtgtgggaaaggggtggagctggcaaccttgccttaaaagctgagtgatagcccatactaaagactggttgagccgggtagggaaagcagcctaaagcccgggacaggcacacaggcccaggtgtgtaggccacagcagccgcagtcctgaaaggctgcaacacccagacctccaggagagaccaggcccaggatgcctcgcctgttcttgttccacctgctagaattctgtttactactgaaccaattttccagagcagtcgcggccaaatggaaggacgatgttattaaattatgcggccgcgaattagttcgcgcgcagattgccatttgcggcatgagcacctggagcaaaaggtctctgagccaggaagatgctcctcagacacctagaccagtggcagaaattgtaccatccttcatcaacaaagatacagaaactataattatcatgttggaattcattgctaatttgccaccggagctgaaggcagccctatctgagaggcaaccatcattaccagagctacagcagtatgtacctgcattaaaggattccaatcttagctttgaagaatttaagaaacttattcgcaataggcaaagtgaagccgcagacagcaatccttcagaattaaaatacttaggcttggatactcattctcaaaaaaagagacgaccctacgtggcactgtttgagaaatgttgcctaattggttgtaccaaaaggtctcttgctaaatattgctgagatgaagctaattgtgcacatcttgtctaattttcacacatagtcttgatgacatttcactgatgcttctgtcaggtcccactaattattagaatataagaaatctttattaatgtttagatttttcatttggtgtgtaagaaaatattctttgtatgattgtagtttctgtaaatgacactttctatgctgaagtctttttgtctttttattaacagtataattgtgttgattctttttaatgctgttaacttaaaattacaataaaacctttgccactttaaccatacataataacaatacagtacctaacaacagt

SEQ ID NO: 384612 - DNA, 1378 bp, Homo sapiens
acttgggcaggtccctgggaagcagaatctgagatagcgggagactagtgtgtgggttctaataagttagagcatgctcttggggtccacacgtgttgaatggaagggaaggaagaattgggctgaaggagaaattgggttgtagcccagtctcaatgaaggctatcattgacccagtaagacctctggagctgggatggcccttccaagttgcctggagttgtgttgagggggctgggcctttagatccacatgttggccacttattaggtattggctgcccctgggaggagggcatgaccttgggcaaagcaggtgtcttcagagagatggtctccaagacagctgagggctgtcaccattagcactctcggagctgggagaagtccctgagccctgaagggtgttttgggcagtatgtgacagtgctcacagcaggggaaacagcacttccccagaatgcagccgatgcataagatctgttggggcccaacacccttaaggaagaagcatggatgtgtgcaaacccagctatccctggaattgaccctgggtgtcttgtggtttcaaaatctgctcatcaacctccatggcctttatattccaggaaaaaaatctaggcacaaaattgttggtgaacatgtacttagaaacaatccttcctccacccaatcagttcatcaaccacccaggaactggtaatccattgaaactaccctttctcaccatcccttacccacctaatgtcctcacttgccaggatgaggatgtgtggtccatcactacagtaaccgccagagaacactctcaaacccatttgtttaaggcactgtccacccccagttcagtttgtcaccttcgaggaagaggctctgttccttttgttcatgttgtttcctcatcatcagatcttggggatacaaagatgacaggtcataacccccaactcaatgaaaacaccacctctttggagaaaaaaacaaaacatttcatgttagtaagaataagcactaattgatgcagttcaaaaggctttgagagaaaactctgtcatctaatggtattatctaggaaggtggctctttttcctgatctaactttttttctttttttgctgccttctggagtgttagcagcaggaataaatgtaacctgtaagtgaatgaagaagcttgcttccatactgtcctggctgaagagtcgttgagtactgggtttttcaattactggagcttgctgctaaagtagaatgaaaaaggagaactgaattcttagaaatgggatgtttgaagcctttgtagaaatctgacaggcatcctcaaagttaaaagcaaaagatctcagtttcaataaaagggtcagtggtgccataaccatt

SEQ ID NO: 384613 - DNA, 395 bp, Homo sapiens
tatcaaatccagttaatcatgttgttagcaaaatgtacttctactagaaggtatttaaaggaaaatgatttacagatactaattaagaaaatgtaacaagtcaaatcagcactgaaacatggctcaataaaatttgggatgtatgcataaaatacactgttttgaaatgtgaacctcaaacagttaaatactttcttttttaaactatgaagtattcatgattaagaaactagctaggttcaccgggcgcagtggctcacgcctataatcccaccactttgggaagctgaggtgggcagatcacaaggtcaagagatcgagaccatcctggccaacatggtgaaaccccgtctctactaaaaatacaaaaattagccgggcgtggtggcaggtgc

SEQ ID NO: 384614 - DNA, 210 bp, Homo sapiens
tttaaaattttccatttggggaaacttgtacatttaaaaaaaattcatctcattttctccctccccctccttaaaataaataagaaggcttaagaattaacactaataataatcccacaatggtcattgggaaatcctcccccaaagtgacaactgccgctaagaagggcaaaatccactaagaatgaaaattcccccaaatgagtcctt

SEQ ID NO: 384615 - DNA, 524 bp, Homo sapiens
caggtaaatgtatgcactcatgaaacggtgtcagtaaactctcctcaggttgtagaaaagaggacatagaagcctgaaccctgctgtctactcatttccttaatctaacagactatttatctattctgaagcatgtgtgagatagcacatttattttcctgcaaattaaggtatcagcctagcctatgtcccttatcaatatctgcccccacctccacatgacactgagaccaccagtggtcctaaagatggaatgaattccaagtctaaagtcccatatccaacccacatttatttcaactcactttttaaaaataagcaaagttttagagaacagacattttagtgagataatagaagttaaagggtggtcatggagggacactttaccatgatccggacctggaaaactccaggtgaacaagtcggaatagaagaaataacctgtgccacagctcacccagagaaaaagccaggaggatgactaagcaggcagtaaaatggattgttaatggctcagaacc

SEQ ID NO: 384616 - DNA, 94 bp, Homo sapiens
gatcacttgagcccagaagtttgagaccaccctgaccaacacagtgaaaccccatctctaaaaaagtttgtttttaaagtctccttgaaacatc

SEQ ID NO: 384617 - DNA, 506 bp, Homo sapiens
agtttttgaactcctctaagcctctgttttcttatctataaattaataaatgaatgaatcgggttgagtgaatatttagtaaattcttagtacatactagttatttgtaactgtgagactggttttttggtatggttttcacatttgggagtagaaataccacttcctaaagtctgttttatctcaaattctctatccaggcatagtgtaaagtgaaatacctagatttcttgattaatatacagataatggccagacgccatggctaaaacctgtgacgctagcacttcggaaggctgaggcgggcggatcacttgaggtcaggagttggagaccagcctggcaaacatggcgaaaccctgtctctactaaaaatacaaaaattagctggatgtggtggcaggtgtctgtaatcccagctacttaggaggctgagacaggagaactccttgagaattgctccactgccctccagcctgggcaacagagtgagacacttcatctca

SEQ ID NO: 384618 - DNA, 641 bp, Homo sapiens
  misc_feature (233)..(233): n is a, c, g, or t
  misc_feature (240)..(240): n is a, c, g, or t
  misc_feature (285)..(285): n is a, c, g, or t
  misc_feature (321)..(321): n is a, c, g, or t
  misc_feature (368)..(368): n is a, c, g, or t
  misc_feature (372)..(372): n is a, c, g, or t
ggtaaaagaattttattattatgtggcttaggtaggtttttgcattctactaacagaaaagcattttccacaccttattcaacctaacacattatacatttgtgattttatctacatcgctgcagtattacactattgaaaaccttcctttcaaatgtactttggtgcaattatacagtagatatctctgccttcagaaaataaaaatattctcaatctaaactcaaaatggnataaagncatcaataccaagtttgtgcaccacttggtaaaagattgcaatanaagtcaggtagtgtatggttgctttgcatttagggnggttgaggcatctggccacaggtttctagtcaaacctgttgtttggnatgnttttcccatgtatttctgggttctgcacacgtgacctcagtggttgaaataacaagggcagccggcagtgacttagagacacgagactggctgctaggcagcttgcaatctggtgacttcattctgggatcctgggaggagtccctgccaggcccagctcccctgtcaccctagttgccagctccagccagtggccagacagcaatcatccctgcccctccctttgcccacgtgctggtcgtccccctgtctgggacagcagctggggc

SEQ ID NO: 384619 - DNA, 306 bp, Homo sapiens
aggaaccccagcctttcccagaaaaaggtctgacttccacaatcaccgggctcaggctcaccgcccccagcttctgtctccgccaacccgttctgacccactcactgctaaatgcctgacaactgctcaaaagctctactctgacaatgaggcagcttggcttaaacttctccacggtgaagtccaggatccccagcagggccttcgaggctgtttgtagcccctgccaacctgtcccccacctcccaccccagcccacatgcagtgaccacagctgaccactgcccatcatgcgctcccacaccc

SEQ ID NO: 384620 - DNA, 506 bp, Homo sapiens
cagcaacaagttgtttcagtagccattagataaactggtttcaggttacaataggcagtttcagcagccaggcttacagagaattataatcttggagcaatgttacatccctccccctcccctggccccccaccccatccctgcccctcagctctgatttagttgagtacgaataggatgacccaattagtatgatcagctttcacacatgaaggttgaatttatgaaacatgtaaatttgaaaatacatgtttacattgcaaaaagcttttttaacaaaaattttggccagtagtataaattcagtgaatatgttttcattgcacagatagtaaaaccacttgatacatacctcatggggatatggactgctttatgcgctgctttttaccacaccttaaatagtgcctggttgtgtgtgtgtgtgtgtgtgtgtgtgtgtgtgtgtgtgtgtgtgtgtaactcagtaaatattcaatgaatgaatgaagaaattcagaagataa

SEQ ID NO: 384621 - DNA, 459 bp, Homo sapiens
ttctgggagttcttgctcaacatcaagaaacttccaccaggatccacggggggaagtggaagcagccttgtgatagcagtttcaaaggcctgggctctggcaaataggaaaaaacaggctgagaaaacatatcaggcaggcctgcttgtgagggaacctggcagacatccaaccagcagtctggtggccaattcggtacatcagacatgcgcttaatccatcattcggcagcgggcaggtcactggccacacaggcttcagacctcctggcttgagggaacttggggttgccatcaggcccgtatgaatcagaaattctgggcttctcatcccccaccaggcactcccacactgtccctcctctgcatgtttgcctctccattctctctaccttcactgtctcggttgcctatggtcacagtgatactcaataaaccaccaaatccagtggcttaagag

SEQ ID NO: 384622 - DNA, 265 bp, Homo sapiens
ttgcttagcaacggagctagcaagacaaaaatacttcagttggcatctcccttaaagcacatccccaaacgcgggtcctggccccagacagggagaccagggctctgacagtggcaggttcttccctctggaaaaagaatagaagaggagctcctccctaacccactggttcccagggcagaccctgggaggaggtgctgaaacacagaagagagtgtgtcttccccaacctccattccacaggagagaaactgaggtgaggggt

SEQ ID NO: 384623 - DNA, 724 bp, Homo sapiens
gttgttacttccactttatttgcagaaatgttccttattctctagaaaacattatgcgttggctgacacactttcagtgggattcgttttagaaaatgacatgtgaccctgatactatttgacaggctccatggcagcaaggggcaggcctgggcttacggctcagcagatgaatccaggggggtggacttgcaaggactctggagggctctagcttccctgtcattttaaagatggagaaacacaggcctggagaaaggaagaaataaacccagggaatgcgatagatggcactgtgctggcaggggcaggaagaccaaggctgtgacattccagggagtgcgactgcagtgaagcgagtgaccacaaaacactgaacgtaagccctgaggctttgccacttgctggcaccaaggactctgcagtgttgagccaagaggatggactttggagccagactttctgggtctataatcattcagtgtctgtctcctcctctaaaatgcggacggtgggaaattctgacacacgcttcaacacagatgcaccttgaagacattatgctaagtgaaatgagcgagccaggcacgaaagggatgggactggggcctctctgtgcgtccccctgagagacaacggtctcttggccacccaccctgatcccacaggagccaggcgggcccagccctgagacaggccgcccgccgcccgcaattggactaaa

SEQ ID NO: 384624 - DNA, 554 bp, Homo sapiens
aaatgtgagctggtactgataacgcttggtactgtggcgtgcctgggcatttaacaaaggcaagaaggaaaaaaaggagaaaattggggattgagaaaattgaattaaagaagaaaagattgatcagattatttgaagagaaacctcatcacatcccaccgttgtttgcccccttcccgaccctgtgctctctcttccgattcagattcaaaagcattaactgggcacctacttaagctagactgtatgccaagctcctcgcatacaatttcctacacttttaaagttgcaggctttgtaactgctcttagcagaggcaggttctgctttagaaagtttgcataccatcatttttctcttggttcttaatcagcgaatcacactttcatcccgacattccctgcctgctcctcccttcagtgtgaccctgtactgcccaccaggtcttcctgctaaattctgtaggaaaagggagaccatatgaaaagcggctcctctggctcatggtgatagatgctctttgcctcgtttgggacccaggcctcggaataggc

SEQ ID NO: 384625 - DNA, 245 bp, Homo sapiens
gaattctgacatccttggaagtttctggaaccaattcccatgcataccgagggataaccttatatgtggatatatacatatatagatgtatatatttaggtctttaagtgtgtgtgtatatagttatatatgtatgtaaaaagtagagccaatgaatgagaatggtaaccaccaaattaaggatggagttttatcaggatagaggatgagaaataagataagggaaacgtacattaggggaattc

SEQ ID NO: 384626 - DNA, 321 bp, Homo sapiens
aaaaaaaacaaaaaacaaaaaagagtttgggtaggtggctcaacctctctaagcctgttttctcatctacagtgggggtgatagcatctaccacatgggcagtcatgaagataaagcacttagagaggttgagccacctacccaaactcttttttatttttattcgcatcagaccctatttgccggcttcatacctagaaggccagagccattcctggatgtcggcctagcaggccagagaacactctaggcaagggcatttcactggccccttcttcaccagaacccttcacccaatagtccatggccaaacaacgcact

SEQ ID NO: 384627 - DNA, 770 bp, Homo sapiens
caggtggtccacttcacattgctttccagacaactgcaatttgaggcaacttctatgacagtgatccctttgtttcacctggcatacattctaatcatactatttgcagtcacatcatgctattgttgctgcaagttctggatcaaaagtatcatctgtgaacctcaagagcaggggggactt[450 bp omitted]ctaaaagctgaacctctgagaataaatgccttatactaggaattggggaagagaaaagcagaaggaagttctaacaaagatcatgtttcaaagactttcagaaattatgaaggacacctctctgaaaagtactccag

SEQ ID NO: 384628 - DNA, 780 bp, Homo sapiens
acactgggtctaggatgggacccagggtcccgtatttctaacaagttcccgaagaaaggccaaggccaagctgctgctcatggtaccccacccaagtgtcgtccttgttttgttctgagtaccccctcacaatcaaaggagcacatcctggcctaaccataagttgtgttgcaaaaaaattgggaccttatgaaaaaaaggatgcagtggtgaatgaaaaatatgaaaaggatatgtttaaaaactgtactaaaccaaagactttgacaaagggattttgaagaaaagcaagaacgcagtggctcatgcctgtaatcctagcactttaggaggctgaggccagaagatcgctcgagagcaggagtttgagaccagcctgagaaacatagcaagaccccatcactacaaaagaaaaatttaaaagttagctgggtgtgatgatgcacaccttaagtctcagctactcaggaggctggtgggaggatcgcctgaccccaagtagtcatggcaccatcatgcagagagccgtgattgtgccactgcactccagcctggctgacagagtgagaccctgttcccaccactctctccccaaaaaaaagataaagaaaaaagaaggaagaggaaaggatgaaggtgaagcggaggaaaaggaaggattaaagacaaagatgatggcaatgacaggggagttggttctagcagttttccttgtctgtaaagcatttaattctcctgtgcacaactcgtttcttttgaataaataataagaaacctgaa

SEQ ID NO: 384629 - DNA, 348 bp, Homo sapiens
tttggtacagtaattaggtttggttgattcggttatagggggtatacacgcacatgcaaacacacacagggtgtgcgtgtgtgttataaggggcatatacacatgcacacatatacacatatgttatataggatgtgtgtatatgtgtgtatatatatagggtgtgtatgtatcctatatatgtacatatacatgtatatgttgtatatatacatgtatatgtacacatgtgtgcatatgtgtacatatatgtgtatatatgtatatattccacatctcctccaattttcctatacgtatatacacacatatatgttatatagggtgtacagatataggatatgtgtg

SEQ ID NO: 384630 - DNA, 340 bp, Homo sapiens
attttattgatgaagatttagaataataggtagagatgcagtatttgcatatgtgtttattgccacatcgatgcacatgaggattctttgtcacgtccagccatcatgtcttcttgttcaggtctaggtaccatctattagtgttttattttgttttgttttgtttttactgttaaatgcactggataatattaccttgccccctacccttcatgagaaagaggtagcaagaggtgatagtactcacaatgctatgggttattggaactgttcgtattgaaatcacgtagatcttcttgccctacggttccctagaaccctttatttaatgctggctact

SEQ ID NO: 384631 - DNA, 908 bp, Homo sapiens
ccgcgtcttattccttctaatctctcccctgccccttgtcttgcgcctgccttcctaacagccttcagttccccttctcccgtcagaccttcctgacctcccacctggttctctaggggcagggtggacaggaagcagctcagcccagcctgggagaggccaagggctgcctcctatcagagagcgcctgctcgctgtgcccccgggttatgacgacccccaataaaggaaacaaggccttgaaggtgaagcgggagccgggtgagaatggcaccagcctgacggatgaggagctggtgaccatgtcggtgcgggagctgaaccagcacctgcggggcctgtccaaggaggagatcgtccagctgaagcagcgccggcgcacgctcaagaaccgcggctacgctgccagctgccgcgtgaagcgggtgacgcagaaggaggagctggagaagcagaaggcggagctgcagcaggaggtggagaagctggcctcagagaacgccagcatgaagctggagctcgacgcgctgcgctccaagtacgaggcgctgcagaccttcgcccggacggtggcccgcagccccgtggcgccagcccggggcccccttgccgccggcctggggcccctcgtcccaggcaaggtggccgccaccagcgtcatcacaatagtaaagtccaagacggatgcccgatcgtagggacgcgcgtctgcccaggcgggtctttgcggggccactaggcacatggcgaatttggctgccctgtccctctgtttccttctcttctctttcctccctctcttccccacccttctctcttccctgcaaagcacaacctgtaccccaggggcgccgggctgagcccttttgatctcgtcattgtcgtcgtgtgtcttgtatgttggagta

SEQ ID NO: 384632 - DNA, 936 bp, Homo sapiens
ttgtgacgtctgtggagcggcggcggcggcggcggatcccgagcctggtccggcccggccttcccagtgcgctcggcccggcccgcgcaggcggcgagtcctccgagccccgggcccggacccctcgcgccggtccctgccccgcgcggcctcggagcgcgcgcggccccgccccgccccggcctcggcccgccgggcccgcagtgtgagagcgcctgctcgctgtgcccccgggttatgacgacccccaataaaggaaacaaggccttgaaggtgaagcgggagccgggtgagaatggcaccagcctgacggatgaggagctggtgaccatgtcggtgcgggagctgaaccagcacctgcggggcctgtccaaggaggagatcgtccagctgaagcagcgccggcgcacgctcaagaaccgcggctacgctgccagctgccgcgtgaagcgggtgacgcagaaggaggagctggagaagcagaaggcggagctgcagcaggaggtggagaagctggcctcagagaacgccagcatgaagctggagctcgacgcgctgcgctccaagtacgaggcgctgcagaccttcgcccggacggtggcccgcagccccgtggcgccagcccggggcccccttgccgccggcctggggcccctcgtcccaggcaaggtggccgccaccagcgtcatcacaatagtaaagtccaagacggatgcccgatcgtagggacgcgcgtctgcccaggcgggtctttgcggggccactaggcacatggcgaatttggctgccctgtccctctgtttccttctcttctctttcctccctctcttccccacccttctctcttccctgcaaagcacaacctgtaccccaggggcgccgggctgagcccttttgatctcgtcattgtcgtcgtgtgtcttgtatgttggagta

SEQ ID NO: 384633 - DNA, 343 bp, Homo sapiens
gtgatttgcaaccttgagtgattgtcttgaaataggaaccacagttgaaactgaagtagttaggtgttagtgagattttgatggctaggaacatcaggcttattttataactgaaagggaaatgagaacacgtcaccagttccatatgatcacaatgcatttggaataatcaccatggcaacccatgactgttgtattttgagagagaagaattggaaatataatgaccaagcataaagctgacccaatctaacatagatctttgtctttaacacatatctgtaatattcatgtaggcagtgtataaataacttatcagaattatcatttatgtgcaggttct

SEQ ID NO: 384634 - DNA, 1267 bp, Homo sapiens
ctgcgcctgcgcgctcagcggccgggcgtgtaacccacgggtgcgcgcccacgaccgccagactcgagcagtctctggaacacgctgcggggctcccgggcctgagccaggtctgttctccacgcaggtgttccgcgcgccccgttcagccatgtcgtccggcatccatgtagcgctggtgactggaggcaacaagggcatcggcttggccatcgtgcgcgacctgtgccggctgttctcgggggacgtggtgctcacggcgcgggacgtgacgcggggccaggcggccgtacagcagctgcaggcggagggcctgagcccgcgcttccaccagctggacatcgacgatctgcagagcatccgcgccctgcgcgacttcctgcgcaaggagtacgggggcctggacgtgctggtcaacaacgcgggcatcgccttcaaggttgctgatcccacaccctttcatattcaagctgaagtgacgatgaaaacaaatttctttggtacccgagatgtgtgcacagaattactccctctaataaaaccccaagggagagtggtgaacgtatctagcatcatgagcgtcagagcccttaaaagctgcagcccagagctgcagcagaagttccgcagtgagaccatcactgaggaggagctggtggggctcatgaacaagtttgtggaggatacaaagaagggagtgcaccagaaggagggctggcccagcagcgcatacggggtgacgaagattggcgtcaccgttctgtccaggatccacgccaggaaactgagtgagcagaggaaaggggacaagatcctcctgaatgcctgctgcccagggtgggtgagaactgacatggcgggacccaaggccaccaagagcccagaagaaggtgcagagacccctgtgtacttggcccttttgcccccagatgctgagggtccccatggacaatttgtttcagagaagagagttgaacagtggtgagctgggctcacagctccatccatgggccccattttgtaccttgtcctgagttggtccaaagggcatttacaatgtcataaatatccttatataagaaaaaaaatgatctcttatcaattagcactcactaatgtactactaattgagcaacctacgcactcagttgactacgtaaatctgtcaggtcttttgtgatttcctctgatgcaggagaggaaaaattgtaattgatgaaaataatgaatgaaaatcaacagatgaataaatggttctttataagtg

SEQ ID NO: 384635 - DNA, 1075 bp, Homo sapiens
ctgcgcctgcgcgctcagcggccgggcgtgtaacccacgggtgcgcgcccacgaccgccagactcgagcagtctctggaacacgctgcggggctcccgggcctgagccaggtctgttctccacgcaggtgttccgcgcgccccgttcagccatgtcgtccggcatccatgtagcgctggtgactggaggcaacaagggcatcggcttggccatcgtgcgcgacctgtgccggctgttctcgggggacgtggtgctcacggcgcgggacgtgacgcggggccaggcggccgtacagcagctgcaggcggagggcctgagcccgcgcttccaccagctggacatcgacgatctgcagagcatccgcgccctgcgcgacttcctgcgcaaggagtacgggggcctggacgtgctggtcaacaacgcgggcatcgccttcaaggttgctgatcccacaccctttcatattcaagctgaagtgacgatgaaaacaaatttctttggtacccgagatgtgtgcacagaattactccctctaataaaaccccaagggagagtggtgaacgtatctagcatcatgagcgtcagagcccttaaaagctgcagcccagagctgcagcagaagttccgcagtgagaccatcactgaggaggagctggtggggctcatgaacaagtttgtggaggatacaaagaagggagtgcaccagaaggagggctggcccagcagcgcatacggggtgacgaagattggcgtcaccgttctgtccaggatccacgccaggaaactgagtgagcagaggaaaggggacaagatcctcctgaatgcctgctgcccagggtgggtgagaactgacatggcgggacccaaggccaccaagagcccagaagaaggtgcagagacccctgtgtacttggcccttttgcccccagatgctgagggtccccatggacaatttgtttcagagaagagagttgaacagtggtgagctgggctcacagctccatccatgggccccattttgtaccttgtcctgagttggtccaaagggcatttacaatgtcataaatatccttat

SEQ ID NO: 384636 - DNA, 733 bp, Homo sapiens
ctgcgcctgcgcgctcagcggccgggcgtgtaacccacgggtgcgcgcccacgaccgccagactcgagcagtctctggaacacgctgcggggctcccgggcctgagccaggtctgttctccacgcaggtgttccgcgcgccccgttcagccatgtcgtccggcatccatgtagcgctggtgactggaggcaacaagggcatcggcttggccatcgtgcgcgacctgtgccggctgttctcgggggacgtggtgctcacggcgcgggacgtgacgcggggccaggcggccgtacagcagctgcaggcggagggcctgagcccgcgcttccaccagctggacatcgacgatctgcagagcatccgcgccctgcgcgacttcctgcgcaaggagtacgggggcctggacgtgctggtcaacaacgcgggcatcgccttcaagggtatggggaggggacgtggcctccccgaagaagaaccgatgcactggggctcctggcgtctgcggggtccataacgcctccctagggaggagagggaggagctaggagatgcagggagtgcagaaaccttggagaaagtgagagttttccagccaaagggaactttgtgtttccctggctgggactcttggggatctttttcaggttttctgcagtttttctgaattgagctttaaggcaactggatggattttgaactgattttaaaataaacgacaaattgcaaaaagaaa

SEQ ID NO: 384637 - DNA, 1777 bp, Homo sapiens
ctgcgcctgcgcgctcagcggccgggcgtgtaacccacgggtgcgcgcccacgaccgccagactcgagcagtctctggaacacgctgcggggctcccgggcctgagccaggtctgttctccacgcaggtgttccgcgcgccccgttcagccatgtcgtccggcatccatgtagcgctggtgactggaggcaacaagggcatcggcttggccatcgtgcgcgacctgtgccggctgttctcgggggacgtggtgctcacggcgcgggacgtgacgcggggccaggcggccgtacagcagctgcaggcggagggcctgagcccgcgcttccaccagctggacatcgacgatctgcagagcatccgcgccctgcgcgacttcctgcgcaaggagtacgggggcctggacgtgctggtcaacaacgcgggcatcgccttcaaggttgctgatcccacaccctttcatattcaagctgaagtgacgatgaaaacaaatttctttggtacccgagatgtgtgcacagaattactccctctaataaaaccccaagggagagtggtgaacgtatctagcatcatgagcgtcagagcccttaaaagctgcagcccagagctgcagcagaagttccgcagtgagaccatcactgaggaggagctggtggggctcatgaacaagtttgtggaggatacaaagaagggagtgcaccagaaggagggctggcccagcagcgcatacggggtgacgaagattggcgtcaccgttctgtccaggatccacgccaggaaactgagtgagcagaggaaaggggacaagatcctcctgaatgcctgctgcccagggtgggtgagaactgacatggcgggacccaaggccaccaagagcccagaagaaggtgcagagacccctgtgtacttggcccttttgcccccagatgctgagggtccccatggacaatttgtttcagagaagagagttgaacagtggtgagctgggctcacagctccatccatgggccccattttgtaccttgtcctgagttggtccaaagggcatttacaatgtcataaatatccttatataagaaaaaaaatgatctcttatcaattagcactcactaatgtactactaattgagcaacctacgcactcagttgactacgtaaatctgtcaggtcttttgtgatttcctctgatgcaggagaggaaaaattgtaattgatgaaaataatgaatgaaaatcaacagatgaataaatggttctttataagtgaaaaaaaaacaaaaaaaacacaaaaacaacacaaaacaacacaaacaacaaacaaaacaaacaaaaaaaacaaacaaaacacaccccttcccccgcgagcgaaggcactcgagtaacgaacagagaagaatctttcctaaaaaaccgctcacttgtgaggagcgaaggcggcgagcgcgacccccaaaaatgaatcagagagacaacaagcaggagaaaaacaatggcgttctcccacagaaagaaacatcatcgggcagctacaatacaacaatcgtgtggtgtgggtgtatcatacccccacacacagacaagagacagacccacgccccgcgcggcgggaacacaccacggaggcagtcgtgtgagaacaaaaacacacgccgcgaggcgaccgtagcgtagtgagagagagagacacaaagaggcgggggagaaatcaacaaaagcgagggagggcaccacagccgagcggacatacgcgatctctaaacagaagatccccgccgg

SEQ ID NO: 384638 - DNA, 1319 bp, Homo sapiens
  misc_feature (1081)..(1081): n is a, c, g, or t
ctgcgcctgcgcgctcagcggccgggcgtgtaacccacgggtgcgcgcccacgaccgccagactcgagcagtctctggaacacgctgcggggctcccgggcctgagccaggtctgttctccacgcaggtgttccgcgcgccccgttcagccatgtcgtccggcatccatgtagcgctggtgactggaggcaacaagggcatcggcttggccatcgtgcgcgacctgtgccggctgttctcgggggacgtggtgctcacggcgcgggacgtgacgcggggccaggcggccgtacagcagctgcaggcggagggcctgagcccgcgcttccaccagctggacatcgacgatctgcagagcatccgcgccctgcgcgacttcctgcgcaaggagtacgggggcctggacgtgctggtcaacaacgcgggcatcgccttcaaggttgctgatcccacaccctttcatattcaagctgaagtgacgatgaaaacaaatttctttggtacccgagatgtgtgcacagaattactccctctaataaaaccccaagggagagtggtgaacgtatctagcatcatgagcgtcagagcccttaaaagctgcagcccagagctgcagcagaagttccgcagtgagaccatcactgaggaggagctggtggggctcatgaacaagtttgtggaggatacaaagaagggagtgcaccagaaggagggctggcccagcagcgcatacggggtgacgaagattggcgtcaccgttctgtccaggatccacgccaggaaactgagtgagcagaggaaaggggacaagatcctcctgaatgcctgctgcccagggtgggtgagaactgacatggcgggacccaaggccaccaagagcccagaagaaggtgcagagacccctgtgtacttggcccttttgcccccagatgctgagggtccccatggacaattgggtgttcaggagaacgaggaagtggaaaccaggtgggttgaggctgggggctcaaacaagcgtccccattcccattggggcccccaattttgtggttaacacttgtgttcccttggaagttgtgcntcccccaaaagggggggcaattttttacccaaaaatggttccctttaaatttattttcccaaaaaagagacaagcatacagcagccatatctacacaaagaaaaacacatatgtgtgtggggggaggagcatgtgggggcccctccgggaaaaaaaggttttttctgatgaaacacacattgcggtgtgtggggggagacagggggggcccccccaggtgtgtggcacatgggggcac

SEQ ID NO: 384639 - DNA, 1225 bp, Homo sapiens
ctgcgcctgcgcgctcagcggccgggcgtgtaacccacgggtgcgcgcccacgaccgccagactcgagcagtctctggaacacgctgcggggctcccgggcctgagccaggtctgttctccacgcaggtgttccgcgcgccccgttcagccatgtcgtccggcatccatgtagcgctggtgactggaggcaacaagggcatcggcttggccatcgtgcgcgacctgtgccggctgttctcgggggacgtggtgctcacggcgcgggacggcctgagcccgcgcttccaccagctggacatcgacgatctgcagagcatccgcgccctgcgcgacttcctgcgcaaggagtacgggggcctggacgtgctggtcaacaacgcgggcatcgccttcaaggttgctgatcccacaccctttcatattcaagctgaagtgacgatgaaaacaaatttctttggtacccgagatgtgtgcacagaattactccctctaataaaaccccaagggagagtggtgaacgtatctagcatcatgagcgtcagagcccttaaaagctgcagcccagagctgcagcagaagttccgcagtgagaccatcactgaggaggagctggtggggctcatgaacaagtttgtggaggatacaaagaagggagtgcaccagaaggagggctggcccagcagcgcatacggggtgacgaagattggcgtcaccgttctgtccaggatccacgccaggaaactgagtgagcagaggaaaggggacaagatcctcctgaatgcctgctgcccagggtgggtgagaactgacatggcgggacccaaggccaccaagagcccagaagaaggtgcagagacccctgtgtacttggcccttttgcccccagatgctgagggtccccatggacaatttgtttcagagaagagagttgaacagtggtgagctgggctcacagctccatccatgggccccattttgtaccttgtcctgagttggtccaaagggcatttacaatgtcataaatatccttatataagaaaaaaaatgatctcttatcaattagcactcactaatgtactactaattgagcaacctacgcactcagttgactacgtaaatctgtcaggtcttttgtgatttcctctgatgcaggagaggaaaaattgtaattgatgaaaataatgaatgaaaatcaacagatgaataaatggttctttataagtg

SEQ ID NO: 384640 - DNA, 1539 bp, Homo sapiens
ctgcgcctgcgcgctcagcggccgggcgtgtaacccacgggtgcgcgcccacgaccgccagactcgagcagtctctggaacacgctgcggggctcccgggcctgagccaggtctgttctccacgcaggtgttccgcgcgccccgttcagccatgtcgtccggcatccatgtagcgctggtgactggaggcaacaagggcatcggcttggccatcgtgcgcgacctgtgccggctgttctcgggggacgtggtgctcacggcgcgggacgtgacgcggggccaggcggccgtacagcagctgcaggcggagggcctgagcccgcgcttccaccagctggacatcgacgatctgcagagcatccgcgccctgcgcgacttcctgcgcaaggagtacgggggcctggacgtgctggtcaacaacgcgggcatcgccttcaaggttgctgatcccacaccctttcatattcaagctgaagtgacgatgaaaacaaatttctttggtacccgagatgtgtgcacagaattactccctctaataaaaccccaagttgtgctacttctaaggctctggttcaccaggacctcaaagggcagctcttccaaatctcacctgactctactcagccaaaattcgaaggcaggaatgaacttcttcatgcaactaccaccacactttctatgcgtattcctcttagaactcataccagtaactgtctctcatatgaaaattttctgctccaaaatccctgcaaatttggcattcacctctctacgggattgttgcacacctttctacataatgctttgtggtgtatcttagggagagtggtgaacgtatctagcatcatgagcgtcagagcccttaaaagctgcagcccagagctgcagcagaagttccgcagtgagaccatcactgaggaggagctggtggggctcatgaacaagtttgtggaggatacaaagaagggagtgcaccagaaggagggctggcccagcagcgcatacggggtgacgaagattggcgtcaccgttctgtccaggatccacgccaggaaactgagtgagcagaggaaaggggacaagatcctcctgaatgcctgctgcccagggtgggtgagaactgacatggcgggacccaaggccaccaagagcccagaagaaggtgcagagacccctgtgtacttggcccttttgcccccagatgctgagggtccccatggacaatttgtttcagagaagagagttgaacagtggtgagctgggctcacagctccatccatgggccccattttgtaccttgtcctgagttggtccaaagggcatttacaatgtcataaatatccttatataagaaaaaaaatgatctcttatcaattagcactcactaatgtactactaattgagcaacctacgcactcagttgactacgtaaatctgtcaggtcttttgtgatttcctctgatgcaggagaggaaaaattgtaattgatgaaaataatgaatgaaaatcaacagatgaataaatggttctttataagtg

SEQ ID NO: 384641 - DNA, 990 bp, Homo sapiens
  misc_feature (873)..(874): n is a, c, g, or t
  misc_feature (877)..(877): n is a, c, g, or t
  misc_feature (882)..(882): n is a, c, g, or t
  misc_feature (884)..(884): n is a, c, g, or t
  misc_feature (886)..(886): n is a, c, g, or t
  misc_feature (892)..(892): n is a, c, g, or t
ctgcgcctgcgcgctcagcggccgggcgtgtaacccacgggtgcgcgcccacgaccgccagactcgagcagtctctggaacacgctgcggggctcccgggcctgagccaggtctgttctccacgcaggtgttccgcgcgccccgttcagccatgtcgtccggcatccatgtagcgctggtgactggaggcaacaagggcatcggcttggccatcgtgcgcgacctgtgccggctgttctcgggggacgtggtgctcacggcgcgggacgtgacgcggggccaggcggccgtacagcagctgcaggcggagggcctgagcccgcgcttccaccagctggacatcgacgatctgcagagcatccgcgccctgcgcgacttcctgcgcaaggagtacgggggcctggacgtgctggtcaacaacgcgggcatcgccttcaaggttgctgatcccacaccctttcatattcaagctgaagtgacgatgaaaacaaatttctttggtacccgagatgtgtgcacagaattactccctctaataaaaccccaagggagagtggtgaacgtatctagcatcatgagcgtcagagcccttaaaagctgcagcccagagctgcagcagaagttccgcagtgagaccatcactgaggaggagctggtggggctcatgaacaagtttgtggaggatacaaagaagggagtgcaccagaaggagggctggcccagcagcgcatacggggtgacgaagattggcgtcaccgttctgtccaggatccacgccaggaaactgagtgagcagaggaaaggggacaagatcctcctgaatgcctgctgcccagggtgggtgagaactgacatggcgggacccaaggccanngcnaaagngnanccgttnttggccttgcccttgtggtcccggactgtgtcgcactcgccggggggcgccccacgggccttgtcggggccggggctttttaaagatctcgttgcccg

SEQ ID NO: 384642 - DNA, 1470 bp, Homo sapiens
ctgcgcctgcgcgctcagcggccgggcgtgtaacccacgggtgcgcgcccacgaccgccagactcgagcagtctctggaacacgctgcggggctcccgggcctgagccaggtctgttctccacgcaggtgttccgcgcgccccgttcagccatgtcgtccggcatccatgtagcgctggtgactggaggcaacaagggcatcggcttggccatcgtgcgcgacctgtgccggctgttctcgggggacgtggtgctcacggcgcgggacgtgacgcggggccaggcggccgtacagcagctgcaggcggagggcctgagcccgcgcttccaccagctggacatcgacgatctgcagagcatccgcgccctgcgcgacttcctgcgcaaggagtacgggggcctggacgtgctggtcaacaacgcgggcatcgccttcaaggttgctgatcccacaccctttcatattcaagctgaagtgacgatgaaaacaaatttctttggtacccgagatgtgtgcacagaattactccctctaataaaaccccaagggagagtggtgaacgtatctagcatcatgagcgtcagagcccttaaaagctgcagcccagagctgcagcagaagttccgcagtgagaccatcactgaggaggagctggtggggctcatgaacaagtttgtggaggatacaaagaagggagtgcaccagaaggagggctggcccagcagcgcatacggggtgacgaagattggcgtcaccgttctgtccaggatccacgccaggaaactgagtgagcagaggaaaggggacaagatcctcctgaatgcctgctgcccagggtgggtgagaactgacatggcgggacccaaggccaccaagagcccagaagaaggtgcagagacccctgtgtacttggcccttttgcccccagatgctgagggtccccatggacaatttgtttcagagaagagagttgaacagtggtgagctgggctcacagctccatccatgggccccattttgtaccttgtcctgagttggtccaaagggcatttacaatgtcataaatatccttatataagaaaaaaaatgatctcttatcaattagcactcactaatgtactactaattgagcaacctacgcactcagttgactacgtaaatctgtcaggtcttttgtgatttcctctgatgcaggagaggaaaaattgtaattgatgaaaataatgaatgaaaatcaacagatgaataaatggttctttataagtgaaaaaaaaaaaagaaaagagaaaaaagaaaaaaaagcttggggagaggaccaatagcgacacccgacaaaaaacatttataaaagaacgcatggcgagagaaccgcggggcaccaagaagagaaaagagaaaaagtgtgaaaaaggaggatcccggagagaaaacggggaagaaaaaagggaggaagataccacaaaaaaaaa

SEQ ID NO: 384643 - DNA, 765 bp, Homo sapiens
gtttccctgtcctgtcgtcctgttaagttgtgctacttctaaggctctggttcaccaggacctcaaagggcagctcttccaaatctcacctgactctactcagccaaaattcgaaggcaggaatgaacttcttcatgcaactaccaccacactttctatgcgtattcctcttagaactcataccagtaactgtctctcatatgaaaattttctgctccaaaatccctgcaaatttggcattcacctctctacgggattgttgcacacctttctacataatgctttgtggtgtatcttagggagagtggtgaacgtatctagcatcatgagcgtcagagcccttaaaagctgcagcccagagctgcagcagaagttccgcagtgagaccatcactgaggaggagctggtggggctcatgaacaagtttgtggaggatacaaagaagggagtgcaccagaaggagggctggcccagcagcgcatacggggtgacgaagattggcgtcaccgttctgtccaggatccacgccaggaaactgagtgagcagaggaaaggggacaagatcctcctgaatgcctgctgcccagggtgggtgagaactgacatggcgggacccaaggccaccaagagcccagaagaaggtgcagagacccctgtgtacttggcccttttgcccccagatgctgagggtccccatggacaatttgtttcagagaagagagttgaacagtggtgagctgggctcacagctccatccatgggccc

SEQ ID NO: 384644 - DNA, 342 bp, Homo sapiens
ccttggaaaaatataggactcaagttatcttgtctccttctttaagattgacaagaggctgggagcggtgactcaagcctgtaatcctagcactttgggagacccaggtggacggatcacgtcaggtcaggagttcaagactagcctggccaacatggtgaaatcctgtctctgctgaaaaatacaaaaattagtcaggtgtagtagtgcatgcctgtaatcccagctactcaggatgctgagccagagagaatcgcttgaacccaggaggcagaggttgcagtgagccaagatcgtgtaactgcactccagcctaagtggcagagtgagaaactccatctc

SEQ ID NO: 384645 - DNA, 353 bp, Homo sapiens
aatacaaaaaattagttgggtgtggtggcacacatctgtagtcccagctgctcaggaggctgagacaggagagtcgcttgaacctgggaggtggaggctggagtgagccaagatcacaccactgcactccagcctgggtgagacagagtgagactctgtctcaaaaaatccattcttgcaaagtggtgaaaacaaagtttttacttatttattgttccttggagtctttggacacttgtttttttgaaatgtacaatttagtggttttcaatacattcacagggtttgtgaccatccccactatctgattccagaaaggggtgatctaattctgaaagtcactatgactttaa

SEQ ID NO: 384646 - DNA, 354 bp, Homo sapiens
ccatttacaaaaactacaatggtaggtgttgagggatataagtggggtgcctgcagtgattgctacacatggattccgatgacattgtgtaattaatgaagaactatgtgatctaattctacaaacttaaagtccaaaataaaaatagtctagagaatagcattcagatatttgtgacaacatttttgatgacccttaaagatgggattagggaccagaactgtatacatggtcagctttcttttagttacttggaaaagatacgaatatttatttcaaaatgctgctgcttttagttaatttaatatgaataaatagccagtttgaaatttccatttttctgaatttttatag

SEQ ID NO: 384647 - DNA, 239 bp, Homo sapiens
caaagatgtcacactgaagcagggagggagtggagataaaattggctgatctcccttccccaccccagtctccccctggtgtctcccactggccaaatccaatccaatcagaagccagtgggtaaatgaatccaggtgatagagtccacagaggttagcccctcatggcacagaacaggacaaagaagaggaggaatggatctggagtggtagagactggactggagcagtggagaaaa

SEQ ID NO: 384648 - DNA, 181 bp, Homo sapiens
tttattgggagccggggtggaggtcgggccgaacagaagcgtcgggcagcgggcgatggaccagaagatcatcctggagctggaccggaaggtggctgaccagcagagcacactggagaaggcgggggtggctggcttctacgtgacccagagaaataaagatgcctcagtgtggcccaaa

SEQ ID NO: 384649 - DNA, 1093 bp, Homo sapiens
gggacaatcgtaaaaggggcgggacgcgccgcgctcgggatgtcgtgaagctgggggagctcgtcgccgccgccggcggctagcgggcgtccgcgccatggagcgctacgcggccgccttggaggaggtggcggacggtgcccggcagcaggagcgacactaccagttgctgtcggcgctacagagcctggtgaaggagttgcccagctctttccagcagcgcctgtcctacaccacgctcagcgacctggccctggcgcttctcgacggcaccgtgttcgaaatcgtgcaggggctactggagatccagcacctcaccgaaaagagcctgtacaaccagcgcctgcgcctacagaacgagcaccgagtgctcaggcaggcgctgcggcagaagcaccaggaagcccagcaggcctgccggccccacaacctgcctgtggttcaggcggctcagcagcgagaactagaggccgtggaacaccggatccgtgaggagcagcgggcgatggaccagaagatcatcctggagctggaccggaaggtggctgaccagcagagcacactggagaaggcgggggtggctggcttctacgtgaccaccaacccacaggagctgatgctgcagatgaacctgctggaactcatccgaaagctgcagcagaggggctgccgggcagggaatgcagccctgggactgggaggtccctggcagtcgcctgctgcccagtgtgaccagaaaggcagccctgtcccaccatagccacaggcagcagaagtctgggcagagttcatcttcttgacctttggccactgccttcccagctgcccgcagggggttccccctgctgaggagagaccaggtggaccccagctgcctgtcacccttcatctgggacttgctgtcaaaccctaggatagtctcataaaggggaggctgggccagcctgctgctgtctgcttcaggaccaggcagagagtgaggctgggggttctcacaccttactccaccgggcacatcccaactgcagaagaggctcccaggcccaagctctgtgtgacccagagaaataaagatgcctcagtgtggcccaaa

SEQ ID NO: 384650 - DNA, 1031 bp, Homo sapiens
gggacaatcgtaaaaggggcgggacgcgccgcgctcgggatgtcgtgaagctgggggagctcgtcgccgccgccggcggctagcgggcgtccgcgccatggagcgctacgcggccgccttggaggaggtggcggacggtgcccggcagcaggagcgacactaccagttgctgtcggcgctacagagcctggtgaaggagttgcccagctctttccagcagcgcctgtcctacaccacgctcagcgacctggccctggcgcttctcgacggcaccgtgttcgaaatcgtgcaggggctactggagatccagcacctcaccgaaaagagcctgtacaaccagcgcctgcgcctacagaacgagcaccgagtgctcaggcaggcgctgcggcagaagcaccaggaagcccagcaggcctgccggccccacaacctgcctgtggttcaggcggctcagcagcgagaactagaggccgtggaacaccggatccgtgaggagcagcgggcgatggaccagaagatcatcctggagctggaccggaaggtggctgaccagcagagcacactggagaaggcgggggtggctggcttctacgtgaccaccaacccacaggagctgatgctgcagatgaacctgctggaactcatccgaaagctgcagcagaggggctgccgggcagggaatgcagccctgggactgggaggtccctggcagtcgcctgctgcccagtgtgaccagaaaggcagccctgtcccaccatagccacaggcagcagaagtctgggcagagttcatcttcttgacctttggccactgccttcccagctgcccgcagggggttccccctgctgaggagagaccaggtggaccccagctgcctgtcacccttcatctgggactgccttctgtccttcatccgcctgctgctgaattacaggaagtcctcccgccatctggctgccttcatcaacaagtttgtgcagttcatccataagtacattacctacaatgcatcagcagctcgcccctgagtt

SEQ ID NO: 384651 - DNA, 898 bp, Homo sapiens
gggacaatcgtaaaaggggcgggacgcgccgcgctcgggatgtcgtgaagctgggggagctcgtcgccgccgccggcggctagcgggcgtccgcgccatggagcgctacgcggccgccttggaggaggtggcggacggtgcccggcagcaggagcgacactaccagttgctgtcggcgctacagagcctggtgaaggagttgcccagctctttccagcagcgcctgtcctacaccacgctcagcgacctggccctggcgcttctcgacggcaccgtgttcgaaatcgtgcaggggctactggagatccagcacctcaccgaaaagagcctgtacaaccagcgcctgcgcctacagaacgagcaccgagtgctcaggcaggcgctgcggcagaagcaccaggaagcccagcaggcctgccggccccacaacctgcctgtggttcaggcggctcagcagcgagaactagaggccgtggaacaccggatccgtgaggagcagcgggcgatggaccagaagatcatcctggagctggaccggaaggtggctgaccagcagagcacactggagaaggcgggggtggctggcttctacgtgaccaccaacccacaggagctgatgctgcagatgaacctgctggaactcatccgaaagctgcagcagaggggctgccgggcagggaatgcagccctgggactgggaggtccctggcagtcgcctgctgcccagtgtgaccagaaaggcagccctgtcccaccatagccacaggcagcagaagtctgggcagagttcatcttcttgacctttggccactgccttcccagctgccctgcagaagaggctcccaggcccaagctctgtgtgacccagagaaataaagatgcctcagtgtggcccaaa

SEQ ID NO: 384652 - DNA, 1036 bp, Homo sapiens
ggatccccgcacccaggcgcacttctaggagcgacactaccagttgctgtcggcgctacagagcctggtgaaggagttgcccagctctttccagcagcgcctgtcctacaccacgctcagcgacctggccctggcgcttctcgacggcaccgtgttcgaaatcgtgcaggggctactggagatccagcacctcaccgaaaagagcctgtacaaccagcgcctgcgcctacagaacgagcaccgagtgctcaggcaggcgctgcggcagaagcaccaggaagcccagcaggcctgccggccccacaacctgcctgtggttcaggcggctcagcagcgagaactagaggccgtggaacaccggatccgtgaggagcagcgggcgatggaccagaagatcatcctggagctggaccggaaggtggctgaccagcagagcacactggagaaggcgggggtggctggcttctacgtgaccaccaacccacaggagctgatgctgcagatgaacctgctggaactcatccgaaagctgcagcagaggggctgccgggcagggaatgcagccctgggactgggaggtccctggcagtcgcctgctgcccagtgtgaccagaaaggcagccctgtcccaccatagccacaggcagcagaagtctgggcagagttcatcttcttgacctttggccactgccttcccagctgcccgcagggggttccccctgctgaggagagaccaggtggaccccagctgcctgtcacccttcatctgggacttgctgtcaaaccctaggatagtctcataaaggggaggctgggccagcctgctgctgtctgcttcaggaccaggcagagagtgaggctgggggttctcacaccttactccaccgggcacatcccaacctgcactggggcccacccgagcgcttgttctggtctcagccgctcccttggcagctgcagcccccatgcagaagaggctcccaggcccaagctctgtgtgacccagagaaataaagatgcctcagtgtggcccaaa

SEQ ID NO: 384653 - DNA, 1159 bp, Homo sapiens
gggacaatcgtaaaaggggcgggacgcgccgcgctcgggatgtcgtgaagctgggggagctcgtcgccgccgccggcggctagcgggcgtccgcgccatggagcgctacgcggccgccttggaggaggtggcggacggtgcccggcagcaggagcgacactaccagttgctgtcggcgctacagagcctggtgaaggagttgcccagctctttccagcagcgcctgtcctacaccacgctcagcgacctggccctggcgcttctcgacggcaccgtgttcgaaatcgtgcaggggctactggagatccagcacctcaccgaaaagagcctgtacaaccagcgcctgcgcctacagaacgagcaccgagtgctcaggcaggcgctgcggcagaagcaccaggaagcccagcaggcctgccggccccacaacctgcctgtggttcaggcggctcagcagcgagaactagaggccgtggaacaccggatccgtgaggagcagcgggcgatggaccagaagatcatcctggagctggaccggaaggtggctgaccagcagagcacactggagaaggcgggggtggctggcttctacgtgaccaccaacccacaggagctgatgctgcagatgaacctgctggaactcatccgaaagctgcagcagaggggctgccgggcagggaatgcagccctgggactgggaggtccctggcagtcgcctgctgcccagtgtgaccagaaaggcagccctgtcccaccatagccacaggcagcagaagtctgggcagagttcatcttcttgacctttggccactgccttcccagctgcccgcagggggttccccctgctgaggagagaccaggtggaccccagctgcctgtcacccttcatctgggacttgctgtcaaaccctaggatagtctcataaaggggaggctgggccagcctgctgctgtctgcttcaggaccaggcagagagtgaggctgggggttctcacaccttactccaccgggcacatcccaacctgcactggggcccacccgagcgcttgttctggtctcagccgctcccttggcagctgcagcccccatgcagaagaggctcccaggcccaagctctgtgtgacccagagaaataaagatgcctcagtgtggcccaaa

SEQ ID NO: 384654 - DNA, 1058 bp, Homo sapiens
gggacaatcgtaaaaggggcgggacgcgccgcgctcgggatgtcgtgaagctgggggagctcgtcgccgccgccggcggctagcgggcgtccgcgccatggagcgctacgcggccgccttggaggaggtggcggacggtgcccggcagcaggagcgacactaccagttgctgtcggcgctacagagcctggtgaaggagttgcccagctctttccagcagcgcctgtcctacaccacgctcagcgacctggccctggcgcttctcgacggcaccgtgttcgaaatcgtgcaggggctactggagatccagcacctcaccgaaaagagcctgtacaaccagcgcctgcgcctacagaacgagcaccgaggccgtggaacaccggatccgtgaggagcagcgggcgatggaccagaagatcatcctggagctggaccggaaggtggctgaccagcagagcacactggagaaggcgggggtggctggcttctacgtgaccaccaacccacaggagctgatgctgcagatgaacctgctggaactcatccgaaagctgcagcagaggggctgccgggcagggaatgcagccctgggactgggaggtccctggcagtcgcctgctgcccagtgtgaccagaaaggcagccctgtcccaccatagccacaggcagcagaagtctgggcagagttcatcttcttgacctttggccactgccttcccagctgcccgcagggggttccccctgctgaggagagaccaggtggaccccagctgcctgtcacccttcatctgggacttgctgtcaaaccctaggatagtctcataaaggggaggctgggccagcctgctgctgtctgcttcaggaccaggcagagagtgaggctgggggttctcacaccttactccaccgggcacatcccaacctgcactggggcccacccgagcgcttgttctggtctcagccgctcccttggcagctgcagcccccatgcagaagaggctcccaggcccaagctctgtgtgacccagagaaataaagatgcctcagtgtggcccaaa

SEQ ID NO: 384655 - DNA, 487 bp, Homo sapiens
agccaggctacctgcaggggagcctcaggggccctggagttccctggggactggccaccagagaagagctgcaacatcagggctcttcccaggaacagagtgttgggtttcaccttttcttttggccagggacccctccctcctggggagctgtagccatttggcacttactggtcactggcgccagctgtggggtgctgcatgttctgtttcatggtggtttatgtcccatgatcgcttcctctgtacattcccttcagaccagacagtttgcacacatctgtgtttgtgcacagtttagcaaggaccgtggagctttacttgatggctgagggtgagcccctcagagccacacaggcttatggcaccccaagctcatcccaaacttgggcctcccaggtctgcccacccttctcctgcagaagaggctcccaggcccaagctctgtgtgacccagagaaataaagatgcctcagtgtggcccaaa

SEQ ID NO: 384656 - DNA, 1066 bp, Homo sapiens
cgacccacgcgtcgcccacgcgtcggacccacgcgtggcggacggtgcccggcagcaggagcgacactaccagttgctgtcggcgctacagagcctggtgaaggagttgcccagctctttccagcagcgcctgtcctacaccacgctcagcgacctggccctggcgcttctcgacggcaccgtgttcgaaatcgtgcaggggctactggagatccagcacctcaccgaaaagagcctgtacaaccagcgcctgcgcctacagaacgagcaccgagtgctcaggcaggcgctgcggcagaagcaccaggaagcccagcaggcctgccggccccacaacctgcctgtggttcaggcggctcagcagcgagaactagaggccgtggaacaccggatccgtgaggagcagcgggcgatggaccagaagatcatcctggagctggaccggaaggtggctgaccagcagagcacactggagaaggcgggggtggctggcttctacgtgaccaccaacccacaggagctgatgctgcagatgaacctgctggaactcatccgaaagctgcagcagaggggctgccgggcagggaatgcagccctgggactgggaggtccctggcagtcgcctgctgcccagtgtgaccagaaaggcagccctgtcccaccatagccacaggcagcagaagtctgggcagagttcatcttcttgacctttggccactgccttcccagctgcccgcagggggttccccctgctgaggagagaccaggtggaccccagctgcctgtcacccttcatctgggacttgctgtcaaaccctaggatagtctcataaaggggaggctgggccagcctgctgctgtctgcttcaggaccaggcagagagtgaggctgggggttctcacaccttactccaccgggcacatcccaacctgcactggggcccacccgagcgcttgttctggtctcagccgctcccttggcagctgcagcccccatgcagaagaggctcccaggcccaagctctgtgtgacccagagaaataaagatgcctcagtgtggcccaaa

SEQ ID NO: 384657 - DNA, 7157 bp, Homo sapiens
  misc_feature (1485)..(1485): n is a, c, g, or t
  misc_feature (2795)..(2795): n is a, c, g, or t
  misc_feature (2805)..(2805): n is a, c, g, or t
  misc_feature (5171)..(5171): n is a, c, g, or t
atgaattattcatcattccttagaatttgggtctctttcatcttcgcacttgtacagcaccaagctcagcccagggagctcatgtatccattttggcagaatgacaccaaaacccctaaagtagatgatggaagctcatctgagattaagttggccatcccagttttcttctttggcgttccttaccgcactgtctatgtcaataacaacggagttgtttccttcaatgtgctagtgagccagttcacgccagaatcctttcccctgacagatgggagagccttcgtcgccccattttgggcagatgtgcacaatggaattcgaggcgagatctattacagagagaccatggagcctgccatcttgaaaagagccaccaaggacatcaggaagtacttcaaagacatggcaaccttctctgccacttgggttttcattgtgacatgggaggaagtcacgttttatggaggcagcagcaccacacctgtgaacaccttccaggccgtcctagtgtccgatggctcctatacattcaccctcttcaattattacgaaatcaactggaccacggggacggcgagtggcggcgaccccctgacaggtcttggtggagtgatggcacaggcaggatttaatggtggaaacctcaccaatttcttcagcctcccggggtcaagaacccccgagatcgtgaatatccaggagaccacaaacgtcaatgttccaggccgctgggcatttaaagttgatggaaaggaaattgacccagccaatggctgcacctcaaggggacaattccttcggcgaggggaggtgttttgggatgacttgaactgcaccgtcaagtgccgctgtctggatttcaacaatgagatctactgccaggaggcttcctgtagcccctacgaggtgtgcgaacccaaaggcaaattcttctactgcagcgctgtggagaccagcacatgcgtggtgtttggggagccacactaccacacttttgacggcttcctcttccacttccaaggctcctgtgcctacttgctggcccgacagtgtttgcagacttccagcctccctttcttcagtgtggaggccaagaatgaacaccgcggaggttcagccgtctcctgggtgaaggagctctcagtggaggtgaatggctacaagattctcatccccaaaggaagctatggaagagtcaaggttaatgacctagtgacttctttgcctgtcaccttagacttggggacagtgaaaatctaccagagtggcatatctactgccgtggaaacagattttgggctcttagtgacttttgatggccagcactacgcctccatttccgtcccaggctcctatataaactccacctgtggactctgtggaaactataataaaaacccactggatgacttcctccgcccggatggcaggccggccatgtctgtcctggatctgggagagagctggcgtgtgtaccacgcngactggaagtgcgactccggctgcgtcgacaactgcacccagtgcgacgctgccactgaagccctctactttggctctgactactgcggcttcctcaacaagacagacggccctctgtgggagtgtggcactgtcgtggaccccactgcttttgtgcacagctgcgtgtatgacctgtgcagtgtgagggacaatggcacgctcctctgccaagccatccaggcctatgctcttgtgtgccaagcccttggcattccaattggagactggcgaacccagactgggtgtgtgtccacagtgcagtgcccgagcttcagccactactccgtgtgcacaagcagctgccccgacacatgctccgacctgacggcctcgcggaactgcgccacgccgtgcacagagggctgcgagtgcaaccagggcttcgtcctcagcaccagccagtgcgtccctctgcacaagtgcggctgcgacttcgacggccactactacaccatgggggagttcttctgggccacggccaactgcactgtgcaatgcctgtgcgaggagggcggggacgtctactgcttcaacaagacctgcggcagcggggaggtgtgcgccgtggaggacggctaccagggctgcttccccaagcgggagaccgtgtgcctgctcagccagaaccaggtgctgcacacctttgacggcgcctcctacgccttcccctccgagttctcctacaccctcctgaagacctgccctgagcgcccagagtacttggaaatcgacatcaacaagaagaagcccgatgcaggacctgcttggctgcggggacttcggatcctggtggccgaccaggaggtcaagataggaggcatcggggcttcggaagtcaagttgaatggtcaggaagtggaattgccttttttccatccttcggggaagctggaaatttatcgaaacaaaaacagtacgacagtggagtccaagggcgtggtgactgtccagtactcagacataggtctattgtacatccggctgtccaccacatacttcaattgcacagggggcttgtgcggcttctacaatgccaacgccagtgacgagttctgtctccccaacggcaagtgcacggacaacctggcagtgttcctggaaagctggacaactttcgaggagatctgcaatggagagtgtggggacctgctgaaggcctgcaacaatgactcggagctgctcaagttttatcgaagccgctccaggtgcggcatcatcaacgacccctccaacagctccttcctggagtgccatggggtggtgaacgncactgcctantaccgcacctgccttttccgcctgtgccagagtgggggcaatgagtcagagctctgtgactctgtggcccggtatgcaagcgcctgcaagaatgcggacgtggaggtggggccctggcggacctatgacttctgcccactggagtgcccagagaacagccactttgaggagtgcatcacatgtacagagacctgtgagacccttaccctgggccccatctgcgtggatagctgctctgagggatgtcagtgtgatgagggctatgctctactgggcagccagtgtgtcacgcggagtgagtgtggctgcaactttgaggggcaccaacttgccaccaatgagaccttctgggtggacctggactgccagatcttctgctattgcagtggcacagacaacagggtccactgcgagaccattccctgcaaggatgatgagtactgcatggaggaaggtggcctgtactactgccaagcccgcaccgacgcctcctgcatcgtctcaggctacggccactacctcacctttgatggcttcccctttgacttccagaccagctgcccactcatcctgtgcaccacaggaagcaggccaagctcagactctttccccaagtttgttgtcacagccaagaatgaggaccgggacccgtcactggccttgtgggttaagcaggtggacgtgaccgtgtttggctacagcatcgtgatccaccgagcttacaagcacactgtgctggtcaacagtgaacggctctatctgcccctgaagctggggcaagggaagataaatatcttttcctttggcttccacgtggtggtggaaactgattttggcctgaaggttgtatatgactggaagaccttcctgtccatcacagtccctcggagcatgcagaacagcacctatggtctgtgtggccgctacaacggcaaccctgatgatgacctggagatgcccatgggtctgcttgcatcgagtgtcaatgagtttgggcagagctgggtgaagagggacaccttctgccaggtgggctgtggggaccgctgtccgtcctgtgccaaggtggaaggtttctccaaagtgcagcagctgtgcagcctgatccccaaccagaacgctgccttctccaagtgtcacagcaaagttaaccccaccttcttctataagaactgcctgtttgactcttgcatcgatgggggcgcggtgcagaccgcctgcagctggctgcagaactacgccagcacctgccagactcaggggattacggtgactggctggaggaattacacgtcctgcactgtcacctgccctccaaacagccattacgagagctgcgtgagtgtctgccagccccgctgcgccgccatccgcctgaagagtgactgcagccactactgcgtggagggctgtcactgcgacgctggctacgtcctcaacggcaagagctgcatcctgccccacagctgcggctgctactccgatggcaaatattacgagcccaagcagctattttggaacagcgactgcacgcggcgctgccgctgtttccgtcgcaacgtgattcagtgcgacccgcgccaatgcaagtcagacgaggagtgtgcgctgcgcaacggggtgcgcggctgcttcagcaccaagacctcctactgcctggcggccggcggcggcgtcttccgcaccttcgacggcgccttcctgcgcttcccagccaactgcgccttcgtgctgtccaccatctgccagaaactgcccgacatctccttccagcttatcatcaacttcgacaagtggtcggcccccaacctcaccatcatttcgcccgtctacttctacattaacgaagagcagattctcatcaacgaccggaacacggtcaaggtgaatggcacacaagtgaatgttccatttataactggtttggcaaccaaaatctacagcagtgaggggtttctggtgattgacaccagcccagacatccagatatactacaatggtttcaacgtcattaaaatcagcatcagcgagaggctgcagaacaaagtgtgcggtctctgtggcaacttcaacggggacctaacagatgattatgtgaccttgcgagggaagccggtggtaagcagcgtggtgctggcccagagctggaaaaccaatggcatgcagaagagacctcttgcccccagctgcaacgagctgcagttctcacagtatgcagccatgtgtgacaatgtgcacatccagaagatgcagggtgatggctactgcctgaagctcaccgacatgaagggcttcttccagccctgctatgggcttctcgatcccctcccattctacgagtcctgctacctggacggctgctacanccacaagaagttccagctgtgcggctccctggccgcctacggggaggcctgccgctccttcgggatccttagcaccgagtggattgagaaggagaattgctcaggagtggttgaagatccctgtgtgggggcggactgtcccaaccgaacttgcgagctgggcaatggcagggagctgtgtggctgcatcgagccacccccctatggaaataactcacatgacattatcgatgcagaggtgacctgcaaagcagcccaaatggaagtgtccatatctaagtgcaagctcttccagctcggttttgagagggagggcgtgaggatcaatgacagacagtgcaccggcatcgagggggaagattttatctcctttcagatcaacaacaccaaagggaattgtggaaacattgtgcagtccaatggcacgcatatcatgtataaaaacacactctggatcgaaagcgccaacaacactggcaacatcatcaccagggaccgcacgatcaatgtggaattttcatgtgcttatgagctggatatcaagatctccttggattctgttgtgaagcctatgctaagtgtaattaacctgacagttccaacccaagaaggcagcttcatcaccaagatggctctctacaaaaacgcctcctacaaacatccttaccgccagggtgaagtagtgttgacgactcgagatgtgctgtatgtaggggtttttgtggttggagctgacgccacacatttaatcctaacactcaacaaatgctatgccacacccacccgagatagcaatgataagctccgatatttcatcattgaaggagggtgtcagaacctcaaagataacaccattggcatcgaggagaatgcagtctccctgacctgtcgctttcacgtcaccgtctttaaattcataggggattacgacgaagttcaccttcactgtgcagtgtcactctgcgactcagaaaagtactcctgtaaaatcacttgcccacacaattccaggattgccacagattacacaaaagagcccaaagaacagatcatttcagtgggacctattaggagaaaaaggctggactggtgtgaggacaatggagggtgtgagcagatttgcacgagccgggtggatgggcctctctgcagctgtgtaacaggaaccctgcaggaggacggcaagagctgcagagcctctaattcttcaatggaacttcaagtctggacgcttcttctcatcatgatccagatttcattatggcattttgtctataaatcaggcacgacctcataattaactcaaggttgctatataaagtactgtaatttacttacttcaacaccctgtaggataaaaagtgtgtgcccttaagtcaaaacctatttgaaagtgtccagcatctcaaaatgatgccacctgcctccaatggtccaaggtccagaaaccagcgaccatccaagctcctctttcagagtatgaaacggggcttctacaagccagttatggaaagtatctctcttgtgtaaaattcccaaacagttgtcactagagactttggttcacatgaaaaaccagtaaaggaaaaaaattctggttagagaaatctgactggaaatctgaccagagaaatctgtcaagccagtgctatttctggatcacagttttttacagagagagggcctgttggaacgattttgaagtgatgactggaaggtttgactccctctaaggaatcttgctggtgtttggaagtgtccgatctacgttatgcacgtgttctgtctatgaggcgcttctccacccactgtgtccttcaaccttgccatggcagctttggccactggggatattgttgacctggggaaccccacccactctcctaccccctcgaacccaatcccttctctttttacaaatcaaccaaatactttttaatgtgttttatccttaaataaactttgtgttcaagtattctcattact

SEQ ID NO: 384658 - DNA, 583 bp, Homo sapiens
ctcctgcagcaagaccgactccactgatttgcctttcgtaataactgttcccacagactcacatgacattatcgatgcagaggtgacctgcaaagcagcccaaatggaagtgtccatatctaagtgcaagctcttccagctcggttttgagagggagggcgtgaggatcaatgacagacagtgcaccggcatcgagggggaagattttatctcctttcagatcaacaacaccaaagggaattgtggaaacattgtgcaggtgagaaaagcagcaggaaagagcacctggcagaggcagcgacagcttcgagtgtttgcacatttattgtcctgaaaaccaacttcagggtgatctgcttagaaatatgctccttagaaaacagcaataggcatgtgcaacatgaaagacagcaagagcagtcatcatttgatgctaagtgattgacggagttgaaagagtgatgtgttttttccttggtttgggatgcctactgtggttctttctcctgtatatggacaggattgtgtcttcttttctgcttctattgctctttgaggcaaatacatataggcttagctattt

SEQ ID NO: 384659 - DNA, 832 bp, Homo sapiens
caggtactgggggttaaggcctcaacatttcttttggggggacacagtgtaacccacaatagggggtcattggagacaatgagcatcaaggagaaatggattaaagaggtcaacagtgaacggctctatctgcccctgaagctggggcaagggaagataaatatcttttcctttggcttccacgtggtggtggaaactgattttggcctgaaggttgtatatgactggaagaccttcctgtccatcacagtccctcggagcatgcagaacagcacctatggtctgtgtggccgctacaacggcaaccctgatgatgacctggagatgcccatgggtctgcttgcatcgagtgtcaatgagtttgggcagagctgggtgaagagggacaccttctgccaggtgggctgtggggaccgctgtccgtcctgtgccaaggtggaaggtttctccaaagtgcagcagctgtgcagcctgatccccaaccagaacgctgccttctccaagtgtcacagcaaagttaaccccaccttcttctataagaactgcctgtttgactcttgcatcgatgggggcgcggtgcagaccgcctgcagctggctgcagaactacgccagcacctgccagactcaggggattacggtgactggctggaggaattacacgtcctgcagtgagtccttctcgttgtccctccttgtagcttctcctctttcttgattgctctgggaaggccagtcttccaactccctagaagtcagagcaaattgagtagcaatttaaggatatgcactttggaactgagtttgttatctgaatgaagcatgacatgtaa

SEQ ID NO: 384660 - DNA, 954 bp, Homo sapiens
tagtcagacaaaatgtgaagggtccccaaaaggggttatactgtgtaatatatctttagctggtgctggaaatgtgttaccttctgagatggaatctagtgcattacaggagatgcagctgtggagaagccctcatgctctgttttgactttccaccctgtattcttcagcatagttgggtccagttcccagtttagatctagaggcctcctggctgcagcttagcacctcagagcctcagtttcttcctttgtgaaattagggagactggactgaggactctaaagcttcttccctcatctgatactgaggaatctccgatttgtcaaacagctatttaaaggctttaggtttcaaatcctgcctgacgctgatatatagttaagaaaacaaaggaaagggacccccacgtcgtctttcccagacgtggaggcattccctgtgtgtctctttttctccctccctccccactcctcttctctcccctactcctgccattagcatcactctgtgatccctgacacagcatccccagccctgtcctagagccagggcccagtaactcaattagcaacccccagccccagctccctcccctcccctgtgagggacatcgaggagaggagaagaatcggtctgcctcccgaccagttgctgggaggggcaggggttcaccgagccttgtggcccctctgtcaggctgctctggcctgctctgagccaaggcgagaaaggaaaacaagaagatgaatcgccacgtcttcttggtggaggttccgatgagactttagaacaacagtgactggaaagaaaaacagcatctgctggaggagagggggaagaatgggctctgctgggagttgcatttattattatttttctttctaacaacgtgaaatcataatagatgatccacctctcaccttaaaaaaattaaaattaagaaaacaaaat

SEQ ID NO: 384661 - DNA, 440 bp, Homo sapiens
gaattttccaaggaattaaatgataacagtggctaaggcatagtttctaaactttcagtaagatcctggcattcacagaaaaaaatgatgaatggggtctggacatacagcctgagatctcaaaatgacaatgaaattcacaactttttctcagagacattcatgtttcctgcatatgctacaactgcagtttgaaagaggcagcaatgggagcaaccctttacaagaaacaaattgtgatatattcatgtgttggacggcagtaaataagatgaaacctgaggagtcagatccaccttcccccattcatagaggcttttcagcctcattttgaggtacagttacatatcttttgccttttgcccccgtgcatagctatctacagccaatcacagatcacagagtcactggactatagagctggaaggaagctcagagac

SEQ ID NO: 384662 - DNA, 2207 bp, Homo sapiens
acgtagtgtaggtactggcctttctaatagtcttggtatttagtgccagactcccatcaatcttttgaatgtcttttctttttctttttgcacttttctagcttttcaagtgatgactatatactgcttttcttgactgtatatattgttactgaattgtgaatatctgcagaaatgtttactagagaacctgtgactgttgaataacatgtgcccgaacatacacacacacatatgtacacacacacctcagagtactctttcttacagcggactttgctgctgctttctgcatgtgtgggacactggtatctcccgtctcagacaaatggctgatgttctctatgatattggtgttaatatcaaagaattgaatgaatacaacagaattgaggttgaaaaatatttgattgccacattcctttaagcatctttgatgaatactctgcaaagtagcctttaaaaaaatgtaaattttttaaaaagtccacagaggagaatttgctggttagcacaaaacatactgcaaaattgcttctttctggttattataactgaagaatatagaagattgacacacattttatacaccctcaggcagtgttttggaataatattgtaccttttcaaattgttatcaattaactgtttttctccatttcataattctcaagatttttctaaatacagcctttaaatttgactcaaatggaaattgtgcactttcctgtttatacccttccccacgttattgtaaaagagtttaacagcagcctgatatgtaagtttcagcaaaacttatacctgtatatgtttttatttgactcaaaaattagatattttaccatatagtcataagaatttgctcactttgatgccagaagtacttaagaagttacacggcactaattttatgagttgtatgcctaatttcaatttctaacctatttgacagtttcttttaggtcagcctttgttggtcttccatgtaaatacaagttggtacaaatcaatagaaaccattttacctacataggcaaagtaaatgtgtgacttagagactgccagatttatggtgcatctacctttttatccatttgagcttgcttttttatgtttgtgtattggttgctcctgacactatacatttcaaaattttttataacttgaaaaacacttctgtgctaccactcagttctgatcaaatccttacattttgcaacactcatttctgaattttcagtaaagaaatacacattacaaattaaaggttaaaggcccctttacatgcccttccccagtctcctcttcctcccccggaagtgtccattctgctgaattcaggttcatcattgccagacaaatgtagtaagctagtgtttcacatttccaaaatcagccttctggcagacttggaagtactcttgagaaaagaagactcgtgaccaaattctcccacagatttgtaataatgtacatattgaaaggactgaaggctctcagactgggaaagaaacttacccattttaaaattcagcattgctcaacttacctgactgccggaccccttcacccatgattctatgcactgtattgttggaacatacattgtgaaaacactgccctgcctaggcataccccctttccagaattaactttccatttaattctatagtttttcactgatgtaactttctagactggacaacaaagatgactaatagtaatcactccaagttgatgttgactgttgggttgtggtgaaatcattttgcattaaaggaaggtaaaatactaataaattgcatattccttgaccagagcacagattacttatgcttcttaattttttaaaatcttaaatcctctgtccaactggagtatctggctatgggccatgggtactcatataccctttgtcttaaactgatctgttacattttatgttcttgtggctagaagtagcctgagtttgctgttaatgtttaacacattttcttgagtaacagttctgttaatattgtacaagatggtacttgaattctttgtttgccttttttcttcctgtattagaaaatcttggtgctttttataagttttgtataaaagaattttttttaagatttgttcataaaatggtctgatccaggaaaaataaaatgggaacatggacaccatttctgaccttcaaataaaacttattatgt

SEQ ID NO: 384663 - DNA, 632 bp, Homo sapiens
cctgcctcagccttctgagtagctgggattataggcacacaccaccacacctggcttatttttatatttttagtagaaacgggatttcaccatattggctaggctggtcttgaactcctgacctcaggtgatccaccctgcctcggcctcccaaagtgctgggattacaggtgtgagccaccgcacctggcctgaggactctgaatcttgatacaggactgtgcagattgtatttgtgaataacttcttttctgacatctgagggaggacaggaggggtaggaggaccatgtagtctcatgcgttgaaacagtggacgcacagatcctgcaacattgtcaaaatccatgtttttactaaacatacattaatatttctttctcttacttctacaagttaaattaatatcactttgtggaatttttggttttgggctccagcagagatctcgtccatatttagtattagccagcgtcttagcaatgttgacaaaaggtgagaggaaaaattgctgaacatgatgctgcaaaagcctctctctatgtgtgatgaactgaaaaaggcaacctcgattatcttttttgagcgtttcagtttgagctgatgcataaccagggaatgtaaaagatccgt

SEQ ID NO: 384664 - DNA, 4329 bp, Homo sapiens
agcgggaaatccaagatggcggcgctaggctgaccctcctgctggtgacggaagtaccgcctcctcccgtctgacgcccctcaggggaccctgcatcgctccagccgccgcggccatgtctgggccaggcaacaaacgcgccgccggcgacgggggctcagggcccccggaaaagaagctgagtcgtgaggagaagaccaccacgactcttatcgagcccattcgtcttggaggcatctcttccacggaggagatggacctgaaggtactacagttcaagaacaagaaactggcagagcggctggaacaacggcaggcttgtgaagatgaactccgagaacgaattgagaagttggagaagcggcaggccacagatgatgccacactcctcatcgtcaatcgctactgggcccagctggatgaaactgtggaagcccttctccgatgccatgagagccagggggagctgtcttcagcgcctgaggcacctgggacccaggaggggccaacatgtgatgggactcctctcccagagccggggacatcagagctgagagaccccttgctgatgcagctgcggccccctctcagtgagccggccttggcttttgtggtggcactgggtgccagcagcagtgaggaggtggagctggagctgcaaggccgaatggagttctccaaggcagctgtgtctcgtgtggtagaggcctcagaccgcctacagcgccgggtggaggaactctgtcagcgagtgtacagccgaggggacagtgagcccctcagtgaggcggctcaggcacacacccgagagctgggccgtgagaaccggcgactgcaggacttggccactcagctgcaggagaaacaccaccgcatctcattggagtactccgagctccaggataaagtgacatcggcagagaccaaggtgctggagatggagacaacagtggaggacttgcagtgggacatcgagaagctgcggaagcgagagcaaaagctcaataagcacctggcagaggccttagagcagcttaactctggctactatgtatctgggagctcctcaggcttccaggggggccagatcacactcagcatgcagaagtttgagatgctgaatgcagagttagaggaaaaccaggaactggccaacagccgtatggcagagctggagaaactgcaggccgaacttcagggggctgtgcggaccaatgagcgcctcaaggtggccctgcggagccttcctgaggaggtagtgcgggagacgggggagtaccgcatgctgcaggcccaattctcactgctctacaacgagtctctgcaagtgaagacccagctagacgaggctcggggcctgctgctggccacaaagaactcccacctgcgacacatcgagcacatggagagcgacgagctggggctgcagaagaagctacgcacagaggtcattcagctggaggacacgctggcccaggtacgcaaggagtatgagatgctgcgcatcgagtttgagcagaatctggcggccaacgagcaggcggggcccatcaaccgtgagatgcgccacctgattagtagtcttcaaaaccacaaccaccagctaaaaggggacgcccagcgatacaagcggaagcttcgagaagtacaagctgagattggcaagctccgggcccaggccagtggctctgcccactccacccccaacctgggccacccagaggattctggcgtcagtgccccagccccagggaaagaggagggtgggccaggccctgtcagtacccccgacaacagaaaggagatggctccagtgcctggcaccaccactactaccacttcagtgaagaaggaggagctggtcccctctgaagaggacttccagggtataacccctggggcccagggcccttcctcccggggccgagaacctgaggccaggcccaagcgggagcttcgggaacgggaaggtcccagcctaggacctccacctgtagcctccgctctctcaagggctgatcgggagaaggccaaggtggaagaaaccaagcggaaggaatcagaactcctcaagggtctccgagcagagctcaagaaggcccaggagagccagaaggagatgaaactgctgctggatatgtacaagtcagcgcccaaggagcagcgggataaggtgcagctcatggcagcggaacgcaaggctaaggccgaggttgatgagctgcggagccgcatccgggaattggaggagagggatcgaagggagagcaagaagatcgcggatgaggatgccctgcggcgcattcggcaggcagaggagcagatagaacacctgcagcgcaagctgggtgccaccaagcaggaggaggaggctctgctctcagagatggatgtgacaggtcaggcttttgaggacatgcaggaacagaacgggcggctgctacagcagttgcgggaaaaggatgatgccaactttaagctaatgtcagagcggatcaaggccaaccagattcacaagctgctgcgggaggagaaggatgagttgggcgagcaggtccttggcctcaagtcccaggtggatgcccagctgctgactgtgcagaagctggaggagaaggagcgagccttgcagggcagcctcgggggtgtggagaaggagctgacgctgcgcagccaagccctggagctcaacaagcggaaggctgtagaagccgcccagctggccgaggacctgaaggtgcagctggagcacgtgcagactcggctgcgggagatccagccctgcctggcagagagccgggctgctcgtgagaaagagagcttcaacctcaagagggctcaggaggacatctcacggctgcggcgcaagctggaaaagcagaggaaggtggaggtctacgcagatgccgacgaaatcctccaggaggagatcaaggagtacaaggcgcggttgacctgcccctgctgtaacacccgcaagaaggatgcagtccttaccaagtgcttccacgttttctgcttcgagtgcgtgcggggccgctatgaggcccgccagaggaagtgccccaagtgcaacgcggcctttggtgcccacgacttccatcgtatctacatcagctgaacctgaaactcaggggactctggaacaccatggaccctgggggctgtgcccccatctcctccccaccccaggtctagtggccccaccctccattccggaccccatgggcccagcccctgcccatctagttggtttggggaccctggtgcatgctagtgggcatgggatcagccaagcttcgttccatcttttcctaaaggtcagagctgcagcctagggggcactgccctacagaaaaggtctgcctgagaggcctgaggagcccagagcacttgactgagcttcccggaaactggccctaacctgtctgtctccgtggatgcatcctaaccctaaggaaaattccccaggctgtgatctaccctagagaaggctcgctccctgcctactggctcacaaatgaggaccagtgagccatgtccttgttccttgtttgagactgggctgcaggccccaggaagactttccttcacccaccatccccctaacctcggcagggcttctgtcctgtggagttccctggacaccttggtctggctcttgtgccaagggctgaaggaggtaccctcttggcagatgggggcatcacttgcttcctttgggaagctctaaggttgctgcagtcaccttcctcatcttgcaggtgctgaaccaacatcatcagtttctattctaatcaggccccttcccaatctccatttctctgccaagcccatttacccccacctcatgcatcccaaggctctactgggtccctggacctaaccctgctttcatcctggtggccttaactacagtggaggtggaacttcccaggaggggaagggacagaccagccccagccgctgggccaacttccaatcattccagctagaagagcttccccctgacaccctgtgactgagcctgtgtcctgtctgcctgcccagccatgctccatcggctgtgagggcagtgcccggagaggccagagggttggagctgcagggacccgtttggacccacagcctctgttctagagatgcttgtataggctgttaattgtgatgaataaacgttcaaccctcggcctgcagccagagtagccaggccgcgcaccccaaaatgtagtcccccgattttagctgcagcagctgagcagcactttgctggcttggtgtgagcctgggagggctcagacttaacggccggcagggatcccggactgg

SEQ ID NO: 384665 - DNA, 4195 bp, Homo sapiens
agcgggaaatccaagatggcggcgctaggctgaccctcctgctggtgacggaagtaccgcctcctcccgtctgacgcccctcaggggaccctgcatcgctccagccgccgcggccatgtctgggccaggcaacaaacgcgccgccggcgacgggggctcagggcccccggaaaagaagctgagtcgtgaggagaagaccaccacgactcttatcgagcccattcgtcttggaggcatctcttccacggaggagatggacctgaaggtactacagttcaagaacaagaaactggcagagcggctggaacaacggcaggcttgtgaagatgaactccgagaacgaattgagaagttggagaagcggcaggccacagatgatgccacactcctcatcgtcaatcgctactgggcccagctggatgaaactgtggaagcccttctccgatgccatgagagccagggggagctgtcttcagcgcctgaggcacctgggacccaggaggggccaacatgtgatgggactcctctcccagagccggggacatcagagctgagagaccccttgctgatgcagctgcggccccctctcagtgagccggccttggcttttgtggtggcactgggtgccagcagcagtgaggaggtggagctggagctgcaaggccgaatggagttctccaaggcagctgtgtctcgtgtggtagaggcctcagaccgcctacagcgccgggtggaggaactctgtcagcgagtgtacagccgaggggacagtgagcccctcagtgaggcggctcaggcacacacccgagagctgggccgtgagaaccggcgactgcaggacttggccactcagctgcaggagaaacaccaccgcatctcattggagtactccgagctccaggataaagtgacatcggcagagaccaaggtgctggagatggagacaacagtggaggacttgcagtgggacatcgagaagctgcggaagcgagagcaaaagctcaataagcacctggcagaggccttagagcagcttaactctggctactatgtatctgggagctcctcaggcttccaggggggccagatcacactcagcatgcagaagtttgagatgctgaatgcagagttagaggaaaaccaggaactggccaacagccgtatggcagagctggagaaactgcaggccgaacttcagggggctgtgcggaccaatgagcgcctcaaggtggccctgcggagccttcctgaggaggtagtgcgggagacgggggagtaccgcatgctgcaggcccaattctcactgctctacaacgagtctctgcaagtgaagacccagctagacgaggctcggggcctgctgctggccacaaagaactcccacctgcgacacatcgagcacatggagagcgacgagctggggctgcagaagaagctacgcacagaggtcattcagctggaggacacgctggcccaggtacgcaaggagtatgagatgctgcgcatcgagtttgagcagaatctggcggccaacgagcaggcggggcccatcaaccgtgagatgcgccacctgattagtagtcttcaaaaccacaaccaccagctaaaaggggacgcccagcgatacaagcggaagcttcgagaagtacaagctgagattggcaagctccgggcccaggccagtggctctgcccactccacccccaacctgggccacccagaggattctggcgtcagtgccccagccccagggaaagaggagggtgggccaggccctgtcagtacccccgacaacagaaaggagatggctccagtgcctggcaccaccactactaccacttcagtgaagaaggaggagctggtcccctctgaagaggacttccagggtataacccctggggcccagggcccttcctcccggggccgagaacctgaggccaggcccaagcgggagcttcgggaacgggaaggtcccagcctaggacctccacctgtagcctccgctctctcaagggctgatcgggagaaggccaaggtggaagaaaccaagcggaaggaatcagaactcctcaagggtctccgagcagagctcaagaaggcccaggagagccagaaggagatgaaactgctgctggatatgtacaagtcagcgcccaaggagcagcgggataaggtgcagctcatggcagcggaacgcaaggctaaggccgaggttgatgagctgcggagccgcatccgggaattggaggagagggatcgaagggagagcaagaagatcgcggatgaggatgccctgcggcgcattcggcaggcagaggagcagatagaacacctgcagcgcaagctgggtgccaccaagcaggaggaggaggctctgctctcagagatggatgtgacaggtcaggcttttgaggacatgcaggaacagaacgggcggctgctacagcagttgcgggaaaaggatgatgccaactttaagctaatgtcagagcggatcaaggccaaccagattcacaagctgctgcgggaggagaaggatgagttgggcgagcaggtccttggcctcaagtcccaggtggatgcccagctgctgactgtgcagaagctggaggagaaggagcgagccttgcagggcagcctcgggggtgtggagaaggagctgacgctgcgcagccaagccctggagctcaacaagcggaaggctgtagaagccgcccagctggccgaggacctgaaggtgcagctggagcacgtgcagactcggctgcgggagatccagccctgcctggcagagagccgggctgctcgtgagaaagagagcttcaacctcaagagggctcaggaggacatctcacggctgcggcgcaagctggaaaagcagaggaaggtggaggtctacgcagatgccgacgaaatcctccaggaggagatcaaggagtacaaggcgcggttgacctgcccctgctgtaacacccgcaagaaggatgcagtccttaccaagtgcttccacgttttctgcttcgagtgcgtgcggggccgctatgaggcccgccagaggaagtgccccaagtgcaacgcggcctttggtgcccacgacttccatcgtatctacatcagctgaacctgaaactcaggggactctggaacaccatggaccctgggggctgtgcccccatctcctccccaccccaggtctagtggccccaccctccattccggaccccatgggcccagcccctgcccatctagttggtttggggaccctggtgcatgctagtgggcatgggatcagccaagcttcgttccatcttttcctaaaggtcagagctgcagcctagggggcactgccctacagaaaaggtctgcctgagaggcctgaggagcccagagcacttgactgagcttcccggaaactggccctaacctgtctgtctccgtggatgcatcctaaccctaaggaaaattccccaggctgtgatctaccctagagaaggctcgctccctgcctactggctcacaaatgaggaccagtgagccatgtccttgttccttgtttgagactgggctgcaggccccaggaagactttccttcacccaccatccccctaacctcggcagggcttctgtcctgtggagttccctggacaccttggtctggctcttgtgccaagggctgaaggaggtaccctcttggcagatgggggcatcacttgcttcctttgggaagctctaaggttgctgcagtcaccttcctcatcttgcaggtgctgaaccaacatcatcagtttctattctaatcaggccccttcccaatctccatttctctgccaagcccatttacccccacctcatgcatcccaaggctctactgggtccctggacctaaccctgctttcatcctggtggccttaactacagtggaggtggaacttcccaggaggggaagggacagaccagccccagccgctgggccaacttccaatcattccagctagaagagcttccccctgacaccctgtgactgagcctgtgtcctgtctgcctgcccagccatgctccatcggctgtgagggcagtgcccggagaggccagagggttggagctgcagggacccgtttggacccacagcctctgttctagagatgcttgtataggctgttaattgtgatgaataaacgttcaaccctcggcctgc

SEQ ID NO: 384666 - DNA, 965 bp, Homo sapiens
gttctcggccggctgaggcagatccttgttcttgtttgagatcgggctgcggcccaggaagactttccttcacccaccatccccctaacctcggcagggcttctgtcctgtggagttccctggacaccttggtctggctcttgtgccaagggctgaaggaggtaccctcttggcagatgggggcatcacttgcttcctttgggaagctctaaggttgctgcagtcaccttcctcatcttgcagctgggtgccaccaagcaggaggaggaggctctgctctcagagatggatgtgacaggtcaggcttttgaggacatgcaggaacagaacgggcggctgctacagcagttgcgggaaaaggatgatgccaactttaagctaatgtcagagcggatcaaggccaaccagattcacaagctgctgcgggaggagaaggatgagttgggcgagcaggtccttggcctcaagtcccaggtggatgcccagctgctgactgtgcagaagctggaggagaaggagcgagccttgcagggcagcctcgggggtgtggagaaggagctgacgctgcgcagccaagccctggagctcaacaagcggaaggctgtagaagccgcccagctggccgaggacctgaaggtgcagctggagcacgtgcagactcggctgcgggagatccagccctgcctggcagagagccgggctgctcgtgagaaagagagcttcaacctcaagagggctcaggaggacatctcacggctgcggcgcaagctggaaaagcagaggaaggtggaggtctacgcagatgccgacgaaatcctccaggaggagatcaaggagtacaagcgcggttgactgccctgctgtacaccgcagaaggtgccgccttacagtgctcccgtttctgctcgaggggtggggccgataggcccgagagtgcccgtgcagggcttggcccctcccggtac

SEQ ID NO: 384667 - DNA, 632 bp, Homo sapiens
  misc_feature (1)..(1): n is a, c, g, or t
nccaaatacgctagtacaggcctggagattactcgaccgagggctgacctcctacttgtgacggaagtaccgcctcctcccgtctgacgcccctcaggggaccctgcatcgctccagccgccgcggccatgtctgggccaggcaacaaacgcgccgccggcgacgggggctcagggcccccggaaaagaagctgagtcgtgaggagaagaccaccacgactcttatcgagcccattcgtcttggaggcatctcttccacggaggagatggacctgaaggtactacagttcaagaacaagaaactggcagagcggctggaacaacggcaggcttgtgaagatgaactccgagaacgaattgagaagttggagaagcggcaggccacagatgatgccacactcctcatcgtcaatcgctactgggcccagctggatgaaactgtggaagcccttctccgatgccatgagagccagggggagctgtcttcagcgcctgaggcacctgggacccaggaggggccaacatgtgatgggactcctctcccagagccggggacatcagagctgagagaccccattgctgattgcagaatagcggacaccactctaccagtgaagccgggacctttgggg

SEQ ID NO: 384668 - DNA, 4343 bp, Homo sapiens
caatccgcgaatgctaggtagctgcgtgcttatcggcaccgaggctgacctcctgctggtgacggaagtaccgcctcctcccgtctgacgcccctcaggggaccctgcatcgctccagccgccgcggccatgtctgggccaggcaacaaacgcgccgccggcgacgggggctcagggcccccggaaaagaagctgagtcgtgaggagaagaccaccacgactcttatcgagcccattcgtcttggaggcatctcttccacggaggagatggacctgaaggtactacagttcaagaacaagaaactggcagagcggctggaacaacggcaggcttgtgaagatgaactccgagaacgaattgagaagttggagaagcggcaggccacagatgatgccacactcctcatcgtcaatcgctactgggcccagctggatgaaactgtggaagcccttctccgatgccatgagagccagggggagctgtcttcagcgcctgaggcacctgggacccaggaggggccaacatgtgatgggactcctctcccagagccggggacatcagagctgagagaccccttgctgatgcagctgcggccccctctcagtgagccggccttggcttttgtggtggcactgggtgccagcagcagtgaggaggtggagctggagctgcaaggccgaatggagttctccaaggcagctgtgtctcgtgtggtagaggcctcagaccgcctacagcgccgggtggaggaactctgtcagcgagtgtacagccgaggggacagtgagcccctcagtgaggcggctcaggcacacacccgagagctgggccgtgagaaccggcgactgcaggacttggccactcagctgcaggagaaacaccaccgcatctcattggagtactccgagctccaggataaagtgacatcggcagagaccaaggtgctggagatggagacaacagtggaggacttgcagtgggacatcgagaagctgcggaagcgagagcaaaagctcaataagcacctggcagaggccttagagcagcttaactctggctactatgtatctgggagctcctcaggcttccaggggggccagatcacactcagcatgcagaagtttgagatgctgaatgcagagttagaggaaaaccaggaactggccaacagccgtatggcagagctggagaaactgcaggccgaacttcagggggctgtgcggaccaatgagcgcctcaaggtggccctgcggagccttcctgaggaggtagtgcgggagacgggggagtaccgcatgctgcaggcccaattctcactgctctacaacgagtctctgcaagtgaagacccagctagacgaggctcggggcctgctgctggccacaaagaactcccacctgcgacacatcgagcacatggagagcgacgagctggggctgcagaagaagctacgcacagaggtcattcagctggaggacacgctggcccaggtacgcaaggagtatgagatgctgcgcatcgagtttgagcagaatctggcggccaacgagcaggcggggcccatcaaccgtgagatgcgccacctgattagtagtcttcaaaaccacaaccaccagctaaaaggggacgcccagcgatacaagcggaagcttcgagaagtacaagctgagattggcaagctccgggcccaggccagtggctctgcccactccacccccaacctgggccacccagaggattctggcgtcagtgccccagccccagggaaagaggagggtgggccaggccctgtcagtacccccgacaacagaaaggagatggctccagtgcctggcaccaccactactaccacttcagtgaagaaggaggagctggtcccctctgaagaggacttccagggtataacccctggggcccagggcccttcctcccggggccgagaacctgaggccaggcccaagcgggagcttcgggaacgggaaggtcccagcctaggacctccacctgtagcctccgctctctcaagggctgatcgggagaaggccaaggtggaagaaaccaagcggaaggaatcagaactcctcaagggtctccgagcagagctcaagaaggcccaggagagccagaaggagatgaaactgctgctggatatgtacaagtcagcgcccaaggagcagcgggataaggtgcagctcatggcagcggaacgcaaggctaaggccgaggttgatgagctgcggagccgcatccgggaattggaggagagggatcgaagggagagcaagaagatcgcggatgaggatgccctgcggcgcattcggcaggcagaggagcagatagaacacctgcagcgcaagctgggtgccaccaagcaggaggaggaggctctgctctcagagatggatgtgacaggtcaggcttttgaggacatgcaggaacagaacgggcggctgctacagcagttgcgggaaaaggatgatgccaactttaagctaatgtcagagcggatcaaggccaaccagattcacaagctgctgcgggaggagaaggatgagttgggcgagcaggtccttggcctcaagtcccaggtggatgcccagctgctgactgtgcagaagctggaggagaaggagcgagccttgcagggcagcctcgggggtgtggagaaggagctgacgctgcgcagccaagccctggagctcaacaagcggaaggctgtagaagccgcccagctggccgaggacctgaaggtgcagctggagcacgtgcagactcggctgcgggagatccagccctgcctggcagagagccgggctgctcgtgagaaagagagcttcaacctcaagagggctcaggaggacatctcacggctgcggcgcaagctggaaaagcagaggaaggtggaggtctacgcagatgccgacgaaatcctccaggaggagatcaaggagtacaaggcgcggttgacctgcccctgctgtaacacccgcaagaaggatgcagtccttaccaagtgcttccacgttttctgcttcgagtgcgtgcggggccgctatgaggcccgccagaggaagtgccccaagtgcaacgcggcctttggtgcccacgacttccatcgtatctacatcagctgaacctgaaactcaggggactctggaacaccatggaccctgggggctgtgcccccatctcctccccaccccaggtctagtggccccaccctccattccggaccccatgggcccagcccctgcccatctagttggtttggggaccctggtgcatgctagtgggcatgggatcagccaagcttcgttccatcttttcctaaaggtcagagctgcagcctagggggcactgccctacagaaaaggtctgcctgagaggcctgaggagcccagagcacttgactgagcttcccggaaactggccctaacctgtctgtctccgtggatgcatcctaaccctaaggaaaattccccaggctgtgatctaccctagagaaggctcgctccctgcctactggctcacaaatgaggaccagtgagccatgtccttgttccttgtttgagactgggctgcaggccccaggaagactttccttcacccaccatccccctaacctcggcagggcttctgtcctgtggagttccctggacaccttggtctggctcttgtgccaagggctgaaggaggtaccctcttggcagatgggggcatcacttgcttcctttgggaagctctaaggttgctgcagtcaccttcctcatcttgcaggtgctgaaccaacatcatcagtttctattctaatcaggccccttcccaatctccatttctctgccaagcccatttacccccacctcatgcatcccaaggctctactgggtccctggacctaaccctgctttcatcctggtggccttaactacagtggaggtggaacttcccaggaggggaagggacagaccagccccagccgctgggccaacttccaatcattccagctagaagagcttccccctgacaccctgtgactgagcctgtgtcctgtctgcctgcccagccatgctccatcggctgtgagggcagtgcccggagaggccagagggttggagctgcagggacccgtttggacccacagcctctgttctagagatgcttgtataggctgttaattgtgatgaataaacgttcaaccctcggcctgcagccagagtagccaggccgcgcaccccaaaatgtagtcccccgattttagctgcagcagctgagcagcactttgctggcttggtgtgagcctgggagggctcagacttaacggccggcagggatcccggactgg

SEQ ID NO: 384669 - DNA, 4319 bp, Homo sapiens
gggctctggcgccgggggggacgggatccagcaggtgacggaagtaccgcctcctcccgtctgacgcccctcaggggaccctgcatcgctccagccgccgcggccatgtctgggccaggcaacaaacgcgccgccggcgacgggggctcagggcccccggaaaagaagctgagtcgtgaggagaagaccaccacgactcttatcgagcccattcgtcttggaggcatctcttccacggaggagatggacctgaaggtactacagttcaagaacaagaaactggcagagcggctggaacaacggcaggcttgtgaagatgaactccgagaacgaattgagaagttggagaagcggcaggccacagatgatgccacactcctcatcgtcaatcgctactgggcccagctggatgaaactgtggaagcccttctccgatgccatgagagccagggggagctgtcttcagcgcctgaggcacctgggacccaggaggggccaacatgtgatgggactcctctcccagagccggggacatcagagctgagagaccccttgctgatgcagctgcggccccctctcagtgagccggccttggcttttgtggtggcactgggtgccagcagcagtgaggaggtggagctggagctgcaaggccgaatggagttctccaaggcagctgtgtctcgtgtggtagaggcctcagaccgcctacagcgccgggtggaggaactctgtcagcgagtgtacagccgaggggacagtgagcccctcagtgaggcggctcaggcacacacccgagagctgggccgtgagaaccggcgactgcaggacttggccactcagctgcaggagaaacaccaccgcatctcattggagtactccgagctccaggataaagtgacatcggcagagaccaaggtgctggagatggagacaacagtggaggacttgcagtgggacatcgagaagctgcggaagcgagagcaaaagctcaataagcacctggcagaggccttagagcagcttaactctggctactatgtatctgggagctcctcaggcttccaggggggccagatcacactcagcatgcagaagtttgagatgctgaatgcagagttagaggaaaaccaggaactggccaacagccgtatggcagagctggagaaactgcaggccgaacttcagggggctgtgcggaccaatgagcgcctcaaggtggccctgcggagccttcctgaggaggtagtgcgggagacgggggagtaccgcatgctgcaggcccaattctcactgctctacaacgagtctctgcaagtgaagacccagctagacgaggctcggggcctgctgctggccacaaagaactcccacctgcgacacatcgagcacatggagagcgacgagctggggctgcagaagaagctacgcacagaggtcattcagctggaggacacgctggcccaggtacgcaaggagtatgagatgctgcgcatcgagtttgagcagaatctggcggccaacgagcaggcggggcccatcaaccgtgagatgcgccacctgattagtagtcttcaaaaccacaaccaccagctaaaaggggacgcccagcgatacaagcggaagcttcgagaagtacaagctgagattggcaagctccgggcccaggccagtggctctgcccactccacccccaacctgggccacccagaggattctggcgtcagtgccccagccccagggaaagaggagggtgggccaggccctgtcagtacccccgacaacagaaaggagatggctccagtgcctggcaccaccactactaccacttcagtgaagaaggaggagctggtcccctctgaagaggacttccagggtataacccctggggcccagggcccttcctcccggggccgagaacctgaggccaggcccaagcgggagcttcgggaacgggaaggtcccagcctaggacctccacctgtagcctccgctctctcaagggctgatcgggagaaggccaaggtggaagaaaccaagcggaaggaatcagaactcctcaagggtctccgagcagagctcaagaaggcccaggagagccagaaggagatgaaactgctgctggatatgtacaagtcagcgcccaaggagcagcgggataaggtgcagctcatggcagcggaacgcaaggctaaggccgaggttgatgagctgcggagccgcatccgggaattggaggagagggatcgaagggagagcaagaagatcgcggatgaggatgccctgcggcgcattcggcaggcagaggagcagatagaacacctgcagcgcaagctgggtgccaccaagcaggaggaggaggctctgctctcagagatggatgtgacaggtcaggcttttgaggacatgcaggaacagaacgggcggctgctacagcagttgcgggaaaaggatgatgccaactttaagctaatgtcagagcggatcaaggccaaccagattcacaagctgctgcgggaggagaaggatgagttgggcgagcaggtccttggcctcaagtcccaggtggatgcccagctgctgactgtgcagaagctggaggagaaggagcgagccttgcagggcagcctcgggggtgtggagaaggagctgacgctgcgcagccaagccctggagctcaacaagcggaaggctgtagaagccgcccagctggccgaggacctgaaggtgcagctggagcacgtgcagactcggctgcgggagatccagccctgcctggcagagagccgggctgctcgtgagaaagagagcttcaacctcaagagggctcaggaggacatctcacggctgcggcgcaagctggaaaagcagaggaaggtggaggtctacgcagatgccgacgaaatcctccaggaggagatcaaggagtacaaggcgcggttgacctgcccctgctgtaacacccgcaagaaggatgcagtccttaccaagtgcttccacgttttctgcttcgagtgcgtgcggggccgctatgaggcccgccagaggaagtgccccaagtgcaacgcggcctttggtgcccacgacttccatcgtatctacatcagctgaacctgaaactcaggggactctggaacaccatggaccctgggggctgtgcccccatctcctccccaccccaggtctagtggccccaccctccattccggaccccatgggcccagcccctgcccatctagttggtttggggaccctggtgcatgctagtgggcatgggatcagccaagcttcgttccatcttttcctaaaggtcagagctgcagcctagggggcactgccctacagaaaaggtctgcctgagaggcctgaggagcccagagcacttgactgagcttcccggaaactggccctaacctgtctgtctccgtggatgcatcctaaccctaaggaaaattccccaggctgtgatctaccctagagaaggctcgctccctgcctactggctcacaaatgaggaccagtgagccatgtccttgttccttgtttgagactgggctgcaggccccaggaagactttccttcacccaccatccccctaacctcggcagggcttctgtcctgtggagttccctggacaccttggtctggctcttgtgccaagggctgaaggaggtaccctcttggcagatgggggcatcacttgcttcctttgggaagctctaaggttgctgcagtcaccttcctcatcttgcaggtgctgaaccaacatcatcagtttctattctaatcaggccccttcccaatctccatttctctgccaagcccatttacccccacctcatgcatcccaaggctctactgggtccctggacctaaccctgctttcatcctggtggccttaactacagtggaggtggaacttcccaggaggggaagggacagaccagccccagccgctgggccaacttccaatcattccagctagaagagcttccccctgacaccctgtgactgagcctgtgtcctgtctgcctgcccagccatgctccatcggctgtgagggcagtgcccggagaggccagagggttggagctgcagggacccgtttggacccacagcctctgttctagagatgcttgtataggctgttaattgtgatgaataaacgttcaaccctcggcctgcagccagagtagccaggccgcgcaccccaaaatgtagtcccccgattttagctgcagcagctgagcagcactttgctggcttggtgtgagcctgggagggctcagacttaacggccggcagggatcccggactgg

SEQ ID NO: 384670 - DNA, 3146 bp, Homo sapiens
gccctgaatcctgttgctgatcccatttgggcatccctgccccaggtggccctgcggagccttcctgaggaggtagtgcgggagacgggggagtaccgcatgctgcaggcccaattctcactgctctacaacgagtctctgcaagtgaagacccagctagacgaggctcggggcctgctgctggccacaaagaactcccacctgcgacacatcgagcacatggagagcgacgagctggggctgcagaagaagctacgcacagaggtcattcagctggaggacacgctggcccaggtacgcaaggagtatgagatgctgcgcatcgagtttgagcagaatctggcggccaacgagcaggcggggcccatcaaccgtgagatgcgccacctgattagtagtcttcaaaaccacaaccaccagctaaaaggggacgcccagcgatacaagcggaagcttcgagaagtacaagctgagattggcaagctccgggcccaggccagtggctctgcccactccacccccaacctgggccacccagaggattctggcgtcagtgccccagccccagggaaagaggagggtgggccaggccctgtcagtacccccgacaacagaaaggagatggctccagtgcctggcaccaccactactaccacttcagtgaagaaggaggagctggtcccctctgaagaggacttccagggtataacccctggggcccagggcccttcctcccggggccgagaacctgaggccaggcccaagcgggagcttcgggaacgggaaggtcccagcctaggacctccacctgtagcctccgctctctcaagggctgatcgggagaaggccaaggtggaagaaaccaagcggaaggaatcagaactcctcaagggtctccgagcagagctcaagaaggcccaggagagccagaaggagatgaaactgctgctggatatgtacaagtcagcgcccaaggagcagcgggataaggtgcagctcatggcagcggaacgcaaggctaaggccgaggttgatgagctgcggagccgcatccgggaattggaggagagggatcgaagggagagcaagaagatcgcggatgaggatgccctgcggcgcattcggcaggcagaggagcagatagaacacctgcagcgcaagctgggtgccaccaagcaggaggaggaggctctgctctcagagatggatgtgacaggtcaggcttttgaggacatgcaggaacagaacgggcggctgctacagcagttgcgggaaaaggatgatgccaactttaagctaatgtcagagcggatcaaggccaaccagattcacaagctgctgcgggaggagaaggatgagttgggcgagcaggtccttggcctcaagtcccaggtggatgcccagctgctgactgtgcagaagctggaggagaaggagcgagccttgcagggcagcctcgggggtgtggagaaggagctgacgctgcgcagccaagccctggagctcaacaagcggaaggctgtagaagccgcccagctggccgaggacctgaaggtgcagctggagcacgtgcagactcggctgcgggagatccagccctgcctggcagagagccgggctgctcgtgagaaagagagcttcaacctcaagagggctcaggaggacatctcacggctgcggcgcaagctggaaaagcagaggaaggtggaggtctacgcagatgccgacgaaatcctccaggaggagatcaaggagtacaaggcgcggttgacctgcccctgctgtaacacccgcaagaaggatgcagtccttaccaagtgcttccacgttttctgcttcgagtgcgtgcggggccgctatgaggcccgccagaggaagtgccccaagtgcaacgcggcctttggtgcccacgacttccatcgtatctacatcagctgaacctgaaactcaggggactctggaacaccatggaccctgggggctgtgcccccatctcctccccaccccaggtctagtggccccaccctccattccggaccccatgggcccagcccctgcccatctagttggtttggggaccctggtgcatgctagtgggcatgggatcagccaagcttcgttccatcttttcctaaaggtcagagctgcagcctagggggcactgccctacagaaaaggtctgcctgagaggcctgaggagcccagagcacttgactgagcttcccggaaactggccctaacctgtctgtctccgtggatgcatcctaaccctaaggaaaattccccaggctgtgatctaccctagagaaggctcgctccctgcctactggctcacaaatgaggaccagtgagccatgtccttgttccttgtttgagactgggctgcaggccccaggaagactttccttcacccaccatccccctaacctcggcagggcttctgtcctgtggagttccctggacaccttggtctggctcttgtgccaagggctgaaggaggtaccctcttggcagatgggggcatcacttgcttcctttgggaagctctaaggttgctgcagtcaccttcctcatcttgcaggtgctgaaccaacatcatcagtttctattctaatcaggccccttcccaatctccatttctctgccaagcccatttacccccacctcatgcatcccaaggctctactgggtccctggacctaaccctgctttcatcctggtggccttaactacagtggaggtggaacttcccaggaggggaagggacagaccagccccagccgctgggccaacttccaatcattccagctagaagagcttccccctgacaccctgtgactgagcctgtgtcctgtctgcctgcccagccatgctccatcggctgtgagggcagtgcccggagaggccagagggttggagctgcagggacccgtttggacccacagcctctgttctagagatgcttgtataggctgttaattgtgatgaataaacgttcaaccctcggcctgcagccagagtagccaggccgcgcaccccaaaatgtagtcccccgattttagctgcagcagctgagcagcactttgctggcttggtgtgagcctgggagggctcagacttaacggccggcagggatcccggactgg

SEQ ID NO: 384671 - DNA, 4349 bp, Homo sapiens
agcgggaaatccaagatggcggcgctaggctgaccctcctgctggtgacggaagtaccgcctcctcccgtctgacgcccctcaggggaccctgcatcgctccagccgccgcggccatgtctgggccaggcaacaaacgcgccgccggcgacgggggctcagggcccccggaaaagaagctgagtcgtgaggagaagaccaccacgactcttatcgagcccattcgtcttggaggcatctcttccacggaggagatggacctgaaggtactacagttcaagaacaagaaactggcagagcggctggaacaacggcaggcttgtgaagatgaactccgagaacgaattgagaagttggagaagcggcaggccacagatgatgccacactcctcatcgtcaatcgctactgggcccagctggatgaaactgtggaagcccttctccgatgccatgagagccagggggagctgtcttcagcgcctgaggcacctgggacccaggaggggccaacatgtgatgggactcctctcccagagccggggacatcagagctgagagaccccttgctgatgcagctgcggccccctctcagtgagccggccttggcttttgtggtggcactgggtgccagcagcagtgaggaggtggagctggagctgcaaggccgaatggagttctccaaggcagctgtgtctcgtgtggtagaggcctcagaccgcctacagcgccgggtggaggaactctgtcagcgagtgtacagccgaggggacagtgagcccctcagtgaggcggctcaggcacacacccgagagctgggccgtgagaaccggcgactgcaggacttggccactcagctgcaggagaaacaccaccgcatctcattggagtactccgagctccaggataaagtgacatcggcagagaccaaggtgctggagatggagacaacagtggaggacttgcagtgggacatcgagaagctgcggaagcgagagcaaaagctcaataagcacctggcagaggccttagagcagcttaactctggctactatgtatctgggagctcctcaggcttccaggggggccagatcacactcagcatgcagaagtttgagatgctgaatgcagagttagaggaaaaccaggaactggccaacagccgtatggcagagctggagaaactgcaggccgaacttcagggggctgtgcggaccaatgagcgcctcaaggtggccctgcggagccttcctgaggaggtagtgcgggagacgggggagtaccgcatgctgcaggcccaattctcactgctctacaacgagtctctgcaagtgaagacccagctagacgaggctcggggcctgctgctggccacaaagaactcccacctgcgacacatcgagcacatggagagcgacgagctggggctgcagaagaagctacgcacagaggtcattcagctggaggacacgctggcccaggtacgcaaggagtatgagatgctgcgcatcgagtttgagcagaatctggcggccaacgagcaggcggggcccatcaaccgtgagatgcgccacctgattagtagtcttcaaaaccacaaccaccagctaaaaggggacgcccagcgatacaagcggaagcttcgagaagtacaagctgagattggcaagctccgggcccaggccagtggctctgcccactccacccccaacctgggccacccagaggattctggcgtcagtgccccagccccagggaaagaggagggtgggccaggccctgtcagtacccccgacaacagaaaggagatggctccagtgcctggcaccaccactactaccacttcagtgaagaaggaggagctggtcccctctgaagaggacttccagggtataacccctggggcccagggcccttcctcccggggccgagaacctgaggccaggcccaagcgggagcttcgggaacgggaaggtcccagcctaggacctccacctgtagcctccgctctctcaagggctgatcgggagaaggccaaggtggaagaaaccaagcggaaggaatcagaactcctcaagggtctccgagcagagctcaagaaggcccaggagagccagaaggagatgaaactgctgctggatatgtacaagtcagcgcccaaggagcagcgggataaggtgcagctcatggcagcggaacgcaaggctaaggccgaggttgatgagctgcggagccgcatccgggaattggaggagagggatcgaagggagagcaagaagatcgcggatgaggatgccctgcggcgcattcggcaggcagaggagcagatagaacacctgcagcgcaagctgggtgccaccaagcaggaggaggaggctctgctctcagagatggatgtgacaggtcaggcttttgaggacatgcaggaacagaacgggcggctgctacagcagttgcgggaaaaggatgatgccaactttaagctaatgtcagagcggatcaaggccaaccagattcacaagctgctgcgggaggagaaggatgagttgggcgagcaggtccttggcctcaagtcccaggtggatgcccagctgctgactgtgcagaagctggaggagaaggagcgagccttgcagggcagcctcgggggtgtggagaaggagctgacgctgcgcagccaagccctggagctcaacaagcggaaggctgtagaagccgcccagctggccgaggacctgaaggtgcagctggagcacgtgcagactcggctgcgggagatccagccctgcctggcagagagccgggctgctcgtgagaaagagagcttcaacctcaagagggctcagccaggcctctcctgccccaggaggacatctcacggctgcggcgcaagctggaaaagcagaggaaggtggaggtctacgcagatgccgacgaaatcctccaggaggagatcaaggagtacaaggcgcggttgacctgcccctgctgtaacacccgcaagaaggatgcagtccttaccaagtgcttccacgttttctgcttcgagtgcgtgcggggccgctatgaggcccgccagaggaagtgccccaagtgcaacgcggcctttggtgcccacgacttccatcgtatctacatcagctgaacctgaaactcaggggactctggaacaccatggaccctgggggctgtgcccccatctcctccccaccccaggtctagtggccccaccctccattccggaccccatgggcccagcccctgcccatctagttggtttggggaccctggtgcatgctagtgggcatgggatcagccaagcttcgttccatcttttcctaaaggtcagagctgcagcctagggggcactgccctacagaaaaggtctgcctgagaggcctgaggagcccagagcacttgactgagcttcccggaaactggccctaacctgtctgtctccgtggatgcatcctaaccctaaggaaaattccccaggctgtgatctaccctagagaaggctcgctccctgcctactggctcacaaatgaggaccagtgagccatgtccttgttccttgtttgagactgggctgcaggccccaggaagactttccttcacccaccatccccctaacctcggcagggcttctgtcctgtggagttccctggacaccttggtctggctcttgtgccaagggctgaaggaggtaccctcttggcagatgggggcatcacttgcttcctttgggaagctctaaggttgctgcagtcaccttcctcatcttgcaggtgctgaaccaacatcatcagtttctattctaatcaggccccttcccaatctccatttctctgccaagcccatttacccccacctcatgcatcccaaggctctactgggtccctggacctaaccctgctttcatcctggtggccttaactacagtggaggtggaacttcccaggaggggaagggacagaccagccccagccgctgggccaacttccaatcattccagctagaagagcttccccctgacaccctgtgactgagcctgtgtcctgtctgcctgcccagccatgctccatcggctgtgagggcagtgcccggagaggccagagggttggagctgcagggacccgtttggacccacagcctctgttctagagatgcttgtataggctgttaattgtgatgaataaacgttcaaccctcggcctgcagccagagtagccaggccgcgcaccccaaaatgtagtcccccgattttagctgcagcagctgagcagcactttgctggcttggtgtgagcctgggagggctcagacttaacggccggcagggatcccggactgg

SEQ ID NO: 384672 - DNA, 2331 bp, Homo sapiens
cttaaggacttgctgatcgcttagcagggaggggcgtgtggaagaaaccaagcggaaggaatcagaactcctcaagggtctccgagcagagctcaagaaggcccaggagagccagaaggagatgaaactgctgctggatatgtacaagtcagcgcccaaggagcagcgggataaggtgcagctcatggcagcggaacgcaaggctaaggccgaggttgatgagctgcggagccgcatccgggaattggaggagagggatcgaagggagagcaagaagatcgcggatgaggatgccctgcggcgcattcggcaggcagaggagcagatagaacacctgcagcgcaagctgggtgccaccaagcaggaggaggaggctctgctctcagagatggatgtgacaggtcaggcttttgaggacatgcaggaacagaacgggcggctgctacagcagttgcgggaaaaggatgatgccaactttaagctaatgtcagagcggatcaaggccaaccagattcacaagctgctgcgggaggagaaggatgagttgggcgagcaggtccttggcctcaagtcccaggtggatgcccagctgctgactgtgcagaagctggaggagaaggagcgagccttgcagggcagcctcgggggtgtggagaaggagctgacgctgcgcagccaagccctggagctcaacaagcggaaggctgtagaagccgcccagctggccgaggacctgaaggtgcagctggagcacgtgcagactcggctgcgggagatccagccctgcctggcagagagccgggctgctcgtgagaaagagagcttcaacctcaagagggctcaggaggacatctcacggctgcggcgcaagctggaaaagcagaggaaggtggaggtctacgcagatgccgacgaaatcctccaggaggagatcaaggagtacaaggcgcggttgacctgcccctgctgtaacacccgcaagaaggatgcagtccttaccaagtgcttccacgttttctgcttcgagtgcgtgcggggccgctatgaggcccgccagaggaagtgccccaagtgcaacgcggcctttggtgcccacgacttccatcgtatctacatcagctgaacctgaaactcaggggactctggaacaccatggaccctgggggctgtgcccccatctcctccccaccccaggtctagtggccccaccctccattccggaccccatgggcccagcccctgcccatctagttggtttggggaccctggtgcatgctagtgggcatgggatcagccaagcttcgttccatcttttcctaaaggtcagagctgcagcctagggggcactgccctacagaaaaggtctgcctgagaggcctgaggagcccagagcacttgactgagcttcccggaaactggccctaacctgtctgtctccgtggatgcatcctaaccctaaggaaaattccccaggctgtgatctaccctagagaaggctcgctccctgcctactggctcacaaatgaggaccagtgagccatgtccttgttccttgtttgagactgggctgcaggccccaggaagactttccttcacccaccatccccctaacctcggcagggcttctgtcctgtggagttccctggacaccttggtctggctcttgtgccaagggctgaaggaggtaccctcttggcagatgggggcatcacttgcttcctttgggaagctctaaggttgctgcagtcaccttcctcatcttgcaggtgctgaaccaacatcatcagtttctattctaatcaggccccttcccaatctccatttctctgccaagcccatttacccccacctcatgcatcccaaggctctactgggtccctggacctaaccctgctttcatcctggtggccttaactacagtggaggtggaacttcccaggaggggaagggacagaccagccccagccgctgggccaacttccaatcattccagctagaagagcttccccctgacaccctgtgactgagcctgtgtcctgtctgcctgcccagccatgctccatcggctgtgagggcagtgcccggagaggccagagggttggagctgcagggacccgtttggacccacagcctctgttctagagatgcttgtataggctgttaattgtgatgaataaacgttcaaccctcggcctgcagccagagtagccaggccgcgcaccccaaaatgtagtcccccgattttagctgcagcagctgagcagcactttgctggcttggtgtgagcctgggagggctcagacttaacggccggcagggatcccggactgg

SEQ ID NO: 384673 - DNA, 2228 bp, Homo sapiens
gttctcggccggctgaggcagatccttgttcttgtttgagatcgggctgcggcccaggaagactttccttcacccaccatccccctaacctcggcagggcttctgtcctgtggagttccctggacaccttggtctggctcttgtgccaagggctgaaggaggtaccctcttggcagatgggggcatcacttgcttcctttgggaagctctaaggttgctgcagtcaccttcctcatcttgcagctgggtgccaccaagcaggaggaggaggctctgctctcagagatggatgtgacaggtcaggcttttgaggacatgcaggaacagaacgggcggctgctacagcagttgcgggaaaaggatgatgccaactttaagctaatgtcagagcggatcaaggccaaccagattcacaagctgctgcgggaggagaaggatgagttgggcgagcaggtccttggcctcaagtcccaggtggatgcccagctgctgactgtgcagaagctggaggagaaggagcgagccttgcagggcagcctcgggggtgtggagaaggagctgacgctgcgcagccaagccctggagctcaacaagcggaaggctgtagaagccgcccagctggccgaggacctgaaggtgcagctggagcacgtgcagactcggctgcgggagatccagccctgcctggcagagagccgggctgctcgtgagaaagagagcttcaacctcaagagggctcaggaggacatctcacggctgcggcgcaagctggaaaagcagaggaaggtggaggtctacgcagatgccgacgaaatcctccaggaggagatcaaggagtacaaggcgcggttgacctgcccctgctgtaacacccgcaagaaggatgcagtccttaccaagtgcttccacgttttctgcttcgagtgcgtgcggggccgctatgaggcccgccagaggaagtgccccaagtgcaacgcggcctttggtgcccacgacttccatcgtatctacatcagctgaacctgaaactcaggggactctggaacaccatggaccctgggggctgtgcccccatctcctccccaccccaggtctagtggccccaccctccattccggaccccatgggcccagcccctgcccatctagttggtttggggaccctggtgcatgctagtgggcatgggatcagccaagcttcgttccatcttttcctaaaggtcagagctgcagcctagggggcactgccctacagaaaaggtctgcctgagaggcctgaggagcccagagcacttgactgagcttcccggaaactggccctaacctgtctgtctccgtggatgcatcctaaccctaaggaaaattccccaggctgtgatctaccctagagaaggctcgctccctgcctactggctcacaaatgaggaccagtgagccatgtccttgttccttgtttgagactgggctgcaggccccaggaagactttccttcacccaccatccccctaacctcggcagggcttctgtcctgtggagttccctggacaccttggtctggctcttgtgccaagggctgaaggaggtaccctcttggcagatgggggcatcacttgcttcctttgggaagctctaaggttgctgcagtcaccttcctcatcttgcaggtgctgaaccaacatcatcagtttctattctaatcaggccccttcccaatctccatttctctgccaagcccatttacccccacctcatgcatcccaaggctctactgggtccctggacctaaccctgctttcatcctggtggccttaactacagtggaggtggaacttcccaggaggggaagggacagaccagccccagccgctgggccaacttccaatcattccagctagaagagcttccccctgacaccctgtgactgagcctgtgtcctgtctgcctgcccagccatgctccatcggctgtgagggcagtgcccggagaggccagagggttggagctgcagggacccgtttggacccacagcctctgttctagagatgcttgtataggctgttaattgtgatgaataaacgttcaaccctcggcctgcagccagagtagccaggccgcgcaccccaaaatgtagtcccccgattttagctgcagcagctgagcagcactttgctggcttggtgtgagcctgggagggctcagacttaacggccggcagggatcccggactgg

SEQ ID NO: 384674 - DNA, 2013 bp, Homo sapiens
tcctgggagacaggagtgatggcagggaggctgctgaggcggcaggctgggctgggattttagcaggctggaggagcactgttgggggatgctgagttgagtcaatccatgtctggagttggaggtgagaccctcctggtggcggaagagaggtctcaggctaagaagggacccacggcagggtctctggccagtgtcgaggctgggcccagttgagggtagagagaacagatttctagttgcattgccattccagctgtgacttagcaagtgcaggtgaagaggtagacaagattgggatttcaccagaggcggccagtggggcaggagatgaagccccaaggcagagtccaggctgggcctgtgggtccttgtccttttgaggggacacatgatagccatcactgcccagtgatgaatccggactctgctgatttctagtgttgagaccttggcctctgcacctcagtttgctcattcatagagtgctcgtccttacctccagggttatgggaggatgaggtgcagtctccagtgtggtgggcttggcctggactcctcctgctgtcagcttggggtctgggcactgtcagagttgttcccaagctgatgcctttgcctggcccaggcgcggttgacctgcccctgctgtaacacccgcaagaaggatgcagtccttaccaagtgcttccacgttttctgcttcgagtgcgtgcggggccgctatgaggcccgccagaggaagtgccccaagtgcaacgcggcctttggtgcccacgacttccatcgtatctacatcagctgaacctgaaactcaggggactctggaacaccatggaccctgggggctgtgcccccatctcctccccaccccaggtctagtggccccaccctccattccggaccccatgggcccagcccctgcccatctagttggtttggggaccctggtgcatgctagtgggcatgggatcagccaagcttcgttccatcttttcctaaaggtcagagctgcagcctagggggcactgccctacagaaaaggtctgcctgagaggcctgaggagcccagagcacttgactgagcttcccggaaactggccctaacctgtctgtctccgtggatgcatcctaaccctaaggaaaattccccaggctgtgatctaccctagagaaggctcgctccctgcctactggctcacaaatgaggaccagtgagccatgtccttgttccttgtttgagactgggctgcaggccccaggaagactttccttcacccaccatccccctaacctcggcagggcttctgtcctgtggagttccctggacaccttggtctggctcttgtgccaagggctgaaggaggtaccctcttggcagatgggggcatcacttgcttcctttgggaagctctaaggttgctgcagtcaccttcctcatcttgcaggtgctgaaccaacatcatcagtttctattctaatcaggccccttcccaatctccatttctctgccaagcccatttacccccacctcatgcatcccaaggctctactgggtccctggacctaaccctgctttcatcctggtggccttaactacagtggaggtggaacttcccaggaggggaagggacagaccagccccagccgctgggccaacttccaatcattccagctagaagagcttccccctgacaccctgtgactgagcctgtgtcctgtctgcctgcccagccatgctccatcggctgtgagggcagtgcccggagaggccagagggttggagctgcagggacccgtttggacccacagcctctgttctagagatgcttgtataggctgttaattgtgatgaataaacgttcaaccctcggcctgcagccagagtagccaggccgcgcaccccaaaatgtagtcccccgattttagctgcagcagctgagcagcactttgctggcttggtgtgagcctgggagggctcagacttaacggccggcagggatcccggactgg

SEQ ID NO: 384675 - DNA, 1129 bp, Homo sapiens
cggaatcccgggtctacccacgcgtccggcccagcccctgcccatctagttggtttggggaccctggtgcatgctagtgggcatgggatcagccaagcttcgttccatcttttcctaaaggtcagagctgcagcctagggggcactgccctacagaaaaggtctgcctgagaggcctgaggagcccagagcacttgactgagcttcccggaaactggccctaacctgtctgtctccgtggatgcatcctaaccctaaggaaaattccccaggctgtgatctaccctagagaaggctcgctccctgcctactggctcacaaatgaggaccagtgagccatgtccttgttccttgtttgagactgggctgcaggccccaggaagactttccttcacccaccatccccctaacctcggcagggcttctgtcctgtggagttccctggacaccttggtctggctcttgtgccaagggctgaaggaggtaccctcttggcagatgggggcatcacttgcttcctttgggaagctctaaggttgctgcagtcaccttcctcatcttgcaggtgctgaaccaacatcatcagtttctattctaatcaggccccttcccaatctccatttctctgccaagcccatttacccccacctcatgcatcccaaggctctactgggtccctggacctaaccctgctttcatcctggtggccttaactacagtggaggtggaacttcccaggaggggaagggacagaccagccccagccgctgggccaacttccaatcattccagctagaagagcttccccctgacaccctgtgactgagcctgtgtcctgtctgcctgcccagccatgctccatcggctgtgagggcagtgcccggagaggccagagggttggagctgcagggacccgtttggacccacagcctctgttctagagatgcttgtataggctgttaattgtgatgaataaacgttcaaccctcggcctgcagccagagtagccaggccgcgcaccccaaaatgtagtcccccgattttagctgcagcagctgagcagcactttgctggcttggtgtgagcctgggagggctcagacttaacggccggcagggatcccggactgg

SEQ ID NO: 384676 - DNA, 2714 bp, Homo sapiens
  misc_feature (2680)..(2680): n is a, c, g, or t
  misc_feature (2705)..(2705): n is a, c, g, or t
agcgggaaatccaagatggcggcgctaggctgaccctcctgctggtgacggaagtaccgcctcctcccgtctgacgcccctcaggggaccctgcatcgctccagccgccgcggccatgtctgggccaggcaacaaacgcgccgccggcgacgggggctcagggcccccggaaaagaagctgagtcgtgaggagaagaccaccacgactcttatcgagcccattcgtcttggaggcatctcttccacggaggagatggacctgaaggtactacagttcaagaacaagaaactggcagagcggctggaacaacggcaggcttgtgaagatgaactccgagaacgaattgagaagttggagaagcggcaggccacagatgatgccacactcctcatcgtcaatcgctactgggcccagctggatgaaactgtggaagcccttctccgatgccatgagagccagggggagctgtcttcagcgcctgaggcacctgggacccaggaggggccaacatgtgatgggactcctctcccagagccggggacatcagagctgagagaccccttgctgatgcagctgcggccccctctcagtgagccggccttggcttttgtggtggcactgggtgccagcagcagtgaggaggtggagctggagctgcaaggccgaatggagttctccaaggcagctgtgtctcgtgtggtagaggcctcagaccgcctacagcgccgggtggaggaactctgtcagcgagtgtacagccgaggggacagtgagcccctcagtgaggcggctcaggcacacacccgagagctgggccgtgagaaccggcgactgcaggacttggccactcagctgcaggagaaacaccaccgcatctcattggagtactccgagctccaggataaagtgacatcggcagagaccaaggtgctggagatggagacaacagtggaggacttgcagtgggacatcgagaagctgcggaagcgagagcaaaagctcaataagcacctggcagaggccttagagcagcttaactctggctactatgtatctgggagctcctcaggcttccaggggggccagatcacactcagcatgcagaagtttgagatgctgaatgcagagttagaggaaaaccaggaactggccaacagccgtatggcagagctggagaaactgcaggccgaacttcagggggctgtgcggaccaatgagcgcctcaaggtggccctgcggagccttcctgaggaggtagtgcgggagacgggggagtaccgcatgctgcaggcccaattctcactgctctacaacgagtctctgcaagtgaagacccagctagacgaggctcggggcctgctgctggccacaaagaactcccacctgcgacacatcgagcacatggagagcgacgagctggggctgcagaagaagctacgcacagaggtcattcagctggaggacacgctggcccaggtacgcaaggagtatgagatgctgcgcatcgagtttgagcagaatctggcggccaacgagcaggcggggcccatcaaccgtgagatgcgccacctgattagtagtcttcaaaaccacaaccaccagctaaaaggggacgcccagcgatacaagcggaagcttcgagaagtacaagctgagattggcaagctccgggcccaggccagtggctctgcccactccacccccaacctgggccacccagaggattctggcgtcagtgccccagccccagggaaagaggagggtgggccaggccctgtcagtacccccgacaacagaaaggagatggctccagtgcctggcaccaccactactaccacttcagtgaagaaggaggagctggtcccctctgaagaggacttccagggtataacccctggggcccagggcccttcctcccggggccgagaacctgaggccaggcccaagcgggagcttcgggaacgggaaggtcccagcctaggacctccacctgtagcctccgctctctcaagggctgatcgggagaaggccaaggtggaagaaaccaagcggaaggaatcagaactcctcaagggtctccgagcagagctcaagaaggcccaggagagccagaaggagatgaaactgctgctggatatgtacaagtcagcgcccaaggagcagcgggataaggtgcagctcatggcagcggaacgcaaggctaaggccgaggttgatgagctgcggagccgcatccgggaattggaggagagggatcgaagggagagcaagaagatcgcggatgaggatgccctgcggcgcattcggcaggcagaggagcagatagaacacctgcagcgcaagctgggtgccaccaagcaggaggaggaggctctgctctcagagatggatgtgacaggtcaggcttttgaggacatgcaggaacagaacgggcggctgctacagcagttgcgggaaaaggatgatgccaactttaagctaatgtcagagcggatcaaggccaaccagattcacaagctgctgcgggaggagaaggatgagttgggcgagcaggtccttggcctcaagtcccaggtggatgcccagctgctgactgtgcagaagctggaggagaaggagcgagccttgcagggcagcctcgggggtgtggagaaggagctgacgctgctggaaatgctnacggggtcctctagagtcgaccggngcacccaag

SEQ ID NO: 384677 - DNA, 4029 bp, Homo sapiens
agcgggaaatccaagatggcggcgctaggctgaccctcctgctggtgacggaagtaccgcctcctcccgtctgacgcccctcaggggaccctgcatcgctccagccgccgcggccatgtctgggccaggcaacaaacgcgccgccggcgacgggggctcagggcccccggaaaagaagctgagtcgtgaggagaagaccaccacgactcttatcgagcccattcgtcttggaggcatctcttccacggaggagatggacctgaaggtactacagttcaagaacaagaaactggcagagcggctggaacaacggcaggcttgtgaagatgaactccgagaacgaattgagaagttggagaagcggcaggccacagatgatgccacactcctcatcgtcaatcgctactgggcccagctggatgaaactgtggaagcccttctccgatgccatgagagccagggggagctgtcttcagcgcctgaggcacctgggacccaggaggggccaacatgtgatgggactcctctcccagagccggggacatcagagctgagagaccccttgctgatgcagctgcggccccctctcagtgagccggccttggcttttgtggtggcactgggtgccagcagcagtgaggaggtggagctggagctgcaaggccgaatggagttctccaaggcagctgtgtctcgtgtggtagaggcctcagaccgcctacagcgccgggtggaggaactctgtcagcgagtgtacagccgaggggacagtgagcccctcagtgaggcggctcaggcacacacccgagagctgggccgtgagaaccggcgactgcaggacttggccactcagctgcaggagaaacaccaccgcatctcattggagtactccgagctccaggataaagtgacatcggcagagaccaaggtgctggagatggagacaacagtggaggacttgcagtgggacatcgagaagctgcggaagcgagagcaaaagctcaataagcacctggcagaggccttagagcagcttaactctggctactatgtatctgggagctcctcaggcttccaggggggccagatcacactcagcatgcagaagagcgacgagctggggctgcagaagaagctacgcacagaggtcattcagctggaggacacgctggcccaggtacgcaaggagtatgagatgctgcgcatcgagtttgagcagaatctggcggccaacgagcaggcggggcccatcaaccgtgagatgcgccacctgattagtagtcttcaaaaccacaaccaccagctaaaaggggacgcccagcgatacaagcggaagcttcgagaagtacaagctgagattggcaagctccgggcccaggccagtggctctgcccactccacccccaacctgggccacccagaggattctggcgtcagtgccccagccccagggaaagaggagggtgggccaggccctgtcagtacccccgacaacagaaaggagatggctccagtgcctggcaccaccactactaccacttcagtgaagaaggaggagctggtcccctctgaagaggacttccagggtataacccctggggcccagggcccttcctcccggggccgagaacctgaggccaggcccaagcgggagcttcgggaacgggaaggtcccagcctaggacctccacctgtagcctccgctctctcaagggctgatcgggagaaggccaaggtggaagaaaccaagcggaaggaatcagaactcctcaagggtctccgagcagagctcaagaaggcccaggagagccagaaggagatgaaactgctgctggatatgtacaagtcagcgcccaaggagcagcgggataaggtgcagctcatggcagcggaacgcaaggctaaggccgaggttgatgagctgcggagccgcatccgggaattggaggagagggatcgaagggagagcaagaagatcgcggatgaggatgccctgcggcgcattcggcaggcagaggagcagatagaacacctgcagcgcaagctgggtgccaccaagcaggaggaggaggctctgctctcagagatggatgtgacaggtcaggcttttgaggacatgcaggaacagaacgggcggctgctacagcagttgcgggaaaaggatgatgccaactttaagctaatgtcagagcggatcaaggccaaccagattcacaagctgctgcgggaggagaaggatgagttgggcgagcaggtccttggcctcaagtcccaggtggatgcccagctgctgactgtgcagaagctggaggagaaggagcgagccttgcagggcagcctcgggggtgtggagaaggagctgacgctgcgcagccaagccctggagctcaacaagcggaaggctgtagaagccgcccagctggccgaggacctgaaggtgcagctggagcacgtgcagactcggctgcgggagatccagccctgcctggcagagagccgggctgctcgtgagaaagagagcttcaacctcaagagggctcaggaggacatctcacggctgcggcgcaagctggaaaagcagaggaaggtggaggtctacgcagatgccgacgaaatcctccaggaggagatcaaggagtacaaggcgcggttgacctgcccctgctgtaacacccgcaagaaggatgcagtccttaccaagtgcttccacgttttctgcttcgagtgcgtgcggggccgctatgaggcccgccagaggaagtgccccaagtgcaacgcggcctttggtgcccacgacttccatcgtatctacatcagctgaacctgaaactcaggggactctggaacaccatggaccctgggggctgtgcccccatctcctccccaccccaggtctagtggccccaccctccattccggaccccatgggcccagcccctgcccatctagttggtttggggaccctggtgcatgctagtgggcatgggatcagccaagcttcgttccatcttttcctaaaggtcagagctgcagcctagggggcactgccctacagaaaaggtctgcctgagaggcctgaggagcccagagcacttgactgagcttcccggaaactggccctaacctgtctgtctccgtggatgcatcctaaccctaaggaaaattccccaggctgtgatctaccctagagaaggctcgctccctgcctactggctcacaaatgaggaccagtgagccatgtccttgttccttgtttgagactgggctgcaggccccaggaagactttccttcacccaccatccccctaacctcggcagggcttctgtcctgtggagttccctggacaccttggtctggctcttgtgccaagggctgaaggaggtaccctcttggcagatgggggcatcacttgcttcctttgggaagctctaaggttgctgcagtcaccttcctcatcttgcaggtgctgaaccaacatcatcagtttctattctaatcaggccccttcccaatctccatttctctgccaagcccatttacccccacctcatgcatcccaaggctctactgggtccctggacctaaccctgctttcatcctggtggccttaactacagtggaggtggaacttcccaggaggggaagggacagaccagccccagccgctgggccaacttccaatcattccagctagaagagcttccccctgacaccctgtgactgagcctgtgtcctgtctgcctgcccagccatgctccatcggctgtgagggcagtgcccggagaggccagagggttggagctgcagggacccgtttggacccacagcctctgttctagagatgcttgtataggctgttaattgtgatgaataaacgttcaaccctcggcctgcagccagagtagccaggccgcgcaccccaaaatgtagtcccccgattttagctgcagcagctgagcagcactttgctggcttggtgtgagcctgggagggctcagacttaacggccggcagggatcccggactgg

SEQ ID NO: 384678 - DNA, 4405 bp, Homo sapiens
agcgggaaatccaagatggcggcgctaggctgaccctcctgctggtgacggaagtaccgcctcctcccgtctgacgcccctcaggggaccctgcatcgctccagccgccgcggccatgtctgggccaggcaacaaacgcgccgccggcgacgggggctcagggcccccggaaaagaagctgagtcgtgaggagaagaccaccacgactcttatcgagcccattcgtcttggaggcatctcttccacggaggagatggacctgaaggtactacagttcaagaacaagaaactggcagagcggctggaacaacggcaggcttgtgaagatgaactccgagaacgaattgagaagttggagaagcggcaggccacagatgatgccacactcctcatcgtcaatcgctactgggcccagctggatgaaactgtggaagcccttctccgatgccatgagagccagggggagctgtcttcagcgcctgaggcacctgggacccaggaggggccaacatgtgatgggactcctctcccagagccggggacatcagagctgagagaccccttgctgatgcagctgcggccccctctcagtgagccggccttggcttttgtggtggcactgggtgccagcagcagtgaggaggtggagctggagctgcaaggccgaatggagttctccaaggcagctgtgtctcgtgtggtagaggcctcagaccgcctacagcgccgggtggaggaactctgtcagcgagtgtacagccgaggggacagtgagcccctcagtgaggcggctcaggcacacacccgagagctgggccgtgagaaccggcgactgcaggacttggccactcagctgcaggagaaacaccaccgcatctcattggagtactccgagctccaggataaagtgacatcggcagagaccaaggtgctggagatggagacaacagtggaggacttgcagtgggacatcgagaagctgcggaagcgagagcaaaagctcaataagcacctggcagaggccttagagcagcttaactctggctactatgtatctgggagctcctcaggcttccaggggggccagatcacactcagcatgcagaagtttgagatgctgaatgcagagttagaggaaaaccaggaactggccaacagccgtatggcagagctggagaaactgcaggccgaacttcagggggctgtgcggaccaatgagcgcctcaaggtggccctgcggagccttcctgaggaggtagtgcgggagacgggggagtaccgcatgctgcaggcccaattctcactgctctacaacgagtctctgcaagtgaagacccagctagacgaggctcggggcctgctgctggccacaaagaactcccacctgcgacacatcgagcacatggagagcgacgagctggggctgcagaagaagctacgcacagaggtcattcagctggaggacacgctggcccaggtacgcaaggagtatgagatgctgcgcatcgagtttgagcagaatctggcggccaacgagcaggcggggcccatcaaccgtgagatgcgccacctgattagtagtcttcaaaaccacaaccaccagctaaaaggggacgcccagcgatacaagcggaagcttcgagaagtacaagctgagattggcaagctccgggcccaggccagtggctctgcccactccacccccaacctgggccacccagaggattctggcgtcagtgccccagccccagggaaagaggagggtgggccaggccctgtcagtacccccgacaacagaaaggagatggctccagtgcctggcaccaccactactaccacttcagtgaagaaggaggagctggtcccctctgaagaggacttccagggtataacccctggggcccagggcccttcctcccggggccgagaacctgaggccaggcccaagcgggagcttcgggaacgggaaggtcccagcctaggacctccacctgtagcctccgctctctcaagggctgatcgggagaaggccaaggtggaagaaaccaagcggaaggaatcagaactcctcaagggtctccgagcagagctcaagaaggcccaggagagccagaaggagatgaaactgctgctggatatgtacaagtcagcgcccaaggagcagcgggataaggtgcagctcatggcagcggaacgcaaggctaaggccgaggttgatgagctgcggagccgcatccgggaattggaggagagggatcgaagggagagcaagaagatcgcggatgaggatgccctgcggcgcattcggcaggcagaggagcagatagaacacctgcagcgcaagctgggtgccaccaagcaggaggaggaggctctgctctcagagatggatgtgacaggtcaggcttttgaggacatgcaggaacagaacgggcggctgctacagcagttgcgggaaaaggatgatgccaactttaagctaatgtcagagcggatcaaggccaaccagattcacaagctgctgcgggaggagaaggatgagttgggcgagcaggtccttggcctcaagtcccaggtatggccgccgccagcttgcagactggagctggagaggtgggggtcatggccctgagtcctcctctggtccttaggtggatgcccagctgctgactgtgcagaagctggaggagaaggagcgagccttgcagggcagcctcgggggtgtggagaaggagctgacgctgcgcagccaagccctggagctcaacaagcggaaggctgtagaagccgcccagctggccgaggacctgaaggtgcagctggagcacgtgcagactcggctgcgggagatccagccctgcctggcagagagccgggctgctcgtgagaaagagagcttcaacctcaagagggctcaggaggacatctcacggctgcggcgcaagctggaaaagcagaggaaggtggaggtctacgcagatgccgacgaaatcctccaggaggagatcaaggagtacaaggcgcggttgacctgcccctgctgtaacacccgcaagaaggatgcagtccttaccaagtgcttccacgttttctgcttcgagtgcgtgcggggccgctatgaggcccgccagaggaagtgccccaagtgcaacgcggcctttggtgcccacgacttccatcgtatctacatcagctgaacctgaaactcaggggactctggaacaccatggaccctgggggctgtgcccccatctcctccccaccccaggtctagtggccccaccctccattccggaccccatgggcccagcccctgcccatctagttggtttggggaccctggtgcatgctagtgggcatgggatcagccaagcttcgttccatcttttcctaaaggtcagagctgcagcctagggggcactgccctacagaaaaggtctgcctgagaggcctgaggagcccagagcacttgactgagcttcccggaaactggccctaacctgtctgtctccgtggatgcatcctaaccctaaggaaaattccccaggctgtgatctaccctagagaaggctcgctccctgcctactggctcacaaatgaggaccagtgagccatgtccttgttccttgtttgagactgggctgcaggccccaggaagactttccttcacccaccatccccctaacctcggcagggcttctgtcctgtggagttccctggacaccttggtctggctcttgtgccaagggctgaaggaggtaccctcttggcagatgggggcatcacttgcttcctttgggaagctctaaggttgctgcagtcaccttcctcatcttgcaggtgctgaaccaacatcatcagtttctattctaatcaggccccttcccaatctccatttctctgccaagcccatttacccccacctcatgcatcccaaggctctactgggtccctggacctaaccctgctttcatcctggtggccttaactacagtggaggtggaacttcccaggaggggaagggacagaccagccccagccgctgggccaacttccaatcattccagctagaagagcttccccctgacaccctgtgactgagcctgtgtcctgtctgcctgcccagccatgctccatcggctgtgagggcagtgcccggagaggccagagggttggagctgcagggacccgtttggacccacagcctctgttctagagatgcttgtataggctgttaattgtgatgaataaacgttcaaccctcggcctgcagccagagtagccaggccgcgcaccccaaaatgtagtcccccgattttagctgcagcagctgagcagcactttgctggcttggtgtgagcctgggagggctcagacttaacggccggcagggatcccggactgg

SEQ ID NO: 384679 - DNA, 4367 bp, Homo sapiens
  misc_feature (71)..(71): n is a, c, g, or t
  misc_feature (79)..(79): n is a, c, g, or t
  misc_feature (81)..(82): n is a, c, g, or t
cgcaaaaagaaaacaagaaaaaaaatacgttcagaacgacgctcagtgattatacaggcacgagggctgancctcctgncnngtgacggaagtaccgcctcctcccgtctgacgcccctcaggggaccctgcatcgctccagccgccgcggccatgtctgggccaggcaacaaacgcgccgccggcgacgggggctcagggcccccggaaaagaagctgagtcgtgaggagaagaccaccacgactcttatcgagcccattcgtcttggaggcatctcttccacggaggagatggacctgaaggtactacagttcaagaacaagaaactggcagagcggctggaacaacggcaggcttgtgaagatgaactccgagaacgaattgagaagttggagaagcggcaggccacagatgatgccacactcctcatcgtcaatcgctactgggcccagctggatgaaactgtggaagcccttctccgatgccatgagagccagggggagctgtcttcagcgcctgaggcacctgggacccaggaggggccaacatgtgatgggactcctctcccagagccggggacatcagagctgagagaccccttgctgatgcagctgcggccccctctcagtgagccggccttggcttttgtggtggcactgggtgccagcagcagtgaggaggtggagctggagctgcaaggccgaatggagttctccaaggcagctgtgtctcgtgtggtagaggcctcagaccgcctacagcgccgggtggaggaactctgtcagcgagtgtacagccgaggggacagtgagcccctcagtgaggcggctcaggcacacacccgagagctgggccgtgagaaccggcgactgcaggacttggccactcagctgcaggagaaacaccaccgcatctcattggagtactccgagctccaggataaagtgacatcggcagagaccaaggtgctggagatggagacaacagtggaggacttgcagtgggacatcgagaagctgcggaagcgagagcaaaagctcaataagcacctggcagaggccttagagcagcttaactctggctactatgtatctgggagctcctcaggcttccaggggggccagatcacactcagcatgcagaagtttgagatgctgaatgcagagttagaggaaaaccaggaactggccaacagccgtatggcagagctggagaaactgcaggccgaacttcagggggctgtgcggaccaatgagcgcctcaaggtggccctgcggagccttcctgaggaggtagtgcgggagacgggggagtaccgcatgctgcaggcccaattctcactgctctacaacgagtctctgcaagtgaagacccagctagacgaggctcggggcctgctgctggccacaaagaactcccacctgcgacacatcgagcacatggagagcgacgagctggggctgcagaagaagctacgcacagaggtcattcagctggaggacacgctggcccaggtacgcaaggagtatgagatgctgcgcatcgagtttgagcagaatctggcggccaacgagcaggcggggcccatcaaccgtgagatgcgccacctgattagtagtcttcaaaaccacaaccaccagctaaaaggggacgcccagcgatacaagcggaagcttcgagaagtacaagctgagattggcaagctccgggcccaggccagtggctctgcccactccacccccaacctgggccacccagaggattctggcgtcagtgccccagccccagggaaagaggagggtgggccaggccctgtcagtacccccgacaacagaaaggagatggctccagtgcctggcaccaccactactaccacttcagtgaagaaggaggagctggtcccctctgaagaggacttccagggtataacccctggggcccagggcccttcctcccggggccgagaacctgaggccaggcccaagcgggagcttcgggaacgggaaggtcccagcctaggacctccacctgtagcctccgctctctcaagggctgatcgggagaaggccaaggtggaagaaaccaagcggaaggaatcagaactcctcaagggtctccgagcagagctcaagaaggcccaggagagccagaaggagatgaaactgctgctggatatgtacaagtcagcgcccaaggagcagcgggataaggtgcagctcatggcagcggaacgcaaggctaaggccgaggttgatgagctgcggagccgcatccgggaattggaggagagggatcgaagggagagcaagaagatcgcggatgaggatgccctgcggcgcattcggcaggcagaggagcagatagaacacctgcagcgcaagctgggtgccaccaagcaggaggaggaggctctgctctcagagatggatgtgacaggtcaggcttttgaggacatgcaggaacagaacgggcggctgctacagcagttgcgggaaaaggatgatgccaactttaagctaatgtcagagcggatcaaggccaaccagattcacaagctgctgcgggaggagaaggatgagttgggcgagcaggtccttggcctcaagtcccaggtggatgcccagctgctgactgtgcagaagctggaggagaaggagcgagccttgcagggcagcctcgggggtgtggagaaggagctgacgctgcgcagccaagccctggagctcaacaagcggaaggctgtagaagccgcccagctggccgaggacctgaaggtgcagctggagcacgtgcagactcggctgcgggagatccagccctgcctggcagagagccgggctgctcgtgagaaagagagcttcaacctcaagagggctcaggaggacatctcacggctgcggcgcaagctggaaaagcagaggaaggtggaggtctacgcagatgccgacgaaatcctccaggaggagatcaaggagtacaaggcgcggttgacctgcccctgctgtaacacccgcaagaaggatgcagtccttaccaagtgcttccacgttttctgcttcgagtgcgtgcggggccgctatgaggcccgccagaggaagtgccccaagtgcaacgcggcctttggtgcccacgacttccatcgtatctacatcagctgaacctgaaactcaggggactctggaacaccatggaccctgggggctgtgcccccatctcctccccaccccaggtctagtggccccaccctccattccggaccccatgggcccagcccctgcccatctagttggtttggggaccctggtgcatgctagtgggcatgggatcagccaagcttcgttccatcttttcctaaaggtcagagctgcagcctagggggcactgccctacagaaaaggtctgcctgagaggcctgaggagcccagagcacttgactgagcttcccggaaactggccctaacctgtctgtctccgtggatgcatcctaaccctaaggaaaattccccaggctgtgatctaccctagagaaggctcgctccctgcctactggctcacaaatgaggaccagtgagccatgtccttgttccttgtttgagactgggctgcaggccccaggaagactttccttcacccaccatccccctaacctcggcagggcttctgtcctgtggagttccctggacaccttggtctggctcttgtgccaagggctgaaggaggtaccctcttggcagatgggggcatcacttgcttcctttgggaagctctaaggttgctgcagtcaccttcctcatcttgcaggtgctgaaccaacatcatcagtttctattctaatcaggccccttcccaatctccatttctctgccaagcccatttacccccacctcatgcatcccaaggctctactgggtccctggacctaaccctgctttcatcctggtggccttaactacagtggaggtggaacttcccaggaggggaagggacagaccagccccagccgctgggccaacttccaatcattccagctagaagagcttccccctgacaccctgtgactgagcctgtgtcctgtctgcctgcccagccatgctccatcggctgtgagggcagtgcccggagaggccagagggttggagctgcagggacccgtttggacccacagcctctgttctagagatgcttgtataggctgttaattgtgatgaataaacgttcaaccctcggcctgcagccagagtagccaggccgcgcaccccaaaatgtagtcccccgattttagctgcagcagctgagcagcactttgctggcttggtgtgagcctgggagggctcagacttaacggccggcagggatcccggactgg

SEQ ID NO: 384680 - DNA, 3978 bp, Homo sapiens
  misc_feature (28)..(28): n is a, c, g, or t
  misc_feature (48)..(48): n is a, c, g, or t
  misc_feature (55)..(55): n is a, c, g, or t
aggcctaggtacgaggcctgggtggtcntgcacactcctcatcgtcantcgctantgggcccagctggatgaaactgtggaagcccttctccgatgccatgagagccagggggagctgtcttcagcgcctgaggcacctgggacccaggaggggccaacatgtgatgggactcctctcccagagccggggacatcagagctgagagaccccttgctgatgcagctgcggccccctctcagtgagccggccttggcttttgtggtggcactgggtgccagcagcagtgaggaggtggagctggagctgcaaggccgaatggagttctccaaggcagctgtgtctcgtgtggtagaggcctcagaccgcctacagcgccgggtggaggaactctgtcagcgagtgtacagccgaggggacagtgagcccctcagtgaggcggctcaggcacacacccgagagctgggccgtgagaaccggcgactgcaggacttggccactcagctgcaggagaaacaccaccgcatctcattggagtactccgagctccaggataaagtgacatcggcagagaccaaggtgctggagatggagacaacagtggaggacttgcagtgggacatcgagaagctgcggaagcgagagcaaaagctcaataagcacctggcagaggccttagagcagcttaactctggctactatgtatctgggagctcctcaggcttccaggggggccagatcacactcagcatgcagaagtttgagatgctgaatgcagagttagaggaaaaccaggaactggccaacagccgtatggcagagctggagaaactgcaggccgaacttcagggggctgtgcggaccaatgagcgcctcaaggtggccctgcggagccttcctgaggaggtagtgcgggagacgggggagtaccgcatgctgcaggcccaattctcactgctctacaacgagtctctgcaagtgaagacccagctagacgaggctcggggcctgctgctggccacaaagaactcccacctgcgacacatcgagcacatggagagcgacgagctggggctgcagaagaagctacgcacagaggtcattcagctggaggacacgctggcccaggtacgcaaggagtatgagatgctgcgcatcgagtttgagcagaatctggcggccaacgagcaggcggggcccatcaaccgtgagatgcgccacctgattagtagtcttcaaaaccacaaccaccagctaaaaggggacgcccagcgatacaagcggaagcttcgagaagtacaagctgagattggcaagctccgggcccaggccagtggctctgcccactccacccccaacctgggccacccagaggattctggcgtcagtgccccagccccagggaaagaggagggtgggccaggccctgtcagtacccccgacaacagaaaggagatggctccagtgcctggcaccaccactactaccacttcagtgaagaaggaggagctggtcccctctgaagaggacttccagggtataacccctggggcccagggcccttcctcccggggccgagaacctgaggccaggcccaagcgggagcttcgggaacgggaaggtcccagcctaggacctccacctgtagcctccgctctctcaagggctgatcgggagaaggccaaggtggaagaaaccaagcggaaggaatcagaactcctcaagggtctccgagcagagctcaagaaggcccaggagagccagaaggagatgaaactgctgctggatatgtacaagtcagcgcccaaggagcagcgggataaggtgcagctcatggcagcggaacgcaaggctaaggccgaggttgatgagctgcggagccgcatccgggaattggaggagagggatcgaagggagagcaagaagatcgcggatgaggatgccctgcggcgcattcggcaggcagaggagcagatagaacacctgcagcgcaagctgggtgccaccaagcaggaggaggaggctctgctctcagagatggatgtgacaggtcaggcttttgaggacatgcaggaacagaacgggcggctgctacagcagttgcgggaaaaggatgatgccaactttaagctaatgtcagagcggatcaaggccaaccagattcacaagctgctgcgggaggagaaggatgagttgggcgagcaggtccttggcctcaagtcccaggtggatgcccagctgctgactgtgcagaagctggaggagaaggagcgagccttgcagggcagcctcgggggtgtggagaaggagctgacgctgcgcagccaagccctggagctcaacaagcggaaggctgtagaagccgcccagctggccgaggacctgaaggtgcagctggagcacgtgcagactcggctgcgggagatccagccctgcctggcagagagccgggctgctcgtgagaaagagagcttcaacctcaagagggctcaggaggacatctcacggctgcggcgcaagctggaaaagcagaggaaggtggaggtctacgcagatgccgacgaaatcctccaggaggagatcaaggagtacaaggcgcggttgacctgcccctgctgtaacacccgcaagaaggatgcagtccttaccaagtgcttccacgttttctgcttcgagtgcgtgcggggccgctatgaggcccgccagaggaagtgccccaagtgcaacgcggcctttggtgcccacgacttccatcgtatctacatcagctgaacctgaaactcaggggactctggaacaccatggaccctgggggctgtgcccccatctcctccccaccccaggtctagtggccccaccctccattccggaccccatgggcccagcccctgcccatctagttggtttggggaccctggtgcatgctagtgggcatgggatcagccaagcttcgttccatcttttcctaaaggtcagagctgcagcctagggggcactgccctacagaaaaggtctgcctgagaggcctgaggagcccagagcacttgactgagcttcccggaaactggccctaacctgtctgtctccgtggatgcatcctaaccctaaggaaaattccccaggctgtgatctaccctagagaaggctcgctccctgcctactggctcacaaatgaggaccagtgagccatgtccttgttccttgtttgagactgggctgcaggccccaggaagactttccttcacccaccatccccctaacctcggcagggcttctgtcctgtggagttccctggacaccttggtctggctcttgtgccaagggctgaaggaggtaccctcttggcagatgggggcatcacttgcttcctttgggaagctctaaggttgctgcagtcaccttcctcatcttgcaggtgctgaaccaacatcatcagtttctattctaatcaggccccttcccaatctccatttctctgccaagcccatttacccccacctcatgcatcccaaggctctactgggtccctggacctaaccctgctttcatcctggtggccttaactacagtggaggtggaacttcccaggaggggaagggacagaccagccccagccgctgggccaacttccaatcattccagctagaagagcttccccctgacaccctgtgactgagcctgtgtcctgtctgcctgcccagccatgctccatcggctgtgagggcagtgcccggagaggccagagggttggagctgcagggacccgtttggacccacagcctctgttctagagatgcttgtataggctgttaattgtgatgaataaacgttcaaccctcggcctgcagccagagtagccaggccgcgcaccccaaaatgtagtcccccgattttagctgcagcagctgagcagcactttgctggcttggtgtgagcctgggagggctcagacttaacggccggcagggatcccggactgg

SEQ ID NO: 384681 - DNA, 3976 bp, Homo sapiens
tacgcgaggcgtggtgtggcgcccgccacacgcctcatcggggactcgctactgttgcccagctggatgaaactgtggaagcccttctccgatgccatgagagccagggggagctgtcttcagcgcctgaggcacctgggacccaggaggggccaacatgtgatgggactcctctcccagagccggggacatcagagctgagagaccccttgctgatgcagctgcggccccctctcagtgagccggccttggcttttgtggtggcactgggtgccagcagcagtgaggaggtggagctggagctgcaaggccgaatggagttctccaaggcagctgtgtctcgtgtggtagaggcctcagaccgcctacagcgccgggtggaggaactctgtcagcgagtgtacagccgaggggacagtgagcccctcagtgaggcggctcaggcacacacccgagagctgggccgtgagaaccggcgactgcaggacttggccactcagctgcaggagaaacaccaccgcatctcattggagtactccgagctccaggataaagtgacatcggcagagaccaaggtgctggagatggagacaacagtggaggacttgcagtgggacatcgagaagctgcggaagcgagagcaaaagctcaataagcacctggcagaggccttagagcagcttaactctggctactatgtatctgggagctcctcaggcttccaggggggccagatcacactcagcatgcagaagtttgagatgctgaatgcagagttagaggaaaaccaggaactggccaacagccgtatggcagagctggagaaactgcaggccgaacttcagggggctgtgcggaccaatgagcgcctcaaggtggccctgcggagccttcctgaggaggtagtgcgggagacgggggagtaccgcatgctgcaggcccaattctcactgctctacaacgagtctctgcaagtgaagacccagctagacgaggctcggggcctgctgctggccacaaagaactcccacctgcgacacatcgagcacatggagagcgacgagctggggctgcagaagaagctacgcacagaggtcattcagctggaggacacgctggcccaggtacgcaaggagtatgagatgctgcgcatcgagtttgagcagaatctggcggccaacgagcaggcggggcccatcaaccgtgagatgcgccacctgattagtagtcttcaaaaccacaaccaccagctaaaaggggacgcccagcgatacaagcggaagcttcgagaagtacaagctgagattggcaagctccgggcccaggccagtggctctgcccactccacccccaacctgggccacccagaggattctggcgtcagtgccccagccccagggaaagaggagggtgggccaggccctgtcagtacccccgacaacagaaaggagatggctccagtgcctggcaccaccactactaccacttcagtgaagaaggaggagctggtcccctctgaagaggacttccagggtataacccctggggcccagggcccttcctcccggggccgagaacctgaggccaggcccaagcgggagcttcgggaacgggaaggtcccagcctaggacctccacctgtagcctccgctctctcaagggctgatcgggagaaggccaaggtggaagaaaccaagcggaaggaatcagaactcctcaagggtctccgagcagagctcaagaaggcccaggagagccagaaggagatgaaactgctgctggatatgtacaagtcagcgcccaaggagcagcgggataaggtgcagctcatggcagcggaacgcaaggctaaggccgaggttgatgagctgcggagccgcatccgggaattggaggagagggatcgaagggagagcaagaagatcgcggatgaggatgccctgcggcgcattcggcaggcagaggagcagatagaacacctgcagcgcaagctgggtgccaccaagcaggaggaggaggctctgctctcagagatggatgtgacaggtcaggcttttgaggacatgcaggaacagaacgggcggctgctacagcagttgcgggaaaaggatgatgccaactttaagctaatgtcagagcggatcaaggccaaccagattcacaagctgctgcgggaggagaaggatgagttgggcgagcaggtccttggcctcaagtcccaggtggatgcccagctgctgactgtgcagaagctggaggagaaggagcgagccttgcagggcagcctcgggggtgtggagaaggagctgacgctgcgcagccaagccctggagctcaacaagcggaaggctgtagaagccgcccagctggccgaggacctgaaggtgcagctggagcacgtgcagactcggctgcgggagatccagccctgcctggcagagagccgggctgctcgtgagaaagagagcttcaacctcaagagggctcaggaggacatctcacggctgcggcgcaagctggaaaagcagaggaaggtggaggtctacgcagatgccgacgaaatcctccaggaggagatcaaggagtacaaggcgcggttgacctgcccctgctgtaacacccgcaagaaggatgcagtccttaccaagtgcttccacgttttctgcttcgagtgcgtgcggggccgctatgaggcccgccagaggaagtgccccaagtgcaacgcggcctttggtgcccacgacttccatcgtatctacatcagctgaacctgaaactcaggggactctggaacaccatggaccctgggggctgtgcccccatctcctccccaccccaggtctagtggccccaccctccattccggaccccatgggcccagcccctgcccatctagttggtttggggaccctggtgcatgctagtgggcatgggatcagccaagcttcgttccatcttttcctaaaggtcagagctgcagcctagggggcactgccctacagaaaaggtctgcctgagaggcctgaggagcccagagcacttgactgagcttcccggaaactggccctaacctgtctgtctccgtggatgcatcctaaccctaaggaaaattccccaggctgtgatctaccctagagaaggctcgctccctgcctactggctcacaaatgaggaccagtgagccatgtccttgttccttgtttgagactgggctgcaggccccaggaagactttccttcacccaccatccccctaacctcggcagggcttctgtcctgtggagttccctggacaccttggtctggctcttgtgccaagggctgaaggaggtaccctcttggcagatgggggcatcacttgcttcctttgggaagctctaaggttgctgcagtcaccttcctcatcttgcaggtgctgaaccaacatcatcagtttctattctaatcaggccccttcccaatctccatttctctgccaagcccatttacccccacctcatgcatcccaaggctctactgggtccctggacctaaccctgctttcatcctggtggccttaactacagtggaggtggaacttcccaggaggggaagggacagaccagccccagccgctgggccaacttccaatcattccagctagaagagcttccccctgacaccctgtgactgagcctgtgtcctgtctgcctgcccagccatgctccatcggctgtgagggcagtgcccggagaggccagagggttggagctgcagggacccgtttggacccacagcctctgttctagagatgcttgtataggctgttaattgtgatgaataaacgttcaaccctcggcctgcagccagagtagccaggccgcgcaccccaaaatgtagtcccccgattttagctgcagcagctgagcagcactttgctggcttggtgtgagcctgggagggctcagacttaacggccggcagggatcccggactgg

SEQ ID NO: 384682 - DNA, 2433 bp, Homo sapiens
gctgtcctctgagagactcaggtatacctgggccagccttctccggcgagactgagcagccagcggagctcggaagggaagtccagctagactcactgtagcctccgctctctcaagggctgatcgggagaaggccaaggtggaagaaaccaagcggaaggaatcagaactcctcaagggtctccgagcagagctcaagaaggcccaggagagccagaaggagatgaaactgctgctggatatgtacaagtcagcgcccaaggagcagcgggataaggtgcagctcatggcagcggaacgcaaggctaaggccgaggttgatgagctgcggagccgcatccgggaattggaggagagggatcgaagggagagcaagaagatcgcggatgaggatgccctgcggcgcattcggcaggcagaggagcagatagaacacctgcagcgcaagctgggtgccaccaagcaggaggaggaggctctgctctcagagatggatgtgacaggtcaggcttttgaggacatgcaggaacagaacgggcggctgctacagcagttgcgggaaaaggatgatgccaactttaagctaatgtcagagcggatcaaggccaaccagattcacaagctgctgcgggaggagaaggatgagttgggcgagcaggtccttggcctcaagtcccaggtggatgcccagctgctgactgtgcagaagctggaggagaaggagcgagccttgcagggcagcctcgggggtgtggagaaggagctgacgctgcgcagccaagccctggagctcaacaagcggaaggctgtagaagccgcccagctggccgaggacctgaaggtgcagctggagcacgtgcagactcggctgcgggagatccagccctgcctggcagagagccgggctgctcgtgagaaagagagcttcaacctcaagagggctcaggaggacatctcacggctgcggcgcaagctggaaaagcagaggaaggtggaggtctacgcagatgccgacgaaatcctccaggaggagatcaaggagtacaaggcgcggttgacctgcccctgctgtaacacccgcaagaaggatgcagtccttaccaagtgcttccacgttttctgcttcgagtgcgtgcggggccgctatgaggcccgccagaggaagtgccccaagtgcaacgcggcctttggtgcccacgacttccatcgtatctacatcagctgaacctgaaactcaggggactctggaacaccatggaccctgggggctgtgcccccatctcctccccaccccaggtctagtggccccaccctccattccggaccccatgggcccagcccctgcccatctagttggtttggggaccctggtgcatgctagtgggcatgggatcagccaagcttcgttccatcttttcctaaaggtcagagctgcagcctagggggcactgccctacagaaaaggtctgcctgagaggcctgaggagcccagagcacttgactgagcttcccggaaactggccctaacctgtctgtctccgtggatgcatcctaaccctaaggaaaattccccaggctgtgatctaccctagagaaggctcgctccctgcctactggctcacaaatgaggaccagtgagccatgtccttgttccttgtttgagactgggctgcaggccccaggaagactttccttcacccaccatccccctaacctcggcagggcttctgtcctgtggagttccctggacaccttggtctggctcttgtgccaagggctgaaggaggtaccctcttggcagatgggggcatcacttgcttcctttgggaagctctaaggttgctgcagtcaccttcctcatcttgcaggtgctgaaccaacatcatcagtttctattctaatcaggccccttcccaatctccatttctctgccaagcccatttacccccacctcatgcatcccaaggctctactgggtccctggacctaaccctgctttcatcctggtggccttaactacagtggaggtggaacttcccaggaggggaagggacagaccagccccagccgctgggccaacttccaatcattccagctagaagagcttccccctgacaccctgtgactgagcctgtgtcctgtctgcctgcccagccatgctccatcggctgtgagggcagtgcccggagaggccagagggttggagctgcagggacccgtttggacccacagcctctgttctagagatgcttgtataggctgttaattgtgatgaataaacgttcaaccctcggcctgcagccagagtagccaggccgcgcaccccaaaatgtagtcccccgattttagctgcagcagctgagcagcactttgctggcttggtgtgagcctgggagggctcagacttaacggccggcagggatcccggactgg

SEQ ID NO: 384683 - DNA, 2213 bp, Homo sapiens
tgctcggcgactctacaggatcctctccccgtactgccacaggagcagcgggataaggtgcagctcatggcagcggaacgcaaggctaaggccgaggttgatgagctgcggagccgcatccgggaattggaggagagggatcgaagggagagcaagaagatcgcggatgaggatgccctgcggcgcattcggcaggcagaggagcagatagaacacctgcagcgcaagctgggtgccaccaagcaggaggaggaggctctgctctcagagatggatgtgacaggtcaggcttttgaggacatgcaggaacagaacgggcggctgctacagcagttgcgggaaaaggatgatgccaactttaagctaatgtcagagcggatcaaggccaaccagattcacaagctgctgcgggaggagaaggatgagttgggcgagcaggtccttggcctcaagtcccaggtggatgcccagctgctgactgtgcagaagctggaggagaaggagcgagccttgcagggcagcctcgggggtgtggagaaggagctgacgctgcgcagccaagccctggagctcaacaagcggaaggctgtagaagccgcccagctggccgaggacctgaaggtgcagctggagcacgtgcagactcggctgcgggagatccagccctgcctggcagagagccgggctgctcgtgagaaagagagcttcaacctcaagagggctcaggaggacatctcacggctgcggcgcaagctggaaaagcagaggaaggtggaggtctacgcagatgccgacgaaatcctccaggaggagatcaaggagtacaaggcgcggttgacctgcccctgctgtaacacccgcaagaaggatgcagtccttaccaagtgcttccacgttttctgcttcgagtgcgtgcggggccgctatgaggcccgccagaggaagtgccccaagtgcaacgcggcctttggtgcccacgacttccatcgtatctacatcagctgaacctgaaactcaggggactctggaacaccatggaccctgggggctgtgcccccatctcctccccaccccaggtctagtggccccaccctccattccggaccccatgggcccagcccctgcccatctagttggtttggggaccctggtgcatgctagtgggcatgggatcagccaagcttcgttccatcttttcctaaaggtcagagctgcagcctagggggcactgccctacagaaaaggtctgcctgagaggcctgaggagcccagagcacttgactgagcttcccggaaactggccctaacctgtctgtctccgtggatgcatcctaaccctaaggaaaattccccaggctgtgatctaccctagagaaggctcgctccctgcctactggctcacaaatgaggaccagtgagccatgtccttgttccttgtttgagactgggctgcaggccccaggaagactttccttcacccaccatccccctaacctcggcagggcttctgtcctgtggagttccctggacaccttggtctggctcttgtgccaagggctgaaggaggtaccctcttggcagatgggggcatcacttgcttcctttgggaagctctaaggttgctgcagtcaccttcctcatcttgcaggtgctgaaccaacatcatcagtttctattctaatcaggccccttcccaatctccatttctctgccaagcccatttacccccacctcatgcatcccaaggctctactgggtccctggacctaaccctgctttcatcctggtggccttaactacagtggaggtggaacttcccaggaggggaagggacagaccagccccagccgctgggccaacttccaatcattccagctagaagagcttccccctgacaccctgtgactgagcctgtgtcctgtctgcctgcccagccatgctccatcggctgtgagggcagtgcccggagaggccagagggttggagctgcagggacccgtttggacccacagcctctgttctagagatgcttgtataggctgttaattgtgatgaataaacgttcaaccctcggcctgcagccagagtagccaggccgcgcaccccaaaatgtagtcccccgattttagctgcagcagctgagcagcactttgctggcttggtgtgagcctgggagggctcagacttaacggccggcagggatcccggactgg

SEQ ID NO: 384684 - DNA, 3111 bp, Homo sapiens
agcgggaaatccaagatggcggcgctaggctgaccctcctgctggtgacggaagtaccgcctcctcccgtctgacgcccctcaggggaccctgcatcgctccagccgccgcggccatgtctgggccaggcaacaaacgcgccgccggcgacgggggctcagggcccccggaaaagaagctgagtcgtgaggagaagaccaccacgactcttatcgagcccattcgtcttggaggcatctcttccacggaggagatggacctgaaggtactacagttcaagaacaagaaactggcagagcggctggaacaacggcaggcttgtgaagatgaactccgagaacgaattgagaagttggagaagcggcaggccacagatgatgccacactcctcatcgtcaatcgctactgggcccagctggatgaaactgtggaagcccttctccgatgccatgagagccagggggagctgtcttcagcgcctgaggcacctgggacccaggaggggccaacatgtgatgggactcctctcccagagccggggacatcagagctgagagaccccttgctgatgcagctgcggccccctctcagtgagccggccttggcttttgtggtggcactgggtgccagcagcagtgaggaggtggagctggagctgcaaggccgaatggagttctccaaggcagctgtgtctcgtgtggtagaggcctcagaccgcctacagcgccgggtggaggaactctgtcagcgagtgtacagccgaggggacagtgagcccctcagtgaggcggctcaggcacacacccgagagctgggccgtgagaaccggcgactgcaggacttggccactcagctgcaggagaaacaccaccgcatctcattggagtactccgagctccaggataaagtgacatcggcagagaccaaggtgctggagatggagacaacagtggaggacttgcagtgggacatcgagaagctgcggaagcgagagcaaaagctcaataagcacctggcagaggccttagagcagcttaactctggctactatgtatctgggagctcctcaggcttccaggggggccagatcacactcagcatgcagaagtttgagatgctgaatgcagagttagaggaaaaccaggaactggccaacagccgtatggcagagctggagaaactgcaggccgaacttcagggggctgtgcggaccaatgagcgcctcaaggtggccctgcggagccttcctgaggaggtagtgcgggagacgggggagtaccgcatgctgcaggcccaattctcactgctctacaacgagtctctgcaagtgaagacccagctagacgaggctcggggcctgctgctggccacaaagaactcccacctgcgacacatcgagcacatggagagcgacgagctggggctgcagaagaagctacgcacagaggtcattcagctggaggacacgctggcccaggtacgcaaggagtatgagatgctgcgcatcgagtttgagcagaatctggcggccaacgagcaggcggggcccatcaaccgtgagatgcgccacctgattagtagtcttcaaaaccacaaccaccagctaaaaggggacgcccagcgatacaagcggaagcttcgagaagtacaagctgagattggcaagctccgggcccaggccagtggctctgcccactccacccccaacctgggccacccagaggattctggcgtcagtgccccagccccagggaaagaggagggtgggccaggccctgtcagtacccccgacaacagaaaggagatggctccagtgcctggcaccaccactactaccacttcagtgaagaaggaggagctggtcccctctgaagaggacttccagggtataacccctggggcccagggcccttcctcccggggccgagaacctgaggccaggcccaagcgggagcttcgggaacgggaaggtcccagcctaggacctccacctgtagcctccgctctctcaagggctgatcgggagaaggccaaggtggaagaaaccaagcggaaggaatcagaactcctcaagggtctccgagcagagctcaagaaggcccaggagagccagaaggagatgaaactgctgctggatatgtacaagtcagcgcccaaggagcagcgggataaggtgcagctcatggcagcggaacgcaaggctaaggccgaggttgatgagctgcggagccgcatccgggaattggaggagagggatcgaagggagagcaagaagatcgcggatgaggatgccctgcggcgcattcggcaggcagaggagcagatagaacacctgcagcgcaagctgggtgccaccaagcaggaggaggaggctctgctctcagagatggatgtgacaggtcaggcttttgaggacatgcaggaacagaacgggcggctgctacagcagttgcgggaaaaggaggtaccctcttggcagatgggggcatcacttgcttcctttgggaagctctaaggttgctgcagtcaccttcctcatcttgcaggtgctgaaccaacatcatcagtttctattctaatcaggccccttcccaatctccatttctctgccaagcccatttacccccacctcatgcatcccaaggctctactgggtccctggacctaaccctgctttcatcctggtggccttaactacagtggaggtggaacttcccaggaggggaagggacagaccagccccagccgctgggccaacttccaatcattccagctagaagagcttccccctgacaccctgtgactgagcctgtgtcctgtctgcctgcccagccatgctccatcggctgtgagggcagtgcccggagaggccagagggttggagctgcagggacccgtttggacccacagcctctgttctagagatgcttgtataggctgttaattgtgatgaataaacgttcaaccctcggcctgcagccagagtagccaggccgcgcaccccaaaatgtagtcccccgattttagctgcagcagctgagcagcactttgctggcttggtgtgagcctgggagggctcagacttaacggccggcagggatcccggactgg

SEQ ID NO: 384685 - DNA, 1260 bp, Homo sapiens
agcgggaaatccaagatggcggcgctaggctgaccctcctgctggtgacggaagtaccgcctcctcccgtctgacgcccctcaggggaccctgcatcgctccagccgccgcggccatgtctgggccaggcaacaaacgcgccgccggcgacgggggctcagggcccccggaaaagaagctgagtcgtgaggagaagaccaccacgactcttatcgagcccattcgtcttggaggcatctcttccacggaggagatggacctgaaggtactacagttcaagaacaagaaactggcagagcggctggaacaacggcaggcttgtgaagatgaactccgagaacgaattgagaagttggagaagcggcaggccacagatgatgccacactcctcatcgtcaatcgctactgggcccagctggatgaaactgtggaagcccttctccgatgccatgagagccagggggagctgtcttcagcgcctgaggcacctgggacccaggaggggccaacatgtgatgggactcctctcccagagccggggacatcagagctgagagaccccttgctgatgcagctgcggccccctctcagtgagccggccttggcttttgtggtggcactgggtgccagcagcagtgaggaggtggagctggagctgcaaggccgaatggagttctccaaggcagctgtgtctcgtgtggtagaggcctcagaccgcctacagcgccgggtggaggaactctgtcagcgagtgtacagccgaggggacagtgagcccctcagtgaggcggctcaggcacacacccgagagctgggccgtgagaaccggcgactgcaggacttggccactcagctgcaggagaaacaccaccgcatctcattggagtactccgagctccaggataaagtgacatcggcagagaccaaggtgctggagatggagacaacagtggaggacttgcagtgggacatcgagaagctgcggaagcgagagcaaaagctcaataagcacctggcagaggccttagagcagcttaactctggctactatgtatctgggagctcctcaggcttccaggggggccagatcacactcagcatgcagaagtttgagatgctgaatgcagagttagaggaaaaccaggaactggccaacagccgtatggcagagctggagaaactgcaggccgaacttcagggggctgtgcggaccaatgagcgcctcaaggtgggctgctgtaggggctgagaggtcctggg

SEQ ID NO: 384686 - DNA, 412 bp, Homo sapiens
gggccttgcctcgtggccccccgccctggggcccagcacctgtaggtcctggagcaccgattcagggaaagcgcaaacaaatgaatgctggccatcaggtggtgaggatgctcctgtcagcctcagggcacctggatcccgaatggtcaggaaggcagattgggggtggggaagggtgtcaggatgtgtcaaaaaatgaggttttctaactcaaccatggcttagatagagagaaagcaactctgagggaacacccctttgtgtgggggctctgggcttctgaagcctgaaaggtaaaatgaccctgagaatgatctcgtgggctcccccatcccacacaccacctgctgctagaagtttgatctgaccacacccacccccgtccttcctgggccaggcccccttatagagc

SEQ ID NO: 384687 - DNA, 262 bp, Homo sapiens
  misc_feature (222)..(222): n is a, c, g, or t
  misc_feature (225)..(225): n is a, c, g, or t
  misc_feature (231)..(231): n is a, c, g, or t
  misc_feature (233)..(233): n is a, c, g, or t
gtgaagtccagggcacagagaaacatctttgcaggcacctgtgaacacattgtgcccacaggaaattcaagctcttcttctattttcaaactaaggagtcactctcataaacatcgcaggggtcggggaggtggatgggaattgcttgactttcctacaatgcttggagattcttagagctggaacgtttccattttgatgttcccgccactctccctcttntantttacncntgccaagcacgtcagcccatctacgggtc

SEQ ID NO: 384688 - DNA, 567 bp, Homo sapiens
cttaaacagtatagggtttcttcctccagccagagaaatggcagactccctacattagcattcaggaaccccagtgacctggccccattgtgccttcctccttcgttcatttcccatggcatccttttcttagatgtcagtctcgctcctcatcctaaagttgcccaattgcactggcttcagaactacaattcacaggcaaccctgtggaggcatttttcccatctcttccccctcatcctccctgtcctcttcccctccttgttgcctttgtagccctcctcctcctcttttaacacagtccagataggtcttcatgtaggggaaaaaaaagaaaaaaaaaagacctataaacataacactttttttagtagtggggaccccatctctacaaaatataaaaaaattaaaaaattatctgggtgtggtggtatgtgcctgtaggcatagctactctggaggctgaggcaggaggatcacctgagcctagggatttgaggttacagttagctatgactgcaccactgtactccagcctgggtgacagtgcaagaccctgtctcttta

SEQ ID NO: 384689 - DNA, 484 bp, Homo sapiens
ttaaggttactaatatatataaagtacttttgattgtaagcaatagcagccatgcatgcctactttaagccaaacagggaatctattggaaggaaactggaagaaatcacagatttaaaggagatggaaacagcccaagacaaagtcaaagataactctgggacagtcagcagccttgggctccatataccttcaccctaaagttttaatataacttaactcccaccagtcctaggagagagaaatgcccacccaccttccaggtcagccagacttagtaaggatcaaataaagcaaacagttttggagaccctcccctgggtatcatggaatcattctcagagcaaaagcaattttgaggaaggccatcaccataaaaattgtcaactgctagcacagttataagcaaagtatttgttttctaaataatttgcctatacgttgtcttgcatgattagtataagagcaaatcagagcataagaa

SEQ ID NO: 384690 - DNA, 571 bp, Homo sapiens
gtagttagtcagtaggacccagttagttaacttttttctaacaaagtaaaacatttattagccccataaaaaaaaattcttgtaatacctccttcatttagaggtttactttccttcattctgtaaaaagaaagaaggaaacttttattcttcttttccttggtcttttgataagtctttgatatttgcataatctttgtgagttgaaactttgttttaaataccaacagtgtatgtggaatcatattctgtgtagagattatttttgtattctgcctgctgccctttctacacatttttgtcttacggtgtttttcatgaatgtagatgaaagcttcctactctgagcttgactttcataacttctctttcatagatggtcaccagataaaatgaaggcttctcggttaccttttcattttaaataaacaacaaaaagcattttagtataattgtcaatattcttgtaacttagtaatattctcattattgcatggacagacttatactaaaaataattatttgttttttgtcaacaaattgtcaaatttcaaattaaaatgtgacattt

SEQ ID NO: 384691 - DNA, 335 bp, Homo sapiens
tgccaggtacctcaatagaaggaattgaatatggggagattagtacaaaggtgggagacgggttgaaggaacaactgggggcagggagggaaaccagagatgagcagcagcaggaagtcacttcccccgctaggcctgaagggtagagggagcaagtggtgttaccagaatccacagctagggacaccaggcaggagctggtatcacagagttagaggctgctctgtgggagctaaaaacccagaatagcactttgggaggccgaggcagcagatcgcttgagtccaggagtttgagaccagcctaggcaatatggtgaaaccacatgtctatga

SEQ ID NO: 384692 - DNA, 326 bp, Homo sapiens
aagaacttctggctgagttccagactgattctgctggcacagagagctctgagatcataccctatattcagagcacagaagaaatatttcatccatctctgaaataaagaggaagaaatgaagcatatttgaacagttgcagaaaaaaaccataccagggtgaaaagtgaagggcatcctagccatttggagttacagaaaagtactattaatcctaaatacttaagtggcatattttttcattctaagtgtttcactataaactaagcagcttgcataaatctatttcatagatatataaatgaaagcagatttcatgatttacc

SEQ ID NO: 384693 - DNA, 132 bp, Homo sapiens
ctgctcccctagggaagaggaggctggactcagaggccactgtccggagctgcgccggcccctttatgtgcacatgtccaagctccacaggagaacgcagccgcttccttcccttccgcatgcggggatggg

SEQ ID NO: 384694 - DNA, 382 bp, Homo sapiens
tattaagcataaaatatctggcaagaattttttaagtgacaccttgtttcagtgtctgttaaaattctaatgcatttttaataggatagtgatatgttagtttgtaatttagtagtgcaatacgtattgcaaaaatatagcatgtgtgtccctaaaaatcacctcttcatgcaaaatctggaaacaaaaaacgcagggcttggggggaaaatggatctaggagcacactacacaaaaacttcattagtgacacatgggaataaagataggaaccgaataaaaatggtagcataataaatatgacatttggccttgaaaaagacccgcattttgcttgtgaaagtaactgagtgttgaaagggtttcagcatgtgaattattg

SEQ ID NO: 384695 - DNA, 225 bp, Homo sapiens
ccactgctggctgactaaagtccacctggactctccttggctgcaatccccaatgggagctgccggctagagagaactgacttgcgctgccatggcaggataggtgacaggaacgacctgctgggagcctagaccagctccaggagaggtcaccttccaccagtgaaagacactaccaacacttccaccacctctcagtgctgtgggtgaccgggagctgctcct

SEQ ID NO: 384696 - DNA, 343 bp, Homo sapiens
gagaggtcctattttcttttattgccacgccgctgccttggccccgatggtagcatgccatggcctgctgccaaatgaacagcccgtgtggatttttaaaataaggagacaagttccatcactattcccaagagtgcctgccctgattgcaacccaagatagttgcttctagcaagcttggagccaagagacctaggttcaaaccctgaactcagcacaagtccctttacctctctgggcctgtttcttgcctttcgtggataacataaaggcactgcttagccatcaggcactgtgtctggctgtagcaactatcattattgtcatcctcctcatgggctgt

SEQ ID NO: 384697 - DNA, 295 bp, Homo sapiens
tcagacaaggttccagtcctcaaggagctcacagtcacaggacgaaagcaggctcacaacatagggcaatatgtgctgtgaaaactgagcacagggggctgtgagaacacggagcaagggacactgtagagaagggaatgaagcaggtatggaaatggatatagaacaagacatggactgctctgtgcattcaagggcagagagatctcatccagcagggcccatctgcagaggtttcatgaagttaggtggtctttgagttgaaaccgagaggatgcctagggtttctttcaac

SEQ ID NO: 384698 - DNA, 420 bp, Homo sapiens
tcctgttttgttttgttttgttttaccacctacacctcatggctagcctagacaatgcatttccagcattagaggcaggaatgcctagacattgatagaggaaccgccagaaccactaatgagaatgtgttacactgatttgggagatgcccagaaaagcaacaatggaacatgtaggatttgacctcagtaaggaaaagaaacatttctctctcttttttttttagacaaggtgtctctctgtcacccaggctagagtgcagtggtaccatcacagctcactgcagcctcgatctcctgggctcaaggatcctcctgcctcagcttcacaaatactcactaccatgcctggctaattattttattttttgcagagatggggtcttgctatgttgcccaggctggttttgaactcctggg

SEQ ID NO: 384699 - DNA, 724 bp, Homo sapiens
gtcaaaatgagacatctccctgttatgatctgtgtcagcaaggctgtcccactaatcctatcctgtttcgtggtaagctgttttcagagccaactcaggaactcaggtccatccaagcaaagacagatggcaactttttacagaacactttcatcatgtatatgcgatctaatttgatcttcgtagttatagtatctgtgagacgggcactattatttctatttcatagttgaggaaattggctcagaggcgttaggtaacttgtattcagaaccgggacaccactacaattgtgggcttttctgactggtggtgttctcttctttctccaagatgtcacagttctgctcaaataaggagctctgaagcctactagagagactttaagtcctcaacttcccccagggacccgtaaacaaagggtatcagggctgctaggagactataggaggccctaggaatcacctcaccctgctgggtttatgctgctagtgaggaatacctaacctgctcaattttactgcttgttgaagttctaggtttctcatttgtaaggctaaaaaaactaaaaatcatagccactgtctatttaaaaatgaacagtaacattgatagttttaaataaagaagaatgtacaggtccagccaatcttacttggaataagtgagtcaaacagattgttttacaggatggtgaagcttacttaacagtgataatttgcat

SEQ ID NO: 384700 - DNA, 432 bp, Homo sapiens
aatgatattgagcttgagtatgtgcagaaattaacgatgtactaactatctaactgcctaaaataaaaacgggtagtcagtgatttgtattttactgagcagaagtggcaaggtttcttatgtgcagctgagattatgtactgttgtaaatgaaacccaaactctagttttcaggatctgagaagggagctctttgagcctgcatcttcccttcctaatatgagcctacatattccctgaatatctgacttactccctttccaacaatgtcatttttccatttgtagttggtaatatataaccatgagcaatttctaaatcatgttaaactaaactagtgaccatactccatgccaagggccttagaaattattcaagttaggtataatgaaaataataataataatttgtattaccattattactatcatt

SEQ ID NO: 384701 - DNA, 2050 bp, Homo sapiens
attctggggctcgggggatcccggacaccctctcagctcctgcccgggggcccatgtagtcccttctgccctgtgcctcggtgcctgtgacctgagccccttggttgaccctgcactcgtccaacttgggccaaacgactgcccctccttctggcagtgggctggaccagccggccagcgggagcccccttggcagaagccggtcgtaaaggatcataaactggcggcgtctggctggggcgaaggtcgctgaggtaggaactgcgccagtcctagacgccagacccgctcagaccctcctgccaggtgacagccgccaagatggggtcttgggccctgctgtggcctcccctgctgttcaccgggctgctcgtccgacccccggggaccatggcccaggcccagtactgctctgtgaacaaggacatctttgaagtagaggagaacacaaatgtcaccgagccgctggtggacatccacgtcccggagggccaggaggtgaccctcggagccttgtccaccccctttgcatttcggatccagggaaaccagctgtttctcaacgtgactcctgattacgaggagaagtcactgcttgaggctcagctgctgtgtcagagcggaggcacattggtgacccagctaagggtgttcgtgtcagtgctggacgtcaatgacaatgcccccgaattcccctttaagaccaaggagataagggtggaggaggacacgaaagtgaactccaccgtcatccccgagacgcaactgcaggctgaggaccgcgacaaggacgacattctgttctacaccctccaggaaatgacagcaggtgccagtgactacttctccctggtgagtgtaaaccgtcccgccctgaggctggaccggcccctggacttctacgagcggccgaacatgaccttctggctgctggtgcgggacactccgggggagaatgtggaacccagccacactgccaccgccacactagtgctgaacgtggtgcccgccgacctgcggcccccgtggttcctgccctgcaccttctcagatggctacgtctgcattcaagctcagtaccacggggctgtccccacggggcacatactgccatctcccctcgtcctgcgtcccggacccatctacgctgaggacggagaccgcggcatcaaccagcccatcatctacagcatctttaggggaaacgtgaatggtacattcatcatccacccagactcgggcaacctcaccgtggccaggagtgtccccagccccatgaccttccttctgctggtgaagggccaacaggccgaccttgcccgctactcagtgacccaggtcaccgtggaggctgtggctgcggccgggagcccgccccgcttcccccagagcctgtatcgtggcaccgtggcgcgtggcgctggagcgggcgttgtggtcaaggatgcagctgccccttctcagcctctgaggatccaggctcaggacccggagttctcggacctcaactcggccatcacatatcgaattaccaaccactcacacttccggatggagggagaggttgtgctgaccaccaccacactggcacaggcgggagccttctacgcagagctgcaccggagatctcaggcacccggctcaactcagacctcccgctcccgaccctacacagagattgcctggggaggctgaggagccgatgcaaacccccaaggcgacgcacttgggagccggtggtctcaaacacctgccgggggtcctagtccccttctgaaatctacatgcttgggttggagcgcagcagtaaacaccctgcccagtgacctggactgaggcgcgctgggggtgggtgcgccgtgtggcctgagcaggagccagaccaggaggcctaggggtgagagacacattcccctcgctgctcccaaagccagagcccaggctgggcgcccatgcccagaaccatcaagggatcccttgcggcttgtcagcactttccctaatggaaatacaccattaattcctttccaaatgttttaattgtgagagt

SEQ ID NO: 384702 - DNA, 364 bp, Homo sapiens
tgagacagagtctcactctgtcacccaggctggcgtgcagtggagcgatctcggctcactgcaacttccgcctcccgggtccaagcgattctcctgcctcagcctcttgagtagctgggattacaaggctgtacgtgggaggcagcctggccggggactcaatgagaccctgtccaggacctcaactcggccatcacatatcgaattaccaaccactcacacttccggatggagggagaggttgtgctgaccaccaccacactggcacaggcgggagccttctacgcagagtgcggggcagggcaggcgggcatctccaagggtgtggggcttaaagatgtgtctaggagggacaagccccttc

SEQ ID NO: 384703 - DNA, 3110 bp, Homo sapiens
attctggggctcgggggatcccggacaccctctcagctcctgcccgggggcccatgtagtcccttctgccctgtgcctcggtgcctgtgacctgagccccttggttgaccctgcactcgtccaacttgggccaaacgactgcccctccttctggcagtgggctggaccagccggccagcgggagcccccttggcagaagccggtcgtaaaggatcataaactggcggcgtctggctggggcgaaggtcgctgaggtaggaactgcgccagtcctagacgccagacccgctcagaccctcctgccaggtgacagccgccaagatggggtcttgggccctgctgtggcctcccctgctgttcaccgggctgctcgtccgacccccggggaccatggcccaggcccagtactgctctgtgaacaaggacatctttgaagtagaggagaacacaaatgtcaccgagccgctggtggacatccacgtcccggagggccaggaggtgaccctcggagccttgtccaccccctttgcatttcggatccagggaaaccagctgtttctcaacgtgactcctgattacgagaaggctgggccatttcgggatgaagctgcctgggcccacaccctcagcactgaccactgatgatggggaccctgggccagcgcctgcccacttggcctcagtctccccacctgtggggcaggacggtgactgcagacctgtctacatccacaggagaagtcactgcttgaggctcagctgctgtgtcagagcggaggcacattggtgacccagctaagggtgttcgtgtcagtgctggacgtcaatgacaatgcccccgaattcccctttaagaccaaggagataagggtggaggaggacacgaaagtgaactccaccgtcatccccgagacgcaactgcaggctgaggaccgcgacaaggacgacattctgttctacaccctccaggaaatgacagcaggtgccagtgactacttctccctggtgagtgtaaaccgtcccgccctgaggctggaccggcccctggacttctacgagcggccgaacatgaccttctggctgctggtgcgggacactccgggggagaatgtggaacccagccacactgccaccgccacactagtgctgaacgtggtgcccgccgacctgcggcccccgtggttcctgccctgcaccttctcagatggctacgtctgcattcaagctcagtaccacggggctgtccccacggggcacatactgccatctcccctcgtcctgcgtcccggacccatctacgctgaggacggagaccgcggcatcaaccagcccatcatctacagcatctttaggggaaacgtgaatggtacattcatcatccacccagactcgggcaacctcaccgtggccaggagtgtccccagccccatgaccttccttctgctggtgaagggccaacaggccgaccttgcccgctactcagtgacccaggtcaccgtggaggctgtggctgcggccgggagcccgccccgcttcccccagagcctgtatcgtggcaccgtggcgcgtggcgctggagcgggcgttgtggtcaaggatgcagctgccccttctcagcctctgaggatccaggctcaggacccggagttctcggacctcaactcggccatcacatatcgaattaccaaccactcacacttccggatggagggagaggttgtgctgaccaccaccacactggcacaggcgggagccttctacgcagaggttgaggcccacaacacggtgacctctggcaccgcaaccacagtcattgagatacaagtttccgaacaggagcccccctccacagatgtccccccatccccagaggctggaggaacaactgggccctggaccagcaccacttccgaggtccccagaccccctgagccctcccagggaccctccacgaccagctctgggggaggcacaggccctcatccaccctctggcacaactctgaggccaccaacctcgtccacacccggggggtccccgggtgcagaaaacagcacctcccaccaaccagccactcccggtggggacacagcacagaccccaaagccaggaacctctcagccgatgccccccggtgtgggaaccagcacctcccaccaaccagccacacccagtgggggcacagtacagaccccagagccaggaacctctcagccgatgccccccagtatgggaaccagcacctcccaccaaccagccacacccggtgggggcacagcacagaccccagaggcaggaacctctcagccgatgccccccggtatgggaaccagcacctcccaccaaccaaccacacccggtgggggcacagcacagaccccagagccaggaacctctcagccgatgcccctcagcaagagcaccccatcttcaggtggcggcccctcggaggacaagcgcttctcggtggtggatatggcggccctgggcggggtgctgggtgcgctgctgctgctggctctccttggcctcgccgtccttgtccacaagcactatggcccccggctcaagtgctgctctggcaaagctccggagccccagccccaaggctttgacaaccaggcgttcctccctgaccacaaggccaactgggcgcccgtccccagccccacgcacgaccccaagcccgcggaggcaccgatgcccgcagagcccgcaccccccggccctgcctccccaggcggtgcccctgagccccccgcagcggcccgagctggcggaagccccacggcggtgaggtccatcctgaccaaggagcggcggccagagggcgggtacaaggctgtctggtttggcgaggacatcgggacggaggcagacgtggtcgttctcaacgcgcccaccctggacgtggatggcgccagtgactccggcagcggcgatgagggcgagggcgcggggaggggtgggggtccctacgatgcgcccggtggtgatgactcctacatctaagtggcccctccaccctctcccccagccgcacgggcactggaggtctcgctcccccagcctccgacccgaggcagaataaagcaaggctcccgaaaccc

SEQ ID NO: 384704 - DNA, 2277 bp, Homo sapiens
attctggggctcgggggatcccggacaccctctcagctcctgcccgggggcccatgtagtgggctggaccagccggccagcgggagcccccttggcagaagccggtcgtaaaggatcataaactggcggcgtctggctggggcgaaggtcgctgaggtaggaactgcgccagtcctagacgccagacccgctcagaccctcctgccaggtgacagccgccaagatggggtcttgggccctgctgtggcctcccctgctgttcaccgggctgctcgtccgacccccggggaccatggcccaggcccagtactgctctgtgaacaaggacatctttgaagtagaggagaacacaaatgtcaccgagccgctggtggacatccacgtcccggagggccaggaggtgaccctcggagccttgtccaccccctttgcatttcggatccagggaaaccagctgtttctcaacgtgactcctgattacgaggagaagtcactgcttgaggctcagctgctgtgtcagagcggaggcacattggtgacccagctaagggtgttcgtgtcagtgctggacgtcaatgacaatgcccccgaattcccctttaagaccaaggagataagggtggaggaggacacgaaagtgaactccaccgtcatccccgagacgcaactgcaggctgaggaccgcgacaaggacgacattctgttctacaccctccaggaaatgacagcaggtgccagtgactacttctccctggtgagtgtaaaccgtcccgccctgaggctggaccggcccctggacttctacgagcggccgaacatgaccttctggctgctggtgcgggacactccgggggagaatgtggaacccagccacactgccaccgccacactagtgctgaacgtggtgcccgccgacctgcggcccccgtggttcctgccctgcaccttctcagatggctacgtctgcattcaagctcagtaccacggggctgtccccacggggcacatactgccatctcccctcgtcctgcgtcccggacccatctacgctgaggacggagaccgcggcatcaaccagcccatcatctacagcatctttaggggaaacgtgaatggtacattcatcatccacccagactcgggcaacctcaccgtggccaggagtgtccccagccccatgaccttccttctgctggtgaagggccaacaggccgaccttgcccgctactcagtgacccaggtcaccgtggaggctgtggctgcggccgggagcccgccccgcttcccccagagcctgtatcgtggcaccgtggcgcgtggcgctggagcgggcgttgtggtcaaggatgcagctgccccttctcagcctctgaggatccaggctcaggacccggagttctcggacctcaactcggccatcacatatcgaattaccaaccactcacacttccggatggagggagaggttgtgctgaccaccaccacactggcacaggcgggagccttctacgcagaggttgaggcccacaacacggtgacctctggcaccgcaaccacagtcattgagatacaagtttccgaacaggagcccccctccacaggtggcggcccctcggaggacaagcgcttctcggtggtggatatggcggccctgggcggggtgctgggtgcgctgctgctgctggctctccttggcctcgccgtccttgtccacaagcactatggcccccggctcaagtgctgctctggcaaagctccggagccccagccccaaggctttgacaaccaggcgttcctccctgaccacaaggccaactgggcgcccgtccccagccccacgcacgaccccaagcccgcggaggcaccgatgcccgcagagcccgcaccccccggccctgcctccccaggcggtgcccctgagccccccgcagcggcccgagctggcggaagccccacggcggtgaggtccatcctgaccaaggagcggcggccagagggcgggtacaaggctgtctggtttggcgaggacatcgggacggaggcagacgtggtcgttctcaacgcgcccaccctggacgtggatggcgccagtgactccggcagcggcgatgagggcgagggcgcggggaggggtgggggtccctacgatgcgcccggtggtgatgactcctacatctaagtggcccctccaccctctcccccagccgcacgggcactggaggtctcgctcccccagcctccgacccgaggcagaataaagcaaggctcccgaaaccc

SEQ ID NO: 384705 - DNA, 2805 bp, Homo sapiens
attctggggctcgggggatcccggacaccctctcagctcctgcccgggggcccatgtagtcccttctgccctgtgcctcggtgcctgtgacctgagccccttggttgaccctgcactcgtccaacttgggccaaacgactgcccctccttctggcagtgggctggaccagccggccagcgggagcccccttggcagaagccggtcgtaaaggatcataaactggcggcgtctggctggggcgaaggtcgctgagactgctctgtgaacaaggacatctttgaagtagaggagaacacaaatgtcaccgagccgctggtggacatccacgtcccggagggccaggaggtgaccctcggagccttgtccaccccctttgcatttcggatccagggaaaccagctgtttctcaacgtgactcctgattacgaggagaagtcactgcttgaggctcagctgctgtgtcagagcggaggcacattggtgacccagctaagggtgttcgtgtcagtgctggacgtcaatgacaatgcccccgaattcccctttaagaccaaggagataagggtggaggaggacacgaaagtgaactccaccgtcatccccgagacgcaactgcaggctgaggaccgcgacaaggacgacattctgttctacaccctccaggaaatgacagcaggtgccagtgactacttctccctggtgagtgtaaaccgtcccgccctgaggctggaccggcccctggacttctacgagcggccgaacatgaccttctggctgctggtgcgggacactccgggggagaatgtggaacccagccacactgccaccgccacactagtgctgaacgtggtgcccgccgacctgcggcccccgtggttcctgccctgcaccttctcagatggctacgtctgcattcaagctcagtaccacggggctgtccccacggggcacatactgccatctcccctcgtcctgcgtcccggacccatctacgctgaggacggagaccgcggcatcaaccagcccatcatctacagcatctttaggggaaacgtgaatggtacattcatcatccacccagactcgggcaacctcaccgtggccaggagtgtccccagccccatgaccttccttctgctggtgaagggccaacaggccgaccttgcccgctactcagtgacccaggtcaccgtggaggctgtggctgcggccgggagcccgccccgcttcccccagagcctgtatcgtggcaccgtggcgcgtggcgctggagcgggcgttgtggtcaaggatgcagctgccccttctcagcctctgaggatccaggctcaggacccggagttctcggacctcaactcggccatcacatatcgaattaccaaccactcacacttccggatggagggagaggttgtgctgaccaccaccacactggcacaggcgggagccttctacgcagaggttgaggcccacaacacggtgacctctggcaccgcaaccacagtcattgagatacaagtttccgaacaggagcccccctccacagatgtccccccatccccagaggctggaggaacaactgggccctggaccagcaccacttccgaggtccccagaccccctgagccctcccagggaccctccacgaccagctctgggggaggcacaggccctcatccaccctctggcacaactctgaggccaccaacctcgtccacacccggggggtccccgggtgcagaaaacagcacctcccaccaaccagccactcccggtggggacacagcacagaccccaaagccaggaacctctcagccgatgccccccggtgtgggaaccagcacctcccaccaaccagccacacccagtgggggcacagtacagaccccagagccaggaacctctcagccgatgccccccagtatgggaaccagcacctcccaccaaccagccacacccggtgggggcacagcacagaccccagaggcaggaacctctcagccgatgccccccggtatgggaaccagcacctcccaccaaccaaccacacccggtgggggcacagcacagaccccagagccaggaacctctcagccgatgcccctcagcaagagcaccccatcttcaggtggcggcccctcggaggacaagcgcttctcggtggtggatatggcggccctgggcggggtgctgggtgcgctgctgctgctggctctccttggcctcgccgtccttgtccacaagcactatggcccccggctcaagtgctgctctggcaaagctccggagccccagccccaaggctttgacaaccaggcgttcctccctgaccacaaggccaactgggcgcccgtccccagccccacgcacgaccccaagcccgcggaggcaccgatgcccgcagagcccgcaccccccggccctgcctccccaggcggtgcccctgagccccccgcagcggcccgagctggcggaagccccacggcggtgaggtccatcctgaccaaggagcggcggccagagggcgggtacaaggctgtctggtttggcgaggacatcgggacggaggcagacgtggtcgttctcaacgcgcccaccctggacgtggatggcgccagtgactccggcagcggcgatgagggcgagggcgcggggaggggtgggggtccctacgatgcgcccggtggtgatgactcctacatctaagtggcccctccaccctctcccccagccgcacgggcactggaggtctcgctcccccagcctccgacccgaggcagaataaagcaaggctcccgaaaccc

SEQ ID NO: 384706 - DNA, 2924 bp, Homo sapiens
attctggggctcgggggatcccggacaccctctcagctcctgcccgggggcccatgtagtcccttctgccctgtgcctcggtgcctgtgacctgagccccttggttgaccctgcactcgtccaacttgggccaaacgactgcccctccttctggcagtgggctggaccagccggccagcgggagcccccttggcagaagccggtcgtaaaggatcataaactggcggcgtctggctggggcgaaggtcgctgaggtaggaactgcgccagtcctagacgccagacccgctcagaccctcctgccaggtgacagccgccaagatggggtcttgggccctgctgtggcctcccctgctgttcaccgggctgctcgtccgacccccggggaccatggcccaggcccagtactgctctgtgaacaaggacatctttgaagtagaggagaacacaaatgtcaccgagccgctggtggacatccacgtcccggagggccaggaggtgaccctcggagccttgtccaccccctttgcatttcggatccagggaaaccagctgtttctcaacgtgactcctgattacgaggagaagtcactgcttgaggctcagctgctgtgtcagagcggaggcacattggtgacccagctaagggtgttcgtgtcagtgctggacgtcaatgacaatgcccccgaattcccctttaagaccaaggagataagggtggaggaggacacgaaagtgaactccaccgtcatccccgagacgcaactgcaggctgaggaccgcgacaaggacgacattctgttctacaccctccaggaaatgacagcaggtgccagtgactacttctccctggtgagtgtaaaccgtcccgccctgaggctggaccggcccctggacttctacgagcggccgaacatgaccttctggctgctggtgcgggacactccgggggagaatgtggaacccagccacactgccaccgccacactagtgctgaacgtggtgcccgccgacctgcggcccccgtggttcctgccctgcaccttctcagatggctacgtctgcattcaagctcagtaccacggggctgtccccacggggcacatactgccatctcccctcgtcctgcgtcccggacccatctacgctgaggacggagaccgcggcatcaaccagcccatcatctacagcatctttagggactcgggcaacctcaccgtggccaggagtgtccccagccccatgaccttccttctgctggtgaagggccaacaggccgaccttgcccgctactcagtgacccaggtcaccgtggaggctgtggctgcggccgggagcccgccccgcttcccccagagcctgtatcgtggcaccgtggcgcgtggcgctggagcgggcgttgtggtcaaggatgcagctgccccttctcagcctctgaggatccaggctcaggacccggagttctcggacctcaactcggccatcacatatcgaattaccaaccactcacacttccggatggagggagaggttgtgctgaccaccaccacactggcacaggcgggagccttctacgcagaggttgaggcccacaacacggtgacctctggcaccgcaaccacagtcattgagatacaagtttccgaacaggagcccccctccacagatgtccccccatccccagaggctggaggaacaactgggccctggaccagcaccacttccgaggtccccagaccccctgagccctcccagggaccctccacgaccagctctgggggaggcacaggccctcatccaccctctggcacaactctgaggccaccaacctcgtccacacccggggggtccccgggtgcagaaaacagcacctcccaccaaccagccactcccggtggggacacagcacagaccccaaagccaggaacctctcagccgatgccccccggtgtgggaaccagcacctcccaccaaccagccacacccagtgggggcacagtacagaccccagagccaggaacctctcagccgatgccccccagtatgggaaccagcacctcccaccaaccagccacacccggtgggggcacagcacagaccccagaggcaggaacctctcagccgatgccccccggtatgggaaccagcacctcccaccaaccaaccacacccggtgggggcacagcacagaccccagagccaggaacctctcagccgatgcccctcagcaagagcaccccatcttcaggtggcggcccctcggaggacaagcgcttctcggtggtggatatggcggccctgggcggggtgctgggtgcgctgctgctgctggctctccttggcctcgccgtccttgtccacaagcactatggcccccggctcaagtgctgctctggcaaagctccggagccccagccccaaggctttgacaaccaggcgttcctccctgaccacaaggccaactgggcgcccgtccccagccccacgcacgaccccaagcccgcggaggcaccgatgcccgcagagcccgcaccccccggccctgcctccccaggcggtgcccctgagccccccgcagcggcccgagctggcggaagccccacggcggtgaggtccatcctgaccaaggagcggcggccagagggcgggtacaaggctgtctggtttggcgaggacatcgggacggaggcagacgtggtcgttctcaacgcgcccaccctggacgtggatggcgccagtgactccggcagcggcgatgagggcgagggcgcggggaggggtgggggtccctacgatgcgcccggtggtgatgactcctacatctaagtggcccctccaccctctcccccagccgcacgggcactggaggtctcgctcccccagcctccgacccgaggcagaataaagcaaggctcccgaaaccc

SEQ ID NO: 384707 - DNA, 2940 bp, Homo sapiens
attctggggctcgggggatcccggacaccctctcagctcctgcccgggggcccatgtagtcccttctgccctgtgcctcggtgcctgtgacctgagccccttggttgaccctgcactcgtccaacttgggccaaacgactgcccctccttctggcagtgggctggaccagccggccagcgggagcccccttggcagaagccggtcgtaaaggatcataaactggcggcgtctggctggggcgaaggtcgctgaggtaggaactgcgccagtcctagacgccagacccgctcagaccctcctgccaggtgacagccgccaagatggggtcttgggccctgctgtggcctcccctgctgttcaccgggctgctcgtccgacccccggggaccatggcccaggcccagtactgctctgtgaacaaggacatctttgaagtagaggagaacacaaatgtcaccgagccgctggtggacatccacgtcccggagggccaggaggtgaccctcggagccttgtccaccccctttgcatttcggatccagggaaaccagctgtttctcaacgtgactcctgattacgaggagaagtcactgcttgaggctcagctgctgtgtcagagcggaggcacattggtgacccagctaagggtgttcgtgtcagtgctggacgtcaatgacaatgcccccgaattcccctttaagaccaaggagataagggtggaggaggacacgaaagtgaactccaccgtcatccccgagacgcaactgcaggctgaggaccgcgacaaggacgacattctgttctacaccctccaggaaatgacagcaggtgccagtgactacttctccctggtgagtgtaaaccgtcccgccctgaggctggaccggcccctggacttctacgagcggccgaacatgaccttctggctgctggtgcgggacactccgggggagaatgtggaacccagccacactgccaccgccacactagtgctgaacgtggtgcccgccgacctgcggcccccgtggttcctgccctgcaccttctcagatggctacgtctgcattcaagctcagtaccacggggctgtccccacggggcacatactgccatctcccctcgtcctgcgtcccggacccatctacgctgaggacggagaccgcggcatcaaccagcccatcatctacagcatctttaggggaaacgtgaatggtacattcatcatccacccagactcgggcaacctcaccgtggccaggagtgtccccagccccatgaccttccttctgctggtgaagggccaacaggccgaccttgcccgctactcagtgacccaggtcaccgtggaggctgtggctgcggccgggagcccgccccgcttcccccagagcctgtatcgtggcaccgtggcgcgtggcgctggagcgggcgttgtggtcaaggatgcagctgccccttctcagcctctgaggatccaggctcaggacccggagttctcggacctcaactcggccatcacatatcgaattaccaaccactcacacttccggatggagggagaggttgtgctgaccaccaccacactggcacaggcgggagccttctacgcagaggttgaggcccacaacacggtgacctctggcaccgcaaccacagtcattgagatacaagtttccgaacaggagcccccctccacagatgtccccccatccccagaggctggaggaacaactgggccctggaccagcaccacttccgaggtccccagaccccctgagccctcccagggaccctccacgaccagctctgggggaggcacaggccctcatccaccctctggcacaactctgaggccaccaacctcgtccacacccggggggtccccgggtgcagaaaacagcacctcccaccaaccagccactcccggtggggacacagcacagaccccaaagccaggaacctctcagccgatgccccccggtgtgggaaccagcacctcccaccaaccagccacacccagtgggggcacagtacagaccccagagccaggaacctctcagccgatgccccccagtatgggaaccagcacctcccaccaaccagccacacccggtgggggcacagcacagaccccagaggcaggaacctctcagccgatgccccccggtatgggaaccagcacctcccaccaaccaaccacacccggtgggggcacagcacagaccccagagccaggaacctctcagccgatgcccctcagcaagagcaccccatcttcaggtggcggcccctcggaggacaagcgcttctcggtggtggatatggcggccctgggcggggtgctgggtgcgctgctgctgctggctctccttggcctcgccgtccttgtccacaagcactatggcccccggctcaagtgctgctctggcaaagctccggagccccagccccaaggctttgacaaccaggcgttcctccctgaccacaaggccaactgggcgcccgtccccagccccaggcggtgcccctgagccccccgcagcggcccgagctggcggaagccccacggcggtgaggtccatcctgaccaaggagcggcggccagagggcgggtacaaggctgtctggtttggcgaggacatcgggacggaggcagacgtggtcgttctcaacgcgcccaccctggacgtggatggcgccagtgactccggcagcggcgatgagggcgagggcgcggggaggggtgggggtccctacgatgcgcccggtggtgatgactcctacatctaagtggcccctccaccctctcccccagccgcacgggcactggaggtctcgctcccccagcctccgacccgaggcagaataaagcaaggctcccgaaacccaggccatggcgtggggcaggcgcgcgggtccatgggggtcccattcactca

SEQ ID NO: 384708 - DNA, 2290 bp, Homo sapiens
  misc_feature (2263)..(2263): n is a, c, g, or t
attctggggctcgggggatcccggacaccctctcagctcctgcccgggggcccatgtagtcccttctgccctgtgcctcggtgcctgtgacctgagccccttggttgaccctgcactcgtccaacttgggccaaacgactgcccctccttctggcagtgggctggaccagccggccagcgggagcccccttggcagaagccggtcgtaaaggatcataaactggcggcgtctggctggggcgaaggtcgctgaggtaggaactgcgccagtcctagacgccagacccgctcagaccctcctgccaggtgacagccgccaagatggggtcttgggccctgctgtggcctcccctgctgttcaccgggctgctcgtccgacccccggggaccatggcccaggcccagtactgctctgtgaacaaggacatctttgaagtagaggagaacacaaatgtcaccgagccgctggtggacatccacgtcccggagggccaggaggtgaccctcggagccttgtccaccccctttgcatttcggatccagggaaaccagctgtttctcaacgtgactcctgattacgaggagaagtcactgcttgaggctcagctgctgtgtcagagcggaggcacattggtgacccagctaagggtgttcgtgtcagtgctggacgtcaatgacaatgcccccgaattcccctttaagaccaaggagataagggtggaggaggacacgaaagtgaactccaccgtcatccccgagacgcaactgcaggctgaggaccgcgacaaggacgacattctgttctacaccctccaggaaatgacagcaggtgccagtgactacttctccctggtgagtgtaaaccgtcccgccctgaggctggaccggcccctggacttctacgagcggccgaacatgaccttctggctgctggtgcgggacactccgggggagaatgtggaacccagccacactgccaccgccacactagtgctgaacgtggtgcccgccgacctgcggcccccgtggttcctgccctgcaccttctcagatggctacgtctgcattcaagctcagtaccacggggctgtccccacggggcacatactgccatctcccctcgtcctgcgtcccggacccatctacgctgaggacggagaccgcggcatcaaccagcccatcatctacagcatctttaggggaaacgtgaatggtacattcatcatccacccagactcgggcaacctcaccgtggccaggagtgtccccagccccatgaccttccttctgctggtgaagggccaacaggccgaccttgcccgctactcagtgacccaggtcaccgtggaggctgtggctgcggccgggagcccgccccgcttcccccagagcctgtatcgtggcaccgtggcgcgtggcgctggagcgggcgttgtggtcaaggatgcagctgccccttctcagcctctgaggatccaggctcaggacccggagttctcggacctcaactcggccatcacatatcgaattaccaaccactcacacttccggatggagggagaggttgtgctgaccaccaccacactggcacaggcgggagccttctacgcagaggttgaggcccacaacacggtgacctctggcaccgcaaccacagtcattgagatacaagtttccgaacaggagcccccctccacagatgtccccccatccccagaggctggaggaacaactgggccctggaccagcaccacttccgaggtccccagaccccctgagccctcccagggaccctccacgaccagctctgggggaggcacaggccctcatccaccctctggcacaactctgaggccaccaacctcgtccacacccggggggtccccgggtgcagaaaacagcacctcccaccaaccagccactcccggtggggacacagcacagaccccaaagccaggaacctctcagccgatgccccccggtgtgggaaccagcacctcccaccaaccagccacacccagtgggggcacagtacagaccccagagccaggaacctctcagccgatgccccccagtatgggaaccagcacctcccaccaaccagccacacccggtgggggcacagcacagaccccagaggcaggaacctctcagccgatgccccccggtatgggaaccagcacctcctctcctcctctgtgctgtcacagaggagggaaagtatatgtggtactggggaggaggaggaaggaagagtcgcccnctgtgctgtccccctcctctgtgctgt

SEQ ID NO: 384709 - DNA, 1141 bp, Homo sapiens
ccctgctacgagcagctgaacaggaaagcggagggaaaggccacttccaccactgagctgccccccgagtacctgatcagccgcctgtctcagcagtcccagccactcccggtggggacacagcacagaccccaaagccaggaacctctcagccgatgccccccggtgtgggaaccagcacctcccaccaaccagccacacccagtgggggcacagtacagaccccagagccaggaacctctcagccgatgccccccagtatgggaaccagcacctcccaccaaccagccacacccggtgggggcacagcacagaccccagaggcaggaacctctcagccgatgccccccggtatgggaaccagcacctcccaccaaccaaccacacccggtgggggcacagcacagaccccagagccaggaacctctcagccgatgcccctcagcaagagcaccccatcttcaggtggcggcccctcggaggacaagcgcttctcggtggtggatatggcggccctgggcggggtgctgggtgcgctgctgctgctggctctccttggcctcgccgtccttgtccacaagcactatggcccccggctcaagtgctgctctggcaaagctccggagccccagccccaaggctttgacaaccaggcgttcctccctgaccacaaggccaactgggcgcccgtccccagccccacgcacgaccccaagcccgcggaggcaccgatgcccgcagagcccgcaccccccggccctgcctccccaggcggtgcccctgagccccccgcagcggcccgagctggcggaagccccacggcggtgaggtccatcctgaccaaggagcggcggccagagggcgggtacaaggctgtctggtttggcgaggacatcgggacggaggcagacgtggtcgttctcaacgcgcccaccctggacgtggatggcgccagtgactccggcagcggcgatgagggcgagggcgcggggaggggtgggggtccctacgatgcgcccggtggtgatgactcctacatctaagtggcccctccaccctctcccccagccgcacgggcactggaggtctcgctcccccagcctccgacccgaggcagaataaagcaaggctcccgaaaccc

SEQ ID NO: 384710 - DNA, 2957 bp, Homo sapiens
attctggggctcgggggatcccggacaccctctcagctcctgcccgggggcccatgtagtcccttctgccctgtgcctcggtgcctgtgacctgagccccttggttgaccctgcactcgtccaacttgggccaaacgactgcccctccttctggcagtgggctggaccagccggccagcgggagcccccttggcagaagccggtcgtaaaggatcataaactggcggcgtctggctggggcgaaggtcgctgaggtaggaactgcgccagtcctagacgccagacccgctcagaccctcctgccaggtgacagccgccaagatggggtcttgggccctgctgtggcctcccctgctgttcaccgggctgctcgtccgacccccggggaccatggcccaggcccagtactgctctgtgaacaaggacatctttgaagtagaggagaacacaaatgtcaccgagccgctggtggacatccacgtcccggagggccaggaggtgaccctcggagccttgtccaccccctttgcatttcggatccagggaaaccagctgtttctcaacgtgactcctgattacgaggagaagtcactgcttgaggctcagctgctgtgtcagagcggaggcacattggtgacccagctaagggtgttcgtgtcagtgctggacgtcaatgacaatgcccccgaattcccctttaagaccaaggagataagggtggaggaggacacgaaagtgaactccaccgtcatccccgagacgcaactgcaggctgaggaccgcgacaaggacgacattctgttctacaccctccaggaaatgacagcaggtgccagtgactacttctccctggtgagtgtaaaccgtcccgccctgaggctggaccggcccctggacttctacgagcggccgaacatgaccttctggctgctggtgcgggacactccgggggagaatgtggaacccagccacactgccaccgccacactagtgctgaacgtggtgcccgccgacctgcggcccccgtggttcctgccctgcaccttctcagatggctacgtctgcattcaagctcagtaccacggggctgtccccacggggcacatactgccatctcccctcgtcctgcgtcccggacccatctacgctgaggacggagaccgcggcatcaaccagcccatcatctacagcatctttaggggaaacgtgaatggtacattcatcatccacccagactcgggcaacctcaccgtggccaggagtgtccccagccccatgaccttccttctgctggtgaagggccaacaggccgaccttgcccgctactcagtgacccaggtcaccgtggaggctgtggctgcggccgggagcccgccccgcttcccccagagcctgtatcgtggcaccgtggcgcgtggcgctggagcgggcgttgtggtcaaggatgcagctgccccttctcagcctctgaggatccaggctcaggacccggagttctcggacctcaactcggccatcacatatcgaattaccaaccactcacacttccggatggagggagaggttgtgctgaccaccaccacactggcacaggcgggagccttctacgcagaggttgaggcccacaacacggtgacctctggcaccgcaaccacagtcattgagatacaagtttccgaacaggagcccccctccacagatgtccccccatccccagaggctggaggaacaactgggccctggaccagcaccacttccgaggtccccagaccccctgagccctcccagggaccctccacgaccagctctgggggaggcacaggccctcatccaccctctggcacaactctgaggccaccaacctcgtccacacccggggggtccccgggtgcagaaaacagcacctcccaccaaccagccactcccggtggggacacagcacagaccccaaagccaggaacctctcagccgatgccccccggtgtgggaaccagcacctcccaccaaccagccacacccagtgggggcacagtacagaccccagagccaggaacctctcagccgatgccccccagtatgggaaccagcacctcccaccaaccagccacacccggtgggggcacagcacagaccccagaggcaggaacctctcagccgatgccccccggtatgggaaccagcacctcccaccaaccaaccacacccggtgggggcacagcacagaccccagagccaggaacctctcagccgatgcccctcagcaagagcaccccatcttcaggtggcggcccctcggaggacaagcgcttctcggtggtggatatggcggccctgggcggggtgctgggtgcgctgctgctgctggctctccttggcctcgccgtccttgtccacaagcactatggcccccggctcaagtgctgctctggcaaagctccggagccccagccccaaggctttgacaaccaggcgttcctccctgaccacaaggccaactgggcgcccgtccccagccccacgcacgaccccaagcccgcggaggcaccgatgcccgcagagcccgcaccccccggccctgcctccccaggcggtgcccctgagccccccgcagcggcccgagctggcggaagccccacggcggtgaggtccatcctgaccaaggagcggcggccagagggcgggtacaaggctgtctggtttggcgaggacatcgggacggaggcagacgtggtcgttctcaacgcgcccaccctggacgtggatggcgccagtgactccggcagcggcgatgagggcgagggcgcggggaggggtgggggtccctacgatgcgcccggtggtgatgactcctacatctaagtggcccctccaccctctcccccagccgcacgggcactggaggtctcgctcccccagcctccgacccgaggcagaataaagcaaggctcccgaaaccc

SEQ ID NO: 384711 - DNA, 445 bp, Homo sapiens
cagtgagctgcagcatgacgcctatgagctggacgtcgcagacgatgtcgtcagtgtgagaaccatggctcccaccaaccagccacacccagtgggggcacagtacagaccccagagccaggaacctctcagccgatgccccccagtatgggaaccagcacctcccaccaaccagccacacccggtgggggcacagcacagaccccagaggcaggaacctctcagccgatgccccccggtatgggaaccagcacctcccaccaaccaaccacacccggtgggggcacagcacagaccccagagccaggaacctctcagccgatgcccctcagcaagagcaccccatcttcaggtagcacccactctgttgccttccctccctgactccggtcattggctggtatgggaaacgctgtaggaagggtccaccccaggctgacctggc

SEQ ID NO: 384712 - DNA, 2375 bp, Homo sapiens
attctggggctcgggggatcccggacaccctctcagctcctgcccgggggcccatgtagtcccttctgccctgtgcctcggtgcctgtgacctgagccccttggttgaccctgcactcgtccaacttgggccaaacgactgcccctccttctggcagtgggctggaccagccggccagcgggagcccccttggcagaagccggtcgtaaaggatcataaactggcggcgtctggctggggcgaaggtcgctgaggtaggaactgcgccagtcctagacgccagacccgctcagaccctcctgccaggtgacagccgccaagatggggtcttgggccctgctgtggcctcccctgctgttcaccgggctgctcgtccgacccccggggaccatggcccaggcccagtactgctctgtgaacaaggacatctttgaagtagaggagaacacaaatgtcaccgagccgctggtggacatccacgtcccggagggccaggaggtgaccctcggagccttgtccaccccctttgcatttcggatccagggaaaccagctgtttctcaacgtgactcctgattacgaggagaagtcactgcttgaggctcagctgctgtgtcagagcggaggcacattggtgacccagctaagggtgttcgtgtcagtgctggacgtcaatgacaatgcccccgaattcccctttaagaccaaggagataagggtggaggaggacacgaaagtgaactccaccgtcatccccgagacgcaactgcaggctgaggaccgcgacaaggacgacattctgttctacaccctccaggaaatgacagcaggtgccagtgactacttctccctggtgagtgtaaaccgtcccgccctgaggctggaccggcccctggacttctacgagcggccgaacatgaccttctggctgctggtgcgggacactccgggggagaatgtggaacccagccacactgccaccgccacactagtgctgaacgtggtgcccgccgacctgcggcccccgtggttcctgccctgcaccttctcagatggctacgtctgcattcaagctcagtaccacggggctgtccccacggggcacatactgccatctcccctcgtcctgcgtcccggacccatctacgctgaggacggagaccgcggcatcaaccagcccatcatctacagcatctttaggggaaacgtgaatggtacattcatcatccacccagactcgggcaacctcaccgtggccaggagtgtccccagccccatgaccttccttctgctggtgaagggccaacaggccgaccttgcccgctactcagtgacccaggtcaccgtggaggctgtggctgcggccgggagcccgccccgcttcccccagagcctgtatcgtggcaccgtggcgcgtggcgctggagcgggcgttgtggtcaaggatgcagctgccccttctcagcctctgaggatccaggctcaggacccggagttctcggacctcaactcggccatcacatatcgaattaccaaccactcacacttccggatggagggagaggttgtgctgaccaccaccacactggcacaggcgggagccttctacgcagaggttgaggcccacaacacggtgacctctggcaccgcaaccacagtcattgagatacaagtttccgaacaggagcccccctccacaggtggcggcccctcggaggacaagcgcttctcggtggtggatatggcggccctgggcggggtgctgggtgcgctgctgctgctggctctccttggcctcgccgtccttgtccacaagcactatggcccccggctcaagtgctgctctggcaaagctccggagccccagccccaaggctttgacaaccaggcgttcctccctgaccacaaggccaactgggcgcccgtccccagccccacgcacgaccccaagcccgcggaggcaccgatgcccgcagagcccgcaccccccggccctgcctccccaggcggtgcccctgagccccccgcagcggcccgagctggcggaagccccacggcggtgaggtccatcctgaccaaggagcggcggccagagggcgggtacaaggctgtctggtttggcgaggacatcgggacggaggcagacgtggtcgttctcaacgcgcccaccctggacgtggatggcgccagtgactccggcagcggcgatgagggcgagggcgcggggaggggtgggggtccctacgatgcgcccggtggtgatgactcctacatctaagtggcccctccaccctctcccccagccgcacgggcactggaggtctcgctcccccagcctccgacccgaggcagaataaagcaaggctcccgaaaccc

SEQ ID NO: 384713 - DNA, 3008 bp, Homo sapiens
attctggggctcgggggatcccggacaccctctcagctcctgcccgggggcccatgtagtcccttctgccctgtgcctcggtgcctgtgacctgagccccttggttgaccctgcactcgtccaacttgggccaaacgactgcccctccttctggcagtgggctggaccagccggccagcgggagcccccttggcagaagccggtcgtaaaggatcataaactggcggcgtctggctggggcgaaggtcgctgaggtaggaactgcgccagtcctagacgccagacccgctcagaccctcctgccaggtgacagccgccaagatggggtcttgggccctgctgtggcctcccctgctgttcaccgggctgctcgtccgacccccggggaccatggcccaggcccagtactgctctgtgaacaaggacatctttgaagtagaggagaacacaaatgtcaccgagccgctggtggacatccacgtcccggagggccaggaggtgaccctcggagccttgtccaccccctttgcatttcggatccagggaaaccagctgtttctcaacgtgactcctgattacgaggagaagtcactgcttgaggctcagctgctgtgtcagagcggaggcacattggtgacccagctaagggtgttcgtgtcagtgctggacgtcaatgacaatgcccccgaattcccctttaagaccaaggagataagggtggaggaggacacgaaagtgaactccaccgtcatccccgagacgcaactgcaggctgaggaccgcgacaaggacgacattctgttctacaccctccaggaaatgacagcaggtgccagtgactacttctccctggtgagtgtaaaccgtcccgccctgaggctggaccggcccctggacttctacgagcggccgaacatgaccttctggctgctggtgcgggacactccgggggagaatgtggaacccagccacactgccaccgccacactagtgctgaacgtggtgcccgccgacctgcggcccccgtggttcctgccctgcaccttctcagatggctacgtctgcattcaagctcagtaccacggggctgtccccacggggcacatactgccatctcccctcgtcctgcgtcccggacccatctacgctgaggacggagaccgcggcatcaaccagcccatcatctacagcatctttaggggaaacgtgaatggtacattcatcatccacccagactcgggcaacctcaccgtggccaggagtgtccccagccccatgaccttccttctgctggtgaagggccaacaggccgaccttgcccgctactcagtgacccaggtcaccgtggaggctgtggctgcggccgggagcccgccccgcttcccccagagcctgtatcgtggcaccgtggcgcgtggcgctggagcgggcgttgtggtcaaggatgcagctgccccttctcagcctctgaggatccaggctcaggacccggagttctcggacctcaactcggccatcacatatcgaattaccaaccactcacacttccggatggagggagaggttgtgctgaccaccaccacactggcacaggcgggagccttctacgcagaggttgaggcccacaacacggtgacctctggcaccgcaaccacagtcattgagatacaagtttccgaacaggagcccccctccacagatgtccccccatccccagaggctggaggaacaactgggccctggaccagcaccacttccgaggtccccagaccccctgagccctcccagggaccctccacgaccagctctgggggaggcacaggccctcatccaccctctggcacaactctgaggccaccaacctcgtccacacccggggggtccccgggtgcagaaaacagcacctcccaccaaccagccactcccggtggggacacagcacagaccccaaagccaggaacctctcagccgatgccccccggtgtgggaaccagcacctcccaccaaccagccacacccagtgggggcacagtacagaccccagagccaggaacctctcagccgatgccccccagtatgggaaccagcacctcccaccaaccagccacacccggtgggggcacagcacagaccccagaggcaggaacctctcagccgatgccccccggtatgggaaccagcacctcccaccaaccaaccacacccggtgggggcacagcacagaccccagagccaggaacctctcagccgatgcccctcagcaagagcaccccatcttcaggtggcggcccctcggaggacaagcgcttctcggtggtggatatggcggccctgggcggggtgctgggtgcgctgctgctgctggctctccttggcctcgccgtccttgtccacaagcactatggcccccggctcaagtgctgctctggcaaagctccggagccccagccccaaggctttgacaaccaggcgttcctccctgaccacaaggccaactgggcgcccgtccccagccccacgcacgaccccaagcccgcggaggcaccgatgcccgcagagcccgcaccccccggccctgcctccccaggcggtgcccctgagccccccgcagcggcccgagctggcggaagccccacggcggtgaggtccatcctgaccaaggagcggcggccagagggcgggtacaaggctgtctggtttggcgaggacatcgggacggaggcagacgtggtcgttctcaacgcgcccaccctggacgtggatggcgccagtgactccggcagcggcgatgagggcgagggcgcggggaggggtgggggtccctacgatgcgcccggtggtgatgactcctacatctaagtggcccctccaccctctcccccagccgcacgggcactggaggtctcgctcccccagcctccgacccgaggcagaataaagcaaggctcccgaaacccaggccatggcgtggggcaggcgcgcgggtccatgggggtcccattcactca

SEQ ID NO: 384714 - DNA, 2229 bp, Homo sapiens
aagctcggttacccccgactagcccgacagtccccgactagcccacagccgccctcgccctccaaggctcttaggctctgtcctccctgaccctccccagggtgccagtgactacttctccctggtgagtgtaaaccgtcccgccctgaggctggaccggcccctggacttctacgagcggccgaacatgaccttctggctgctggtgcgggacactccgggggagaatgtggaacccagccacactgccaccgccacactagtgctgaacgtggtgcccgccgacctgcggcccccgtggttcctgccctgcaccttctcagatggctacgtctgcattcaagctcagtaccacggggctgtccccacggggcacatactgccatctcccctcgtcctgcgtcccggacccatctacgctgaggacggagaccgcggcatcaaccagcccatcatctacagcatctttaggggaaacgtgaatggtacattcatcatccacccagactcgggcaacctcaccgtggccaggagtgtccccagccccatgaccttccttctgctggtgaagggccaacaggccgaccttgcccgctactcagtgacccaggtcaccgtggaggctgtggctgcggccgggagcccgccccgcttcccccagagcctgtatcgtggcaccgtggcgcgtggcgctggagcgggcgttgtggtcaaggatgcagctgccccttctcagcctctgaggatccaggctcaggacccggagttctcggacctcaactcggccatcacatatcgaattaccaaccactcacacttccggatggagggagaggttgtgctgaccaccaccacactggcacaggcgggagccttctacgcagaggttgaggcccacaacacggtgacctctggcaccgcaaccacagtcattgagatacaagtttccgaacaggagcccccctccacagatgtccccccatccccagaggctggaggaacaactgggccctggaccagcaccacttccgaggtccccagaccccctgagccctcccagggaccctccacgaccagctctgggggaggcacaggccctcatccaccctctggcacaactctgaggccaccaacctcgtccacacccggggggtccccgggtgcagaaaacagcacctcccaccaaccagccactcccggtggggacacagcacagaccccaaagccaggaacctctcagccgatgccccccggtgtgggaaccagcacctcccaccaaccagccacacccagtgggggcacagtacagaccccagagccaggaacctctcagccgatgccccccagtatgggaaccagcacctcccaccaaccagccacacccggtgggggcacagcacagaccccagaggcaggaacctctcagccgatgccccccggtatgggaaccagcacctcccaccaaccaaccacacccggtgggggcacagcacagaccccagagccaggaacctctcagccgatgcccctcagcaagagcaccccatcttcaggtggcggcccctcggaggacaagcgcttctcggtggtggatatggcggccctgggcggggtgctgggtgcgctgctgctgctggctctccttggcctcgccgtccttgtccacaagcactatggcccccggctcaagtgctgctctggcaaagctccggagccccagccccaaggctttgacaaccaggcgttcctccctgaccacaaggccaactgggcgcccgtccccagccccacgcacgaccccaagcccgcggaggcaccgatgcccgcagagcccgcaccccccggccctgcctccccaggcggtgcccctgagccccccgcagcggcccgagctggcggaagccccacggcggtgaggtccatcctgaccaaggagcggcggccagagggcgggtacaaggctgtctggtttggcgaggacatcgggacggaggcagacgtggtcgttctcaacgcgcccaccctggacgtggatggcgccagtgactccggcagcggcgatgagggcgagggcgcggggaggggtgggggtccctacgatgcgcccggtggtgatgactcctacatctaagtggcccctccaccctctcccccagccgcacgggcactggaggtctcgctcccccagcctccgacccgaggcagaataaagcaaggctcccgaaaccc

SEQ ID NO: 384715 - DNA, 2374 bp, Homo sapiens
attctggggctcgggggatcccggacaccctctcagctcctgcccgggggcccatgtagtcccttctgccctgtgcctcggtgcctgtgacctgagccccttggttgaccctgcactcgtccaacttgggccaaacgactgcccctccttctggcagtgggctggaccagccggccagcgggagcccccttggcagaagccggtcgtaaaggatcataaactggcggcgtctggctggggcgaaggtcgctgaggtaggaactgcgccagtcctagacgccagacccgctcagaccctcctgccaggtgacagccgccaagatggggtcttgggccctgctgtggcctcccctgctgttcaccgggctgctcgtccgacccccggggaccatggcccaggcccagtactgctctgtgaacaaggacatctttgaagtagaggagaacacaaatgtcaccgagccgctggtggacatccacgtcccggagggccaggaggtgaccctcggagccttgtccaccccctttgcatttcggatccagggaaaccagctgtttctcaacgtgactcctgattacgaggagaagtcactgcttgaggctcagctgctgtgtcagagcggaggcacattggtgacccagctaagggtgttcgtgtcagtgctggacgtcaatgacaatgcccccgaattcccctttaagaccaaggagataagggtggaggaggacacgaaagtgaactccaccgtcatccccgagacgcaactgcaggctgaggaccgcgacaaggacgacattctgttctacaccctccaggaaatgacagcaggtgccagtgactacttctccctggtgagtgtaaaccgtcccgccctgaggctggaccggcccctggacttctacgagcggccgaacatgaccttctggctgctggtgcgggacactccgggggagaatgtggaacccagccacactgccaccgccacactagtgctgaacgtggtgcccgccgacctgcggcccccgtggttcctgccctgcaccttctcagatggctacgtctgcattcaagctcagtaccacggggctgtccccacggggcacatactgccatctcccctcgtcctgcgtcccggacccatctacgctgaggacggagaccgcggcatcaaccagcccatcatctacagcatctttaggggaaacgtgaatggtacattcatcatccacccagactcgggcaacctcaccgtggccaggagtgtccccagccccatgaccttccttctgctggtgaagggccaacaggccgaccttgcccgctactcagtgacccaggtcaccgtggaggctgtggctgcggccgggagcccgccccgcttcccccagagcctgtatcgtggcaccgtggcgcgtggcgctggagcgggcgttgtggtcaaggatgcagctgccccttctcagcctctgaggatccaggctcaggacccggagttctcggacctcaactcggccatcacatatcgaattaccaaccactcacacttccggatggagggagaggttgtgctgaccaccaccacactggcacaggcgggagccttctacgcagaggttgaggcccacaacacggtgacctctggcaccgcaaccacagtcattgagatacaagtttccgaacaggagcccccctccacagatgtccccccatccccagaggctggaggaacaactgggccctggaccagcaccacttccgaggtccccagaccccctgagccctcccagggaccctccacgaccagctctgggggaggcacaggccctcatccaccctctggcacaactctgaggccaccaacctcgtccacacccggggggtccccgggtgcagaaaacagcacctcccaccaaccagccactcccggtggggacacagcacagaccccaaagccaggaacctctcagccgatgccccccggtgtgggaaccagcacctcccaccaaccagccacacccagtgggggcacagtacagaccccagagccaggaacctctcagccgatgccccccagtatgggaaccagcacctcccaccaaccagccacacccggtgggggcacagcacagaccccagaggcaggaacctctcagccgatgccccccggtatgggaaccagcacctcccaccaaccaaccacacccggtgggggcacagcacagaccccagagccaggaacctctcagccgatgcccctcagcaagagcaccccatcttcaggtagcacccactctgttgccttccctccctgactccggtcattggctggtatgggaaacgctgtaggaagggtccaccccaggctgacctggc

SEQ ID NO: 384716 - DNA, 1629 bp, Homo sapiens
attctggggctcgggggatcccggacaccctctcagctcctgcccgggggcccatgtagtcccttctgccctgtgcctcggtgcctgtgacctgagccccttggttgaccctgcactcgtccaacttgggccaaacgactgcccctccttctggcagtgggctggaccagccggccagcgggagcccccttggcagaagccggtcgtaaaggatcataaactggcggcgtctggctggggcgaaggtcgctgaggtaggaactgcgccagtcctagacgccagacccgctcagaccctcctgccaggtgacagccgccaagatggggtcttgggccctgctgtggcctcccctgctgttcaccgggctgctcgtccgacccccggggaccatggcccaggcccagtactgctctgtgaacaaggacatctttgaagtagaggagaacacaaatgtcaccgagccgctggtggacatccacgtcccggagggccaggaggtgaccctcggagccttgtccaccccctttgcatttcggatccagggaaaccagctgtttctcaacgtgactcctgattacgaggagaagtcactgcttgaggctcagctgctgtgtcagagcggaggcacattggtgacccagctaagggtgttcgtgtcagtgctggacgtcaatgacaatgcccccgaattcccctttaagaccaaggagataagggtggaggaggacacgaaagtgaactccaccgtcatccccgagacgcaactgcaggctgaggaccgcgacaaggacgacattctgttctacaccctccaggaaatgacagcaggtgccagtgactacttctccctggtgagtgtaaaccgtcccgccctgaggctggaccggcccctggacttctacgagcggccgaacatgaccttctggctgctggtgcgggacactccgggggagaatgtggaacccagccacactgccaccgccacactagtgctgaacgtggtgcccgccgacctgcggcccccgtggttcctgccctgcaccttctcagatggctacgtctgcattcaagctcagtaccacggggctgtccccacggggcacatactgccatctcccctcgtcctgcgtcccggacccatctacgctgaggacggagaccgcggcatcaaccagcccatcatctacagcatctttaggggaaacgtgaatggtacattcatcatccacccagactcgggcaacctcaccgtggccaggagtgtccccagccccatgaccttccttctgctggtgaagggccaacaggccgaccttgcccgctactcagtgacccaggtcaccgtggaggctgtggctgcggccgggagcccgccccgcttcccccagagcctgtatcgtggcaccgtggcgcgtggcgctggagcgggcgttgtggtcaaggatgcagctgccccttctcagcctctgaggatccaggctcaggacccggagttctcggacctcaactcggccatcacatatcgaattaccaaccactcacacctctcccccagccgcacgggcactggaggtctcgctcccccagcctccgacccgaggcagaataaagcaaggctcccgaaaccc

SEQ ID NO: 384717 - DNA, 1036 bp, Homo sapiens
gactgacagacacagacaggcccaaggcccccagtgaggtaacctgtgatgtgtgtaggacagaggccagatgtggggtccagcgaatcccacgattcccacggctgccgctcaccctgcaagtccctgcacctcttgtgagctcctgtgagcagcttggcctcccgggggggagggggtgggcagggtctcgatgggacacacaggccccttgagccagggtcagcagagcctgagatttgggagacagcccaggcctgggtggaacccaagtgtcccaagcctggcacaggttggcacgggaaatgcctggggcactcaacagtgcggggatgatgacgttttccactgcgatgccaggtggcggcccctcggaggacaagcgcttctcggtggtggatatggcggccctgggcggggtgctgggtgcgctgctgctgctggctctccttggcctcgccgtccttgtccacaagcactatggcccccggctcaagtgctgctctggcaaagctccggagccccagccccaaggctttgacaaccaggcgttcctccctgaccacaaggccaactgggcgcccgtccccagccccacgcacgaccccaagcccgcggaggcaccgatgcccgcagagcccgcaccccccggccctgcctccccaggcggtgcccctgagccccccgcagcggcccgagctggcggaagccccacggcggtgaggtccatcctgaccaaggagcggcggccagagggcgggtacaaggctgtctggtttggcgaggacatcgggacggaggcagacgtggtcgttctcaacgcgcccaccctggacgtggatggcgccagtgactccggcagcggcgatgagggcgagggcgcggggaggggtgggggtccctacgatgcgcccggtggtgatgactcctacatctaagtggcccctccaccctctcccccagccgcacgggcactggaggtctcgctcccccagcctccgacccgaggcagaataaagcaaggctcccgaaaccc

SEQ ID NO: 384718 - DNA, 461 bp, Homo sapiens
atcatcatccagaagcaaatggctccttaatttaatcaggatctcttattatcaaattattgccttggccacagtgaggctgaaaacaggagcagaacattatcaagctgctcaggaagccagtgagtagtaattactcccccagagaactggtcatcttccgtgtcctacctagtggcaacggagtacagctgagatttataccctcctccacaccaaaataatggatgaaacagacaggctattaaaaataggcctgattctgttcccttttaaccctcacatccttcaaatggatgtctccaggcagttaagtgttctagcctttgcggccccttgttaccgcctgattttgggtgttttacagcaacggaggaacttaagcaaagaaacactatgtggcttgaaattcacactaatccatttagaaataaaagaatctgagaaattttaaataattg

SEQ ID NO: 384719 - DNA, 350 bp, Homo sapiens
tgtctaatttttcacctagaagcttagttgttttgccttttatatttagatcaaagaccaactgaaataaattatgtatagtgtgaagtagtagtcaaaatatatttttcccatgtgagtatccaaccaatttggttccatttctttaaaagactatcccttccctacagttctacagtgaaactttagtcataaagcaaatttccatatatgagtgggtctatttctgaaccctctattctgttgccttgttctatttgcactgacacactctagctttatatgaatgcttgaaatgtggttgtgtaagcattctagtttatcattgttttggctatttgtgggccttt

SEQ ID NO: 384720 - DNA, 280 bp, Homo sapiens
ttgttgctcattaatatttactagataaataatacattggagcttgagtaccactgtataattggttttcccaacattagatttgtttaaagttatccaatgtttcaatagttccaatttctcctactatacccgcaatggatggtttcttttgagacactcagagaaagcctagcatttaagggcgcaggttgtggagatagactgccggggttttaagtccagatcaactctttcctgtcctcatgaccttgtgcaagcaaatctacccttctctgag

SEQ ID NO: 384721 - DNA, 779 bp, Homo sapiens
ccagcccctatattttcacagcatcactgctgtgctacatagatgcttgtgggcatcttcatggaatcacaagtcctagatgaggctcttgtgtggttatattttgtttgtttatttggctagtgtctctttcttttggaaaaccaacttttccccaatccatgtggttttcctaactgttgacttagaatttctggtggtagttcctgcaaatctgaattttcaaaaacacttgagggaattttcatgcaccataaggggtgagaaactcaaatcaaaggaatgagaatgggactcatgtgacatcaatcaaaatcttttcttgaattgataaatagactctgggagaaagaagctttctttctactggggctgccaagtagagaaggagggaacaaggctcttccagcagtgcccttcttcattcagttgggagagtgtgcctacctataggataaagccaaggagagataagcagagtcaaaagaagataaagggccaggcacagtagctcacccctgtaatccaagcactttgggaggccaaggcaggtgaattacgaggtcaggagttcgagatcagcctggccaacatggcaaaactctgtctctactaaaaatacaaaaattagcctggcgtggaggtacgcgcttgtaatcccagctactctgcaggctgaagcaggagaatcacttgaacccaggaggcggaggttgcagtgagccaagatcacaccactgcactccagcctgggcaacagagtgagactccatctcaaa

SEQ ID NO: 384722 - DNA, 432 bp, Homo sapiens
atggtggtttctgcacagacaccctccgtctgcgtattaaacacgcaggaatactcttcccttccacagagaaagaactttgctgtctcgcatttttctggtaacacctagctgtctcgaactgcatctctttttctcgttgttgatagaaacagggacataaagaaagcttcttctcttctaagaggagctgcggccgaagcacaaggatgaacagctgcggatactcggctttggtgccaggaagaccgcggggcgtggcggggaccgggccctgcgaatggagcagctgagactcagctccgcggaatgacacaagcctggggctgccagctcttcccatttttcaaaagaagctggaaatgggttttcgtttaaaataccctggttttcgaatcttggcctgacatgtttttaaacaccgtatgagcc

SEQ ID NO: 384723 - DNA, 587 bp, Homo sapiens
cttccccactgtctgattggcagcctcccatcgagtgcaagcctggggaatcagatatgcagaagcctcctctaaaacagccccctcagtctctgtacccttatcccgtttcattcttcaaagcacttaccgttacatgacatttagagtctatatgatttgtttgtggttggcctatttcaaatgtggactcctctatgagggcattaagtctgacttgatctacttcacactgtatctcctaactcctttcagtgtgggagcaggcagtcaataaatatttgtatgaatgaatgaatgaatcaatcagtgcttgacacagaatgcttttctgggaagaggagctcctgtctctattttgtctaagatctataccagaaatcctcttcatcactggtaaaattttaaggtactatagaggaatataatgacctggtttcagctgtaatttctgtgctgatttgtatatatattatgatagtaacaagggagctaaccccatcactttgggatgctgaggcaggaggatcacttgaggccaggagttctagaccaccctgggcaacatagtgagaccccatctctac

SEQ ID NO: 384724 - DNA, 478 bp, Homo sapiens
gtgcaggaactcctgggatggtgttgcccagtgacacaatcccagtgtggccatttctgatcccgagaaagcagtcaggagtgggtggatgcagttacagttcatcaagtcctgctagttcaagtcatgagtcctgaattctccaggaggagccactaaagaaatgcagaagcaggcaatccttgcaataaggccagcaaactgccagtgtgaaggatgcccaggtaacctgcccatgccagaacggccaggagatggtggaaccagaatctaagcccacgcccatctgacctcaaagtctgtgctcctgaggttcgcaccgagttgcctcctaagacttgctgaaactggatcacgtccatttacccatctctgagagaaatgcaagctttaaaaaaggaaatatttactatggatattttacaatagttccaaaacatgaaagttttaaataagatattcttaaccatcctcacca

SEQ ID NO: 384725 - DNA, 311 bp, Homo sapiens
ccactggggcttcagtaggtgtaaacattcacccctagacactgccatggggtcagagccccacagcctgcccgtctgcatgctcccctagaggttggagcagcagggcactgaagaagcgaatcactcccccgctgcacgccttgcgagggggacaagggaagttatcccctttcaatatgttactcctagccttaatttctggaactttatttttcaatactttaaaatgcagtgttggttaatctgattaaattcacttatatttcacttatattctattataattcataataaatgtgttaattggt

SEQ ID NO: 384726 - DNA, 524 bp, Homo sapiens
ccagggcacggctgaggcaggacgggcagaagtcattcctggggcctgggcgatgctgcatgagctcttcctccaagaggaagtgtccctccagcttggccctgagagcacagtagatcaggactggacagggagcaaggccttggagaggcccccagggatgtgtgcatgtgcctctgccccacgaatgcagctgcgccctgctcactgatgccctctgcagctctctcttcagcccaaagctcttctccctaaaagcctctgggcctttgcccagggagaggtaccctcctgcctgaaagactgcccgagggacggtggctctgccccccattttgcttccaggccgagctgggctggcccgccagcactctgtgcacatgcccctagttatctgaggattacccatctcctgtgtcttccccactggtgtcacacagtgtgtgagcaccctggggaagcacaaaggctgggcaagtgctgacctttggccccgtccccacccctcccacccctactcttta

SEQ ID NO: 384727 - DNA, 393 bp, Homo sapiens
ctgggagggaaggactcttgagcaggcccaaagggactatttcaaattttggatacaagtttccattcacatctgaattcctctttccaggttgtttctctcccctggatgcctgtgggggtggggacggcagagcctcggacactgcccggggatcactctcaggctacttttcccaccctgccaagctgctcgagacgtcaaaggagaccaggccggtcagcacacaggcttctggtaagtgccgccctccggtctgggagctcagctctccccttctgactcaccgctcggcgctgactcatcgtgacggcgagtggggctccagctccgcggcatttcatagacagcgcggtcacattcctttccaacagtcgctctggcctcgatgtc

SEQ ID NO: 384728 - DNA, 288 bp, Homo sapiens
attaccggttatacctatggaatgaagagaatgttccttatctgagttgtaatagcctacttgtaggtctatatttatcttcacagtttgtacatttttttcttgtaatatcaaaatatatgtatatgtactaagtttattttgcaagtgtttcaagaatttgtagtttaatatgcatatttcattgctttcttctccatctgacattatttagacttaggatgaaatagcaagctgggaaacaatgccatagatttaaaaaggcctatgagaagtatagaaattaaa

SEQ ID NO: 384729 - DNA, 389 bp, Homo sapiens
tccaggaactaatgtaatgtcaagtcaatatgatttaccaagtaagtacttaataaatatttctgaataacaaacaattattaagtactaactacttgctaagaacctctgttaagtgctctgcatggaccattttgtatttcactacactaggaggtcttgcagatgaggagaccaaggctcagggagctgatcatccaggcccagggcacacaatggacgacatctggtagtttggctacagagcccaagttctgaaacacttgacattcgtagaaccaatgatcctgaaagaattcagaggttataaaattttcttcctataaactattaagaagtggaagaacttttaagaaatggataggaattcgtggcagtgtattgggtat

SEQ ID NO: 384730 - DNA, 740 bp, Homo sapiens
ctgcagagcggagattgggagcgcaggggcagcggctccgagagcgcccacaaaacccaacgagccctggacgactgcaagatgcttgtccaagagttcaacacacaagtggccctgtaccgagagctggtcatttctattggggatgtctcggtcagctgcccctcactccgggcggaaatgcacaagacaagaaccaaaggctgtgaaatggcccgtcaggcacaccaaaaattggctgccatctcaggcccggaagatggtgagatccatccagaaatctgtcggctttacatccagctgcagtgctgcttagaaatgtataccacagagatgctaaaatccatatgtctgctggggtctcttcagtttcatcgaaaaggaaaggaacctggcgggggaaccaagagtttggattgcaaaattgaggagagtgctgaaacacctgccctagaagactcctcatcatcccccgtagatagtcagcaacattcctggcaggtttccacagacattgagaacactgaaagagacatgagagaaatgaaaaaccttttaagcaaactcagggaaactatgcctttaccattgaaaaatcaagatgacagcagccttctgaatctaactccctaccccctggtgagaagacggaagagaaggttctttgggctgtgttgtctcgtctcaagctaggtggctcctcctggaaacccactgagaacatcttgaaaaaaatcaca

SEQ ID NO: 384731 - DNA, 215 bp, Homo sapiens
tatcttatctataacattcattttatattgcaactacttgctttcctgtttatcttcaccactagattgaactctttaagttagtatcttaatccttccgtattttcccagcacctagcacagtgcctggcacgaagtagtgggtaacagttgtatttgttggtgactgtgctgttatcaggttagacttcgtggaggagggatatttagataga

SEQ ID NO: 384732 - DNA, 993 bp, Homo sapiens
  misc_feature (720)..(720): n is a, c, g, or t
atgagatgtgggtggggacgcagatccaaaccatatcacctgaaaatagatacatagaacaatccaacagaatagagcacacagaagtaaatccacacgtttgtagccaactgatttttgaccacagtgccaggaacatagggaaaggacagtctcttcataaatgatgctaagaaatctggctatccatgtgcagaagaattaaactagatccctatctcttaccacatacaaaaatcaactcaaaatgggctaaagacttaagtgaaagacctaaaatgataaaactactagaagaaaacataggggaaatacttcatgacattgatctgggcaaagattttttgggtaagaccttaaaagcacagctaacaaaagcaaaaatagacaaataggattatatcgaacaaaaaaactccttcacagcaaaggaaacagtcagcagaatgaaaagacaacctacagaatggaagaaaatatgtgcaaactattcatctggcaaggggctaatataaggaactcaactcagtagaaaaaagaactaaataaaaaatgggcaaaagacttggttagacatttctcaaaagaaaacatacaaatggccacaggtataggagaaaatgttcaacgtcactaatcatcaaggaaatacaatgggaaccacagtgagacatcacctcaccccgattagaatggctattatcaaaaagaggccaggcncagtggctcatgcctgtaatcccagcactttgggaggctgaggtgggcagatcacttgaggtcggtagttcaagaccagcctggctaacatggtaaaaccccatctcttctacaaatacaaaaattacctgggcatgctggcgggtgcctgtagtcccagttactggggagattgaggcatgagaatcacttgaacctgggaggtggacgttgcagtgagccgagatcatgacactgcactccaggttaggagacagagcaagaccctgtctc

SEQ ID NO: 384733 - DNA, 608 bp, Homo sapiens
atgtgcacacatttgctatctctatctgctgaagaggacatgaagcaaagaaaccccagtagcaagaagccacattgtgctcaggtcttagtttctaacaaacaccattccccattaaaaggaaccagagctccttagagaaatggatgattccagggctgtggcagggtaggtacaagatgaacctaaagtgtcgttttataccagaaagtaagaaagtattaaagtgtttaaaaaagtgatgggagcatatcacaaggattcagaagggataccaactggctaaatctggaacaatttgatcaccaaagtaagtacaataataaattctaagctattgaagtaaaggcatttattatgcgtagtaataataaatagataatgagagagaaatgaggactcatgcttacagtaaaatgccaggagctgactggcataaatgtggaaggaaggctggagtgggaaaattattattttgcaaccatcatggtaattaccagatcagataaggatcaacagatgccaaatctagggcaaatttgatgaggagcagaatatttgcactgtctttgagagtttctcccagagatcacttatttgttgtaaaa

SEQ ID NO: 384734 - DNA, 144 bp, Homo sapiens
caatgtaaaaggtacattatattacatttgatataatgcaacagtaattataactatatatgcaattcgtatctacataagccatgatagtggaggatttcttgaaattactttcttttcccccagtgaaatgtcagttgtttt

SEQ ID NO: 384735 - DNA, 837 bp, Homo sapiens
ctcagaccggttctgggacaaaaggggccgcggcggccggagcgggacgggcccggcgcgggagggagcgaagcagcgcgggcagcgagcgagatgcagcaccgaggcttcctcctcctcaccctcctcgccctgctggcgctcacctccgcggtcgccaaaaagaaagataaggtgaagaagggcggcccggggagcgagtgcgctgagtgggcctgggggccctgcacccccagcagcaaggattgcggcgtgggtttccgcgagggcacctgcggggcccagacccagcgcatccggtgcagggtgccctgcaactggaagaaggagtttggagccgactgcaagtacaagtttgagaactggggtgcgtgtgatgggggcacaggcaccaaagtccgccaaggcaccctgaagaaggcgcgctacaatgctcagtgccaggagaccatccgcgtcaccaagccctgcacccccaagaccaaagcaaaggccaaagccaagaaagggaagggaaaggactagacgccaagcctggatgccaaggagcccctggtgtcacatggggcctggcccacgccctccctctcccaggcccgagatgtgacccaccagtgccttctgtctgctcgttagctttaatcaatcatgccctgccttgtccctctcactccccagccccacccctaagtgcccaaagtggggagggacaagggattctgggaagcttgagcctcccccaaagcaatgtgagtcccagagcccgcttttgttcttccccacaattccattactaagaaacacatcaaataaactgactttttccccccaaaaaaa

SEQ ID NO: 384736 - DNA, 1143 bp, Homo sapiens
tgaaagtgaaagaggggtggggcgggggcgagcccgggttctgtggcccatttgccctgtggccttgagcaagcccctcccccaggcctcgggggctctcccggtttgggggaaccgggcgaggcaatgccacaggcccagggttagagggggtgggcacttgcagctgccgatgtggctagatctggaacttctcagacggctcctgtcagcgccaagtttcaccaaatccaggcctgcgggctcctcccccaggacccccactcgcagtccctcaagcctgtgctcccggaaaggcactgggcgaccgcacccgtggctttctctgggcgaccgggtcccagactccccccagcacagcagagcgcttccctgcccacccgcggaaaccgccccaggatgcagcaccgaggcttcctcctcctcaccctcctcgccctgctggcgctcacctccgcggtcgccaaaaagaaagataaggtgaagaagggcggcccggggagcgagtgcgctgagtgggcctgggggccctgcacccccagcagcaaggattgcggcgtgggtttccgcgagggcacctgcggggcccagacccagcgcatccggtgcagggtgccctgcaactggaagaaggagtttggagccgactgcaagtacaagtttgagaactggggtgcgtgtgatgggggcacaggcaccaaagtccgccaaggcaccctgaagaaggcgcgctacaatgctcagtgccaggagaccatccgcgtcaccaagccctgcacccccaagaccaaagcaaaggccaaagccaagaaagggaagggaaaggactagacgccaagcctggatgccaaggagcccctggtgtcacatggggcctggcccacgccctccctctcccaggcccgagatgtgacccaccagtgccttctgtctgctcgttagctttaatcaatcatgccctgccttgtccctctcactccccagccccacccctaagtgcccaaagtggggagggacaagggattctgggaagcttgagcctcccccaaagcaatgtgagtcccagagcccgcttttgttcttccccacaattccattactaagaaacacatcaaataaactgactttttccccccaaaaaaa

SEQ ID NO: 384737 - DNA, 1013 bp, Homo sapiens
  misc_feature (1013)..(1013): n is a, c, g, or t
ctcagaccggttctgggacaaaaggggccgcggcggccggagcgggacgggcccggcgcgggagggagcgaagcagcgcgggcagcgagcgagatgcagcaccgaggcttcctcctcctcaccctcctcgccctgctggcgctcacctccgcggtcgccaaaaagaaagataaggtgaagaagggcggcccggggagcgagtgcgctgagtgggcctgggggccctgcacccccagcagcaaggattgcggcgtgggtttccgcgagggcacctgcggggcccagacccagcgcatccggtgcagggtgccctgcaactggaagaaggagtttggagccgactgcaagtacaagtttgagaactggggtgcgtgtgatgggggcacaggcaccaaagtccgccaaggcaccctgaagaaggcgcgctacaatgctcagtgccaggagaccatccgcgtcaccaagccctgcacccccaagaccaaagcaaaggccaaagccaagaaagggaagggaaaggactagacgccaagcctggatgccaaggagcccctggtgtcacatggggcctggcccacgccctccctctcccaggcccgagatgtgacccaccagtgccttctgtctgctcgttagctttaatcaatcatgccctgccttgtccctctcactccccagccctgtccccaacatgccctgtactaaaattgcgagaagactaacaaaaaaaacaaaaaaattcggaggactctatgccggggtgggggaaagggggactgaaatggccatggccaaagcgttccgtaaccaggtttctggtccaaggggaagatggcggggacccccctatagggggagcgcgaataaattcggaaaagcggcgtacgtagaccgaccgcgacggaacgaagatacacgcagggccgcgagcagaaggagcggagcacacgggcgaacaaagagcaacgacagaaggcacacctacgcaatacactgcacccacagcgacgctn

SEQ ID NO: 384738 - DNA, 479 bp, Homo sapiens
gcttccgagtcagctgattggaaaccactagggggcagaatcttctccttccctgatgcccgggtgtttgtggagccggcggtctgcaatgggtcagcctaactgctgatatggtattaatatttctttcttgttttacagccaagaaagggaagggaaaggactagacgccaagcctggatgccaaggagcccctggtgtcacatggggcctggcccacgccctccctctcccaggcccgagatgtgacccaccagtgccttctgtctgctcgttagctttaatcaatcatgccctgccttgtccctctcactccccagccccacccctaagtgcccaaagtggggagggacaagggattctgggaagcttgagcctcccccaaagcaatgtgagtcccagagcccgcttttgttcttccccacaattccattactaagaaacacatcaaataaactgactttttccccccaaaaaaa

SEQ ID NO: 384739 - DNA, 742 bp, Homo sapiens
ctcagaccggttctgggacaaaaggggccgcggcggccggagcgggacgggcccggcgcgggagggagcgaagcagcgcgggcagcgagcgagatgcagcaccgaggcttcctcctcctcaccctcctcgccctgctggcgctcacctccgcggtcgccaaaaagaaagataaggtgaagaagggcggcccggggagcgagtgcgctgagtgggcctgggggccctgcacccccagcagcaaggattgcggcgtgggtttccgcgagggcacctgcggggcccagacccagcgcatccggtgcagggtgccctgcaactggaagaaggagtttggagccgactgcaagtacaagtttgagaactggggtgcgtgtgatgggggcacaggcaccaaagtccgccaaggcaccctgaagaaggcgcgctacaatgctcagtgccaggagaccatccgcgtcaccaagccctgcacccccaagaccaaagcaaaggccaaagccaagaaagggaagggaaaggactagacgccaagcctggatgccaaggagcccctggtgtcacatggggcctggcccacgccctccctctcccaggcccgagatgtgacccaccagtgccttctgtctgctcgttagctttaattaacatgcgctgtgttgtggactttacttcccaacccaccctaaatggccgtgtgagggacatgggaattgtggagcttggccttccccgcatggaggc

SEQ ID NO: 384740 - DNA, 249 bp, Homo sapiens
gcggccgcctactactactactgctcgaattcaagcttctaacgatgtacggggacaatcatgccctgccttgtccctctcactccccagccccacccctaagtgcccaaagtggggagggacaagggattctgggaagcttgagcctcccccaaagcaatgtgagtcccagagcccgcttttgttcttccccacaattccattactaagaaacacatcaaataaactgactttttccccccaaaaaaa

SEQ ID NO: 384741 - DNA, 964 bp, Homo sapiens
ctcagaccggttctgggacaaaaggggccgcggcggccggagcgggacgggcccggcgcgggagggagcgaagcagcgcgggcagcgagcgagtgagcgcgcggcggcccctggtccgcccggccgcggccgatctaggggctgggggctggaggcgggggtgggggtctgagctgcgtcctgggctcgaggcgtcccccggggagtcgcctcttagcggatgcagcaccgaggcttcctcctcctcaccctcctcgccctgctggcgctcacctccgcggtcgccaaaaagaaagataaggtgaagaagggcggcccggggagcgagtgcgctgagtgggcctgggggccctgcacccccagcagcaaggattgcggcgtgggtttccgcgagggcacctgcggggcccagacccagcgcatccggtgcagggtgccctgcaactggaagaaggagtttggagccgactgcaagtacaagtttgagaactggggtgcgtgtgatgggggcacaggcaccaaagtccgccaaggcaccctgaagaaggcgcgctacaatgctcagtgccaggagaccatccgcgtcaccaagccctgcacccccaagaccaaagcaaaggccaaagccaagaaagggaagggaaaggactagacgccaagcctggatgccaaggagcccctggtgtcacatggggcctggcccacgccctccctctcccaggcccgagatgtgacccaccagtgccttctgtctgctcgttagctttaatcaatcatgccctgccttgtccctctcactccccagccccacccctaagtgcccaaagtggggagggacaagggattctgggaagcttgagcctcccccaaagcaatgtgagtcccagagcccgcttttgttcttccccacaattccattactaagaaacacatcaaataaactgactttttccccccaaaaaaa

SEQ ID NO: 384742 - DNA, 984 bp, Homo sapiens
ctcagaccggttctgggacaaaaggggccgcggcggccggagcgggacgggcccggcgcgggagggagcgaagcagcgcgggcagcgagcgagatgcagcaccgaggcttcctcctcctcaccctcctcgccctgctggcgctcacctccgcggtcgccaaaaagaaagataaggtgaagaagggcggcccggggagcgagtgcgctgagtgggcctgggggccctgcacccccagcagcaaggattgcggcgtgggtttccgcgagggcacctgcggggcccagacccagcgcatccggtgcagggtgccctgcaactggaagaaggagtttggagccgactgcaagtacaagtttgagaactggggtgcgtgtgatgggggcacaggcaccaaagtccgccaaggcaccctgaagaaggcgcgctacaatgctcagtgccaggagaccatccgcgtcaccaagccctgcacccccaagaccaaagcaaaggccaaagccaagaaagggaagggaaaggactagacgccaagcctggatgccaaggagcccctggtgtcacatggggcctggcccacgccctccctctcccaggcccgagatgtgacccaccagtgccttctgtctgctcgttagctttaatcaatcatgccctgccttgtccctctcactccccagccccacccctaagtgcccaaagtggggagggacaagggattctgggaagcttgagcctcccccaaagcaatgtgagtcccagagcccgcttttgttcttccccacaattccattactaagaaacacatcaaataaactgactttttccccccaaaaaaagctcttcttttttaatataaaacaacgatctataaagagtagaaaatctgggggatattggggggggacaagaggtcaacaggacggggacactatcgtacccgtcttggaggggagaatggggcaccaaggggggatatggacgga

SEQ ID NO: 384743 - DNA, 956 bp, Homo sapiens
ctcagaccggttctgggacaaaaggggccgcggcggccggagcgggacgggcccggcgcgggagggagcgaagcagcgcgggcagcgagcgagatgcagcaccgaggcttcctcctcctcaccctcctcgccctgctggcgctcacctccgcggtcgccaaaaagaaagataaggtgaagaagggcggcccggggagcgagtgcgctgagtgggcctgggggccctgcacccccagcagcaaggattgcggcgtgggtttccgcgagggcacctgcggggcccagacccagcgcatccggtgcagggtgccctgcaactggaagaaggagtttggagccgactgcaagtacaagtttgagaactggggtgcgtgtgatgggggcacaggcaccaaagtccgccaaggcaccctgaagaaggcgcgctacaatgctcagtgccaggagaccatccgcgtcaccaagccctgcacccccaagaccaaagcaaaggccaaagccaagaaagggaagggaaaggactagacgccaagcctggatgccaaggagcccctggtgtcacatggggcctggcccacgccctccctctcccaggcccgagatgtgacccaccagtgccttctgtctgctcgttagctttaatcaatcatgccctgccttgtccctctcactccccagccccacccctaagtgcccaaagtggggagggacaagggattctgggaagcttgagcctcccccaaagcaatgtgagtcccagagcccgcttttgttcttccccacaattccattactaagaaacacatcaaataaactgactttttccccccaaaaaaaaaatacctcccctccccccgccccccccccccgcgcctcttcccggggcggcgcaacacagaaggccgccctgctccccctttcgaaggggccggcccacgggggtatccagcggccgc

SEQ ID NO: 384744 - DNA, 507 bp, Homo sapiens
ggcagtgcaggtttattctgctggttgactcttgaggtatcctgtgatgggggcacaggcaccaaagtccgccaaggcaccctgaagaaggcgcgctacaatgctcagtgccaggagaccatccgcgtcaccaagccctgcacccccaagaccaaagcaaaggccaaagccaagaaagggaagggaaaggactagacgccaagcctggatgccaaggagcccctggtgtcacatggggcctggcccacgccctccctctcccaggcccgagatgtgacccaccagtgccttctgtctgctcgttagctttaatcaatcatgccctgccttgtccctctcactccccagccccacccctaagtgcccaaagtggggagggacaagggattctgggaagcttgagcctcccccaaagcaatgtgagtcccagagcccgcttttgttcttccccacaattccattactaagaaacacatcaaataaactgactttttccccccaaaaaaa

SEQ ID NO: 384745 - DNA, 706 bp, Homo sapiens
ctcagaccggttctgggacaaaaggggccgcggcggccggagcgggacgggcccggcgcgggagggagcgaagcagcgcgggcagcgagcgagatgcagcaccgaggcttcctcctcctcaccctcctcgccctgctggcgctcacctccgcggtcgccaaaaagaaagataaggtgaagaagggcggcccggggagcgagtgcgctgagtgggcctgggggccctgcacccccagcagcaaggattgcggcgtgggtttccgcgagggcacctgcggggcccagacccagcgcatccggtgcagggtgccctgcaactggaagaaggagtttggagccgactgcaagtacaagtttgagaactggggtgcgtgtgatgggggcacaggcaccaaagtccgccaaggcaccctgaagaaggcgcgctacaatgctcagtgccaggagaccatccgcgtcaccaagccctgcacccccaagaccaaagcaaaggccaaagccaagaaagggaagggaaaggactagacgccaagcctggatgccaaggagcccctggtgtcacatggggcctggcccacgccctccctctcccaggcccgagatgtgacccaccagtgccttctgtctgctcgttagctttaatcaatcatgccctgccttgtccctctcactccccagcccgtcgggtggagcggtaccgagctcg

SEQ ID NO: 384746 - DNA, 812 bp, Homo sapiens
ctcagaccggttctgggacaaaaggggccgcggcggccggagcgggacgggcccggcgcgggagggagcgaagcagcgcgggcagcgagcgagatgcagcaccgaggcttcctcctcctcaccctcctcgccctgctggcgctcacctccgcggtcgccaaaaagaaagataaggtgaagaagggcggcccggggagcgagtgcgctgagtgggcctgggggccctgcacccccagcagcaaggattgcggcgtgggtttccgcgagggcacctgcggggcccagacccagcgcatccggtgcagggtgccctgcaactggaagaaggagtttggagccgactgcaagtacaagtttgagaactggggtgcgtgtgatgggggcacaggcaccaaagtccgccaaggcaccctgaagaaggcgcgctacaatgctcagtgccaggagaccatccgcgtcaccaagccctgcacccccaagaccaaagcaaaggccaaagccaagaaagggaagggaaaggactagacgccaagcctggatgccaaggagcccctggtgtcacatggggcctggcccacgccctccctctcccaggcccgagatgtgacccaccagtgccttctgtctgctcgttagctttaatcaatcatgccctgccttgtccctctcactccccagcccaaacgcgtcagcgcataacgtgcgactaactgctagatggaaagggtagttgcaggtaagacagggagcgatggccacgaaaagcaatgtgatggtccgagagcacggagggtgctgtgcacgcctacaat

SEQ ID NO: 384747 - DNA, 1410 bp, Homo sapiens
ctcagaccggttctgggacaaaaggggccgcggcggccggagcgggacgggcccggcgcgggagggagcgaagcagcgcgggcagcgagcgagtgagcgcgcggcggcccctggtccgcccggccgcggccgatctaggggctgggggctggaggcgggggtgggggtctgagctgcgtcctgggctcgaggcgtcccccggggagtcgcctcttagcggatgcagcaccgaggcttcctcctcctcaccctcctcgccctgctggcgctcacctccgcggtcgccaaaaagaaagataaggtgaagaagggcggcccggggagcgagtgcgctgagtgggcctgggggccctgcacccccagcagcaaggattgcggcgtgggtttccgcgagggcacctgcggggcccagacccagcgcatccggtgcagggtgccctgcaactggaagaaggagtttggagccgactgcaagtacaagtttgagaactggggtgcgtgtgatgggggcacaggcaccaaagtccgccaaggcaccctgaagaaggcgcgctacaatgctcagtgccaggagaccatccgcgtcaccaagccctgcacccccaagaccaaagcaaaggccaaaggtcagcgaaaggagaagggggtggggctgtcgcggggggctgccccccccccccccccgcctgtaaggggacaattccaagttaaaccttaagttttgagtcctggccagtggcttcctgacatcgcctcacttggcttccctgcctggaaaagtctgaagatgggcactacaagagaggccgcaggtgatgctggggacataaatcctccctggcccaaatagggaccaactcaaactactccattggagcatctggcttaggacccagggagagtgtcctggaacggcttgcctttgtcagctctccagccacgggcagcatttggtcagctctgccctttctagtgttgggaggaggtcaaggcccaccctgggcctctcagctcactcgtgactcagcccagcgaggccagcagggcaggggtgaatctgcccgcttctcagccaagaaagggaagggaaaggactagacgccaagcctggatgccaaggagcccctggtgtcacatggggcctggcccacgccctccctctcccaggcccgagatgtgacccaccagtgccttctgtctgctcgttagctttaatcaatcatgccctgccttgtccctctcactccccagccccacccctaagtgcccaaagtggggagggacaagggattctgggaagcttgagcctcccccaaagcaatgtgagtcccagagcccgcttttgttcttccccacaattccattactaagaaacacatcaaataaactgactttttccccccaaaaaaa

SEQ ID NO: 384748 - DNA, 1589 bp, Homo sapiens
tgaaagtgaaagaggggtggggcgggggcgagcccgggttctgtggcccatttgccctgtggccttgagcaagcccctcccccaggcctcgggggctctcccggtttgggggaaccgggcgaggcaatgccacaggcccagggttagagggggtgggcacttgcagctgccgatgtggctagatctggaacttctcagacggctcctgtcagcgccaagtttcaccaaatccaggcctgcgggctcctcccccaggacccccactcgcagtccctcaagcctgtgctcccggaaaggcactgggcgaccgcacccgtggctttctctgggcgaccgggtcccagactccccccagcacagcagagcgcttccctgcccacccgcggaaaccgccccaggatgcagcaccgaggcttcctcctcctcaccctcctcgccctgctggcgctcacctccgcggtcgccaaaaagaaagataaggtgaagaagggcggcccggggagcgagtgcgctgagtgggcctgggggccctgcacccccagcagcaaggattgcggcgtgggtttccgcgagggcacctgcggggcccagacccagcgcatccggtgcagggtgccctgcaactggaagaaggagtttggagccgactgcaagtacaagtttgagaactggggtgcgtgtgatgggggcacaggcaccaaagtccgccaaggcaccctgaagaaggcgcgctacaatgctcagtgccaggagaccatccgcgtcaccaagccctgcacccccaagaccaaagcaaaggccaaaggtcagcgaaaggagaagggggtggggctgtcgcggggggctgccccccccccccccccgcctgtaaggggacaattccaagttaaaccttaagttttgagtcctggccagtggcttcctgacatcgcctcacttggcttccctgcctggaaaagtctgaagatgggcactacaagagaggccgcaggtgatgctggggacataaatcctccctggcccaaatagggaccaactcaaactactccattggagcatctggcttaggacccagggagagtgtcctggaacggcttgcctttgtcagctctccagccacgggcagcatttggtcagctctgccctttctagtgttgggaggaggtcaaggcccaccctgggcctctcagctcactcgtgactcagcccagcgaggccagcagggcaggggtgaatctgcccgcttctcagccaagaaagggaagggaaaggactagacgccaagcctggatgccaaggagcccctggtgtcacatggggcctggcccacgccctccctctcccaggcccgagatgtgacccaccagtgccttctgtctgctcgttagctttaatcaatcatgccctgccttgtccctctcactccccagccccacccctaagtgcccaaagtggggagggacaagggattctgggaagcttgagcctcccccaaagcaatgtgagtcccagagcccgcttttgttcttccccacaattccattactaagaaacacatcaaataaactgactttttccccccaaaaaaa

SEQ ID NO: 384749 - DNA, 402 bp, Homo sapiens
cgtgaaagcacagaggaggcagcacagaggatgacagcacagaggaggtggacagctggacagcccaagaaagggaagggaaaggactagacgccaagcctggatgccaaggagcccctggtgtcacatggggcctggcccacgccctccctctcccaggcccgagatgtgacccaccagtgccttctgtctgctcgttagctttaatcaatcatgccctgccttgtccctctcactccccagccccacccctaagtgcccaaagtggggagggacaagggattctgggaagcttgagcctcccccaaagcaatgtgagtcccagagcccgcttttgttcttccccacaattccattactaagaaacacatcaaataaactgactttttccccccaaaaaaa

SEQ ID NO: 384750 - DNA, 1402 bp, Homo sapiens
ctcagaccggttctgggacaaaaggggccgcggcggccggagcgggacgggcccggcgcgggagggagcgaagcagcgcgggcagcgagcgagatgcagcaccgaggcttcctcctcctcaccctcctcgccctgctggcgctcacctccgcggtcgccaaaaagaaagataaggtgaagaagggcggcccggggagcgagtgcgctgagtgggcctgggggccctgcacccccagcagcaaggattgcggcgtgggtttccgcgagggcacctgcggggcccagacccagcgcatccggtgcagggtgccctgcaactggaagaaggagtttggagccgactgcaagtacaagtttgagaactggggtgcgtgtgatgggggcacaggcaccaaagtccgccaaggcaccctgaagaaggcgcgctacaatgctcagtgccaggagaccatccgcgtcaccaagccctgcacccccaagaccaaagcaaaggccaaaggtcagcgaaaggagaagggggtggggctgtcgcggggggctgccccccccccccccccgcctgtaaggggacaattccaagttaaaccttaagttttgagtcctggccagtggcttcctgacatcgcctcacttggcttccctgcctggaaaagtctgaagatgggcactacaagagaggccgcaggtgatgctggggacataaatcctccctggcccaaatagggaccaactcaaactactccattggagcatctggcttaggacccagggagagtgtcctggaacggcttgcctttgtcagctctccagccacgggcagcatttggtcagctctgccctttctagtgttgggaggaggtcaaggcccaccctgggcctctcagctcactcgtgactcagcccagcgaggccagcagggcaggggtgaatctgcccgcttctcagccaagaaagggaagggaaaggactagacgccaagcctggatgccaaggagcccctggtgtcacatggggcctggcccacgccctccctctcccaggcccgagatgtgacccaccagtgccttctgtctgctcgttagctttaatcaatcatgccctgccttgtccctctcactccccagccccacccctaagtgcccaaagtggggagggacaagggattctgggaagcttgagcctcccccaaagcaatgtgagtcccagagcccgcttttgttcttccccacaattccattactaagaaacacatcaaataaactgactttttccccccaaaaaaaaaatacctcccctccccccgccccccccccccgcgcctcttcccggggcggcgcaacacagaaggccgccctgctccccctttcgaaggggccggcccacgggggtatccagcggccgc

SEQ ID NO: 384751 - DNA, 887 bp, Homo sapiens
ctcagaccggttctgggacaaaaggggccgcggcggccggagcgggacgggcccggcgcgggagggagcgaagcagcgcgggcagcgagcgagatgcagcaccgaggcttcctcctcctcaccctcctcgccctgctggcgctcacctccgcggtcgccaaaaagaaagataaggtgaagaagggcggcccggggagcgagtgcgctgagtgggcctgggggccctgcacccccagcagcaaggattgcggcgtgggtttccgcgagggcacctgcggggcccagacccagcgcatccggtgcagggtgccctgcaactggaagaaggagtttggagccgactgcaagtacaagtttgagaactggggtgcgtgtgatgggggcacaggcaccaaagtccgccaaggcaccctgaagaaggcgcgctacaatgctcagtgccaggagaccatccgcgtcaccaagccctgcacccccaagaccaaagcaaaggccaaagccaagaaagggaagggaaaggactagacgccaagcctggatgccaaggagcccctggtgtcacatggggcctggcccacgccctccctctcccaggcccgagatgtgacccaccagtgccttctgtctgctcgttagctttaatcaatcatgccctgccttgtccctctcactccccagccccacccctaagtgcccaaagtggggagggacaagggattctgggaagcttgagcctcccccaaagcaatgtgagtcccagagcccgcttttgttcttccccacaattccattactaagaaacacatcaaataaactgactttttccccccaaaaaaaaaacaccaccaccacacaatactcaaacacaaagggggccccaaaaattc

SEQ ID NO: 384752 - DNA, 1136 bp, Homo sapiens
ctcagaccggttctgggacaaaaggggccgcggcggccggagcgggacgggcccggcgcgggagggagcgaagcagcgcgggcagcgagcgagtgagcgcgcggcggcccctggtccgcccggccgcggccgatctaggggctgggggctggaggcgggggtgggggtctgagctgcgtcctgggctcgaggcgtcccccggggagtcgcctcttagcggtgcgtccgggctagcggcgaggggccgccccaagtcttcccaccgccgccaccttagcagcccgacttggggcctggaaagtggagcacgcggaggtgggagggccctgcacgcggcccccggtggggaaggggacgggccagggattcagactcgggctctcccctcagggatgcagcaccgaggcttcctcctcctcaccctcctcgccctgctggcgctcacctccgcggtcgccaaaaagaaagataaggtgaagaagggcggcccggggagcgagtgcgctgagtgggcctgggggccctgcacccccagcagcaaggattgcggcgtgggtttccgcgagggcacctgcggggcccagacccagcgcatccggtgcagggtgccctgcaactggaagaaggagtttggagccgactgcaagtacaagtttgagaactggggtgcgtgtgatgggggcacaggcaccaaagtccgccaaggcaccctgaagaaggcgcgctacaatgctcagtgccaggagaccatccgcgtcaccaagccctgcacccccaagaccaaagcaaaggccaaagccaagaaagggaagggaaaggactagacgccaagcctggatgccaaggagcccctggtgtcacatggggcctggcccacgccctccctctcccaggcccgagatgtgacccaccagtgccttctgtctgctcgttagctttaatcaatcatgccctgccttgtccctctcactccccagccccacccctaagtgcccaaagtggggagggacaagggattctgggaagcttgagcctcccccaaagcaatgtgagtcccagagcccgcttttgttcttccccacaattccattactaagaaacacatcaaataaactgactttttccccccaaaaaaa

SEQ ID NO: 384753 - DNA, 828 bp, Homo sapiens
ggcggacgtgaccgtgagcgtccccggggcgggagggaccggcgcagcgggggcgcgcgaggcagcgatgcatcgactgcatcgatgcagcaccgaggcttcctcctcctcaccctcctcgccctgctggcgctcacctccgcggtcgccaaaaagaaagataaggtgaagaagggcggcccggggagcgagtgcgctgagtgggcctgggggccctgcacccccagcagcaaggattgcggcgtgggtttccgcgagggcacctgcggggcccagacccagcgcatccggtgcagggtgccctgcaactggaagaaggagtttggagccgactgcaagtacaagtttgagaactggggtgcgtgtgatgggggcacaggcaccaaagtccgccaaggcaccctgaagaaggcgcgctacaatgctcagtgccaggagaccatccgcgtcaccaagccctgcacccccaagaccaaagcaaaggccaaagccaagaaagggaagggaaaggactagacgccaagcctggatgccaaggagcccctggtgtcacatggggcctggcccacgccctccctctcccaggcccgagatgtgacccaccagtgccttctgtctgctcgttagctttaatcaatcatgccctgccttgtccctctcactccccagccccacccctaagtgcccaaagtggggagggacaagggattctgggaagcttgagcctcccccaaagcaatgtgagtcccagagcccgcttttgttcttccccacaattccattactaagaaacacatcaaataaactgactttttccccccaaaaaaa

SEQ ID NO: 384754 - DNA, 1284 bp, Homo sapiens
gggccatgaggtccaccaccctgttgctgtagccaaattcgttgtcataccaggaaatgagcttgacaaagtggtcgttgagggcaatgccagccccagcgtcaaaggtggaggagtgggtgtcgctgttgaagtcagaggagaccacctggtgctcagtgtagcccaggatgcccttgagggggccctccgacgcctgcttcaccaccttcttgatgtcatcatatttggcaggtttttctagacggcaggtcaggtccaccactgacacgttggcagtggggacacggaaggccatgccagtgagcttcccgttcagctcagggatgaccttgcccacagccttggcagcgccagtagaggcagggatgatgttctggagagccccgcggccatcacgccacagtttcccggaggggccatccacagtcttctgggtggcagtgatggcatggactgtggtcatgagtccttccacgataccaaagttgtcatggatgacctgggccagggattcagactcgggctctcccctcagggatgcagcaccgaggcttcctcctcctcaccctcctcgccctgctggcgctcacctccgcggtcgccaaaaagaaagataaggtgaagaagggcggcccggggagcgagtgcgctgagtgggcctgggggccctgcacccccagcagcaaggattgcggcgtgggtttccgcgagggcacctgcggggcccagacccagcgcatccggtgcagggtgccctgcaactggaagaaggagtttggagccgactgcaagtacaagtttgagaactggggtgcgtgtgatgggggcacaggcaccaaagtccgccaaggcaccctgaagaaggcgcgctacaatgctcagtgccaggagaccatccgcgtcaccaagccctgcacccccaagaccaaagcaaaggccaaagccaagaaagggaagggaaaggactagacgccaagcctggatgccaaggagcccctggtgtcacatggggcctggcccacgccctccctctcccaggcccgagatgtgacccaccagtgccttctgtctgctcgttagctttaatcaatcatgccctgccttgtccctctcactccccagccccacccctaagtgcccaaagtggggagggacaagggattctgggaagcttgagcctcccccaaagcaatgtgagtcccagagcccgcttttgttcttccccacaattccattactaagaaacacatcaaataaactgactttttccccccaaaaaaa

SEQ ID NO: 384755 - DNA, 1216 bp, Homo sapiens
ctcagaccggttctgggacaaaaggggccgcggcggccggagcgggacgggcccggcgcgggagggagcgaagcagcgcgggcagcgagcgagatgcagcaccgaggcttcctcctcctcaccctcctcgccctgctggcgctcacctccgcggtcgccaaaaagaaagataaggtgaagaagggcggcccggggagcgagtgcgctgagtgggcctgggggccctgcacccccagcagcaaggattgcggcgtgggtttccgcgagggcacctgcggggcccagacccagcgcatccggtgcagggtgccctgcaactggaagaaggagtttggagccgactgcaagtacaagtttgagaactggggtgcgtgtgatgggggcacaggcaccaaagtccgccaaggcaccctgaagaaggcgcgctacaatgctcagtgccaggagaccatccgcgtcaccaagccctgcacccccaagaccaaagcaaaggccaaagccaagaaagggaagggaaaggactagacgccaagcctggatgccaaggagcccctggtgtcacatggggcctggcccacgccctccctctcccaggcccgagatgtgacccaccagtgccttctgtctgctcgttagctttaatcaatcatgccctgccttgtccctctcactccccagccccacccctaagtgcccaaagtggggagggacaagggattctgggaagcttgagcctcccccaaagcaatgtgagtcccagagcccgcttttgttcttccccacaattccattactaagaaacacatcaaataaactgactttttccccccaaaaaaagctcttcttttttaatatataaaagccccttcccaaggagtttgctgtggaaatgtgtttgggagtgggaaggtggggagaaagaccaggctgtagggactggtgggtttcagggggcttggtggtgggtgctctccagagctcatggaaaaagcagaacaattacaaacatttcttccagggcccctgaaagggtgctccccatcaagtcacctaagcctttcggtcctcatctccctcagggaccagggctggggaagggaacctggctgactcactggaaccaccacacccatctcagcctcacccagtcaaaggtcttttgatacaacccacagccaatcaggaaggttctacccatgggggagagcagatgcga

SEQ ID NO: 384756 - DNA, 1283 bp, Homo sapiens
ctcagaccggttctgggacaaaaggggccgcggcggccggagcgggacgggcccggcgcgggagggagcgaagcagcgcgggcagcgagcgagatgcagcaccgaggcttcctcctcctcaccctcctcgccctgctggcgctcacctccgcggtcgccaaaaagaaagataaggtgaagaagggcggcccggggagcgagtgcgctgagtgggcctgggggccctgcacccccagcagcaaggattgcggcgtgggtttccgcgagggcacctgcggggcccagacccagcgcatccggtgcagggtgccctgcaactggaagaaggagtttggagccgactgcaagtacaagtttgagaactggggtgcgtgtgatgggggcacaggcaccaaagtccgccaaggcaccctgaagaaggcgcgctacaatgctcagtgccaggagaccatccgcgtcaccaagccctgcacccccaagaccaaagcaaaggccaaaggtcagcgaaaggagaagggggtggggctgtcgcggggggctgccccccccccccccccgcctgtaaggggacaattccaagttaaaccttaagttttgagtcctggccagtggcttcctgacatcgcctcacttggcttccctgcctggaaaagtctgaagatgggcactacaagagaggccgcaggtgatgctggggacataaatcctccctggcccaaatagggaccaactcaaactactccattggagcatctggcttaggacccagggagagtgtcctggaacggcttgcctttgtcagctctccagccacgggcagcatttggtcagctctgccctttctagtgttgggaggaggtcaaggcccaccctgggcctctcagctcactcgtgactcagcccagcgaggccagcagggcaggggtgaatctgcccgcttctcagccaagaaagggaagggaaaggactagacgccaagcctggatgccaaggagcccctggtgtcacatggggcctggcccacgccctccctctcccaggcccgagatgtgacccaccagtgccttctgtctgctcgttagctttaatcaatcatgccctgccttgtccctctcactccccagccccacccctaagtgcccaaagtggggagggacaagggattctgggaagcttgagcctcccccaaagcaatgtgagtcccagagcccgcttttgttcttccccacaattccattactaagaaacacatcaaataaactgactttttccccccaaaaaaa

SEQ ID NO: 384757 - DNA, 674 bp, Homo sapiens
ctcagaccggttctgggacaaaaggggccgcggcggccggagcgggacgggcccggcgcgggagggagcgaagcagcgcgggcagcgagcgagatgcagcaccgaggcttcctcctcctcaccctcctcgccctgctggcgctcacctccgcggtcgccaaaaagaaagataaggtgaagaagggcggcccggggagcgagtgcgctgagtgggcctgggggccctgcacccccagcagcaaggattgcggcgtgggtttccgcgagggcacctgcggggcccagacccagcgcatccggtgcagggtgccctgcaactggaagaaggagtttggagccgactgcaagtacaagtttgagaactggggtgcgtgtgatgggggcacaggcaccaaagtccgccaaggcaccctgaagaaggcgcgctacaatgctcagtgccaggagaccatccgcgtcaccaagccctgcacccccaagaccaaagcaaaggccaaagccaagaaagggaagggaaaggactagacgccaagcctggatgccaaggagcccctggtgtcacatggggcctggcccacgccctccctctcccaggcccgagatgtgacccaccagtgccttgttgttggactccgctagcgtaaatcaaacaggagcctgccacagaccgtctg

SEQ ID NO: 384758 - DNA, 954 bp, Homo sapiens
gggccatgaggtccaccaccctgttgctgtagccaaattcgttgtcataccaggaaatgagcttgacaaagtggtcgttgagggcaatgccagccccagcgtcaaaggtggaggagtgggtgtcgctgttgaagtcagaggagaccacctggtgctcagtgtagcccaggatgcccttgagggggccctccgacgcctgcttcaccaccttcttgatgtcatcatatttggcaggtttttctagacggcaggtcaggtccaccactgacacgttggcagtggggacacggaaggccatgccagtgagcttcccgttcagctcagggatgaccttgcccacagccttggcagcgccagtagaggcagggatgatgttctggagagccccgcggccatcacgccacagtttcccggaggggccatccacagtcttctgggtggcagtgatggcatggactgtggtcatgagtccttccacgataccaaagttgtcatggatgacctgggccagggattcagactcgggctctcccctcagggatgcagcaccgaggcttcctcctcctcaccctcctcgccctgctggcgctcacctccgcggtcgccaaaaagaaagataaggtgaagaagggcggcccggggagcgagtgcgctgagtgggcctgggggccctgcacccccagcagcaaggattgcggcgtgggtttccgcgagggcacctgcggggcccagacccagcgcatccggtgcagggtgccctgcaactggaagaaggagtttggagccgactgcaagtacaagtttgagaactggggtgcgtgtgatgggggcacaggcaccaaagtccgccaaggcaccctgaagaaggcgcgctacaatgctcagtgccaggagaccatccgcgtcaccaagcctcctttctcttttgcctattaaaccaatgctcttaacctt

SEQ ID NO: 384759 - DNA, 407 bp, Homo sapiens
aaaatcatgtctcttcattttataataccccaatacataaataaccttgtacactttcctaattatattaaacattgatattaaaagttaccattgcttaactataaagatgccccataatcacagaactctaaaatatttgcttctctctttataggccttacttttatcaaatgtttctcgacaaaagttttccactggggaaattattaacttgatgtcagcaactcatggacttgacagcaaacctcaatctcctctggtctgccccttttcaaatcctaatggccgtatatctcctttggcaagagctgggtccagcagtgttagcaggggtggcagtccttgtgtttgttataccaataaatgctttagctgcaactaaaataaaaaagttaaaggtaaga

SEQ ID NO: 384760 - DNA, 879 bp, Homo sapiens
  misc_feature (17)..(17): n is a, c, g, or t
  misc_feature (41)..(42): n is a, c, g, or t
  misc_feature (48)..(48): n is a, c, g, or t
  misc_feature (55)..(55): n is a, c, g, or t
cagcgcatttattgggntgacacctaaattgacaccacccnntgtggnttttaanaaagcagtgtacggccgattcgggatgttatggcactctacacagcctgcatagaatgaggtaacatgagaacatggtcagcccttaggagctccggtctgcagttttcactatttatttatgacaaatattccacatccgtgattctctctagtcaaaacttctttgagacgatgctgtcggccttggccaatcggagaatcgaatcatctgactcacccatcctatcgccccgcagatagcataagttttaaactggccattaaacctgcccgtgaccttgtcagcctcggccacgttcatctggatggatgcgtggtccttggcaccgatgatgcggttgctagcggagcatttccgcggaacttacaggtccacgaactcgccggcgttgttctgcatttcgaggctccgcctgctgccaccacaccgcgcacgcgagagaaagccgagggtttgtcctcttatgccaagttagggcagccctcaaagcagatctcgaagggaagacgtctaccgagagcggattttgatgtatcactccatgagactggtgcctttctctagcctggagaattccaagggtgcaaagctggctgaagctatttgagacggctggtgaggatttgggccagcagaggggtaagcgttcaggactcgcagagtttgaatgagcaagcatgtctgagtggaccccatggaaagcattcaggctttagttgtcttaaaacggccatacccagagcaagtgtaaaggcagttgtggaaaataatataaaccagttacaatagcattcttggagtgcttacccaggtactaggga

SEQ ID NO: 384761 - DNA, 960 bp, Homo sapiens
gcggccgcggcggcgggggcccggctccagatcaccgacccccacgagcgccggccctgcctgcccgctattttggttccatctcttctgcatatttatgcttgcctgttacattccctggcctctgagtgtcctttggcagtttccaaagcatttgggcaagaaggagcttgggcagcttcacaacaggtttattgggcacttcctagcaccaggcactgcaataagaaatggaggttaaaccatgaagaaacatggctctagcccttagggagctcccggtcctgcagtcaaaacttctttgagacgatgctgtcggccttggccaatcggagaatcgaatcatctgactcacccatcctatcgccccgcagatagcataagttttaaactggccattaaacctgcccgtgaccttgtcagcctcggccacgttcatctggatggatgcgtggtccttggcaccgatgatgcggttgctagcggagcatttccgcggaacttacaggtccacgaactcgccggcgttgttctgcatttcgaggctccgcctgctgccaccacaccgcgcacgcgagagaaagccgagggtttgtcctcttatgccaagttagggcagccctcaaagcagatctcgaagggaagacgtctaccgagagcggattttgatgtatcactccatgagactggtgcctttctctagcctggagaattccaagggtgcaaagctggctgaagctatttgagacggctggtgaggatttgggccagcagaggggtaagcgttcaggactcgcagagtttgaatgagcaagcatgtctgagtggaccccatggaaagcattcaggctttagttgtcttaaaacggccatacccagagcaagtgtaaaggcagttgtggaaaataatataaaccagttacaatagcattcttggagtgcttacccaggtactaggga

SEQ ID NO: 384762 - DNA, 783 bp, Homo sapiens
  misc_feature (10)..(10): n is a, c, g, or t
  misc_feature (36)..(37): n is a, c, g, or t
cacgccgatnggtggtgcttcctgggcactgaacanntgcactgcaataagaaatggaggttaaaccatgaagaaacatggctctagcccttagggagctcccggtcctgcagtcaaaacttctttgagacgatgctgtcggccttggccaatcggagaatcgaatcatctgactcacccatcctatcgccccgcagatagcataagttttaaactggccattaaacctgcccgtgaccttgtcagcctcggccacgttcatctggatggatgcgtggtccttggcaccgatgatgcggttgctagcggagcatttccgcggaacttacaggtccacgaactcgccggcgttgttctgcatttcgaggctccgcctgctgccaccacaccgcgcacgcgagagaaagccgagggtttgtcctcttatgccaagttagggcagccctcaaagcagatctcgaagggaagacgtctaccgagagcggattttgatgtatcactccatgagactggtgcctttctctagcctggagaattccaagggtgcaaagctggctgaagctatttgagacggctggtgaggatttgggccagcagaggggtaagcgttcaggactcgcagagtttgaatgagcaagcatgtctgagtggaccccatggaaagcattcaggctttagttgtcttaaaacggccatacccagagcaagtgtaaaggcagttgtggaaaataatataaaccagttacaatagcattcttggagtgcttacccaggtactaggga

SEQ ID NO: 384763 - DNA, 726 bp, Homo sapiens
agagcaccccaaaaaactaggagaaagaatccaggaaggagcggtagaaggtagggagaaactcacaagacggcattcttgtggaagtcaagtcaagaaagaggaagtggtcaacaatgttggatgctgcaaagaggatgcatactgaaatgtgtggattttgcaacaataacatcaccctgtcgtcactgaaggcaacctcatgagctgctatcacttgctttcatatctcagtcaaggggatcttactgcccttaaccccacagtactatcacttgccatgacgcttgaatattactgcttttgagaaagtcttgctaccacgtgttggccacaacatcagataagctttgatactcttgctctccagctgtgagctgggtcttacctcatctactagatctaccactcacaggtcagatgaaacaaaacactgtgttgtgaccctgaccattctctgttcctcccatttgtcctgagactgaacaaattacagcaaaacttgggttgccttatgaataatggggcggtggccaatgcacacatccttatcttcatccacggagggctcatctaaccacccctggtgtcttcactgcaggtttattgggcacttcctagcaccaggcactgcaataagaaatggaggttaaaccatgaagaaacatggctctagcccttagggagctcccggtcctgcaggtaagttaatccttgttgcgatac

SEQ ID NO: 384764 - DNA, 430 bp, Homo sapiens
agagcaccccaaaaaactaggagaaagaatccaggaaggagcggtagaaggtagggagaaactcacaagacggcattcttgtggaagtcaagtcaagaaagaggaagtggtcaacaatgttggatgctgcaaagaggatgcatactgaaatgtgtggattttgcaacaataacatcaccctgtcgtcactgaaggcaacctcatgaacggagaaagatatgcagctgggtatacagaagaggagcaagaaggaagcgaagatgtggagacaattacaaggacaacactgggctgcaagaagaaaaatttgcttattgattggctggtttgtttccttttagtacggagagacttaagcatggttaggtgccgatgggttagagaggagaggatgaatgtacaggagagttggaacaggatccccaagaag

SEQ ID NO: 384765 - DNA, 1337 bp, Homo sapiens
cctttccaggggtagaatttagcattgctgcctaaatctccatatctaatgattcctctgcagccgtgcccaagacagaaccatcctcaatctggcccatccatttgggcttttactttgggttccccattaaacccctaattccttcctgggcccagaactttctccagagctgctatcacttgctttcatatctcagtcaaggggatcttactgcccttaaccccacagtactatcacttgccatgacgcttgaatattactgcttttgagaaagtcttgctaccacgtgttggccacaacatcagataagctttgatactcttgctctccagctgtgagctgggtcttacctcatctactagatctaccactcacaggtcagatgaaacaaaacactgtgttgtgaccctgaccattctctgttcctcccatttgtcctgagactgaacaaattacagcaaaacttgggttgccttatgaataatggggcggtggccaatgcacacatccttatcttcatccacggagggctcatctaaccacccctggtgtcttcactgcaggtttattgggcacttcctagcaccaggcactgcaataagaaatggaggttaaaccatgaagaaacatggctctagcccttagggagctcccggtcctgcagtcaaaacttctttgagacgatgctgtcggccttggccaatcggagaatcgaatcatctgactcacccatcctatcgccccgcagatagcataagttttaaactggccattaaacctgcccgtgaccttgtcagcctcggccacgttcatctggatggatgcgtggtccttggcaccgatgatgcggttgctagcggagcatttccgcggaacttacaggtccacgaactcgccggcgttgttctgcatttcgaggctccgcctgctgccaccacaccgcgcacgcgagagaaagccgagggtttgtcctcttatgccaagttagggcagccctcaaagcagatctcgaagggaagacgtctaccgagagcggattttgatgtatcactccatgagactggtgcctttctctagcctggagaattccaagggtgcaaagctggctgaagctatttgagacggctggtgaggatttgggccagcagaggggtaagcgttcaggactcgcagagtttgaatgagcaagcatgtctgagtggaccccatggaaagcattcaggctttagttgtcttaaaacggccatacccagagcaagtgtaaaggcagttgtggaaaataatataaaccagttacaatagcattcttggagtgcttacccaggtactaggga

SEQ ID NO: 384766 - DNA, 528 bp, Homo sapiens
gcggccgcggcggcgggggcccggctccagatcaccgacccccacgagcgccggccctgcctgcccgctattttggttccatctcttctgcatatttatgcttgcctgttacattccctggcctctgagtgtcctttggcagtttccaaagcatttgggcaagaaggagcttgggcagcttcacaacaggtttattgggcacttcctagcaccaggcactgcaataagaaatggaggttaaaccatgaagaaacatggctctagcccttagggagctcccggtcctgcagaccccacatataggaaccatcggatccctgtgtacagatgaagaactgagtcttggaaagcttaactaccttgctcacagtcacacgttaaggtctaaagtgagaaattaaaccaagtcttccaatctcaaagactttaaaggaaaagctacaagctacaagaataaagaagttcttcatgtatatttatgggaaaattgctaaggtgtagtctcaagtcctaaaaaagcaaagttca

SEQ ID NO: 384767 - DNA, 566 bp, Homo sapiens
gctggtctcaaactcttcacctcagatgatccacctgcctcagccaatgggtggactgttaactcaaaatacgcacattgaatactgaggaaaatgtatagccatcatcaccagcagctgagatgccagttgagataccagaaatgccccagcatgtaactcctcttttaattcacacacacacacacacacacacacacacacacacacactcatggtaaccagttcaggatggacacagaaacagtcacagtcttttttgggaacacactcccctgtgacacttagatcctaatgctgactccaattccctcctgggacctcccctctccttgcagcatgctgggctttcccttagaaaaccccatgtcatttccttcaatggaacatgaatcagcttcacccacagtgtctgcatgtctctgtccatagcaaacgtttttattaccttaaaatatagatctttaccttaactagccaagacctaggaccctttttccaagctcttttagatgaagtaataaatgcaaatattagagatgtgtatatgtgtataaatatatgga

SEQ ID NO: 384768 - DNA, 582 bp, Homo sapiens
gctggtctcaaactcttcacctcagatgatccacctgcctcagccaatgggtggactgttaactcaaaatacgcacattgaatactgaggaaaatgtatagccatcatcaccagcagctgagatgccagttgagataccagaaatgccccagcatgtaactcctcttttaattcacacacacacacacaaacacacacacacacacacacacacacacacacacacactcatggtaaccagttcaggatggacacagaaacagtcacagtcttttttgggaacacactcccctgtgacacttagatcctaatgctgactccaattccctcctgggacctcccctctccttgcagcatgctgggctttcccttagaaaaccccatgtcatttccttcaatggaacatgaatcagcttcacccacagtgtctgcatgtctctgtccatagcaaacgtttttattaccttaaaatatagatctttaccttaactagccaagacctaggaccctttttccaagctcttttagatgaagtaataaatgcaaatattagagatgtgtatatgtgtataaatatatgga

SEQ ID NO: 384769 - DNA, 318 bp, Homo sapiens
agaaagtctttgttgcttcaggcaagcatcagaaactgaatctgctggggtgttggttggactgtgtggcctctctttatccctctcttcccagacccctcaaaatcaggtgcattctatatccccttaggctagatagacattctatggatgctccggtctgcatgaggaagggaactccaacctcccccaagtcagttaattttaaacattttggtcttttttctgtataatttgggattggtgtaccagaaatgactaaaaacctgtggttttctgagagtgatcctgggactataattttctgaaattaaactt

SEQ ID NO: 384770 - DNA, 669 bp, Homo sapiens
ccaccgatctccctgtgcggccctcatgtgctgtgctcgctgacacccgaagtccgcggctttccgcacacggtggggtcgtcagacccgctgcccttggcggtcgaagtcgtcgtgcgggcccgcggcggccgcccatggagaaggccaggagaggcggggatggcgtcccccgggggcccgtactgcacatcgtggtggtcggatttcaccacaagaagggctgccaggtgaggaaagggcccgccccgccccccagccgttcgggcgttcgcccttccgggcccccctgccctgcttctgtgtgctcagctcgcgtcgtgcagtcctccccacagcgcctgcgacccttcgcctctcaacctgactccttttgcagctcctcccacccgccccacatgaagcccagcccccacaacctcttccttctgcccctgaaaaatggttgagcagcggaggagctggttgatacgtgtaggttgtaggtttttaacttctgctttggtggagtgggaggaaagcatcgaagaccggccccactctcttccccgtccatcattgtctccactggctttctgggtgtccacctataatgggagtctagaaaaattcagtgcttggactctgctttcaaggtaataggctcagtgggcttgcatactaatgctt

SEQ ID NO: 384771 - DNA, 6714 bp, Homo sapiens
ccaccgatctccctgtgcggccctcatgtgctgtgctcgctgacacccgaagtccgcggctttccgcacacggtggggtcgtcagacccgctgcccttggcggtcgaagtcgtcgtgcgggcccgcggcggccgcccatggagaaggccaggagaggcggggatggcgtcccccgggggcccgtactgcacatcgtggtggtcggatttcaccacaagaagggctgccaggttgaattctcttacccgcccctgattccaggagatggacatgacagccacactttacctgaagaatggaagtatttgcccttccttgccttaccagatggcgcacacaactaccaggaagatactgtgttttttcacttgccacccagaaatggaaatggagccacagtatttggtatctcttgctatcgacaaattgaagccaaggcactgaaagtaaggcaagcagatatcaccagagagactgttcagaaaagtgtctgtgttctaagcaagctgcctctgtatggtttacttcaagcaaaacttcaactcattacacatgcatattttgaagagaaggatttttcccaaatttctattctaaaggagctttatgaacatatgaatagttccttgggaggtgcttcattagaaggatcccaagtatatcttggtctgtcacctcgagatcttgtccttcattttcgacacaaggtcttaatcctatttaagctaattcttcttgaaaaaaaggttcttttttatatttctccagtgaataaattggtgggtgcactgatgactgtgttatccctttttccaggcatgattgaacatggtctcagtgactgttctcagtatagaccccggaaaagtatgtctgaagatggtgggcttcaggaaagtaacccatgtgcagatgattttgtttctgcatccactgctgatgtttcacataccaacttgggaactatcaggaaagtcatggcaggaaaccatggagaagatgctgccatgaagactgaggagcctttgttccaagtggaagacagcagcaaagggcaggaacccaatgataccaatcaatatttgaaacctccatctcgcccatctccagattcttcagaaagtgactgggaaactttggatcctagtgtcttagaggaccccaacttgaaagaaagggaacagctgggatcagaccagacaaatttgtttccaaaggactctgtcccctcagagagtcttccaattactgtacaacctcaagctaatacgggacaggtagtcctgataccagggctcatttcgggtttggaagaggatcagtatggcatgcccctggccatcttcacaaagggatatctgtgtttgccttacatggcattgcagcagcatcatcttctctccgatgtcaccgttcgggggtttgttgctggagctactaacatcctttttcgacaacagaaacacctcagtgatgccattgtggaagtagaagaagctctgatccagatccatgatccagaactcaggaagctgcttaacccaaccactgcagacctaaggttcgcagactacctagtgaggcacgtgactgagaatcgggatgacgtcttcctagatggcacgggctgggagggaggtgacgaatggatccgggcccagtttgcggtctacattcatgccctgctggctgccacgctgcaattagttctgttcagaatagtgaacgtggcaaaaaaattggaaacgtcatggtcacaactagccggaatgttgtacaaacaggaaaagctgttggccagtcagttggaggagctttttccagtgcaaagacagctatgtcttcatggctttccactttcaccacttccacctcccaaagtctcactgagccaccagatgagaagccttgagcaaggcgtcagaggctgctattgctttctgaggtttaagtgtcccctgtctgtctgctgctcccaggctgttactagccacagatccacagcaggggaccatatgtcgaactgtttacatggatgttgctctaagtgaatgtttcgggatgccgaaatgatgaaatcacagccatagcagggatggctttccaggttggggtttcaattgactacttttatttcagtctgagcctgattaaaacatacagtgaaccttctaatgaattttgagttttgatattgtacattggtttactttagaagagtttttacttatgtaaattttgttctgttttggtgtttgaatatctagatggtcactgtaatttatacttgctaaaattaatttatattaccattttctctaaagttggccttaaaacgtgcttataaagtgaaggggtcatacagttgggccttcattattttgctgaattatgtgatgatttttttgctttctacccacaaaacatttattaattcacttcctcccagaaacatgaaagttagaggtggtagttctgaggattgggtgttttgttttacgtttttagtttgttctttccacatccttaaaaacttggtttcagacatcaaggagtatcactgtgctttcctcctctttataactgtgcaggtgggtgtgcagagaaatagcagagtgatggttcgatgatactgaagcagtttaacatgaatgtgtctgtagggcaatactttcaaagaagacctatgtgtttatttttcaaccgcagtcatgttgcagtcttacaagcactttttttttattccagagtttgtgccatctgtttctctttttttttgggggggggggggggcggggtctcactctatcgcccaggctggagtgcagtggtgccatctcggctcactgcaacctccatctcccgggttcaagcaattcttgtacctcagcctcccaagtagctgggattatggacatgcgccaccatgcccagctaattattgtatttttagtagagacggggttttgccatgttggccaggctggtcttgatctcctggcctcaagtgatctgcccgcctcagcctctcaaagtgctgggactacaggcatgagccactgcgcctggcctgtttcttttttaaacagttttctattgggtgtttgcagacctacagcttttctcgtagtcttattcataaagcttttcaaagcacttagtcttctacttccctaactgaaagtcctcctataatcaatccctacccccttctagaagtatcttaaaagaaaagcaaggtgattgtaagtattaaatagaaatctcatcttagtttatattcagcaaagtaagaggcaagagaagaaaactgcagccttgacatctgtcatctgagaaaggacatctggtttcatgttaggcacatacatgcatgtgtgtgccatctactgatgatttgtacacagctggacctcgtgtgtttgccatgctcagctctcatttgcttttcaaggatacctgggatggctgttctcagagagtacttacggggaacagactgccttttagtaacaagggatacttgggaaatacattgtgagtatgatctatcccagattgctggggaaataaaggagggccctgattatatttggtttattcctcactaaatgtttaagaagtaaatgctcccaaggcatttgaaatgaacatagaaacataatctaaatgtctctaaattttccactttgtgttttctaaacacaaattgtattactcatttgagcataactcaagaattcagcgatgataaattgaagggctgaatgtgagaactccattaattccacttcttccaagaaagttaacctcaggaaatactgtttgaagagaagaaagtagtaccaaacaaaaaccttaaacagtacttgaatcttttttgcgctgagactataaagaattcattctaacatcttgtttcataagggccacatcattcgttggagcatgatagtgtgatttgtgtacaattgttacctctcagctgctgaagttcacacttcaaggatctaggagctctgtgaggggtcgtccagcaagatgctgatttgtctttcagttggtatggtttctgtgatcggggtaaactcccgtctcccactattcaaaagcagcccaactcatgctttggaatccactgaaataaaaatagttacatgaagtttaactttgctttaatatcacttgttcctcattgaatatacactttgatcagactttctattaacatttctagctaagagtttgactcttagtggtcactttactgactttccaacataaaacaagtatctcagaagatacagctttcatcatagaaatggtcaaaagaccatagctatatttccttcaggttctgggaggtggagtttttcaaggaacactggctgttgtattgttggcaggggccccaaggcagctcgcacaatcaaaggcaggaagcctcacccctggtcctgtgaccccccccaccccacacacacacatacttcaggcttggattctaggctccaagtggccagcatagaagcagcagcctctctccaaaccctggctctgtgagccataggaaccagcactaggtcatcttctgacatagccctggtgaaggtgtgtgtgtgttggtggccacacttgctaaggcttttgtgtctaagaattgagtatttgtacctaggtgtgagggaaccagggtcagccagcctttttcagatggcgccaggcacacacactacatcaatggcttgctggtggcttcaccactatccaggtgacttaaaagagtgtttggaaaatgtccctggtatacttcaattcctactagacattgtaatgacaatggtgtaggtaaggaagagagagttaaaactaccagttgtggaatagaaatagttgcatgtccaaagaaggcttagaatgattgtgcatatgcagttggctcacataaccagcatgaacagtctctccccaaatccattagtgattcactaccccccgccaagcacagccctaaaacaattctcgtccactttcctgttaagaaacacagcagcaatatactttggcagcaaaccagagcatatgatgtaacttgctcaaccttatcttcctttccaaattctatactaagcatctgatgttttttagaataatttcctttggaaagccaatgagaaaacaaattaggaagagagagaagtgagaaattgttgcatggctgaggaacaagatgcttaaaatctgaatggaagtattttgagagcagtatttcatgtgctaagggttataagaattcttttagaaagggattagaattttactctgctagttacaagttttaaagtcacgctacggcattatcaccctggcaggtaggttttgttattgttttacattttgtgaaaaaaagttttgtagaagttacagctagtggtcttttccctccagagccagtgatgagtgtgggagcacttcagctctgtaaggggccagcgttctgacctttaaccacatgaactaacctgcgtcagcagttgcagaaagtagcctgttaggacagcagctgctaagcgttgcctggtattttagtggggagaaggctgggactcttcatggcatcaacacttgcatgctctgaatctttgatcagagatgaggtgccatttttggcatttccaccccgtctcgtggtagcctttaaaagtggtagaagatgctgccctaattccccgaggatgattgtcattccatgcagcataatgtgccgtgaggagttttctcattccagttctttggacttcgtaacattggaattgtttttccataatttccggcattccataaatatttgtcaaggacaaagaaaaggaatgtggatgtttattcttttcatatgaatgactttgtacacatgacttcctgctttcattatgaaggaggggaaactagttcccttgtatggtaactccaaagttaaaaaattgtgcatgtctgaggggttgaatatattttgtaaaactctaaatacatttgtatttctgtgctgttctaaagtttacctttttacttatatgaaagataactatatatttaaatcatgtaagtggaacacagtgtagggggtttttccaatcttatttttcatcaggttctcacacccacgtagtatgctgctcaaattttttcgtgtgtgcaaatgtgaacatttgaacatttcagttaggtactgagccagaaaaggtaattgaagttttcagaaagcttctgtgcttagaaaatattttgttgttttcttaaaatattagtattttgtagctggaagaataagatcaaggcttacatgtttcaggccacttggtcactggttcctgaatttagaaaacattggattaatgagttggtgaaggcatttagtggttacaaaaacagtttaaatatttatgattaaaggcttttcacaaacctttttaaagaaaatttagctgagaaaacttaaaaagttttctaaggaagtttaactgtggcacatgttttgatcagaaaggtagttctctttgctctggtagttttaaagtttgtactagttctttatttctgttgtttttttaaattgttaaaattataaatcacgtctaatcatactgaattgtaaaacttgaattgtatctttattttaagcataaatgagaataaaatgatcctgttcaccctgcc

SEQ ID NO: 384772 - DNA, 6832 bp, Homo sapiens
ccaccgatctccctgtgcggccctcatgtgctgtgctcgctgacacccgaagtccgcggctttccgcacacggtggggtcgtcagacccgctgcccttggcggtcgaagtcgtcgtgcgggcccgcggcggccgcccatggagaaggccaggagaggcggggatggcgtcccccgggggcccgtactgcacatcgtggtggtcggatttcaccacaagaagggctgccaggttgaattctcttacccgcccctgattccaggagatggacatgacagccacactttacctgaagaatggaagtatttgcccttccttgccttaccagatggcgcacacaactaccaggaagatactgtgttttttcacttgccacccagaaatggaaatggagccacagtatttggtatctcttgctatcgacaaattgaagccaaggcactgaaagtaaggcaagcagatatcaccagagagactgttcagaaaagtgtctgtgttctaagcaagctgcctctgtatggtttacttcaagcaaaacttcaactcattacacatgcatattttgaagagaaggatttttcccaaatttctattctaaaggagctttatgaacatatgaatagttccttgggaggtgcttcattagaaggatcccaagtatatcttggtctgtcacctcgagatcttgtccttcattttcgacacaaggtcttaatcctatttaagctaattcttcttgaaaaaaaggttcttttttatatttctccagtgaataaattggtgggtgcactgatgactgtgttatccctttttccaggcatgattgaacatggtctcagtgactgttctcagtatagaccccggaaaagtatgtctgaagatggtgggcttcaggaaagtaacccatgtgcagatgattttgtttctgcatccactgctgatgtttcacataccaacttgggaactatcaggaaagtcatggcaggaaaccatggagaagatgctgccatgaagactgaggagcctttgttccaagtggaagacagcagcaaagggcaggaacccaatgataccaatcaatatttgaaacctccatctcgcccatctccagattcttcagaaagtgactgggaaactttggatcctagtgtcttagaggaccccaacttgaaagaaagggaacagctgggatcagaccagacaaatttgtttccaaaggactctgtcccctcagagagtcttccaattactgtacaacctcaagctaatacgggacaggtagtcctgataccagggctcatttcgggtttggaagaggatcagtatggcatgcccctggccatcttcacaaagggatatctgtgtttgccttacatggcattgcagcagcatcatcttctctccgatgtcaccgttcgggggtttgttgctggagctactaacatcctttttcgacaacagaaacacctcagtgatgccattgtggaagtagaagaagctctgatccagatccatgatccagaactcaggaagctgcttaacccaaccactgcagacctaaggttcgcagactacctagtgaggcacgtgactgagaatcgggatgacgtcttcctagatggcacgggctgggagggaggtgacgaatggatccgggcccagtttgcggtctacattcatgccctgctggctgccacgctgcaattagacaatgaaaagatattatcggactatgggacaacttttgttacagcatggaagaatactcacaactacagggtgtggaacagcaacaagcatccagcacttgcagaaataaatccaaattctgttcagaatagtgaacgtggcaaaaaaattggaaacgtcatggtcacaactagccggaatgttgtacaaacaggaaaagctgttggccagtcagttggaggagctttttccagtgcaaagacagctatgtcttcatggctttccactttcaccacttccacctcccaaagtctcactgagccaccagatgagaagccttgagcaaggcgtcagaggctgctattgctttctgaggtttaagtgtcccctgtctgtctgctgctcccaggctgttactagccacagatccacagcaggggaccatatgtcgaactgtttacatggatgttgctctaagtgaatgtttcgggatgccgaaatgatgaaatcacagccatagcagggatggctttccaggttggggtttcaattgactacttttatttcagtctgagcctgattaaaacatacagtgaaccttctaatgaattttgagttttgatattgtacattggtttactttagaagagtttttacttatgtaaattttgttctgttttggtgtttgaatatctagatggtcactgtaatttatacttgctaaaattaatttatattaccattttctctaaagttggccttaaaacgtgcttataaagtgaaggggtcatacagttgggccttcattattttgctgaattatgtgatgatttttttgctttctacccacaaaacatttattaattcacttcctcccagaaacatgaaagttagaggtggtagttctgaggattgggtgttttgttttacgtttttagtttgttctttccacatccttaaaaacttggtttcagacatcaaggagtatcactgtgctttcctcctctttataactgtgcaggtgggtgtgcagagaaatagcagagtgatggttcgatgatactgaagcagtttaacatgaatgtgtctgtagggcaatactttcaaagaagacctatgtgtttatttttcaaccgcagtcatgttgcagtcttacaagcactttttttttattccagagtttgtgccatctgtttctctttttttttgggggggggggggggcggggtctcactctatcgcccaggctggagtgcagtggtgccatctcggctcactgcaacctccatctcccgggttcaagcaattcttgtacctcagcctcccaagtagctgggattatggacatgcgccaccatgcccagctaattattgtatttttagtagagacggggttttgccatgttggccaggctggtcttgatctcctggcctcaagtgatctgcccgcctcagcctctcaaagtgctgggactacaggcatgagccactgcgcctggcctgtttcttttttaaacagttttctattgggtgtttgcagacctacagcttttctcgtagtcttattcataaagcttttcaaagcacttagtcttctacttccctaactgaaagtcctcctataatcaatccctacccccttctagaagtatcttaaaagaaaagcaaggtgattgtaagtattaaatagaaatctcatcttagtttatattcagcaaagtaagaggcaagagaagaaaactgcagccttgacatctgtcatctgagaaaggacatctggtttcatgttaggcacatacatgcatgtgtgtgccatctactgatgatttgtacacagctggacctcgtgtgtttgccatgctcagctctcatttgcttttcaaggatacctgggatggctgttctcagagagtacttacggggaacagactgccttttagtaacaagggatacttgggaaatacattgtgagtatgatctatcccagattgctggggaaataaaggagggccctgattatatttggtttattcctcactaaatgtttaagaagtaaatgctcccaaggcatttgaaatgaacatagaaacataatctaaatgtctctaaattttccactttgtgttttctaaacacaaattgtattactcatttgagcataactcaagaattcagcgatgataaattgaagggctgaatgtgagaactccattaattccacttcttccaagaaagttaacctcaggaaatactgtttgaagagaagaaagtagtaccaaacaaaaaccttaaacagtacttgaatcttttttgcgctgagactataaagaattcattctaacatcttgtttcataagggccacatcattcgttggagcatgatagtgtgatttgtgtacaattgttacctctcagctgctgaagttcacacttcaaggatctaggagctctgtgaggggtcgtccagcaagatgctgatttgtctttcagttggtatggtttctgtgatcggggtaaactcccgtctcccactattcaaaagcagcccaactcatgctttggaatccactgaaataaaaatagttacatgaagtttaactttgctttaatatcacttgttcctcattgaatatacactttgatcagactttctattaacatttctagctaagagtttgactcttagtggtcactttactgactttccaacataaaacaagtatctcagaagatacagctttcatcatagaaatggtcaaaagaccatagctatatttccttcaggttctgggaggtggagtttttcaaggaacactggctgttgtattgttggcaggggccccaaggcagctcgcacaatcaaaggcaggaagcctcacccctggtcctgtgaccccccccaccccacacacacacatacttcaggcttggattctaggctccaagtggccagcatagaagcagcagcctctctccaaaccctggctctgtgagccataggaaccagcactaggtcatcttctgacatagccctggtgaaggtgtgtgtgtgttggtggccacacttgctaaggcttttgtgtctaagaattgagtatttgtacctaggtgtgagggaaccagggtcagccagcctttttcagatggcgccaggcacacacactacatcaatggcttgctggtggcttcaccactatccaggtgacttaaaagagtgtttggaaaatgtccctggtatacttcaattcctactagacattgtaatgacaatggtgtaggtaaggaagagagagttaaaactaccagttgtggaatagaaatagttgcatgtccaaagaaggcttagaatgattgtgcatatgcagttggctcacataaccagcatgaacagtctctccccaaatccattagtgattcactaccccccgccaagcacagccctaaaacaattctcgtccactttcctgttaagaaacacagcagcaatatactttggcagcaaaccagagcatatgatgtaacttgctcaaccttatcttcctttccaaattctatactaagcatctgatgttttttagaataatttcctttggaaagccaatgagaaaacaaattaggaagagagagaagtgagaaattgttgcatggctgaggaacaagatgcttaaaatctgaatggaagtattttgagagcagtatttcatgtgctaagggttataagaattcttttagaaagggattagaattttactctgctagttacaagttttaaagtcacgctacggcattatcaccctggcaggtaggttttgttattgttttacattttgtgaaaaaaagttttgtagaagttacagctagtggtcttttccctccagagccagtgatgagtgtgggagcacttcagctctgtaaggggccagcgttctgacctttaaccacatgaactaacctgcgtcagcagttgcagaaagtagcctgttaggacagcagctgctaagcgttgcctggtattttagtggggagaaggctgggactcttcatggcatcaacacttgcatgctctgaatctttgatcagagatgaggtgccatttttggcatttccaccccgtctcgtggtagcctttaaaagtggtagaagatgctgccctaattccccgaggatgattgtcattccatgcagcataatgtgccgtgaggagttttctcattccagttctttggacttcgtaacattggaattgtttttccataatttccggcattccataaatatttgtcaaggacaaagaaaaggaatgtggatgtttattcttttcatatgaatgactttgtacacatgacttcctgctttcattatgaaggaggggaaactagttcccttgtatggtaactccaaagttaaaaaattgtgcatgtctgaggggttgaatatattttgtaaaactctaaatacatttgtatttctgtgctgttctaaagtttacctttttacttatatgaaagataactatatatttaaatcatgtaagtggaacacagtgtagggggtttttccaatcttatttttcatcaggttctcacacccacgtagtatgctgctcaaattttttcgtgtgtgcaaatgtgaacatttgaacatttcagttaggtactgagccagaaaaggtaattgaagttttcagaaagcttctgtgcttagaaaatattttgttgttttcttaaaatattagtattttgtagctggaagaataagatcaaggcttacatgtttcaggccacttggtcactggttcctgaatttagaaaacattggattaatgagttggtgaaggcatttagtggttacaaaaacagtttaaatatttatgattaaaggcttttcacaaacctttttaaagaaaatttagctgagaaaacttaaaaagttttctaaggaagtttaactgtggcacatgttttgatcagaaaggtagttctctttgctctggtagttttaaagtttgtactagttctttatttctgttgtttttttaaattgttaaaattataaatcacgtctaatcatactgaattgtaaaacttgaattgtatctttattttaagcataaatgagaataaaatgatcctgttcaccctgcc

SEQ ID NO: 384773 - DNA, 5149 bp, Homo sapiens
ccaccgatctccctgtgcggccctcatgtgctgtgctcgctgacacccgaagtccgcggctttccgcacacggtggggtcgtcagacccgctgcccttggcggtcgaagtcgtcgtgcgggcccgcggcggccgcccatggagaaggccaggagaggcggggatggcgtcccccgggggcccgtactgcacatcgtggtggtcggatttcaccacaagaagggctgccaggttgaattctcttacccgcccctgattccaggagatggacatgacagccacactttacctgaagaatggaagtatttgcccttccttgccttaccagatggcgcacacaactaccaggaagatactgtgttttttcacttgccacccagaaatggaaatggagccacagtatttggtatctcttgctatcgacaaattgaagccaaggcactgaaagtaaggcaagcagatatcaccagagagactgttcagaaaagtgtctgtgttctaagcaagctgcctctgtatggtttacttcaagcaaaacttcaactcattacacatgcatattttgaagagaaggatttttcccaaatttctattctaaaggagctttatgaacatatgaatagttccttgggaggtgcttcattagaaggatcccaagtatatcttggtctgtcacctcgagatcttgtccttcattttcgacacaaggtcttaatcctatttaagctaattcttcttgaaaaaaaggttcttttttatatttctccagtgaataaattggtgggtgcactgatgactgtgttatccctttttccaggcatgattgaacatggtctcagtgactgttctcagtatagaccccggaaaagtatgtctgaagatggtgggcttcaggaaagtaacccatgtgcagatgattttgtttctgcatccactgctgatgtttcacataccaacttgggaactatcaggaaagtcatggcaggaaaccatggagaagatgctgccatgaagactgaggagcctttgttccaagtggaagacagcagcaaagggcaggaacccaatgataccaatcaatatttgaaacctccatctcgcccatctccagattcttcagaaagtgactgggaaactttggatcctagtgtcttagaggaccccaacttgaaagaaagggaacagctgggatcagaccagacaaatttgtttccaaaggactctgtcccctcagagagtcttccaattactgtacaacctcaagctaatacgggacaggtagtcctgataccagggctcatttcgggtttggaagaggatcagtatggcatgcccctggccatcttcacaaagggatatctgtgtttgccttacatggcattgcagcagcatcatcttctctccgatgtcaccgttcgggggtttgttgctggagctactaacatcctttttcgacaacagaaacacctcagtgatgccattgtggaagtagaagaagctctgatccagatccatgatccagaactcaggaagctgcttaacccaaccactgcagacctaaggttcgcagactacctagtgaggcacgtgactgagaatcgggatgacgtcttcctagatggcacgggctgggagggaggtgacgaatggatccgggcccagtttgcggtctacattcatgccctgctggctgccacgctgcaattagacaatgaaaagatattatcggactatgggacaacttttgttacagcatggaagaatactcacaactacagggtgtggaacagcaacaagcatccagcacttgcagaaataaatccaaaccatccatttcaaggccaatactcagtatcagacatgaagttaaggttctcacattctgttcagaatagtgaacgtggcaaaaaaattggaaacgtcatggtcacaactagccggaatgttgtacaaacaggaaaagctgttggccagtcagttggaggagctttttccagtgcaaagacagctatgtcttcatggctttccactttcaccacttccacctcccaaagtctcactgagccaccagatgagaagccttgagcaaggcgtcagaggctgctattgctttctgaggtttaagtgtcccctgtctgtctgctgctcccaggctgttactagccacagatccacagcaggggaccatatgtcgaactgtttacatggatgttgctctaagtgaatgtttcgggatgccgaaatgatgaaatcacagccatagcagggatggctttccaggatacctgggatggctgttctcagagagtacttacggggaacagactgccttttagtaacaagggatacttgggaaatacattggccacatcattcgttggagcatgatagtgtgatttgtgtacaattgttacctctcagctgctgaagttcacacttcaaggatctaggagctctgtgaggggtcgtccagcaagatgctgatttgtctttcagttggtatggtttctgtgatcggggtaaactcccgtctcccactattcaaaagcagcccaactcatgctttggaatccactgaaataaaaatagttacatgaagtttaactttgctttaatatcacttgttcctcattgaatatacactttgatcagactttctattaacatttctagctaagagtttgactcttagtggtcactttactgactttccaacataaaacaagtatctcagaagatacagctttcatcatagaaatggtcaaaagaccatagctatatttccttcaggttctgggaggtggagtttttcaaggaacactggctgttgtattgttggcaggggccccaaggcagctcgcacaatcaaaggcaggaagcctcacccctggtcctgtgaccccccccaccccacacacacacatacttcaggcttggattctaggctccaagtggccagcatagaagcagcagcctctctccaaaccctggctctgtgagccataggaaccagcactaggtcatcttctgacatagccctggtgaaggtgtgtgtgtgttggtggccacacttgctaaggcttttgtgtctaagaattgagtatttgtacctaggtgtgagggaaccagggtcagccagcctttttcagatggcgccaggcacacacactacatcaatggcttgctggtggcttcaccactatccaggtgacttaaaagagtgtttggaaaatgtccctggtatacttcaattcctactagacattgtaatgacaatggtgtaggtaaggaagagagagttaaaactaccagttgtggaatagaaatagttgcatgtccaaagaaggcttagaatgattgtgcatatgcagttggctcacataaccagcatgaacagtctctccccaaatccattagtgattcactaccccccgccaagcacagccctaaaacaattctcgtccactttcctgttaagaaacacagcagcaatatactttggcagcaaaccagagcatatgatgtaacttgctcaaccttatcttcctttccaaattctatactaagcatctgatgttttttagaataatttcctttggaaagccaatgagaaaacaaattaggaagagagagaagtgagaaattgttgcatggctgaggaacaagatgcttaaaatctgaatggaagtattttgagagcagtatttcatgtgctaagggttataagaattcttttagaaagggattagaattttactctgctagttacaagttttaaagtcacgctacggcattatcaccctggcaggtaggttttgttattgttttacattttgtgaaaaaaagttttgtagaagttacagctagtggtcttttccctccagagccagtgatgagtgtgggagcacttcagctctgtaaggggccagcgttctgacctttaaccacatgaactaacctgcgtcagcagttgcagaaagtagcctgttaggacagcagctgctaagcgttgcctggtattttagtggggagaaggctgggactcttcatggcatcaacacttgcatgctctgaatctttgatcagagatgaggtgccatttttggcatttccaccccgtctcgtggtagcctttaaaagtggtagaagatgctgccctaattccccgaggatgattgtcattccatgcagcataatgtgccgtgaggagttttctcattccagttctttggacttcgtaacattggaattgtttttccataatttccggcattccataaatatttgtcaaggacaaagaaaaggaatgtggatgtttattcttttcatatgaatgactttgtacacatgacttcctgctttcattatgaaggaggggaaactagttcccttgtatggtaactccaaagttaaaaaattgtgcatgtctgaggggttgaatatattttgtaaaactctaaatacatttgtatttctgtgctgttctaaagtttacctttttacttatatgaaagataactatatatttaaatcatgtaagtggaacacagtgtagggggtttttccaatcttatttttcatcaggttctcacacccacgtagtatgctgctcaaattttttcgtgtgtgcaaatgtgaacatttgaacatttcagttaggtactgagccagaaaaggtaattgaagttttcagaaagcttctgtgcttagaaaatattttgttgttttcttaaaatattagtattttgtagctggaagaataagatcaaggcttacatgtttcaggccacttggtcactggttcctgaatttagaaaacattggattaatgagttggtgaaggcatttagtggttacaaaaacagtttaaatatttatgattaaaggcttttcacaaacctttttaaagaaaatttagctgagaaaacttaaaaagttttctaaggaagtttaactgtggcacatgttttgatcagaaaggtagttctctttgctctggtagttttaaagtttgtactagttctttatttctgttgtttttttaaattgttaaaattataaatcacgtctaatcatactgaattgtaaaacttgaattgtatctttattttaagcataaatgagaataaaatgatcctgttcaccctgcc

SEQ ID NO: 384774 - DNA, 5594 bp, Homo sapiens
ccaccgatctccctgtgcggccctcatgtgctgtgctcgctgacacccgaagtccgcggctttccgcacacggtggggtcgtcagacccgctgcccttggcggtcgaagtcgtcgtgcgggcccgcggcggccgcccatggagaaggccaggagaggcggggatggcgtcccccgggggcccgtactgcacatcgtggtggtcggatttcaccacaagaagggctgccaggttgaattctcttacccgcccctgattccaggagatggacatgacagccacactttacctgaagaatggaagtatttgcccttccttgccttaccagatggcgcacacaactaccaggaagatactgtgttttttcacttgccacccagaaatggaaatggagccacagtatttggtatctcttgctatcgacaaattgaagccaaggcactgaaagtaaggcaagcagatatcaccagagagactgttcagaaaagtgtctgtgttctaagcaagctgcctctgtatggtttacttcaagcaaaacttcaactcattacacatgcatattttgaagagaaggatttttcccaaatttctattctaaaggagctttatgaacatatgaatagttccttgggaggtgcttcattagaaggatcccaagtatatcttggtctgtcacctcgagatcttgtccttcattttcgacacaaggtcttaatcctatttaagctaattcttcttgaaaaaaaggttcttttttatatttctccagtgaataaattggtgggtgcactgatgactgtgttatccctttttccaggcatgattgaacatggtctcagtgactgttctcagtatagaccccggaaaagtatgtctgaagatggtgggcttcaggaaagtaacccatgtgcagatgattttgtttctgcatccactgctgatgtttcacataccaacttgggaactatcaggaaagtcatggcaggaaaccatggagaagatgctgccatgaagactgaggagcctttgttccaagtggaagacagcagcaaagggcaggaacccaatgataccaatcaatatttgaaacctccatctcgcccatctccagattcttcagaaagtgactgggaaactttggatcctagtgtcttagaggaccccaacttgaaagaaagggaacagctgggatcagaccagacaaatttgtttccaaaggactctgtcccctcagagagtcttccaattactgtacaacctcaagctaatacgggacaggtagtcctgataccagggctcatttcgggtttggaagaggatcagtatggcatgcccctggccatcttcacaaagggatatctgtgtttgccttacatggcattgcagcagcatcatcttctctccgatgtcaccgttcgggggtttgttgctggagctactaacatcctttttcgacaacagaaacacctcagtgatgccattgtggaagtagaagaagctctgatccagatccatgatccagaactcaggaagctgcttaacccaaccactgcagacctaaggttcgcagactacctagtgaggcacgtgactgagaatcgggatgacgtcttcctagatggcacgggctgggagggaggtgacgaatggatccgggcccagtttgcggtctacattcatgccctgctggctgccacgctgcaattagacaatgaaaagatattatcggactatgggacaacttttgttacagcatggaagaatactcacaactacagggtgtggaacagcaacaagcatccagcacttgcagaaataaatccaaattctgttcagaatagtgaacgtggcaaaaaaattggaaacgtcatggtcacaactagccggaatgttgtacaaacaggaaaagctgttggccagtcagttggaggagctttttccagtgcaaagacagctatgtcttcatggctttccactttcaccacttccacctcccaaagtctcactgagccaccagatgagaagccttgagcaaggcgtcagaggctgctattgctttctgaggtttaagtgtcccctgtctgtctgctgctcccaggctgttactagccacagatccacagcaggggaccatatgtcgaactgtttacatggatgttgctctaagtgaatgtttcgggatgccgaaatgatgaaatcacagccatagcagggatggctttccaggttggggtttcaattgactacttttatttcagtctgagcctgattaaaacatacagtgaaccttctaatgaattttgagttttgatattgtacattggtttactttagaagagtttttacttatgtaaattttgttctgttttggtgtttgaatatctagatggtcactgtaatttatacttgctaaaattaatttatattaccattttctctaaagttggccttaaaacgtgcttataaagtgaaggggtcatacagttgggccttcattattttgctgaattatgtgatgatttttttgctttctacccacaaaacatttattaattcacttcctcccagaaacatgaaagttagaggtggtagttctgaggattgggtgttttgttttacgtttttagtttgttctttccacatccttaaaaacttggtttcagacatcaaggagtatcactgtgctttcctcctctttataactgtgcaggtgggtgtgcagagaaatagcagagtgatggttcgatgatactgaagcagtttaacatgaatgtgtctgtagggcaatactttcaaagaagacctatgtgtttatttttcaaccgcagtcatgttgcagtcttacaagcactttttttttattccagagtttgtgccatctgtttctctttttttttgggggggggggggggcggggtctcactctatcgcccaggctggagtgcagtggtgccatctcggctcactgcaacctccatctcccgggttcaagcaattcttgtacctcagcctcccaagtagctgggattatggacatgcgccaccatgcccagctaattattgtatttttagtagagacggggttttgccatgttggccaggctggtcttgatctcctggcctcaagtgatctgcccgcctcagcctctcaaagtgctgggactacaggcatgagccactgcgcctggcctgtttcttttttaaacagttttctattgggtgtttgcagacctacagcttttctcgtagtcttattcataaagcttttcaaagcacttagtcttctacttccctaactgaaagtcctcctataatcaatccctacccccttctagaagtatcttaaaagaaaagcaaggtgattgtaagtattaaatagaaatctcatcttagtttatattcagcaaagtaagaggcaagagaagaaaactgcagccttgacatctgtcatctgagaaaggacatctggtttcatgttaggcacatacatgcatgtgtgtgccatctactgatgatttgtacacagctggacctcgtgtgtttgccatgctcagctctcatttgcttttcaaggatacctgggatggctgttctcagagagtacttacggggaacagactgccttttagtaacaagggatacttgggaaatacattgtgagtatgatctatcccagattgctggggaaataaaggagggccctgattatatttggtttattcctcactaaatgtttaagaagtaaatgctcccaaggcatttgaaatgaacatagaaacataatctaaatgtctctaaattttccactttgtgttttctaaacacaaattgtattactcatttgagcataactcaagaattcagcgatgataaattgaagggctgaatgtgagaactccattaattccacttcttccaagaaagttaacctcaggaaatactgtttgaagagaagaaagtagtaccaaacaaaaaccttaaacagtacttgaatcttttttgcgctgagactataaagaattcattctaacatcttgtttcataagggccacatcattcgttggagcatgatagtgtgatttgtgtacaattgttacctctcagctgctgaagttcacacttcaaggatctaggagctctgtgaggggtcgtccagcaagatgctgatttgtctttcagttggtatggtttctgtgatcggggtaaactcccgtctcccactattcaaaagcagcccaactcatgctttggaatccactgaaataaaaatagttacatgaagtttaactttgctttaatatcacttgttcctcattgaatatacactttgatcagactttctattaacatttctagctaagagtttgactcttagtggtcactttactgactttccaacataaaacaagtatctcagaagatacagctttcatcatagaaatggtcaaaagaccatagctatatttccttcaggttctgggaggtggagtttttcaaggaacactggctgttgtattgttggcaggggccccaaggcagctcgcacaatcaaaggcaggaagcctcacccctggtcctgtgaccccccccaccccacacacacacatacttcaggcttggattctaggctccaagtggccagcatagaagcagcagcctctctccaaaccctggctctgtgagccataggaaccagcactaggtcatcttctgacatagccctggtgaaggtgtgtgtgtgttggtggccacacttgctaaggcttttgtgtctaagaattgagtatttgtacctaggtgtgagggaaccagggtcagccagcctttttcagatggcgccaggcacacacactacatcaatggcttgctggtggcttcaccactatccaggtgacttaaaagagtgtttggaaaatgtccctggtatacttcaattcctactagacattgtaatgacaatggtgtaggtaaggaagagagagttaaaactaccagttgtggaatagaaatagttgcatgtccaaagaaggcttagaatgattgtgcatatgcagttggctcacataaccagcatgaacagtctctccccaaatccattagtgattcactaccccccgccaagcacagccctaaaacaattctcgtccactttcctgttaagaaacacagcagcaatatactttggcagcaaaccagagcatatgatgtaacttgctcaaccttatcttcctttccaaattctatactaagcatctgatgttttttagaataatttcctttggaaagccaatgagaaaacaaattaggaagagagagaagtgagaaattgttgcatggctgaggaacaagatgcttaaaatctgaatggaagtattttgagagcagtatttcatgtgctaagggttataagaattcttttagaaaggtagttctctttgctctggtagttttaaagtttgtactagttctttatttctgttgtttttttaaattgttaaaattataaatcacgtctaatcatactgaattgtaaaacttgaattgtatctttattttaagcataaatgagaataaaatgatcctgttcaccctgcc

SEQ ID NO: 384775 - DNA, 607 bp, Homo sapiens
atgagattataaattccttgagattcgggattgtccattcactattatattcccagtgcctcccacagattctggcacataggcccaaactgacatttatttgttcagtatttcctgagagtcttaataaaaaactttttgaatttaactgaatgtaagaaatttcttatatataatttctatttttatgttgaaaaaatatttttgaaatattgctatgaaatatttctgataaattgctctttgttcataataggcactgaaagtaaggcaagcagatatcaccagagagactgttcagaaaagtgtctgtgttctaagcaagctggtaagagacgaagtaacttgttcattatgttaaaccttcatggcagatctttctttaaggataaggcactattagaataagaagagatttaaatgacatattaaaattatttatgccctagcatctcctcattctctttccctttcagcagttttcatttgcacctctacccaagacttggtaagagaaaggagatcttatagctattggaaagtaagttgacacataaacaaaatgaggtagctgatatatttcatttatccattttggttttgtcca

SEQ ID NO: 384776 - DNA, 420 bp, Homo sapiens
gtctgtcacctcgagatcttgtccttcattttcgacacaaggtatggtaccttatttaaataaatttatgatgtacagtactaaaatggccaacactgttcttagtgtgctcatttaactgccaaattcagtgtgctaaattgaatgcagattgtggcataccatgctttagttcttctaagatgtacttggccttataactatacaaaattaaaagtgttggtagtgcttgtattgtagaaatttaaaagagcacaaatactgtttacttctttgcaggatagggtaattttttctattgtttttgcaatttcatcgatcatgagattagagtggaaagaaacatgttttgatcttgcagaatattttatatgttgccctgagaatggagcatttttcaataaaacatctatatatact

SEQ ID NO: 384777 - DNA, 6886 bp, Homo sapiens
ccaccgatctccctgtgcggccctcatgtgctgtgctcgctgacacccgaagtccgcggctttccgcacacggtggggtcgtcagacccgctgcccttggcggtcgaagtcgtcgtgcgggcccgcggcggccgcccatggagaaggccaggagaggcggggatggcgtcccccgggggcccgtactgcacatcgtggtggtcggatttcaccacaagaagggctgccaggttgaattctcttacccgcccctgattccaggagatggacatgacagccacactttacctgaagaatggaagtatttgcccttccttgccttaccagatggcgcacacaactaccaggaagatactgtgttttttcacttgccacccagaaatggaaatggagccacagtatttggtatctcttgctatcgacaaattgaagccaaggcactgaaagtaaggcaagcagatatcaccagagagactgttcagaaaagtgtctgtgttctaagcaagctgcctctgtatggtttacttcaagcaaaacttcaactcattacacatgcatattttgaagagaaggatttttcccaaatttctattctaaaggagctttatgaacatatgaatagttccttgggaggtgcttcattagaaggatcccaagtatatcttggtctgtcacctcgagatcttgtccttcattttcgacacaaggtcttaatcctatttaagctaattcttcttgaaaaaaaggttcttttttatatttctccagtgaataaattggtgggtgcactgatgactgtgttatccctttttccaggcatgattgaacatggtctcagtgactgttctcagtatagaccccggaaaagtatgtctgaagatggtgggcttcaggaaagtaacccatgtgcagatgattttgtttctgcatccactgctgatgtttcacataccaacttgggaactatcaggaaagtcatggcaggaaaccatggagaagatgctgccatgaagactgaggagcctttgttccaagtggaagacagcagcaaagggcaggaacccaatgataccaatcaatatttgaaacctccatctcgcccatctccagattcttcagaaagtgactgggaaactttggatcctagtgtcttagaggaccccaacttgaaagaaagggaacagctgggatcagaccagacaaatttgtttccaaaggactctgtcccctcagagagtcttccaattactgtacaacctcaagctaatacgggacaggtagtcctgataccagggctcatttcgggtttggaagaggatcagtatggcatgcccctggccatcttcacaaagggatatctgtgtttgccttacatggcattgcagcagcatcatcttctctccgatgtcaccgttcgggggtttgttgctggagctactaacatcctttttcgacaacagaaacacctcagtgatgccattgtggaagtagaagaagctctgatccagatccatgatccagaactcaggaagctgcttaacccaaccactgcagacctaaggttcgcagactacctagtgaggcacgtgactgagaatcgggatgacgtcttcctagatggcacgggctgggagggaggtgacgaatggatccgggcccagtttgcggtctacattcatgccctgctggctgccacgctgcaattagacaatgaaaagatattatcggactatgggacaacttttgttacagcatggaagaatactcacaactacagggtgtggaacagcaacaagcatccagcacttgcagaaataaatccaaaccatccatttcaaggccaatactcagtatcagacatgaagttaaggttctcacattctgttcagaatagtgaacgtggcaaaaaaattggaaacgtcatggtcacaactagccggaatgttgtacaaacaggaaaagctgttggccagtcagttggaggagctttttccagtgcaaagacagctatgtcttcatggctttccactttcaccacttccacctcccaaagtctcactgagccaccagatgagaagccttgagcaaggcgtcagaggctgctattgctttctgaggtttaagtgtcccctgtctgtctgctgctcccaggctgttactagccacagatccacagcaggggaccatatgtcgaactgtttacatggatgttgctctaagtgaatgtttcgggatgccgaaatgatgaaatcacagccatagcagggatggctttccaggttggggtttcaattgactacttttatttcagtctgagcctgattaaaacatacagtgaaccttctaatgaattttgagttttgatattgtacattggtttactttagaagagtttttacttatgtaaattttgttctgttttggtgtttgaatatctagatggtcactgtaatttatacttgctaaaattaatttatattaccattttctctaaagttggccttaaaacgtgcttataaagtgaaggggtcatacagttgggccttcattattttgctgaattatgtgatgatttttttgctttctacccacaaaacatttattaattcacttcctcccagaaacatgaaagttagaggtggtagttctgaggattgggtgttttgttttacgtttttagtttgttctttccacatccttaaaaacttggtttcagacatcaaggagtatcactgtgctttcctcctctttataactgtgcaggtgggtgtgcagagaaatagcagagtgatggttcgatgatactgaagcagtttaacatgaatgtgtctgtagggcaatactttcaaagaagacctatgtgtttatttttcaaccgcagtcatgttgcagtcttacaagcactttttttttattccagagtttgtgccatctgtttctctttttttttgggggggggggggggcggggtctcactctatcgcccaggctggagtgcagtggtgccatctcggctcactgcaacctccatctcccgggttcaagcaattcttgtacctcagcctcccaagtagctgggattatggacatgcgccaccatgcccagctaattattgtatttttagtagagacggggttttgccatgttggccaggctggtcttgatctcctggcctcaagtgatctgcccgcctcagcctctcaaagtgctgggactacaggcatgagccactgcgcctggcctgtttcttttttaaacagttttctattgggtgtttgcagacctacagcttttctcgtagtcttattcataaagcttttcaaagcacttagtcttctacttccctaactgaaagtcctcctataatcaatccctacccccttctagaagtatcttaaaagaaaagcaaggtgattgtaagtattaaatagaaatctcatcttagtttatattcagcaaagtaagaggcaagagaagaaaactgcagccttgacatctgtcatctgagaaaggacatctggtttcatgttaggcacatacatgcatgtgtgtgccatctactgatgatttgtacacagctggacctcgtgtgtttgccatgctcagctctcatttgcttttcaaggatacctgggatggctgttctcagagagtacttacggggaacagactgccttttagtaacaagggatacttgggaaatacattgtgagtatgatctatcccagattgctggggaaataaaggagggccctgattatatttggtttattcctcactaaatgtttaagaagtaaatgctcccaaggcatttgaaatgaacatagaaacataatctaaatgtctctaaattttccactttgtgttttctaaacacaaattgtattactcatttgagcataactcaagaattcagcgatgataaattgaagggctgaatgtgagaactccattaattccacttcttccaagaaagttaacctcaggaaatactgtttgaagagaagaaagtagtaccaaacaaaaaccttaaacagtacttgaatcttttttgcgctgagactataaagaattcattctaacatcttgtttcataagggccacatcattcgttggagcatgatagtgtgatttgtgtacaattgttacctctcagctgctgaagttcacacttcaaggatctaggagctctgtgaggggtcgtccagcaagatgctgatttgtctttcagttggtatggtttctgtgatcggggtaaactcccgtctcccactattcaaaagcagcccaactcatgctttggaatccactgaaataaaaatagttacatgaagtttaactttgctttaatatcacttgttcctcattgaatatacactttgatcagactttctattaacatttctagctaagagtttgactcttagtggtcactttactgactttccaacataaaacaagtatctcagaagatacagctttcatcatagaaatggtcaaaagaccatagctatatttccttcaggttctgggaggtggagtttttcaaggaacactggctgttgtattgttggcaggggccccaaggcagctcgcacaatcaaaggcaggaagcctcacccctggtcctgtgaccccccccaccccacacacacacatacttcaggcttggattctaggctccaagtggccagcatagaagcagcagcctctctccaaaccctggctctgtgagccataggaaccagcactaggtcatcttctgacatagccctggtgaaggtgtgtgtgtgttggtggccacacttgctaaggcttttgtgtctaagaattgagtatttgtacctaggtgtgagggaaccagggtcagccagcctttttcagatggcgccaggcacacacactacatcaatggcttgctggtggcttcaccactatccaggtgacttaaaagagtgtttggaaaatgtccctggtatacttcaattcctactagacattgtaatgacaatggtgtaggtaaggaagagagagttaaaactaccagttgtggaatagaaatagttgcatgtccaaagaaggcttagaatgattgtgcatatgcagttggctcacataaccagcatgaacagtctctccccaaatccattagtgattcactaccccccgccaagcacagccctaaaacaattctcgtccactttcctgttaagaaacacagcagcaatatactttggcagcaaaccagagcatatgatgtaacttgctcaaccttatcttcctttccaaattctatactaagcatctgatgttttttagaataatttcctttggaaagccaatgagaaaacaaattaggaagagagagaagtgagaaattgttgcatggctgaggaacaagatgcttaaaatctgaatggaagtattttgagagcagtatttcatgtgctaagggttataagaattcttttagaaagggattagaattttactctgctagttacaagttttaaagtcacgctacggcattatcaccctggcaggtaggttttgttattgttttacattttgtgaaaaaaagttttgtagaagttacagctagtggtcttttccctccagagccagtgatgagtgtgggagcacttcagctctgtaaggggccagcgttctgacctttaaccacatgaactaacctgcgtcagcagttgcagaaagtagcctgttaggacagcagctgctaagcgttgcctggtattttagtggggagaaggctgggactcttcatggcatcaacacttgcatgctctgaatctttgatcagagatgaggtgccatttttggcatttccaccccgtctcgtggtagcctttaaaagtggtagaagatgctgccctaattccccgaggatgattgtcattccatgcagcataatgtgccgtgaggagttttctcattccagttctttggacttcgtaacattggaattgtttttccataatttccggcattccataaatatttgtcaaggacaaagaaaaggaatgtggatgtttattcttttcatatgaatgactttgtacacatgacttcctgctttcattatgaaggaggggaaactagttcccttgtatggtaactccaaagttaaaaaattgtgcatgtctgaggggttgaatatattttgtaaaactctaaatacatttgtatttctgtgctgttctaaagtttacctttttacttatatgaaagataactatatatttaaatcatgtaagtggaacacagtgtagggggtttttccaatcttatttttcatcaggttctcacacccacgtagtatgctgctcaaattttttcgtgtgtgcaaatgtgaacatttgaacatttcagttaggtactgagccagaaaaggtaattgaagttttcagaaagcttctgtgcttagaaaatattttgttgttttcttaaaatattagtattttgtagctggaagaataagatcaaggcttacatgtttcaggccacttggtcactggttcctgaatttagaaaacattggattaatgagttggtgaaggcatttagtggttacaaaaacagtttaaatatttatgattaaaggcttttcacaaacctttttaaagaaaatttagctgagaaaacttaaaaagttttctaaggaagtttaactgtggcacatgttttgatcagaaaggtagttctctttgctctggtagttttaaagtttgtactagttctttatttctgttgtttttttaaattgttaaaattataaatcacgtctaatcatactgaattgtaaaacttgaattgtatctttattttaagcataaatgagaataaaatgatcctgttcaccctgcc

SEQ ID NO: 384778 - DNA, 6873 bp, Homo sapiens
ccaccgatctccctgtgcggccctcatgtgctgtgctcgctgacacccgaagtccgcggctttccgcacacggtggggtcgtcagacccgctgcccttggcggtcgaagtcgtcgtgcgggcccgcggcggccgcccatggagaaggccaggagaggcggggatggcgtcccccgggggcccgtactgcacatcgtggtggtcggatttcaccacaagaagggctgccaggttgaattctcttacccgcccctgattccaggagatggacatgacagccacactttacctgaagaatggaagtatttgcccttccttgccttaccagatggcgcacacaactaccaggaagatactgtgttttttcacttgccacccagaaatggaaatggagccacagtatttggtatctcttgctatcgacaaattgaagccaaggcactgaaagtaaggcaagcagatatcaccagagagactgttcagaaaagtgtctgtgttctaagcaagctgcctctgtatggtttacttcaagcaaaacttcaactcattacacatgcatattttgaagagaaggatttttcccaaatttctattctaaaggagctttatgaacatatgaatagttccttgggaggtgcttcattagaaggatcccaagtatatcttggtctgtcacctcgagatcttgtccttcattttcgacacaaggtcttaatcctatttaagctaattcttcttgaaaaaaaggttcttttttatatttctccagtgaataaattggtgggtgcactgatgactgtgttatccctttttccaggcatgattgaacatggtctcagtgactgttctcagtatagaccccggaaaagtatgtctgaagatggtgggcttcaggaaagtaacccatgtgcagatgattttgtttctgcatccactgctgatgtttcacataccaacttgggaactatcaggaaagtcatggcaggaaaccatggagaagatgctgccatgaagactgaggagcctttgttccaagtggaagacagcagcaaagggcaggaacccaatgataccaatcaatatttgaaacctccatctcgcccatctccagattcttcagaaagtgactgggaaactttggatcctagtgtcttagaggaccccaacttgaaagaaagggaacagctgggatcagaccagacaaatttgtttccaaaggactctgtcccctcagagagtcttccaattactgtacaacctcaagctaatacgggacaggtagtcctgataccagggctcatttcgggtttggaagaggatcagtatggcatgcccctggccatcttcacaaagggatatctgtgtttgccttacatggcattgcagcagcatcatcttctctccgatgtcaccgttcgggggtttgttgctggagctactaacatcctttttcgacaacagaaacacctcagtgatgccattgtggaagtagaagaagctctgatccagatccatgatccagaactcaggaagctgcttaacccaaccactgcagacctaaggttcgcagactacctagtgaggcacgtgactgagaatcgggatgacgtcttcctagatggcacgggctgggagggaggtgacgaatggatccgggcccagtttgcggtctacattcatgccctgctggctgccacgctgcaattagacaatgaaaagatattatcggactatgggacaacttttgttacagcatggaagaatactcacaactacagggtgtggaacagcaacaagcatccagcacttgcagaaataaatccaaattctgttcagaatagtgaacgtggcaaaaaaattggaaacgtcatggtcacaactagccggaatgttgtacaaacaggaaaagctgttggccagtcagttggaggagctttttccagtgcaaagacagctatgtcttcatggctttccactttcaccacttccacctcccaaagtctcactgagccaccagatgagaagccttgagcaaggcgtcagaggctgctattgctttctgaggtttaagtgtcccctgtctgtctgctgctcccaggctgttactagccacagatccacagcaggggaccatatgtcgaactgtttacatggatgttgctctaagtgaatgtttcgggatgccgaaatgatgaaatcacagccatagcagggatggctttccaggttggggtttcaattgactacttttatttcagtctgagcctgattaaaacatacagtgaaccttctaatgaattttgagttttgatattgtacattggtttactttagaagagtttttacttatgtaaattttgttctgttttggtgtttgaatatctagatggtcactgtaatttatacttgctaaaattaatttatattaccattttctctaaagttggccttaaaacgtgcttataaagtgaaggggtcatacagttgggccttcattattttgctgaattatgtgatgatttttttgctttctacccacaaaacatttattaattcacttcctcccagaaacatgaaagttagaggtggtagttctgaggattgggtgttttgttttacgtttttagtttgttctttccacatccttaaaaacttggtttcagacatcaaggagtatcactgtgctttcctcctctttataactgtgcaggtgggtgtgcagagaaatagcagagtgatggttcgatgatactgaagcagtttaacatgaatgtgtctgtagggcaatactttcaaagaagacctatgtgtttatttttcaaccgcagtcatgttgcagtcttacaagcactttttttttattccagagtttgtgccatctgtttctctttttttttgggggggggggggggcggggtctcactctatcgcccaggctggagtgcagtggtgccatctcggctcactgcaacctccatctcccgggttcaagcaattcttgtacctcagcctcccaagtagctgggattatggacatgcgccaccatgcccagctaattattgtatttttagtagagacggggttttgccatgttggccaggctggtcttgatctcctggcctcaagtgatctgcccgcctcagcctctcaaagtgctgggactacaggcatgagccactgcgcctggcctgtttcttttttaaacagttttctattgggtgtttgcagacctacagcttttctcgtagtcttattcataaagcttttcaaagcacttagtcttctacttccctaactgaaagtcctcctataatcaatccctacccccttctagaagtatcttaaaagaaaagcaaggtgattgtaagtattaaatagaaatctcatcttagtttatattcagcaaagtaagaggcaagagaagaaaactgcagccttgacatctgtcatctgagaaaggacatctggtttcatgttaggcacatacatgcatgtgtgtgccatctactgatgatttgtacacagctggacctcgtgtgtttgccatgctcagctctcatttgcttttcaaggatacctgggatggctgttctcagagagtacttacggggaacagactgccttttagtaacaagggatacttgggaaatacattgtgagtatgatctatcccagattgctggggaaataaaggagggccctgattatatttggtttattcctcactaaatgtttaagaagtaaatgctcccaaggcatttgaaatgaacatagaaacataatctaaatgtctctaaattttccactttgtgttttctaaacacaaattgtattactcatttgagcataactcaagaattcagcgatgataaattgaagggctgaatgtgagaactccattaattccacttcttccaagaaagttaacctcaggaaatactgtttgaagagaagaaagtagtaccaaacaaaaaccttaaacagtacttgaatcttttttgcgctgagactataaagaattcattctaacatcttgtttcataagggccacatcattcgttggagcatgatagtgtgatttgtgtacaattgttacctctcagctgctgaagttcacacttcaaggatctaggagctctgtgaggggtcgtccagcaagatgctgatttgtctttcagttggtatggtttctgtgatcggggtaaactcccgtctcccactattcaaaagcagcccaactcatgctttggaatccactgaaataaaaatagttacatgaagtttaactttgctttaatatcacttgttcctcattgaatatacactttgatcagactttctattaacatttctagctaagagtttgactcttagtggtcactttactgactttccaacataaaacaagtatctcagaagatacagctttcatcatagaaatggtcaaaagaccatagctatatttccttcaggttctgggaggtggagtttttcaaggaacactggctgttgtattgttggcaggggccccaaggcagctcgcacaatcaaaggcaggaagcctcacccctggtcctgtgaccccccccaccccacacacacacatacttcaggcttggattctaggctccaagtggccagcatagaagcagcagcctctctccaaaccctggctctgtgagccataggaaccagcactaggtcatcttctgacatagccctggtgaaggtgtgtgtgtgttggtggccacacttgctaaggcttttgtgtctaagaattgagtatttgtacctaggtgtgagggaaccagggtcagccagcctttttcagatggcgccaggcacacacactacatcaatggcttgctggtggcttcaccactatccaggtgacttaaaagagtgtttggaaaatgtccctggtatacttcaattcctactagacattgtaatgacaatggtgtaggtaaggaagagagagttaaaactaccagttgtggaatagaaatagttgcatgtccaaagaaggcttagaatgattgtgcatatgcagttggctcacataaccagcatgaacagtctctccccaaatccattagtgattcactaccccccgccaagcacagccctaaaacaattctcgtccactttcctgttaagaaacacagcagcaatatactttggcagcaaaccagagcatatgatgtaacttgctcaaccttatcttcctttccaaattctatactaagcatctgatgttttttagaataatttcctttggaaagccaatgagaaaacaaattaggaagagagagaagtgagaaattgttgcatggctgaggaacaagatgcttaaaatctgaatggaagtattttgagagcagtatttcatgtgctaagggttataagaattcttttagaaagggattagaattttactctgctagttacaagttttaaagtcacgctacggcattatcaccctggcaggtaggttttgttattgttttacattttgtgaaaaaaagttttgtagaagttacagctagtggtcttttccctccagagccagtgatgagtgtgggagcacttcagctctgtaaggggccagcgttctgacctttaaccacatgaactaacctgcgtcagcagttgcagaaagtagcctgttaggacagcagctgctaagcgttgcctggtattttagtggggagaaggctgggactcttcatggcatcaacacttgcatgctctgaatctttgatcagagatgaggtgccatttttggcatttccaccccgtctcgtggtagcctttaaaagtggtagaagatgctgccctaattccccgaggatgattgtcattccatgcagcataatgtgccgtgaggagttttctcattccagttctttggacttcgtaacattggaattgtttttccataatttccggcattccataaatatttgtcaaggacaaagaaaaggaatgtggatgtttattcttttcatatgaatgactttgtacacatgacttcctgctttcattatgaaggaggggaaactagttcccttgtatggtaactccaaagttaaaaaattgtgcatgtctgaggggttgaatatattttgtaaaactctaaatacatttgtatttctgtgctgttctaaagtttacctttttacttatatgaaagataactatatatttaaatcatgtaagtggaacacagtgtagggggtttttccaatcttatttttcatcaggttctcacacccacgtagtatgctgctcaaattttttcgtgtgtgcaaatgtgaacatttgaacatttcagttaggtactgagccagaaaaggtaattgaagttttcagaaagcttctgtgcttagaaaatattttgttgttttcttaaaatattagtattttgtagctggaagaataagatcaaggcttacatgtttcaggccacttggtcactggttcctgaatttagaaaacattggattaatgagttggtgaaggcatttagtggttacaaaaacagtttaaatatttatgattaaaggcttttcacaaacctttttaaagaaaatttagctgagaaaacttaaaaagttttctaaggaagtttaactgtggcacatgttttgatcagaaaggtagttctctttgctctggtagttttaaagtttgtactagttctttatttctgttgtttttttaaattgttaaaattataaatcacgtctaatcatactgaattgtaaaacttgaattgtatctttattttaagcataaatgagaataaaatgatcctgttcaccctgcctacagttggacttgacctgtccttctagaagtaccctgtgt

SEQ ID NO: 384779 - DNA, 6788 bp, Homo sapiens
ccaccgatctccctgtgcggccctcatgtgctgtgctcgctgacacccgaagtccgcggctttccgcacacggtggggtcgtcagacccgctgcccttggcggtcgaagtcgtcgtgcgggcccgcggcggccgcccatggagaaggccaggagaggcggggatggcgtcccccgggggcccgtactgcacatcgtggtggtcggatttcaccacaagaagggctgccaggttgaattctcttacccgcccctgattccaggagatggacatgacagccacactttacctgaagaatggaagtatttgcccttccttgccttaccagatggcgcacacaactaccaggaagatactgtgttttttcacttgccacccagaaatggaaatggagccacagtatttggtatctcttgctatcgacaaattgaagccaaggcactgaaagtaaggcaagcagatatcaccagagagactgttcagaaaagtgtctgtgttctaagcaagctgcctctgtatggtttacttcaagcaaaacttcaactcattacacatgcatattttgaagagaaggatttttcccaaatttctattctaaaggagctttatgaacatatgaatagttccttgggaggtgcttcattagaaggatcccaagtatatcttggtctgtcacctcgagatcttgtccttcattttcgacacaaggtcttaatcctatttaagctaattcttcttgaaaaaaaggttcttttttatatttctccagtgaataaattggtgggtgcactgatgactgtgttatccctttttccaggcatgattgaacatggtctcagtgactgttctcagtatagaccccggaaaagtatgtctgaagatggtgggcttcaggaaagtaacccatgtgcagatgattttgtttctgcatccactgctgatgtttcacataccaacttgggaactatcaggaaagtcatggcaggaaaccatggagaagatgctgccatgaagactgaggagcctttgttccaagtggaagacagcagcaaagggcaggaacccaatgataccaatcaatatttgaaacctccatctcgcccatctccagattcttcagaaagtgactgggaaactttggatcctagtgtcttagaggaccccaacttgaaagaaagggaacagctgggatcagaccagacaaatttgtttccaaaggactctgtcccctcagagagtcttccaattactgtacaacctcaagctaatacgggacaggtagtcctgataccagggctcatttcgggtttggaagaggatcagtatggcatgcccctggccatcttcacaaagggatatctgtgtttgccttacatggcattgcagcagcatcatcttctctccgatgtcaccgttcgggggtttgttgctggagctactaacatcctttttcgacaacagaaacacctcagtgatgccattgtggaagtagaagaagctctgatccagatccatgatccagaactcaggaagctgcttaacccaaccactgcagacctaaggttcgcagactacctagtgaggcacgtgactgagaatcgggatgacgtcttcctagatggcacgggctgggagggaggtgacgaatggatccgggcccagtttgcggtctacattcatgccctgctggctgccacgctgcaattagacaatgaaaagatattatcggactatgggacaacttttgttacagcatggaagaatactcacaactacagggtgtggaacagcaacaagcatccagcacttgcagaaataaatccaaattctgttcagaatagtgaacgtggcaaaaaaattggaaacgtcatggtcacaactagccggaatgttgtacaaacaggaaaagctgttggccagtcagttggaggagctttttccagtgcaaagacagctatgtcttcatggctttccactttcaccacttccacctcccaaagtctcactgagccaccagatgagaagccttgagcaaggcgtcagaggctgctattgctttctgaggtttaagtgtcccctgtctgtctgctgctcccaggctgttactagccacagatccacagcaggggaccatatgtcgaactgtttacatggatgttgctctaagtgaatgtttcgggatgccgaaatgatgaaatcacagccatagcagggatggctttccaggttggggtttcaattgactacttttatttcagtctgagcctgattaaaacatacagtgaaccttctaatgaattttgagttttgatattgtacattggtttactttagaagagtttttacttatgtaaattttgttctgttttggtgtttgaatatctagatggtcactgtaatttatacttgctaaaattaatttatattaccattttctctaaagttggccttaaaacgtgcttataaagtgaaggggtcatacagttgggccttcattattttgctgaattatgtgatgatttttttgctttctacccacaaaacatttattaattcacttcctcccagaaacatgaaagttagaggtggtagttctgaggattgggtgttttgttttacgtttttagtttgttctttccacatccttaaaaacttggtttcagacatcaaggagtatcactgtgctttcctcctctttataactgtgcaggtgggtgtgcagagaaatagcagagtgatggttcgatgatactgaagcagtttaacatgaatgtgtctgtagggcaatactttcaaagaagacctatgtgtttatttttcaaccgcagtcatgttgcagtcttacaagcactttttttttattccagagtttgtgccatctgtttctctttttttttgggggggggggggggcggggtctcactctatcgcccaggctggagtgcagtggtgccatctcggctcactgcaacctccatctcccgggttcaagcaattcttgtacctcagcctcccaagtagctgggattatggacatgcgccaccatgcccagctaattattgtatttttagtagagacggggttttgccatgttggccaggctggtcttgatctcctggcctcaagtgatctgcccgcctcagcctctcaaagtgctgggactacaggcatgagccactgcgcctggcctgtttcttttttaaacagttttctattgggtgtttgcagacctacagcttttctcgtagtcttattcataaagcttttcaaagcacttagtcttctacttccctaactgaaagtcctcctataatcaatccctacccccttctagaagtatcttaaaagaaaagcaaggtgattgtaagtattaaatagaaatctcatcttagtttatattcagcaaagtaagaggcaagagaagaaaactgcagccttgacatctgtcatctgagaaaggacatctggtttcatgttaggcacatacatgcatgtgtgtgccatctactgatgatttgtacacagctggacctcgtgtgtttgccatgctcagctctcatttgcttttcaaggatacctgggatggctgttctcagagagtacttacggggaacagactgccttttagtaacaagggatacttgggaaatacattgtgagtatgatctatcccagattgctggggaaataaaggagggccctgattatatttggtttattcctcactaaatgtttaagaagtaaatgctcccaaggcatttgaaatgaacatagaaacataatctaaatgtctctaaattttccactttgtgttttctaaacacaaattgtattactcatttgagcataactcaagaattcagcgatgataaattgaagggctgaatgtgagaactccattaattccacttcttccaagaaagttaacctcaggaaatactgtttgaagagaagaaagtagtaccaaacaaaaaccttaaacagtacttgaatcttttttgcgctgagactataaagaattcattctaacatcttgtttcataagggccacatcattcgttggagcatgatagtgtgatttgtgtacaattgttacctctcagctgctgaagttcacacttcaaggatctaggagctctgtgaggggtcgtccagcaagatgctgatttgtctttcagttggtatggtttctgtgatcggggtaaactcccgtctcccactattcaaaagcagcccaactcatgctttggaatccactgaaataaaaatagttacatgaagtttaactttgctttaatatcacttgttcctcattgaatatacactttgatcagactttctattaacatttctagctaagagtttgactcttagtggtcactttactgactttccaacataaaacaagtatctcagaagatacagctttcatcatagaaatggtcaaaagaccatagctatatttccttcaggttctgggaggtggagtttttcaaggaacactggctgttgtattgttggcaggggccccaaggcagctcgcacaatcaaaggcaggaagcctcacccctggtcctgtgaccccccccaccccacacacacacatacttcaggcttggattctaggctccaagtggccagcatagaagcagcagcctctctccaaaccctggctctgtgagccataggaaccagcactaggtcatcttctgacatagccctggtgaaggtgtgtgtgtgttggtggccacacttgctaaggcttttgtgtctaagaattgagtatttgtacctaggtgtgagggaaccagggtcagccagcctttttcagatggcgccaggcacacacactacatcaatggcttgctggtggcttcaccactatccaggtgacttaaaagagtgtttggaaaatgtccctggtatacttcaattcctactagacattgtaatgacaatggtgtaggtaaggaagagagagttaaaactaccagttgtggaatagaaatagttgcatgtccaaagaaggcttagaatgattgtgcatatgcagttggctcacataaccagcatgaacagtctctccccaaatccattagtgattcactaccccccgccaagcacagccctaaaacaattctcgtccactttcctgttaagaaacacagcagcaatatactttggcagcaaaccagagcatatgatgtaacttgctcaaccttatcttcctttccaaattctatactaagcatctgatgttttttagaataatttcctttggaaagccaatgagaaaacaaattaggaagagagagaagtgagaaattgttgcatggctgaggaacaagatgcttaaaatctgaatggaagtattttgagagcagtatttcatgtgctaagggttataagaattcttttagaaagggattagaattttactctgctagttacaagttttaaagtcacgctacggcattatcaccctggcaggtaggttttgttattgttttacattttgtgaaaaaaagttttgtagaagttacagctagtggtcttttccctccagagccagtgatgagtgtgggagcacttcagctctgtaaggggccagcgttctgacctttaaccacatgaactaacctgcgtcagcagttgcagaaagtagcctgttaggacagcagctgctaagcgttgcctggtattttagtggggagaaggctgggactcttcatggcatcaacacttgcatgctctgaatctttgatcagagatgaggtgccatttttggcatttccaccccgtctcgtggtagcctttaaaagtggtagaagatgctgccctaattccccgaggatgattgtcattccatgcagcataatgtgccgtgaggagttttctcattccagttctttggacttcgtaacattggaattgtttttccataatttccggcattccataaatatttgtcaaggacaaagaaaaggaatgtggatgtttattcttttcatatgaatgactttgtacacatgacttcctgctttcattatgaaggaggggaaactagttcccttgtatggtaactccaaagttaaaaaattgtgcatgtctgaggggttgaatatattttgtaaaactctaaatacatttgtatttctgtgctgttctaaagtttacctttttacttatatgaaagataactatatatttaaatcatgtaagtggaacacagtgtagggggtttttccaatcttatttttcatcaggttctcacacccacgtagtatgctgctcaaattttttcgtgtgtgcaaatgtgaacatttgaacatttcagttaggtactgagccagaaaaggtaattgaagttttcagaaagcttctgtgcttagaaaatattttgttgttttcttaaaatattagtattttgtagctggaagaataagatcaaggcttacatgtttcaggccacttggtcactggttcctgaatttagaaaacattggattaatgagttggtgaaggcatttagtggttacaaaaacagtttaaatatttatgattaaaggcttttcacaaacctttttaaagaaaatttagtggaaactaaagtttaaggaagttactgtggcatgttgacgaaggattctgccggaagtaaagggacaagcttatacggggtaagggaaataaaagggatatggggggagagggtttttgaagaaaaattgtcgggaaaaaaaaatgggcgaaataggggaaggtaagattaaagaggatttagtaag

SEQ ID NO: 384780 - DNA, 463 bp, Homo sapiens
gcctttgttccaagtggaagacagcagcaaagggcaggaacccaatgataccaatcaatatttgaaacctccatctcgcccatctccagattcttcagaaagtgactgggaaactttggatcctagtgtcttagaggaccccaacttgaaagaaagggaacagctgggatcagaccagacaaatttgtttccaaaggactctgtcccctcagagagtcttccaattactgtacaacctcaagctaatacgggacaggtagtcctgataccagggctcatttcgggtttggaagaggatcagtatggcatgcccctggccatcttcacaaaggtaaagtgtaatattttttatcgaattccttaaagaatttgaaaaatcctttcggagtttaacttttgaacttttggtattcaacacattttcaggtggaaaaatttccttgaaaactgtaaagtacaacca

SEQ ID NO: 384781 - DNA, 373 bp, Homo sapiens
ttttaatgtttccatttttttccagctgacaattttttcttcatgtctagaaagtcattcaatgactacagatattcttctacattgtaacctagtaattctatgatttttaataatactttcttagatgtgtctggatttcaccttataagacataagaaagatagataaacctctttatgttcagatattttgctacttgtttcaataaatttgttgaaagcccctacttttgagaagggagttaaattttctcttaactagttacattgattacctcttaaataattctggagagaatgagagccggcagcctgtttggttattcattttattgtagaatgttgacccctccagaatgggctcttggttt

SEQ ID NO: 384782 - DNA, 418 bp, Homo sapiens
actaagatttttctgttttactctactgtttttaatggagacttgtagatttcagatatggcttatacacattctaaaccctgcttctcagaatagtcatactagttttaacacctctttacacaacttttatgtttatctaacattaaaatattgtataatttggttcagttcaaaagtatgggatggctgttacagctattcagactttcatattgttcaaaactttgtatacaagactttattttttttaattttttttttaagagacagggtcttgctttgtcgctcacaggctggagtgcagtggtgtaattataagctcattgacctcctgggctcaagtaatcctcctatctaagcctcccaagaagctggtgctcactcacagtcacatgctactgtgcctggctacttt

SEQ ID NO: 384783 - DNA, 441 bp, Homo sapiens
ctttagtttattaatcagcaccatatgatgtcacagttttataactcatttatctcatttaattctcatacccaccttgtggaattgttatcactgtcctttacagatgaagaaagaaactccaagaaattaagtagctggcccaagtccacccaactgggatgggcagaaccagggtttgctcttggttgtgcctttctacagcctgtgccttaaccacatctatgtgctgcctcttggcctctgtgtggccagtagattctctcatggctaggctcatcttaattaacatttgttgggtgcctactatggctcaggctctagagatcattgtaaaatccagtccactgccccagctcctcgtgtgtcttttgaacacattagtattgtgctgtgcagaaaggacttctgtgcatatgcctgctattacacttgttgaac

SEQ ID NO: 384784 - DNA, 339 bp, Homo sapiens
aaacactctcaacaggaaagagcatgggctgggatagactgttccatcaggacaggtgggaagagagggtggctcagtcacctgggctcttaagtctatagcaccactatcacttactccaaggaagaccaaggtacaatgtcaatacatgaagcagatgcaaccatgcagagttctagtaatcactctaattttaaatgcctggcactgggatggattcctcttcttcctagaaagcagtagacacttttggtgtctacagtttacaatgtcaactacaaatctcccaccatactggattttcagagagagaagagcaaatttttattcctaaaaaga

SEQ ID NO: 384785 - DNA, 868 bp, Homo sapiens
cccacaacccctttccaagattatttctgcactgtagagaagaagccaggtatcatatttcccagaatcctcttttccgtgttgcttcagtttacagctggccgatgagaggtgctgcatgatattggaagatgggacagaaggaaccagtattctgcagaggcagttgcatgagcagatatgaaatgtcctggaggctcccccagtaagctgagaagcacctgctttcccactatagactgagaccactgatggaagcttcccagagatttgagaattgcagaagcttctgtgagctatgaagaacaacgtgactttgaccttcagactgagatatagctggaggctgctttgaccttctttcccacagctcttttgacctttctaaagccccaaaccctatcttaaaaatgacaaatatggaatgcaaagagcagcttttctttttctgatcatggccttaatgtaatacaatagtgaaaccgtctagcatagtgattaagaacattggctgtagaattagacatatttagtttagcattttgattctaccccaaactggcaaagttactgaatgtatctaaattttaatttgctcatttgtaaaatatggctaataatagtactattttttagctcatttataaagtatggataataatagtgcctattttagggagttctgaatattaaaagaagtaaaccatgtaaagcacttagcacagtgctggatactaacaatcgttattgtgatctaactataattttgcttaaaaacatttgttcaagttttcttatatcatctcctctataaatatgagaatttaacatgaaattttaactctacaagttaaatgggagctaaaat

SEQ ID NO: 384786 - DNA, 850 bp, Homo sapiens
ttttcagaaaaaaaaaacacctctgtttgcatctgtagacaaagatctgttcagaatggttggctttgtgagtttacagctggccgatgagaggtgctgcatgatattggaagatgggacagaaggaaccagtattctgcagaggcagttgcatgagcagatatgaaatgtcctggaggctcccccagtaagctgagaagcacctgctttcccactatagactgagaccactgatggaagcttcccagagatttgagaattgcagaagcttctgtgagctatgaagaacaacgtgactttgaccttcagactgagatatagctggaggctgctttgaccttctttcccacagctcttttgacctttctaaagccccaaaccctatcttaaaaatgacaaatatggaatgcaaagagcagcttttctttttctgatcatggccttaatgtaatacaatagtgaaaccgtctagcatagtgattaagaacattggctgtagaattagacatatttagtttagcattttgattctaccccaaactggcaaagttactgaatgtatctaaattttaatttgctcatttgtaaaatatggctaataatagtactattttttagctcatttataaagtatggataataatagtgcctattttagggagttctgaatattaaaagaagtaaaccatgtaaagcacttagcacagtgctggatactaacaatcgttattgtgatctaactataattttgcttaaaaacatttgttcaagttttcttatatcatctcctctataaatatgagaatttaacatgaaattttaactctacaagttaaatgggagctaaaat

SEQ ID NO: 384787 - DNA, 928 bp, Homo sapiens
agcagagtccctacaacgagtggaacggttagcggcacttgctctatgttctatcgaccttgctgtcggaagagagaaatggcagaatgacatcccccatttggcccgctggaaatgcccaccatcttttgggaagatttactggctgtttatagaatgcctgcctatataatatgaaaaagctgctctcaacttctcccccaaaaccttttaaaagaaaacatttgccacatccagcccttctagagtaaagaggttgccaacgtatgaagtagagttagaaaatcacacaccttgcaaattctcattagtttaaaaagaagtcatagaaaatgtcttctggagttgactttttgaaatggagttattagaccacttctggaagcaacacgtccacgtttgttcaatgggctagaggacatggagcagaagacctgagaaggaaaagaagtgccagtagaacgtatgtctgaaactctcccctttctgcctgaagttagaagactacatgttgaaagtttgctttgagcttggttcttcttgaacatgcagcttcaaatcaatgtctgtctgctcataagttcaaccaaaccaggactgccactggctgctaaagggaagaaaaggctccatgaagaattccagcgtacctcctgccctggcagccattctgctgtttctatggaaacattcaccagatagcagcatgctatactgtgcaagtgaagaagaaggcatcttcctttcatcaccacatctagagtgtgaccacttcacagaatgaaagaatgtggtgaacacagttctttattctgacagataaatcgttcaagagaaaggggccagatgccagtgacattttcttggacttcccagcctttagaaccatgatccaaataaacttgtattgtttataaattaaaaaaaa

SEQ ID NO: 384788 - DNA, 474 bp, Homo sapiens
agagcgctcttcggtaagagcggctggggagaggtccttacctctgatccacttagagcaataaccactttttaaatgtaaaataaaaagacaaatgaaaaggcacatccttgtcttctggtaaatgcccaaatgttgccctctttttctggcaattggcagcaagtcaggatgtgtggaggagggagtcagtttctctccattttggcctgcagcttcttagggacatgcctgccagccaagctggagttggaagggaaatctcaaacagatgggggtgcacgtgtaggagaagaaaatagctgctccatcatcctattactgaggctcccccaaaccaagcttgggctgcctcactagataggtatgcaggctggtacttagtttttaaaacaaagggttttcccctctggatggggctgggtgcttttcctggccaaaggaatacaattcttgtttctccccagggtaagg

SEQ ID NO: 384789 - DNA, 2207 bp, Homo sapiens
tgcggccgccgggcgccggagccgcgtccccctgcgccgccccgggcctgccggccggaggagccaccatacaccccgggtcgccgagcgcctggccgccccgcgcccgcgccgcgctccgcctgtggctgggctgcgtctgcttcgcgctggtgcaggcggacagtccctcagccccagtgaacgtcaccgtcaggcacctcaaggccaactctgcagtggtgagctgggatgttctggaggatgaggttgtcatcggatttgccatctcccagcagaagaaggatgtgcggatgctgcgcttcatccaggaggtgaacaccaccacccgctcatgtgccctctgggacctggaggaggatacggagtacatagtccacgtgcaggccatctccattcagggccagagcccagccagcgagcctgtgctcttcaagaccccgcgtgaggctgagaagatggcctccaagaacaaagatgaggtaaccatgaaagagatggggaggaaccaacagctgcggacaggcgaggtgctgatcatcgtcgtggtcctgttcatgtgggcaggtgtcattgccctcttctgccgccagtatgacatcatcaaggacaatgaacccaataacaacaaggaaaaaaccaagagtgcatcagaaaccagcacaccagagcaccagggcggggggcttctccgcagcaagtttccaaacaagccctcagtgaacatcattgaagcgtgactgcctgtctgcagggagaaggattccatttttcttctcagctggtccccaggcccacgggcacagggagagggacaactgcagcagtggggaggaggcacagctagctgcacagttctctcttctccttgtcctagtcagatgaaggaggctgcactacaaacccaaattctgcaaaaaaataaaaataagccacaaaactaaaaggcctggccccattctggaaaaggcaaagctgcatgagacacagccttctgcctcctcgcctctcctggactggcttcctctttgagaaaatgcacaaagccctgggagatgacaagcacaaggactgactcaagctgtgtctttcagaccaaggaacatcagagaagctgtggggctgcctgccaggcaggatcatggctgccatcaagccttttctggatccagccatcaaggacatgtttgtggtgtgatgcacacttttgcaagcgtgtaagatgttacctggtttgtctcttttggaaaacaaaaatcagaaggctgcattctagagggcagagaaattcccccgaagactgagctggttgcctgcatcctctatcttctttgacccttatgactgaaagatcatcagtttggaaggtactggtccaatttatttaggaagtatctcttggagtttcagaaatgctagcttggacaactgaaaagtcacatcacagctggcattctgggggctaccaaaacaccccttctggagtagaagctgctggaaggcaggcctgagccattcaccacggacaggaagagcagctctggctatcaccactggcctctggggtcttcatatcttgccatctcatccagggttccatgaaagttacccagggtcctcatgtccttccttagagcctgagtggtgtgaggtgacaggtctctctctccactgcccctttctggtttaaaaaaatggtgcttgatgagggaaggtagactcttccctaggactgacgagttacggctgccagatgcctgcatgggaagaggtggacatctgcatcttccattggtggtcaaggatgggtgtgggagaaccacacctagtgcaagcctggtactcagtaaatatttgttgaaatgaatgataagagcattggtccccaagccagagagccagaagccatcaccctaatgaccgccccttccttccggtctacaagagctctcaaggctgggtctgccaccactctgctttgcccaagtgtgacagcactggggaggagagacaggataaagggcagatgtcagcaatactaagggcttcctcatgggagggcatgaggctccactcattgtcttgtgacttccatccctgctgaatggggctgcaaggccaaggctccttaggggagaggtccttacctctgatccacttagagcaataaccactttttaaatgtaaaataaaaagacaaatgaaaa

SEQ ID NO: 384790 - DNA, 3103 bp, Homo sapiens
tgcggccgccgggcgccggagccgcgtccccctgcgccgccccgggcctgccggccggaggagccaccatacaccccgggtcgccgagcgcctggccgccccgcgcccgcgccgcgctccgcctgtggctgggctgcgtctgcttcgcgctggtgcaggcggacagtccctcagccccagtgaacgtcaccgtcaggcacctcaaggccaactctgcagtggtgagctgggatgttctggaggatgaggttgtcatcggatttgccatctcccagcagaagaaggatgtgcggatgctgcgcttcatccaggaggtgaacaccaccacccgctcatgtgccctctgggacctggaggaggatacggagtacatagtccacgtgcaggccatctccattcagggccagagcccagccagcgagcctgtgctcttcaagaccccgcgtgaggctgagaagatggcctccaagaacaaagatgaggtaaccatgaaagagatggggaggaaccaacagctgcggacaggcgaggtgctgatcatcgtcgtggtcctgttcatgtgggcaggtgtcattgccctcttctgccgccagtatgacatcatcaaggacaatgaacccaataacaacaaggaaaaaaccaagagtgcatcagaaaccagcacaccagagcaccagggcggggggcttctccgcagcaagatatgaaaaccttttcagtgcttgccctcagcagctaagaagacagacagtagagaatgtgagaggatctcatggttctgatgatgattatccaacaaacatctggccctctctacatctcttccctccatctccttgtaccctctggcttactgtcctctctctggcgcactttcctgaagcctcttattaactcccatctccagaagcacctcaacaatgtcagtggctgaggctgcactcagagggatgactgctgggggtagactgggtgccaggggccatgggcccaggacccagtcttggccattcagttgagtgaggctgaaggctgggtttgaaaaggcaaaaagacaagacatccaggcagggcttctcttttctttccacaagggacaagagcttggcttatttaggctacagccctgctgctgctcccttccttcttctgtcctgtttccagccttgcaagaaggctattcacaattaggcctggctgcttctctcatttttttcctcccagtttccaaacaagccctcagtgaacatcattgaagcgtgactgcctgtctgcagggagaaggattccatttttcttctcagctggtccccaggcccacgggcacagggagagggacaactgcagcagtggggaggaggcacagctagctgcacagttctctcttctccttgtcctagtcagatgaaggaggctgcactacaaacccaaattctgcaaaaaaataaaaataagccacaaaactaaaaggcctggccccattctggaaaaggcaaagctgcatgagacacagccttctgcctcctcgcctctcctggactggcttcctctttgagaaaatgcacaaagccctgggagatgacaagcacaaggactgactcaagctgtgtctttcagaccaaggaacatcagagaagctgtggggctgcctgccaggcaggatcatggctgccatcaagccttttctggatccagccatcaaggacatgtttgtggtgtgatgcacacttttgcaagcgtgtaagatgttacctggtttgtctcttttggaaaacaaaaatcagaaggctgcattctagagggcagagaaattcccccgaagactgagctggttgcctgcatcctctatcttctttgacccttatgactgaaagatcatcagtttggaaggtactggtccaatttatttaggaagtatctcttggagtttcagaaatgctagcttggacaactgaaaagtcacatcacagctggcattctgggggctaccaaaacaccccttctggagtagaagctgctggaaggcaggcctgagccattcaccacggacaggaagagcagctctggctatcaccactggcctctggggtcttcatatcttgccatctcatccagggttccatgaaagttacccagggtcctcatgtccttccttagagcctgagtggtgtgaggtgacaggtctctctctccactgcccctttctggtttaaaaaaatggtgcttgatgagggaaggtagactcttccctaggactgacgagttacggctgccagatgcctgcatgggaagaggtggacatctgcatcttccattggtggtcaaggatgggtgtgggagaaccacacctagtgcaagcctggtactcagtaaatatttgttgaaatgaatgataagagcattggtccccaagccagagagccagaagccatcaccctaatgaccgccccttccttccggtctacaagagctctcaaggctgggtctgccaccactctgctttgcccaagtgtgacagcactggggaggagagacaggataaagggcagatgtcagcaatactaagggcttcctcatgggagggcatgaggctccactcattgtcttgtgacttccatccctgctgaatggggctgcaaggccaaggctccttaggggagaggtccttacctctgatccacttagagcaataaccactttttaaatgtaaaataaaaagacaaatgaaaaggcacatccttgtcttctggtaaatgcccaaatgttgccctctttttctggcaattggcagcaagtcaggatgtgtggaggagggagtcagtttctctccattttggcctgcagcttcttagggacatgcctgccagccaagctggagttggaagggaaatctcaaacagatgggggtgcacgtgtaggagaagaaaatagctgctccatcatcctattactgaggctcccccaaaccaagcttgggctgcctcactagataggtatgcaggctggtacttagtttttaaaacaaagggttttcccctctggatggggctgggtgcttttcctggccaaaggaatacaattcttgtttctccccagggtaagg

SEQ ID NO: 384791 - DNA, 2298 bp, Homo sapiens
tgcggccgccgggcgccggagccgcgtccccctgcgccgccccgggcctgccggccggaggagccaccatacaccccgggtcgccgagcgcctggccgccccgcgcccgcgccgcgctccgcctgtggctgggctgcgtctgcttcgcgctggtgcaggcggacagtccctcagccccagtgaacgtcaccgtcaggcacctcaaggccaactctgcagtggtgagctgggatgttctggaggatgaggttgtcatcggatttgccatctcccagcagaagaaggatgtgcggatgctgcgcttcatccaggaggtgaacaccaccacccgctcatgtgccctctgggacctggaggaggatacggagtacatagtccacgtgcaggccatctccattcagggccagagcccagccagcgagcctgtgctcttcaagaccccgcgtgaggctgagaagatggcctccaagaacaaagatgaggtaaccatgaaagagatggggaggaaccaacagctgcggacaggcgaggtgctgatcatcgtcgtggtcctgttcatgtgggcaggtgtcattgccctcttctgccgccagtatgacatcatcaaggacaatgaacccaataacaacaaggaaaaaaccaagagtgcatcagaaaccagcacaccagagcaccagggcggggggcttctccgcagcaagatatgaaaaccttttcagtgcttgccctcagcagctaagaagacagacagtagagaatgtgagaggatctcatggttctgatgatgattatccaacaaacatctggccctctctacatctcttccctccatctccttgtaccctctggcttactgtcctctctctggcgcactttcctgaagcctcttattaactcccatctccagaagcacctcaacaatgtcagtggctgaggctgcactcagagggatgactgctgggggtagactgggtgccaggggccatgggcccaggacccagtcttggccattcagttgagtgaggctgaaggctgggtttgaaaaggcaaaaagacaagacatccaggcagggcttctcttttctttccacaagggacaagagcttggcttatttaggctacagccctgctgctgctcccttccttcttctgtcctgtttccagccttgcaagaaggctattcacaattaggcctggctgcttctctcatttttttcctcccagtttccaaacaagccctcagtgaacatcattgaagcgtgactgcctgtctgcagggagaaggattccatttttcttctcagctggtccccaggcccacgggcacagggagagggacaactgcagcagtggggaggaggcacagctagctgcacagttctctcttctccttgtcctagtcagatgaaggaggctgcactacaaacccttatgactgaaagatcatcagtttggaaggtactggtccaatttatttaggaagtatctcttggagtttcagaaatgctagcttggacaactgaaaagtcacatcacagctggcattctgggggctaccaaaacaccccttctggagtagaagctgctggaaggcaggcctgagccattcaccacggacaggaagagcagctctggctatcaccactggcctctggggtcttcatatcttgccatctcatccagggttccatgaaagttacccagggtcctcatgtccttccttagagcctgagtggtgtgaggtgacaggtctctctctccactgcccctttctggtttaaaaaaatggtgcttgatgagggaaggtagactcttccctaggactgacgagttacggctgccagatgcctgcatgggaagaggtggacatctgcatcttccattggtggtcaaggatgggtgtgggagaaccacacctagtgcaagcctggtactcagtaaatatttgttgaaatgaatgataagagcattggtccccaagccagagagccagaagccatcaccctaatgaccgccccttccttccggtctacaagagctctcaaggctgggtctgccaccactctgctttgcccaagtgtgacagcactggggaggagagacaggataaagggcagatgtcagcaatactaagggcttcctcatgggagggcatgaggctccactcattgtcttgtgacttccatccctgctgaatggggctgcaaggccaaggctccttaggggagaggtccttacctctgatccacttagagcaataaccactttttaaatgtaaaataaaaagacaaatgaaaa

SEQ ID NO: 384792 - DNA, 2329 bp, Homo sapiens
tgcggccgccgggcgccggagccgcgtccccctgcgccgccccgggcctgccggccggaggagccaccatacaccccgggtcgccgagcgcctggccgccccgcgcccgcgccgcgctccgcctgtggctgggctgcgtctgcttcgcgctggtgcaggcggacagtccctcagccccagtgaacgtcaccgtcaggcacctcaaggccaactctgcagtggtgagctgggatgttctggaggatgaggttgtcatcggatttgccatctcccagcagaagaaggatgtgcggatgctgcgcttcatccaggaggtgaacaccaccacccgctcatgtgccctctgggacctggaggaggatacggagtacatagtccacgtgcaggccatctccattcagggccagagcccagccagcgagcctgtgctcttcaagaccccgcgtgaggctgagaagatggcctccaagaacaaagatgaggtaaccatgaaagagatggggaggaaccaacagctgcggacaggcgaggtgctgatcatcgtcgtggtcctgttcatgtgggcaggtgtcattgccctcttctgccgccagtatgacatcatcaaggacaatgaacccaataacaacaaggaaaaaaccaagagtgcatcagaaaccagcacaccagagcaccagggcggggggcttctccgcagcaagatatgaaaaccttttcagtgcttgccctcagcagctaagaagacagacagtagagaatgtgagaggatctcatggttctgatgatgattatccaacaaacatctggccctctctacatctcttccctccatctccttgtaccctctggcttactgtcctctctctggcgcactttcctgaagcctcttattaactcccatctccagaagcacctcaacaatgtcagtggctgaggctgcactcagagggatgactgctgggggtagactgggtgccaggggccatgggcccaggacccagtcttggccattcagttgagtgaggctgaaggctgggtttgaaaaggcaaaaagacaagacatccaggcagggcttctcttttctttccacaagggacaagagcttggcttatttaggctacagccctgctgctgctcccttccttcttctgtcctgtttccagccttgcaagaaggctattcacaattaggcctggctgcttctctcatttttttcctcccagtttccaaacaagccctcagtgaacatcattgaagcgtgactgcctgtctgcagggagaaggattccatttttcttctcagctggtccccaggcccacgggcacagggagagggacaactgcagcagtggggaggaggcacagctagctgcacagttctctcttctccttgtcctagtcagatgaaggaggctgcactacaaacccaaattctgcaaaaaaataaaaataagccacaaaactaaaaggcctggccccattctggaaaaggcaaagctgcatgagacacagccttctgcctcctcgcctctcctggactggcttcctctttgagaaaatgcacaaagccctgggagatgacaagcacaaggactgactcaagctgtgtctttcagaccaaggaacatcagagaagctgtggggctgcctgccaggcaggatcatggctgccatcaagccttttctggatccagcagaagaaggatgtgcggatctgcgcttcatccaggaggtgaacaccaccacccgctcatgtgccctctgggacctggaggaggatacggagtacatagtccacgtgcaggccatctccattcagggccagagcccagccagcgagcctgtgctcttcaagaccccgcgtgaggctgagaagatggcctccaagaacaaagatgaggtaaccatgaaagagatggggaggaaccaacagctgcggacaggcgaggtgctgatcatcgtcgtggtcctgttcatgtgggcaggtgtcattgccctcttctgccgccagtatgacatcatcaaggacaatgaacccaataacaacaaggaaaaaaccaagagtgcatcagaaaccagcacaccagagcaccagggcggggggcttctccgcagcaaggtgagggcaagacctgggcctgggtgggccaccctgtgcctcatgctctggtaatccctggactgcagagggggtcagctcggggactggcatggcgacagctgggcagagccagacttggctgctgcctgtgtgacacagggacactgcaagttgattttggatcctctccttttgcagggtgccaggggccagtggtgatttgaaaa

SEQ ID NO: 384793 - DNA, 1164 bp, Homo sapiens
  misc_feature (1)..(1): n is a, c, g, or t
  misc_feature (6)..(6): n is a, c, g, or t
  misc_feature (17)..(17): n is a, c, g, or t
  misc_feature (23)..(23): n is a, c, g, or t
  misc_feature (28)..(28): n is a, c, g, or t
nccttnccctcgcttgnagaagnttgtntctcatgcagctgtgtctttcagaccaaggaacatcagagaagctgtggggctgcctgccaggcaggatcatggctgccatcaagccttttctggatccagccatcaaggacatgtttgtggtgtgatgcacacttttgcaagcgtgtaagatgttacctggtttgtctcttttggaaaacaaaaatcagaaggctgcattctagagggcagagaaattcccccgaagactgagctggttgcctgcatcctctatcttctttgacccttatgactgaaagatcatcagtttggaaggtactggtccaatttatttaggaagtatctcttggagtttcagaaatgctagcttggacaactgaaaagtcacatcacagctggcattctgggggctaccaaaacaccccttctggagtagaagctgctggaaggcaggcctgagccattcaccacggacaggaagagcagctctggctatcaccactggcctctggggtcttcatatcttgccatctcatccagggttccatgaaagttacccagggtcctcatgtccttccttagagcctgagtggtgtgaggtgacaggtctctctctccactgcccctttctggtttaaaaaaatggtgcttgatgagggaaggtagactcttccctaggactgacgagttacggctgccagatgcctgcatgggaagaggtggacatctgcatcttccattggtggtcaaggatgggtgtgggagaaccacacctagtgcaagcctggtactcagtaaatatttgttgaaatgaatgataagagcattggtccccaagccagagagccagaagccatcaccctaatgaccgccccttccttccggtctacaagagctctcaaggctgggtctgccaccactctgctttgcccaagtgtgacagcactggggaggagagacaggataaagggcagatgtcagcaatactaagggcttcctcatgggagggcatgaggctccactcattgtcttgtgacttccatccctgctgaatggggctgcaaggccaaggctccttaggggagaggtccttacctctgatccacttagagcaataaccactttttaaatgtaaaataaaaagacaaatgaaaa

SEQ ID NO: 384794 - DNA, 2730 bp, Homo sapiens
tgcggccgccgggcgccggagccgcgtccccctgcgccgccccgggcctgccggccggaggagccaccatacaccccgggtcgccgagcgcctggccgccccgcgcccgcgccgcgctccgcctgtggctgggctgcgtctgcttcgcgctggtgcaggcggacagtccctcagccccagtgaacgtcaccgtcaggcacctcaaggccaactctgcagtggtgagctgggatgttctggaggatgaggttgtcatcggatttgccatctcccagcagaagaaggatgtgcggatgctgcgcttcatccaggaggtgaacaccaccacccgctcatgtgccctctgggacctggaggaggatacggagtacatagtccacgtgcaggccatctccattcagggccagagcccagccagcgagcctgtgctcttcaagaccccgcgtgaggctgagaagatggcctccaagaacaaagatgaggtaaccatgaaagagatggggaggaaccaacagctgcggacaggcgaggtgctgatcatcgtcgtggtcctgttcatgtgggcaggtgtcattgccctcttctgccgccagtatgacatcatcaaggacaatgaacccaataacaacaaggaaaaaaccaagagtgcatcagaaaccagcacaccagagcaccagggcggggggcttctccgcagcaagatatgaaaaccttttcagtgcttgccctcagcagctaagaagacagacagtagagaatgtgagaggatctcatggttctgatgatgattatccaacaaacatctggccctctctacatctcttccctccatctccttgtaccctctggcttactgtcctctctctggcgcactttcctgaagcctcttattaactcccatctccagaagcacctcaacaatgtcagtggctgaggctgcactcagagggatgactgctgggggtagactgggtgccaggggccatgggcccaggacccagtcttggccattcagttgagtgaggctgaaggctgggtttgaaaaggcaaaaagacaagacatccaggcagggcttctcttttctttccacaagggacaagagcttggcttatttaggctacagccctgctgctgctcccttccttcttctgtcctgtttccagccttgcaagaaggctattcacaattaggcctggctgcttctctcatttttttcctcccagtttccaaacaagccctcagtgaacatcattgaagcgtgactgcctgtctgcagggagaaggattccatttttcttctcagctggtccccaggcccacgggcacagggagagggacaactgcagcagtggggaggaggcacagctagctgcacagttctctcttctccttgtcctagtcagatgaaggaggctgcactacaaacccaaattctgcaaaaaaataaaaataagccacaaaactaaaaggcctggccccattctggaaaaggcaaagctgcatgagacacagccttctgcctcctcgcctctcctggactggcttcctctttgagaaaatgcacaaagccctgggagatgacaagcacaaggactgactcaagctgtgtctttcagaccaaggaacatcagagaagctgtggggctgcctgccaggcaggatcatggctgccatcaagccttttctggatccagccatcaaggacatgtttgtggtgtgatgcacacttttgcaagcgtgtaagatgttacctggtttgtctcttttggaaaacaaaaatcagaaggctgcattctagagggcagagaaattcccccgaagactgagctggttgcctgcatcctctatcttctttgacccttatgactgaaagatcatcagtttggaaggtactggtccaatttatttaggaagtatctcttggagtttcagaaatgctagcttggacaactgaaaagtcacatcacagctggcattctgggggctaccaaaacaccccttctggagtagaagctgctggaaggcaggcctgagccattcaccacggacaggaagagcagctctggctatcaccactggcctctggggtcttcatatcttgccatctcatccagggttccatgaaagttacccagggtcctcatgtccttccttagagcctgagtggtgtgaggtgacaggtctctctctccactgcccctttctggtttaaaaaaatggtgcttgatgagggaaggtagactcttccctaggactgacgagttacggctgccagatgcctgcatgggaagaggtggacatctgcatcttccattggtggtcaaggatgggtgtgggagaaccacacctagtgcaagcctggtactcagtaaatatttgttgaaatgaatgataagagcattggtccccaagccagagagccagaagccatcaccctaatgaccgccccttccttccggtctacaagagctctcaaggctgggtctgccaccactctgctttgcccaagtgtgacagcactggggaggagagacaggataaagggcagatgtcagcaatactaagggcttcctcatgggagggcatgaggctccactcattgtcttgtgacttccatccctgctgaatggggctgcaaggccaaggctccttaggggagaggtccttacctctgatccacttagagcaataaccactttttaaatgtaaaataaaaagacaaatgaaaa

SEQ ID NO: 384795 - DNA, 2661 bp, Homo sapiens
tgcggccgccgggcgccggagccgcgtccccctgcgccgccccgggcctgccggccggaggagccaccatacaccccgggtcgccgagcgcctggccgccccgcgcccgcgccgcgctccgcctgtggctgggctgcgtctgcttcgcgctggtgcaggcggacagtccctcagccccagtgaacgtcaccgtcaggcacctcaaggccaactctgcagtggtgagctgggatgttctggaggatgaggttgtcatcggatttgccatctcccagcagaagaaggatgtgcggatgctgcgcttcatccaggaggtgaacaccaccacccgctcatgtgccctctgggacctggaggaggatacggagtacatagtccacgtgcaggccatctccattcagggccagagcccagccagcgagcctgtgctcttcaagaccccgcgtgaggctgagaagatggcctccaagaacaaagatgaggtaaccatgaaagagatggggaggaaccaacagctgcggacaggcgaggtgctgatcatcgtcgtggtcctgttcatgtgggcaggtgtcattgccctcttctgccgccagtatgacatcatcaaggacaatgaacccaataacaacaaggaaaaaaccaagagtgcatcagaaaccagcacaccagagcaccagggcggggggcttctccgcagcaagatatgaaaaccttttcagtgcttgccctcagcagctaagaagacagacagtagagaatgtgagaggatctcatggttctgatgatgattatccaacaaacatctggccctctctacatctcttccctccatctccttgtaccctctggcttactgtcctctctctggcgcactttcctgaagcctcttattaactcccatctccagaagcacctcaacaatgtcagtggctgaggctgcactcagagggatgactgctgggggtagactgggtgccaggggccatgggcccaggacccagtcttggccattcagttgagtgaggctgaaggctgggtttgaaaaggcaaaaagacaagacatccaggcagggcttctcttttctttccacaagggacaagagcttggcttatttaggctacagccctgctgctgctcccttccttcttctgtcctgtttccagccttgcaagaaggctattcacaattaggcctggctgcttctctcatttttttcctcccagtttccaaacaagccctcagtgaacatcattgaagcgtgactgcctgtctgcagggagaaggattccatttttcttctcagctggtccccaggcccacgggcacagggagagggacaactgcagcagtggggaggaggcacagctagctgcacagttctctcttctccttgtcctagtcagatgaaggaggctgcactacaaacccaaattctgcaaaaaaataaaaataagccacaaaactaaaaggcctggccccattctggaaaaggcaaagctgcatgagacacagccttctgcctcctcgcctctcctggactggcttcctctttgagaaaatgcacaaagccctgggagatgacaagcacaaggactgactcaagctgtgtctttcagaccaaggaacatcagagaagctgtggggctgcctgccaggcaggatcatggctgccatcaagccttttctggatccagccatcaaggacatgtttgtggtgtgatgcacacttttgcaagcgtgtaagatgttacctggtttgtctcttttggaaaacaaaaatcagaaggctgcattctagagggcagagaaattcccccgaagactgagctggttgcctgcatcctctatcttctttgacccttatgactgaaagatcatcagtttggaaggtactggtccaatttatttaggaagtatctcttggagtttcagaaatgctagcttggacaactgaaaagtcacatcacagctggcattctgggggctaccaaaacaccccttctggagtagaagctgctggaaggcaggcctgagccattcaccacggacaggaagagcagctctggctatcaccactggcctctggggtcttcatatcttgccatctcatccagggttccatgaaagttacccagggtcctcatgtccttccttagagcctgagtggtgtgaggtgacaggtctctctctccactgcccctttctggtttaaaaaaatggtccttacctctgatccacttagagcaataaccactttttaaatgtaaaataaaaagacaaatgaaaaggcacatccttgtcttctggtaaatgcccaaatgttgccctctttttctggcaattggcagcaagtcaggatgtgtggaggagggagtcagtttctctccattttggcctgcagcttcttagggacatgcctgccagccaagctggagttggaagggaaatctcaaacagatgggggtgcacgtgtaggagaagaaaatagctgctccatcatcctattactgaggctcccccaaaccaagcttgggctgcctcactagataggtatgcaggctggtacttagtttttaaaacaaagggttttcccctctggatggggctgggtgcttttcctggccaaaggaatacaattcttgtttctccccagggtaagg

SEQ ID NO: 384796 - DNA, 910 bp, Homo sapiens
tgcggccgccgggcgccggagccgcgtccccctgcgccgccccgggcctgccggccggaggagccaccatacaccccgggtcgccgagcgcctggccgccccgcgcccgcgccgcgctccgcctgtggctgggctgcgtctgcttcgcgctggtgcaggcggacagtccctcagccccagtgaacgtcaccgtcaggcacctcaaggccaactctgcagtggtgagctgggatgttctggaggatgaggttgtcatcggatttgccatctcccagcagaagaaggatgtgcggatgctgcgcttcatccaggaggtgaacaccaccacccgctcatgtgccctctgggacctggaggaggatacggagtacatagtccacgtgcaggccatctccattcagggccagagcccagccagcgagcctgtgctcttcaagaccccgcgtgaggctgagaagatggcctccaagaacaaagatgaggtaaccatgaaagagatggggaggaaccaacagctgcggacaggcgaggtgctgatcatcgtcgtggtcctgttcatgtgggcaggtgtcattgccctcttctgccgccagtatgacatcatcaaggacaatgaacccaataacaacaaggaaaaaaccaagagtgcatcagaaaccagcacaccagagcaccagggcggggggcttctccgcagcaaggtgagggcaagacctgggcctgggtgggccaccctgtgcctcatgctctggtaatccctggactgcagagggggtcagctcggggactggcatggcgacagctgggcagagccagacttggctgctgcctgtgtgacacagggacactgcaagttgattttggatcctctccttttgcagggtgccaggggccagtggtgatttgaaga

SEQ ID NO: 384797 - DNA, 453 bp, Homo sapiens
ataaacttgttgttgttttgggagataccctgtttagcctgaaaggattgagatactgtaattgctatgggggaggggatggatagaaggaaggaggatttgaaggtgggatggggtcctcggtgaccacctaagaatggtgatagtggtttcggggcggtgaactggactttggctttggctttggctgggttggtcaggtgttgttttaagccctgggaagctgctccaaggtgcaaggttgatggttgatgcctatttaaagaagttctccaaaaagtaaaaacaaaacaaaactcttaaaaaggctacattaggctgggtgtgatggctcacacctgtcatctcagcactttgggaagctgaggtgggtggattgcttgagctcaggagttagagaccagcctgggcaaaaaaaagacccccgcccccacagctctaccaaaaatacaa

SEQ ID NO: 384798 - DNA, 403 bp, Homo sapiens
agtgaaaactgatcaatcttcctgtctgtatttataagccaggccccactcacttgacacaatccatttcaccaagggtggagatggcccaggctgttcctgcaacatggtttagtagaaggtggccaccttctgtcttcaaagctgatgtgtatagggaagaactaatttcacttcattttgcagctcttgagcattgaggttgatgattgctgggagccacagaggagttttccatgtgctaggaagattagacattgaagtctcccctaggaatctaagcccttggacctacacgtacctctgtctgccctgggcagctgtctccaggtggtgtaaaagcagcaggtgaaaaagtagattgctttcttctcctcccagaggtggtttgggattttgaagg

SEQ ID NO: 384799 - DNA, 450 bp, Homo sapiens
tgatttaaatacttactattaaaataaaaatgtttgaaaactactgaccaggtttcccacaacctcagctttcctctacgtaagattttacttgcatctaaaaaatctctgacatacctgttaggatcccatttgtgaggtcctttatcgattacatgattattagtccatgtctgagttagacgctgtctttcaaagccttcatttcaaattcatttagttaccagtttttcacactagataaattatttggagtctttcattagaatttattttcctaagcataagcccctcttttccctataattttcatttgttcttcactgcttaccaaattatgggcaatctctgtatcctggcattttaaatcttcgatcacatggcaccagaactgtctaccactgcatgcctacatgtgccttagagtgcagtagagctgagggccaggac

SEQ ID NO: 384800 - DNA, 595 bp, Homo sapiens
gcttaactctgatctactgagtgttgtcagagcatctgtttctaagacattaagaatggttaaaaggagcttcttggctcatggtcaagtgagtgtttttaacaaagtgagtggtcaaaatactaagtcgattctggtatatctacaacatggatgaacctctaggacttcatgctaaatgaaatgtcagtcataaaaggacaaatacgtcctaatgctttgtgaggcaaaggtggtaggcttgtcaaaggccaggagtttggagaccagcctgggcaacatagtgagatcctgtctctacaaaaaatttaaaaattagccaggtgaggtgacatatgcctgtagtcccagctacttgggagactaaggtaggaggatcacttgagctgaggagttaaggctgcagtgagctatgaatgcactactgcactctaacctgggcaacagagcaagatcctgtgtctaaaaaaaaaaatgaataaaataaagttaaaaggatagatactgtaagattctacttatttgaattacttaaaataatcaaaattatacaggcagaaaataagatggtggttgtcagacttggggaggcaga

SEQ ID NO: 384801 - DNA, 414 bp, Homo sapiens
cctgggtggacaccaccagccaccagtccctggcatgcccagtgatcctggttccctggcttgtaggggctccagagcctgcttcctggttcctcaagggcagatattggacactccttatttgtcaccaaaggatgactgtaggccgtgtgctggcctttctttctaagaagctgctttgagctcctggactcacctgaggctccctgggggatgacactcagttctgtcactgtcaaggatgcagagagctggtggtaggtgggaagcatggtgtccacctgcctgctgaccactggacgctgctccatgctgaagaaaagtgacagtctccaggggacatttcagccatgctgaaagggaggctggcagtggtcatttggcccggatctaacatggcacctcgtctccaca

SEQ ID NO: 384802 - DNA, 2485 bp, Homo sapiens
  misc_feature (961)..(964): n is a, c, g, or t
  misc_feature (1355)..(1356): n is a, c, g, or t
  misc_feature (1481)..(1482): n is a, c, g, or t
tggggttggggaagtgcggtgactgggaaatgctgagctaggggcaggaggcatgggcgggacagtgttctgtgcccccttctagagcctaaatttgttgcccgagttcctccgggaagcgctccgggtagattctcggggccgggagctgagatccctgggcggggagcgggggaagggatggggctgaggacagcgaagaagagggggcttgggggaggggggaaatggaagagagaggagggaggaggtacaagaggaaggagagaagtgcggccagcttgctttctccagtcgggtggccgcggggacccgggcgacgtcggaggccctgccgggaacccaggctgcagcccccacccccgcgctgcgacacgccccccaccccttccggctcacacccccgcccacactcctgagtggtgcggtgcagcgtcggccgaggcagcagagccgaggagagcaggtccacacctctgcatccctgcaccaggactcaccaagacgcccatcctggaaaaggtcccccgtaagatggcagcaaaaactcccagcagtgaggagtctgggctgcccaaactgcccgtgcccccgctgcagcagaccctggccacgtacctgcagtgcatgcgacacttggtgtctgaggagcagttcaggaagagccaggccattgtgcagcagtttggggcccctggtggcctcggcgagaccctgcagcagaaactcctggagcggcaggagaagacagccaactgggtgtctgagtactggctgaatgacatgtatctcaacaaccgcctggccctgcctgtcaactccagccctgccgtgatctttgctcggcagcacttccctggcaccgatgaccagctgaggtttgcagccagcctcatctctggtgtactcagctacaaggccctgctggacagccactccattcccactgactgtgccaaannnnagctgtcagggcagcccctttgcatgaagcaatactatgggctcttctcctcctaccggctccccggccatacccaggacacgctggtggctcagaacagcagcatcatgccggagcctgagcacgtcatcgtagcctgctgcaatcagttctttgtcttggatgttgtcattaatttccgccgtctcagtgagggggatctgttcactcagttgagaaagatagtcaaaatggcttccaacgaggacgagcgtttgcctccaattggcctgctgacgtctgacgggaggagcgagtgggccgaggccaggacggtcctcgtgaaagactccaccaaccgggactcgctggacatgattgagcgctgcatctgccttgtatgcctggacgnnccaggaggcgtggagctcagcgacacccacagggcactccagctccttcacggcggaggctacagcaagaacggggccaatcgctggtacgacaagtccctgcagtttgtggtgggccgagacgnnacctgcggtgtggtgtgcgaacactccccattcgatggcatcgtcctggtgcagtgcactgagcatctgctcaagcacatgacgcagagcagcaggaagctgatccgagcagactccgtcagcgagctccccgccccccggaggctgcggtggaaatgctccccggaaattcaaggccacttagcctcctcggcagaaaaacttcaacgaatagtaaagaaccttgacttcattgtctataagtttgacaactatgggaaaacattcattaagaagcagaaatgcagccctgatgccttcatccaggtggccctccagctggccttctacaggctccaccgaagactggtgcccacctacgagagcgcgtccatccgccgattccaggagggacgcgtggacaacatcagatcggccactccagaggcactggcttttgtgagagccgtgactgaccacaaggctgctgtgccagcttctgagaagcttctgctcctgaaggatgccatccgtgcccagactgcatacacagtcatggccataacagggatggccattgacaaccacctgctggcactgcgggagctggcccgggccatgtgcaaggagctgcccgagatgttcatggatgaaacctacctgatgagcaaccggtttgtcctctccactagccaggtgcccacaaccacggagatgttctgctgctatggtcctgtggtcccaaatgggtatggtgcctgctacaacccccagccagagaccatccttttctgcatctctagctttcacagctgcaaagagacttcttctagcaagtttgcaaaagctgtggaagaaagcctcattgacatgagagacctctgcagtctgctgccgcctactgagagcaagccattggcaacaaaggaaaaagccacgaggcccagccagggacaccaaccttgactcctgccactaggtttcacctcccaaacccagcctctagaacagccagaccctgcag

SEQ ID NO: 384803 - DNA, 2286 bp, Homo sapiens
  misc_feature (762)..(765): n is a, c, g, or t
  misc_feature (1156)..(1157): n is a, c, g, or t
  misc_feature (1282)..(1283): n is a, c, g, or t
cccgccccgttgaggctttgagaaaggagtaggagcctagcattccggcagaggaagaaaaacggcccatcttttagagtccgacctctggaaattcgggtggccgcggggacccgggcgacgtcggaggccctgccgggaacccaggctgcagcccccacccccgcgctgcgacacgccccccaccccttccggctcacacccccgcccacactcctgagtggtgcggtgcagcgtcggccgaggcagcagagccgaggagagcaggtccacacctctgcatccctgcaccaggactcaccaagacgcccatcctggaaaaggtcccccgtaagatggcagcaaaaactcccagcagtgaggagtctgggctgcccaaactgcccgtgcccccgctgcagcagaccctggccacgtacctgcagtgcatgcgacacttggtgtctgaggagcagttcaggaagagccaggccattgtgcagcagtttggggcccctggtggcctcggcgagaccctgcagcagaaactcctggagcggcaggagaagacagccaactgggtgtctgagtactggctgaatgacatgtatctcaacaaccgcctggccctgcctgtcaactccagccctgccgtgatctttgctcggcagcacttccctggcaccgatgaccagctgaggtttgcagccagcctcatctctggtgtactcagctacaaggccctgctggacagccactccattcccactgactgtgccaaannnnagctgtcagggcagcccctttgcatgaagcaatactatgggctcttctcctcctaccggctccccggccatacccaggacacgctggtggctcagaacagcagcatcatgccggagcctgagcacgtcatcgtagcctgctgcaatcagttctttgtcttggatgttgtcattaatttccgccgtctcagtgagggggatctgttcactcagttgagaaagatagtcaaaatggcttccaacgaggacgagcgtttgcctccaattggcctgctgacgtctgacgggaggagcgagtgggccgaggccaggacggtcctcgtgaaagactccaccaaccgggactcgctggacatgattgagcgctgcatctgccttgtatgcctggacgnnccaggaggcgtggagctcagcgacacccacagggcactccagctccttcacggcggaggctacagcaagaacggggccaatcgctggtacgacaagtccctgcagtttgtggtgggccgagacgnnacctgcggtgtggtgtgcgaacactccccattcgatggcatcgtcctggtgcagtgcactgagcatctgctcaagcacatgacgcagagcagcaggaagctgatccgagcagactccgtcagcgagctccccgccccccggaggctgcggtggaaatgctccccggaaattcaaggccacttagcctcctcggcagaaaaacttcaacgaatagtaaagaaccttgacttcattgtctataagtttgacaactatgggaaaacattcattaagaagcagaaatgcagccctgatgccttcatccaggtggccctccagctggccttctacaggctccaccgaagactggtgcccacctacgagagcgcgtccatccgccgattccaggagggacgcgtggacaacatcagatcggccactccagaggcactggcttttgtgagagccgtgactgaccacaaggctgctgtgccagcttctgagaagcttctgctcctgaaggatgccatccgtgcccagactgcatacacagtcatggccataacagggatggccattgacaaccacctgctggcactgcgggagctggcccgggccatgtgcaaggagctgcccgagatgttcatggatgaaacctacctgatgagcaaccggtttgtcctctccactagccaggtgcccacaaccacggagatgttctgctgctatggtcctgtggtcccaaatgggtatggtgcctgctacaacccccagccagagaccatccttttctgcatctctagctttcacagctgcaaagagacttcttctagcaagtttgcaaaagctgtggaagaaagcctcattgacatgagagacctctgcagtctgctgccgcctactgagagcaagccattggcaacaaaggaaaaagccacgaggcccagccagggacaccaaccttgactcctgccactaggtttcacctcccaaacccagcctctagaacagccagaccctgcag

SEQ ID NO: 384804 - DNA, 2555 bp, Homo sapiens
  misc_feature (1031)..(1034): n is a, c, g, or t
  misc_feature (1425)..(1426): n is a, c, g, or t
  misc_feature (1551)..(1552): n is a, c, g, or t
tggggttggggaagtgcggtgactgggaaatgctgagctaggggcaggaggcatgggcgggacagtgttctgtgcccccttctagagcctaaatttgttgcccgagttcctccgggaagcgctccgggtagattctcggggccgggagctgagatccctgggcggggagcgggggaagggatggggctgaggacagcgaagaagagggggcttgggggaggggggaaatggaagagagaggagggaggaggtacaagaggaaggagagaagtgcggccagcttgctttctccagtcgggtggccgcggggacccgggcgacgtcggaggccctgccgggaacccaggctgcagcccccacccccgcgctgcgacacgccccccaccccttccggctcacacccccgcccacactcctgagtggtgcggtgcagcgtcggccgaggcagcagagccgaggagagcagtgagggaattcaccctactccacaccagagatgtggccggaatgcagagatgaagcactgagcacagtaggtccacacctctgcatccctgcaccaggactcaccaagacgcccatcctggaaaaggtcccccgtaagatggcagcaaaaactcccagcagtgaggagtctgggctgcccaaactgcccgtgcccccgctgcagcagaccctggccacgtacctgcagtgcatgcgacacttggtgtctgaggagcagttcaggaagagccaggccattgtgcagcagtttggggcccctggtggcctcggcgagaccctgcagcagaaactcctggagcggcaggagaagacagccaactgggtgtctgagtactggctgaatgacatgtatctcaacaaccgcctggccctgcctgtcaactccagccctgccgtgatctttgctcggcagcacttccctggcaccgatgaccagctgaggtttgcagccagcctcatctctggtgtactcagctacaaggccctgctggacagccactccattcccactgactgtgccaaannnnagctgtcagggcagcccctttgcatgaagcaatactatgggctcttctcctcctaccggctccccggccatacccaggacacgctggtggctcagaacagcagcatcatgccggagcctgagcacgtcatcgtagcctgctgcaatcagttctttgtcttggatgttgtcattaatttccgccgtctcagtgagggggatctgttcactcagttgagaaagatagtcaaaatggcttccaacgaggacgagcgtttgcctccaattggcctgctgacgtctgacgggaggagcgagtgggccgaggccaggacggtcctcgtgaaagactccaccaaccgggactcgctggacatgattgagcgctgcatctgccttgtatgcctggacgnnccaggaggcgtggagctcagcgacacccacagggcactccagctccttcacggcggaggctacagcaagaacggggccaatcgctggtacgacaagtccctgcagtttgtggtgggccgagacgnnacctgcggtgtggtgtgcgaacactccccattcgatggcatcgtcctggtgcagtgcactgagcatctgctcaagcacatgacgcagagcagcaggaagctgatccgagcagactccgtcagcgagctccccgccccccggaggctgcggtggaaatgctccccggaaattcaaggccacttagcctcctcggcagaaaaacttcaacgaatagtaaagaaccttgacttcattgtctataagtttgacaactatgggaaaacattcattaagaagcagaaatgcagccctgatgccttcatccaggtggccctccagctggccttctacaggctccaccgaagactggtgcccacctacgagagcgcgtccatccgccgattccaggagggacgcgtggacaacatcagatcggccactccagaggcactggcttttgtgagagccgtgactgaccacaaggctgctgtgccagcttctgagaagcttctgctcctgaaggatgccatccgtgcccagactgcatacacagtcatggccataacagggatggccattgacaaccacctgctggcactgcgggagctggcccgggccatgtgcaaggagctgcccgagatgttcatggatgaaacctacctgatgagcaaccggtttgtcctctccactagccaggtgcccacaaccacggagatgttctgctgctatggtcctgtggtcccaaatgggtatggtgcctgctacaacccccagccagagaccatccttttctgcatctctagctttcacagctgcaaagagacttcttctagcaagtttgcaaaagctgtggaagaaagcctcattgacatgagagacctctgcagtctgctgccgcctactgagagcaagccattggcaacaaaggaaaaagccacgaggcccagccagggacaccaaccttgactcctgccactaggtttcacctcccaaacccagcctctagaacagccagaccctgcag

SEQ ID NO: 384805 - DNA, 597 bp, Homo sapiens
ggaggcctggcgatgcccaagaacgcagtggtcatcctgcgctatgggccctacagcgcggcaggcctaccggtggagcaccacaccttccgcctgcagggcctgcaagctgtgttggccatagatggacatgaggtcatcctagagaagatagaagactggaatgtggtggaactcatggtgaatgaagaagtcatcttccactgcaacattaaggacttggagttcggaggcgatggtaaactagacccactgtgtgaaaaggccaggatagccgtgctgaatgcctactgatctcctcatggaacaggcatctcaagtcggcacaacagcagctgccccagccattctatgatgcaggcagaagtggctgtgccacggtgtggacactgggctctgctagtcagaacagggcaactcgggcctgacctccagcttacgcagcctcaggattgtcacctggctgcacaggagcccacagaaataataaaaaccacatcatttataacatgtctcaatctcaacccatagggagagccctccaatatcaggtacacattgagctgaaggaaacaataaaatgcaatcaaataaaaa

SEQ ID NO: 384806 - DNA, 922 bp, Homo sapiens
ggcagggactacgtccgcaccttccagaacgctaggacacagaccaggctctagaagcccggggaaaccccagatgcatgcatactgttttgcatgcaataaaaacatcttttctttttcttcctcagaatagtaaagaaccttgacttcattgtctataagtttgacaactatgggaaaacattcattaagaagcagaaatgcagccctgatgccttcatccaggtggccctccagctggccttctacaggctccaccgaagactggtgcccacctacgagagcgcgtccatccgccgattccaggagggacgcgtggacaacatcagatcggccactccagaggcactggcttttgtgagagccgtgactgaccacaaggctgctgtgccagcttctgagaagcttctgctcctgaaggatgccatccgtgcccagactgcatacacagtcatggccataacagggatggccattgacaaccacctgctggcactgcgggagctggcccgggccatgtgcaaggagctgcccgagatgttcatggatgaaacctacctgatgagcaaccggtttgtcctctccactagccaggtgcccacaaccacggagatgttctgctgctatggtcctgtggtcccaaatgggtatggtgcctgctacaacccccagccagagaccatccttttctgcatctctagctttcacagctgcaaagagacttcttctagcaagtttgcaaaagctgtggaagaaagcctcattgacatgagagacctctgcagtctgctgccgcctactgagagcaagccattggcaacaaaggaaaaagccacgaggcccagccagggacaccaaccttgactcctgccactaggtttcacctcccaaacccagcctctagaacagccagaccctgcag

SEQ ID NO: 384807 - DNA, 2950 bp, Homo sapiens
  misc_feature (223)..(223): n is a, c, g, or t
  misc_feature (232)..(232): n is a, c, g, or t
  misc_feature (635)..(635): n is a, c, g, or t
  misc_feature (1266)..(1269): n is a, c, g, or t
  misc_feature (1660)..(1661): n is a, c, g, or t
  misc_feature (1786)..(1787): n is a, c, g, or t
cccgccccgttgaggctttgagaaaggagtaggagcctagcattccggcagaggaagaaaaacggcccatcttttagagtccgacctctggaaatgtgtgtatgatgtgatgtgtgtgttcattagagaacttgtcctaggaggagtgggggagccgtggttggtgtttgctgtatccctgtcagtcccgagggtctgagtcttgaagggagagatgcgagtntgggatctngtgccaacccccactgccaccctgtcctgagtgggagcagcggcccaggactgtcaggaaagtttcccatccttagtcccagccctgagagcctcaagccagcgttcgcgcaacactccatgtcccgaagaccgtagtctgatgatcgaggcagagtcttcccatcatagcgtgaagaggcggctggtcagggtcgcctgtgtgttagctgcgcctgtgagggtctgctctgctgttgtgcgcatgtctgtcctcgatctgcgagtcgggctgtgtgtgcctgggcggagtctgcctttgtcggtctgtctgtgctatttctgtgtgggggtctctatctggggtgggggatgcttttgtctgagaggagagcctgcctcttgccgcagtccttaagcatccncaggtctgccatcaggattgtcccaagtctgtagcaccccacctctgctccccaccccttccggctcacacccccgcccacactcctgagtggtgcggtgcagcgtcggccgaggcagcagagccgaggagagcaggtccacacctctgcatccctgcaccaggactcaccaagacgcccatcctggaaaaggtcccccgtaagatggcagcaaaaactcccagcagtgaggagtctgggctgcccaaactgcccgtgcccccgctgcagcagaccctggccacgtacctgcagtgcatgcgacacttggtgtctgaggagcagttcaggaagagccaggccattgtgcagcagtttggggcccctggtggcctcggcgagaccctgcagcagaaactcctggagcggcaggagaagacagccaactgggtgtctgagtactggctgaatgacatgtatctcaacaaccgcctggccctgcctgtcaactccagccctgccgtgatctttgctcggcagcacttccctggcaccgatgaccagctgaggtttgcagccagcctcatctctggtgtactcagctacaaggccctgctggacagccactccattcccactgactgtgccaaannnnagctgtcagggcagcccctttgcatgaagcaatactatgggctcttctcctcctaccggctccccggccatacccaggacacgctggtggctcagaacagcagcatcatgccggagcctgagcacgtcatcgtagcctgctgcaatcagttctttgtcttggatgttgtcattaatttccgccgtctcagtgagggggatctgttcactcagttgagaaagatagtcaaaatggcttccaacgaggacgagcgtttgcctccaattggcctgctgacgtctgacgggaggagcgagtgggccgaggccaggacggtcctcgtgaaagactccaccaaccgggactcgctggacatgattgagcgctgcatctgccttgtatgcctggacgnnccaggaggcgtggagctcagcgacacccacagggcactccagctccttcacggcggaggctacagcaagaacggggccaatcgctggtacgacaagtccctgcagtttgtggtgggccgagacgnnacctgcggtgtggtgtgcgaacactccccattcgatggcatcgtcctggtgcagtgcactgagcatctgctcaagcacatgacgcagagcagcaggaagctgatccgagcagactccgtcagcgagctccccgccccccggaggctgcggtggaaatgctccccggaaattcaaggccacttagcctcctcggcagaaaaacttcaacgaatagtaaagaaccttgacttcattgtctataagtttgacaactatgggaaaacattcattaagaagcagaaatgcagccctgatgccttcatccaggtggccctccagctggccttctacaggctccaccgaagactggtgcccacctacgagagcgcgtccatccgccgattccaggagggacgcgtggacaacatcagatcggccactccagaggcactggcttttgtgagagccgtgactgaccacaaggctgctgtgccagcttctgagaagcttctgctcctgaaggatgccatccgtgcccagactgcatacacagtcatggccataacagggatggccattgacaaccacctgctggcactgcgggagctggcccgggccatgtgcaaggagctgcccgagatgttcatggatgaaacctacctgatgagcaaccggtttgtcctctccactagccagctgtgttggccatagatggacatgaggtcatcctagagaagatagaagactggaatgtggtggaactcatggtgaatgaagaagtcatcttccactgcaacattaaggacttggagttcggaggcgatggtaaactagacccactgtgtgaaaaggccaggatagccgtgctgaatgcctactgatctcctcatggaacaggcatctcaagtcggcacaacagcagctgccccagccattctatgatgcaggcagaagtggctgtgccacggtgtggacactgggctctgctagtcagaacagggcaactcgggcctgacctccagcttacgcagcctcaggattgtcacctggctgcacaggagcccacagaaataataaaaaccacatcatttataacatgtctcaatctcaacccatagggagagccctccaatatcaggtacacattgagctgaaggaaacaataaaatgcaatcaaataaaaa

SEQ ID NO: 384808 - DNA, 2705 bp, Homo sapiens
  misc_feature (223)..(223): n is a, c, g, or t
  misc_feature (232)..(232): n is a, c, g, or t
  misc_feature (635)..(635): n is a, c, g, or t
  misc_feature (1266)..(1269): n is a, c, g, or t
  misc_feature (1660)..(1661): n is a, c, g, or t
  misc_feature (1786)..(1787): n is a, c, g, or t
cccgccccgttgaggctttgagaaaggagtaggagcctagcattccggcagaggaagaaaaacggcccatcttttagagtccgacctctggaaatgtgtgtatgatgtgatgtgtgtgttcattagagaacttgtcctaggaggagtgggggagccgtggttggtgtttgctgtatccctgtcagtcccgagggtctgagtcttgaagggagagatgcgagtntgggatctngtgccaacccccactgccaccctgtcctgagtgggagcagcggcccaggactgtcaggaaagtttcccatccttagtcccagccctgagagcctcaagccagcgttcgcgcaacactccatgtcccgaagaccgtagtctgatgatcgaggcagagtcttcccatcatagcgtgaagaggcggctggtcagggtcgcctgtgtgttagctgcgcctgtgagggtctgctctgctgttgtgcgcatgtctgtcctcgatctgcgagtcgggctgtgtgtgcctgggcggagtctgcctttgtcggtctgtctgtgctatttctgtgtgggggtctctatctggggtgggggatgcttttgtctgagaggagagcctgcctcttgccgcagtccttaagcatccncaggtctgccatcaggattgtcccaagtctgtagcaccccacctctgctccccaccccttccggctcacacccccgcccacactcctgagtggtgcggtgcagcgtcggccgaggcagcagagccgaggagagcaggtccacacctctgcatccctgcaccaggactcaccaagacgcccatcctggaaaaggtcccccgtaagatggcagcaaaaactcccagcagtgaggagtctgggctgcccaaactgcccgtgcccccgctgcagcagaccctggccacgtacctgcagtgcatgcgacacttggtgtctgaggagcagttcaggaagagccaggccattgtgcagcagtttggggcccctggtggcctcggcgagaccctgcagcagaaactcctggagcggcaggagaagacagccaactgggtgtctgagtactggctgaatgacatgtatctcaacaaccgcctggccctgcctgtcaactccagccctgccgtgatctttgctcggcagcacttccctggcaccgatgaccagctgaggtttgcagccagcctcatctctggtgtactcagctacaaggccctgctggacagccactccattcccactgactgtgccaaannnnagctgtcagggcagcccctttgcatgaagcaatactatgggctcttctcctcctaccggctccccggccatacccaggacacgctggtggctcagaacagcagcatcatgccggagcctgagcacgtcatcgtagcctgctgcaatcagttctttgtcttggatgttgtcattaatttccgccgtctcagtgagggggatctgttcactcagttgagaaagatagtcaaaatggcttccaacgaggacgagcgtttgcctccaattggcctgctgacgtctgacgggaggagcgagtgggccgaggccaggacggtcctcgtgaaagactccaccaaccgggactcgctggacatgattgagcgctgcatctgccttgtatgcctggacgnnccaggaggcgtggagctcagcgacacccacagggcactccagctccttcacggcggaggctacagcaagaacggggccaatcgctggtacgacaagtccctgcagtttgtggtgggccgagacgnnacctgcggtgtggtgtgcgaacactccccattcgatggcatcgtcctggtgcagtgcactgagcatctgctcaagcacatgacgcagagcagcaggaagctgatccgagcagactccgtcagcgagctccccgccccccggaggctgcggtggaaatgctccccggaaattcaaggccacttagcctcctcggcagaaaaacttcaacgaatagtaaagaaccttgacttcattgtctataagtttgacaactatgggaaaacattcattaagaagcagaaatgcagccctgatgccttcatccaggtggccctccagctggccttctacaggctccaccgaagactggtgcccacctacgagagcgcgtccatccgccgattccaggagggacgcgtggacaacatcagatcggccactccagaggcactggcttttgtgagagccgtgactgaccacaaggctgctgtgccagcttctgagaagcttctgctcctgaaggatgccatccgtgcccagactgcatacacagtcatggccataacagggatggccattgacaaccacctgctggcactgcgggagctggcccgggccatgtgcaaggagctgcccgagatgttcatggatgaaacctacctgatgagcaaccggtttgtcctctccactagccagctgtgttggccatagatggacatgaggtcatcctagagaagatagaagactggaatgtggtggaactcatggtgaatgaagaagtcatcttccactgcaacattaaggacttggagttcggtaagccctttggcgatgcttccagccagcaatttgcctcctctgaggagtccctcaatttctagttgaaatgatcagtgtatcatgcctggattcaaattgggtttctttctgagtttgaaa

SEQ ID NO: 384809 - DNA, 2124 bp, Homo sapiens
  misc_feature (600)..(603): n is a, c, g, or t
  misc_feature (994)..(995): n is a, c, g, or t
  misc_feature (1120)..(1121): n is a, c, g, or t
tcaacgccgctctggggacgcgtcaggcccagcgcacagcctgggcagctcagcctgtcagctgagcacgggcgcctcaaggggtgcggccctctcagaaggaaggtccacacctctgcatccctgcaccaggactcaccaagacgcccatcctggaaaaggtcccccgtaagatggcagcaaaaactcccagcagtgaggagtctgggctgcccaaactgcccgtgcccccgctgcagcagaccctggccacgtacctgcagtgcatgcgacacttggtgtctgaggagcagttcaggaagagccaggccattgtgcagcagtttggggcccctggtggcctcggcgagaccctgcagcagaaactcctggagcggcaggagaagacagccaactgggtgtctgagtactggctgaatgacatgtatctcaacaaccgcctggccctgcctgtcaactccagccctgccgtgatctttgctcggcagcacttccctggcaccgatgaccagctgaggtttgcagccagcctcatctctggtgtactcagctacaaggccctgctggacagccactccattcccactgactgtgccaaannnnagctgtcagggcagcccctttgcatgaagcaatactatgggctcttctcctcctaccggctccccggccatacccaggacacgctggtggctcagaacagcagcatcatgccggagcctgagcacgtcatcgtagcctgctgcaatcagttctttgtcttggatgttgtcattaatttccgccgtctcagtgagggggatctgttcactcagttgagaaagatagtcaaaatggcttccaacgaggacgagcgtttgcctccaattggcctgctgacgtctgacgggaggagcgagtgggccgaggccaggacggtcctcgtgaaagactccaccaaccgggactcgctggacatgattgagcgctgcatctgccttgtatgcctggacgnnccaggaggcgtggagctcagcgacacccacagggcactccagctccttcacggcggaggctacagcaagaacggggccaatcgctggtacgacaagtccctgcagtttgtggtgggccgagacgnnacctgcggtgtggtgtgcgaacactccccattcgatggcatcgtcctggtgcagtgcactgagcatctgctcaagcacatgacgcagagcagcaggaagctgatccgagcagactccgtcagcgagctccccgccccccggaggctgcggtggaaatgctccccggaaattcaaggccacttagcctcctcggcagaaaaacttcaacgaatagtaaagaaccttgacttcattgtctataagtttgacaactatgggaaaacattcattaagaagcagaaatgcagccctgatgccttcatccaggtggccctccagctggccttctacaggctccaccgaagactggtgcccacctacgagagcgcgtccatccgccgattccaggagggacgcgtggacaacatcagatcggccactccagaggcactggcttttgtgagagccgtgactgaccacaaggctgctgtgccagcttctgagaagcttctgctcctgaaggatgccatccgtgcccagactgcatacacagtcatggccataacagggatggccattgacaaccacctgctggcactgcgggagctggcccgggccatgtgcaaggagctgcccgagatgttcatggatgaaacctacctgatgagcaaccggtttgtcctctccactagccaggtgcccacaaccacggagatgttctgctgctatggtcctgtggtcccaaatgggtatggtgcctgctacaacccccagccagagaccatccttttctgcatctctagctttcacagctgcaaagagacttcttctagcaagtttgcaaaagctgtggaagaaagcctcattgacatgagagacctctgcagtctgctgccgcctactgagagcaagccattggcaacaaaggaaaaagccacgaggcccagccagggacaccaaccttgactcctgccactaggtttcacctcccaaacccagcctctagaacagccagaccctgcag

SEQ ID NO: 384810 - DNA, 2114 bp, Homo sapiens
  misc_feature (590)..(593): n is a, c, g, or t
  misc_feature (984)..(985): n is a, c, g, or t
  misc_feature (1110)..(1111): n is a, c, g, or t
cccgccccgttgaggctttgagaaaggagtaggagcctagcattccggcagaggaagaaaaacggcccatcttttagagtccgacctctggaaatgtccacacctctgcatccctgcaccaggactcaccaagacgcccatcctggaaaaggtcccccgtaagatggcagcaaaaactcccagcagtgaggagtctgggctgcccaaactgcccgtgcccccgctgcagcagaccctggccacgtacctgcagtgcatgcgacacttggtgtctgaggagcagttcaggaagagccaggccattgtgcagcagtttggggcccctggtggcctcggcgagaccctgcagcagaaactcctggagcggcaggagaagacagccaactgggtgtctgagtactggctgaatgacatgtatctcaacaaccgcctggccctgcctgtcaactccagccctgccgtgatctttgctcggcagcacttccctggcaccgatgaccagctgaggtttgcagccagcctcatctctggtgtactcagctacaaggccctgctggacagccactccattcccactgactgtgccaaannnnagctgtcagggcagcccctttgcatgaagcaatactatgggctcttctcctcctaccggctccccggccatacccaggacacgctggtggctcagaacagcagcatcatgccggagcctgagcacgtcatcgtagcctgctgcaatcagttctttgtcttggatgttgtcattaatttccgccgtctcagtgagggggatctgttcactcagttgagaaagatagtcaaaatggcttccaacgaggacgagcgtttgcctccaattggcctgctgacgtctgacgggaggagcgagtgggccgaggccaggacggtcctcgtgaaagactccaccaaccgggactcgctggacatgattgagcgctgcatctgccttgtatgcctggacgnnccaggaggcgtggagctcagcgacacccacagggcactccagctccttcacggcggaggctacagcaagaacggggccaatcgctggtacgacaagtccctgcagtttgtggtgggccgagacgnnacctgcggtgtggtgtgcgaacactccccattcgatggcatcgtcctggtgcagtgcactgagcatctgctcaagcacatgacgcagagcagcaggaagctgatccgagcagactccgtcagcgagctccccgccccccggaggctgcggtggaaatgctccccggaaattcaaggccacttagcctcctcggcagaaaaacttcaacgaatagtaaagaaccttgacttcattgtctataagtttgacaactatgggaaaacattcattaagaagcagaaatgcagccctgatgccttcatccaggtggccctccagctggccttctacaggctccaccgaagactggtgcccacctacgagagcgcgtccatccgccgattccaggagggacgcgtggacaacatcagatcggccactccagaggcactggcttttgtgagagccgtgactgaccacaaggctgctgtgccagcttctgagaagcttctgctcctgaaggatgccatccgtgcccagactgcatacacagtcatggccataacagggatggccattgacaaccacctgctggcactgcgggagctggcccgggccatgtgcaaggagctgcccgagatgttcatggatgaaacctacctgatgagcaaccggtttgtcctctccactagccaggtgcccacaaccacggagatgttctgctgctatggtcctgtggtcccaaatgggtatggtgcctgctacaacccccagccagagaccatccttttctgcatctctagctttcacagctgcaaagagacttcttctagcaagtttgcaaaagctgtggaagaaagcctcattgacatgagagacctctgcagtctgctgccgcctactgagagcaagccattggcaacaaaggaaaaagccacgaggcccagccagggacaccaaccttgactcctgccactaggtttcacctcccaaacccagcctctagaacagccagaccctgcag

SEQ ID NO: 384811 - DNA, 910 bp, Homo sapiens
ggaggcctggcgatgcccaagaacgcagtggtcatcctgcgctatgggccctacagcgcggcaggcctaccggtggagcaccacaccttccgcctgcagggcctgcaagctgtgttggccatagatggacatgaggtcatcctagagaagatagaagactggaatgtggtggaactcatggtgaatgaagaagtcatcttccactgcaacattaaggacttggagttcggcaagctcaccccaagtagtgacaagaggaccaccagcagctccaggctgacatttcaccagcttagcagcccgtgtaggatgaaagtttctcctttgcaacagttcccacaaaagacccaggacctgacttgtactgtattggcccagattggatcatgtatccatttccaaaccaatctttgtgacctgggttggccaggcctggatcacatgctcatttctggactagagaagaggggaactcagccctactgaaatcgacaggacagattgtgggaaaggggttcatttcacaaaaggaaaatggtgggtctgtttccagaataagggtgaatagatgctgagtcccccaaaacaaaaattgtcccacatctcccgaacctctccagctagatgtcccacaggcaacctgtggcaaacccaacgtgattctccccagctctgagtctctacaactgtattcccgtgttgaagttatgatcgatgaactacttactcaatttgggaacttggggacagcccccaccatcttctgaagtgaactgatctgcccttttctcaacaatgccagtgctttcgccctgctttgggatttggcatctcttccccaagctgtttaactggattcctatctcgttactctgtctccattatctcctcctgcaaaccactcgccaca

SEQ ID NO: 384812 - DNA, 2790 bp, Homo sapiens
  misc_feature (223)..(223): n is a, c, g, or t
  misc_feature (232)..(232): n is a, c, g, or t
  misc_feature (635)..(635): n is a, c, g, or t
  misc_feature (1266)..(1269): n is a, c, g, or t
  misc_feature (1660)..(1661): n is a, c, g, or t
  misc_feature (1786)..(1787): n is a, c, g, or t
cccgccccgttgaggctttgagaaaggagtaggagcctagcattccggcagaggaagaaaaacggcccatcttttagagtccgacctctggaaatgtgtgtatgatgtgatgtgtgtgttcattagagaacttgtcctaggaggagtgggggagccgtggttggtgtttgctgtatccctgtcagtcccgagggtctgagtcttgaagggagagatgcgagtntgggatctngtgccaacccccactgccaccctgtcctgagtgggagcagcggcccaggactgtcaggaaagtttcccatccttagtcccagccctgagagcctcaagccagcgttcgcgcaacactccatgtcccgaagaccgtagtctgatgatcgaggcagagtcttcccatcatagcgtgaagaggcggctggtcagggtcgcctgtgtgttagctgcgcctgtgagggtctgctctgctgttgtgcgcatgtctgtcctcgatctgcgagtcgggctgtgtgtgcctgggcggagtctgcctttgtcggtctgtctgtgctatttctgtgtgggggtctctatctggggtgggggatgcttttgtctgagaggagagcctgcctcttgccgcagtccttaagcatccncaggtctgccatcaggattgtcccaagtctgtagcaccccacctctgctccccaccccttccggctcacacccccgcccacactcctgagtggtgcggtgcagcgtcggccgaggcagcagagccgaggagagcaggtccacacctctgcatccctgcaccaggactcaccaagacgcccatcctggaaaaggtcccccgtaagatggcagcaaaaactcccagcagtgaggagtctgggctgcccaaactgcccgtgcccccgctgcagcagaccctggccacgtacctgcagtgcatgcgacacttggtgtctgaggagcagttcaggaagagccaggccattgtgcagcagtttggggcccctggtggcctcggcgagaccctgcagcagaaactcctggagcggcaggagaagacagccaactgggtgtctgagtactggctgaatgacatgtatctcaacaaccgcctggccctgcctgtcaactccagccctgccgtgatctttgctcggcagcacttccctggcaccgatgaccagctgaggtttgcagccagcctcatctctggtgtactcagctacaaggccctgctggacagccactccattcccactgactgtgccaaannnnagctgtcagggcagcccctttgcatgaagcaatactatgggctcttctcctcctaccggctccccggccatacccaggacacgctggtggctcagaacagcagcatcatgccggagcctgagcacgtcatcgtagcctgctgcaatcagttctttgtcttggatgttgtcattaatttccgccgtctcagtgagggggatctgttcactcagttgagaaagatagtcaaaatggcttccaacgaggacgagcgtttgcctccaattggcctgctgacgtctgacgggaggagcgagtgggccgaggccaggacggtcctcgtgaaagactccaccaaccgggactcgctggacatgattgagcgctgcatctgccttgtatgcctggacgnnccaggaggcgtggagctcagcgacacccacagggcactccagctccttcacggcggaggctacagcaagaacggggccaatcgctggtacgacaagtccctgcagtttgtggtgggccgagacgnnacctgcggtgtggtgtgcgaacactccccattcgatggcatcgtcctggtgcagtgcactgagcatctgctcaagcacatgacgcagagcagcaggaagctgatccgagcagactccgtcagcgagctccccgccccccggaggctgcggtggaaatgctccccggaaattcaaggccacttagcctcctcggcagaaaaacttcaacgaatagtaaagaaccttgacttcattgtctataagtttgacaactatgggaaaacattcattaagaagcagaaatgcagccctgatgccttcatccaggtggccctccagctggccttctacaggctccaccgaagactggtgcccacctacgagagcgcgtccatccgccgattccaggagggacgcgtggacaacatcagatcggccactccagaggcactggcttttgtgagagccgtgactgaccacaaggctgctgtgccagcttctgagaagcttctgctcctgaaggatgccatccgtgcccagactgcatacacagtcatggccataacagggatggccattgacaaccacctgctggcactgcgggagctggcccgggccatgtgcaaggagctgcccgagatgttcatggatgaaacctacctgatgagcaaccggtttgtcctctccactagccaggtgcccacaaccacggagatgttctgctgctatggtcctgtggtcccaaatgggtatggtgcctgctacaacccccagccagagaccatccttttctgcatctctagctttcacagctgcaaagagacttcttctagcaagtttgcaaaagctgtggaagaaagcctcattgacatgagagacctctgcagtctgctgccgcctactgagagcaagccattggcaacaaaggaaaaagccacgaggcccagccagggacaccaaccttgactcctgccactaggtttcacctcccaaacccagcctctagaacagccagaccctgcag

SEQ ID NO: 384813 - DNA, 691 bp, Homo sapiens
actgatgaggcaactgaggcagcttcagagagttcgagtaacctgcggatcacacaactaggaagtaagagagctggaacttgacgttgggctgttgacctccagaaatggtgttttttccagtactcagtgctgcctctgactccattgtgatggttgattttatgtgtcaacttgactgggcccaggggtacccagatatttggtcaaacattattctgggtgtttctgtgagggcgttttgggtgagattaacatttaaattggtagactgagtaaagcagatggccctctatgatatggccaggcctcatccaatccattgaaagcctgaatggaacaaaaaggccaaccctccctcagtaggaggaaatttcgtctgcttgactgcattcaaactaggacgtcaactttttcctgcctttggacttgaatagaaacatcagctcttcctagatcttcaacctgccaggcttcagattgaagtttataccatcagctctcttggttcttgggcctttggacccagactgtaagtgcaccatccgttctcttgggtcttgcttgctgactcaccctgcagatttggggacttatcagcctctaattctgtgagccaattccttctaatatatctctctatacgcatcctgtctcactggaagaaccctgatacggttaggctttgtgt

SEQ ID NO: 384814 - DNA, 371 bp, Homo sapiens
ccgattattcctttgcactggctaattcatgaagagcagggcttcagctcactacacactggacatgtaatttttagtaataggccattaaaactaaactctaccacaacaaaaatatgtgatacctaatggagttgactgtaccacaatatgctgcatgtatttttatttatagatagttatctgttatccatcagtctctccggctgctgccaccacacaaaatagagggaagcacttatgcatcatgagacatgtttgtttcaggattattaccattatggcagcttccaagttcaaatcatctcagagtagcttaacacactgtgtgtccacaagggcgtcttaacctgtaccagagaaaacaggag

SEQ ID NO: 384815 - DNA, 403 bp, Homo sapiens
gatccactctaattcttgtagactgctctgttgattgctttgtctcttggtttttgttttttgttttgttttacctttccttttttatgtgagttataattttggatttaatgttgggcattaggttatagggctatagcttttaagcctagagatgaacacatttctactggagttgagctaggtttggattctcttgctgttatggtgcaccagtggtttcaaatttgtttagtgttactttgtccttgagtttgctggaagattattctcagtgttcctgctccactcagttttaggccttctctgtgctcttgtgcttcagcagggtctcttcatgttctcatctctcctccaaatgtagattgctattggttgttcctcactgtttgctagcctggca

SEQ ID NO: 384816 - DNA, 242 bp, Homo sapiens
tgtggtggggaggggctgcagggagtcagaggacagggaccgtccctcccagctggaggcctctacatcaagcaagcaggggacctttctcccccagctcttccctcctgtgaccacagtgcctgaaatgcctccattagagagaccagaaaaagggcctgggagaccttggctcactgtggattttgggaatggtggagcaggggaccccatgatcttattacttgctaatatcccaccag

SEQ ID NO: 384817 - DNA, 845 bp, Homo sapiens
tggtcaatgctctgaggaagaaccagtgaaaaggtggatgttaacacagaataagttacaggaagtatagtagaaattatagtagtttggattaatagatttaaggaggtatggtcaataatctcaaatgcctctcaagtgtgtttttgtattataagattttctaaataaaagtttctaaataaaacctaataatatttattttttaagagatagagtcttctattttgggagtggcggagatcgcggtccagtagagggatcttgctgtgttgctcatgctggagtgcagtggctattcacacatgtaatgatagtatactgcaactatgaactctagcaatgtttccagctcagcctcccacatagctgggactacaggtacatgtcaccatacctggtcataattattatttttaatgggaagcaatcgggagtcttcacttcttaatctgtctctgacattgttagctaatgtcaagtgacttcttcccccggtcatgttacctgtcagtactcaatcatcatgtacacagtaagaaattgttttatcttttcactctgaaatgcagggatagaaggaaggcatcaaaaaattaacaatggattatttcatcacaatgttaagtgcaaggtgtcggtacagcaagataatcctagatatttatttgaccttggaatgccgttaggcatatatctacttaaaaattgatgtggctgggcatagtggctcacacctgtaatcccagcactttgggaggctgaggcaggcacataacttgagctacaagttcgagaccagcctgggcaatgtgacaagaccctgtcttttcactaaaagtacc

SEQ ID NO: 384818 - DNA, 165 bp, Homo sapiens
tttcacaaagaatttatgattgcttcaccaggtcactagtgagctaaagtcaaggaatgactacaatcttgtagcattttaaagtgattagaatttgagaaacttttactacattatgtgttactatcataagaacactcctttggggacatttgaataataaaa

SEQ ID NO: 384819 - DNA, 447 bp, Homo sapiens
aaaatgagctgggcatgtgcctgtagtcccagctacccaggaggctaaggcacaagaatcgcttgaacctgggagatagaggatgcagtgagctgagattgttccactgcactccagcctaggtgacagagccagaccctgtcttaaaaaaaaagttctgtgtgaatggtttttcaagtagcgctttgtcctactttccccatcttaaaagaaattggcttatgtatagtgattagagatggattttcatcatagatacaaactacctgaggaagtaaaactgtcacacacagacatcaaaactgtgagtgagaggagttcactgcagtgtgcagtagacagggaatgcttccccagaattacaaagttgtcagttatcccttgctaataaatccagtgtgtatttttcattcatcttgtaaaaaataaaacataatcagttaattt

SEQ ID NO: 384820 - DNA, 511 bp, Homo sapiens
ggctcaggtgatctacccgccttgacctcccaaagtgctagggattacagtcatgagccaccatgcctggcagggacacttattatctctgataacaggaagtctgaggtttgttaatttagtggctcattgtcaaatggcgtagagcctttgcatccttctgctctgttcttttatgttggttttgtcttcaagcttgttccccttatgaaagcctggctgcagccattttgagcatcaatccagacgtgacaatatctacaggcaggagaaggatcgcctcctgtgtgtcctttaaagaacaaggtgttaacatgccaggaactgtggctcctgactgtaatcccagtaatttgggaagccaaagtaggaggatcgcctgaggccaggagttccagaccagcctgggcaacatagcaagaccctatctctataaaataaaataataaaaattaagaaaacaaggtgttaaaagacaaaattaaagcaaatatagttttgcagattgtaa

SEQ ID NO: 384821 - DNA, 318 bp, Homo sapiens
agttagagtactaaagaggaaagaaccgtccaaagattccccttgccccagtcggtactcagcagaatactgatcagtgcagtcatgtgtgtggtaactactcaaggtcaagagaaacctatctgaaaggattcgaggatagtgcctgatgtgtgttctgggctgagaacagtgcctgttttcaccagttagactggcaaaacacatacaggcctatcttaatttattgtgctttggtttgctgcactttgtagatattgcttttttttttttttaaacaaattgatggtttgtggcagcctgcatccagcaagcctg

SEQ ID NO: 384822 - DNA, 745 bp, Homo sapiens
attgaataaacggcatgtttcaggatagagaagtggtttggaggaacaggtgattcctgtttgaaaagtggcagatagagagagttgctctgctggaaccccccggccccggcactagctaggctgcaactggtgatgaccctcatgaggaaatgggactcattaataaagagcctcaacttaaaaattgttgggtggagtggcgcacgcctgtaatcctagcactttgggaagccaaggtgggcggatagcttgagcccgggaggtcaagtctgcagtgagccaagatcatgccactgcactccagcctgagcgacagagtgagaccctgtctcaaaataaataaataaataaaatcaaaattggcaatttatatttgatatggacaggtttgatatagttcgttcccacgacttcctagtcacgtaagtacggtcatttttttctgtggggctggatggaggatgtagattctggaggaaataaaagtgtgtagagaatagatgaattacctagggagaggataattgggccaggattgtgactgtgggaatgcagagagagaaattagaacagaattgtaggggaattggttacaaatgggtctgggcatagagtaatgaagagatgaaaaggatgtgctttgaaaactacaagagtttgcagctcatagcactgaatgagttacacgctctgaatctttagttagcaaccactgttttctaaaatgaaataaagagaagaa

SEQ ID NO: 384823 - DNA, 495 bp, Homo sapiens
tttcctgctactttcctgcttggtgtcttgcctttgaggtgatgttttcctcagacccctctgtgtccttcttgcttcctgggggacctttgtggaactagaaaatagctgtttactagcctggagcaaggagcctgagtggtgagccggctgcataaggaaggcacagcagctcatgcttccctaatgcttcactaaacatgcaagacacaaaaggacccagagggctccagcaagggtctggggaccgaacgtctaagcttggaaactggctggacttgtatgggtaaaaccaagagtttttgtcttagctctcccgcctcacagctttgaactgggggtggctcttggtctgcatttcacatgcacggcacctggagaagtgctgtagcctggcacctctgtggggttctggccctggcggagactttgccggccacggcttctccaataggttgctggtggcatctccagcaattggtggtcattgagttg

SEQ ID NO: 384824 - DNA, 408 bp, Homo sapiens
gcctcccaaaatgctgggattataggcataagccactgcccctggccttgctttcttatgcttattgtttgcaggtgtatttttgtctactctttaactttctagctatctaagtaaatatttataaagcatgtctcttatcaacagtcttctagagtctgctgtttttttttttgtttttttttttaatggagtctcgctctgtctcccaggctggagtgcaatggcacaatcttggctcactgcatcctctgcctcctgggttcaagtgattctcctgcctcagcctcccaagtagctgggattacaggcttatgccaccatgcctggctaatttttgtatttttgtgttttctttagtagagacagggtttcaccatgttggccaggctggtctcgaactcctga

SEQ ID NO: 384825 - DNA, 604 bp, Homo sapiens
acccaggagccccgcgtgggccacacccaactcagagccggcctgagcgttcacggccaggcagcctcgcttccttgcagccaagggctgggggccaggctgctgttctgcactctggggtgggtgagggggaccctgggctgtttgctgtcccaagccccttctggaagttagaagcagcaaagggcccggggaagccgggcatgtgagaggggtgcgtccccaggtcccccagagggccctgtcgccgaggacctttctgaaggaagcagaagacgccatttcctctacttcacactgaactgtcccagccactgcatctagggggcattgggcggaagatggtgcatttccatggaccattttacacttaccttttaaagcaaagcctcattttctaaacccctgacttgtgaagcacaattcagcctccgggctgggccacgtggagagagaggatcttctcagcaaggcgagatcccgggcggcggctgacatcaggagcgccaccctgcgtcctttgctgctggttccttactggtttgtacggtcagcgctggaaacttctattaaatggatgcattctggaggcatgaagttacaa

SEQ ID NO: 384826 - DNA, 814 bp, Homo sapiens
gtaaaccaggtataaagaaatatgtctgtgagctcctgctctcaggtggctagctaaacgctcttggctacctcctggtcccaccatagggaaggctccctgcattacattgaaagtcatttatatttctgtgtctattcaccctaggtcttggtgaatgtgaagctatatggaacctttctagacaaagcaaatcataccttttgcaaatatagtaattgtctccagcttcccaataaaaggacaaagtataaaaaacaaacagaggccaggcgcagtggctcacgcctgtaatcctagaactttgggaagctgaggcaggcggatcatctgaggtcaggagttcgagaccaacctggccaacatggtgaaaccccgtctctactaaaaatacaaaaattagccgggtgtggtggtgcatgcctgtaatcccagctactcaggaggctgaggcaggagaatcgcttgaactcaggaggtggaggttgccgccacttggtgagccaagattgcgccactgcactccagcctgggcaacagagagagactctgtctcaaaaacaaacaaacaaaccagaaacaaaggagaatgaaaggatcgtcaaacttaggagaaaaacagaagaaatgcacatgagtgtatttgagtctaatgacctgtttgcatccactaagtcagagttttccaagccccctcacctgctccctttgtcatctttgaactgataccagggaaaaacttaattggtaaatttgaataagatgaagtatattgagaaatgcagaataaaaatagaaagtcaaaattaaggaa

SEQ ID NO: 384827 - DNA, 532 bp, Homo sapiens
cccgctatggtttccctctaacgctgtgtgacatcatcccccagttaccttttcctagaaaggggtgaaagttgtgctgggcacagtgggcaaaggagtgtacatgaagggccaggggccccctgggccaggtggcaaaaggctagacagtaagatggaccaggcctttctgatgtcagcctggactgaaaactgctggagttctcaggcagggtcaaggaatgctgttccgggcctatatggaagccacctgctcatctctcacccctgtacctaccccaaagccttgtgtggactgggattctagagctttctgccaagccctcgcatttggggtttggcaccagctcctctctgccctaatgggctgggttgccaagccagtgtctgctgagtggccagatgtctgcccactgcctgtttctctcgctgggggctgcagggggaggcctggcatcccaagctgaggccagaggctggccaggctgggagacagccagccctgatattatcacagaccttcagagggcgg

SEQ ID NO: 384828 - DNA, 2038 bp, Homo sapiens
  misc_feature (16)..(17): n is a, c, g, or t
aagtgctggtactgcnncggagtcggcgccgcccggagccgggagcgccgctccagcgaggcgcgggctgtggggccgccgcgtgcctggccccgctcgcccgtgccggccgctcgcccgccatgcctggcttcgactacaagttcctggagaagcccaagcgacggctgctgtgcccactgtgcgggaagcccatgcgcgagcctgtgcaggtttccacctgcggccaccgtttctgcgatacctgcctgcaggagttcctcagtgaaggagtcttcaagtgccctgaggaccagcttcctctggactatgccaagatctacccagacccggagctggaagtacaagtattgggcctgcctatccgctgcatccacagtgaggagggctgccgctggagtgggccactacgtcatctacagggccacctgaatacctgcagcttcaatgtcattccctgccctaatcgctgccccatgaagctgagccgccgtgatctacctgcacacttgcagcatgactgccccaagcggcgcctcaagtgcgagttttgtggctgtgacttcagtggggaggcctatgagagccatgagggtatgtgcccccaggagagtgtctactgtgagaataagtgtggtgcccgcatgatgcggcggctgctggcccagcatgccacctctgagtgccccaagcgcactcagccctgcacctactgcactaaggagttcgtctttgacaccatccagagccaccagtaccagtgcccaaggctgcctgttgcctgccccaaccaatgtggtgtgggcactgtggctcgggaggacctgccaggccatctgaaggacagctgtaacaccgccctggtgctctgcccattcaaagactccggctgcaagcacaggtgccctaagctggcaatggcacggcatgtggaggagagtgtgaagccacatctggccatgatgtgtgccctggtgagccggcaacggcaggagctgcaggagcttcggcgagagctggaggagctatcagtgggcagtgatggcgtgctcatctggaagattggcagctatggacggcggctacaggaggccaaggccaagcccaaccttgagtgcttcagcccagccttctacacacataagtatggttacaagctgcaggtgtctgcattcctcaatggcaatggcagtggtgagggcacacacctctcactgtacattcgtgtgctgcctggtgcctttgacaatctccttgagtggccctttgcccgccgtgtcaccttctccctgctggatcagagcgaccctgggctggctaaaccacagcacgtcactgagaccttccaccccgacccaaactggaagaatttccagaagccaggcacgtggcggggctccctggatgagagttctctgggctttggttatcccaagttcatctcccaccaggacattcgaaagcgaaactatgtgcgggatgatgcagtcttcatccgtgctgctgttgaactgccccggaagatcctcagctgagtgcaggtggggttcgaggggaaaggacgatggggcatgacctcagtcaggcactggctgaacttggagagggggccggacccccgtcagctgcttctgctgcctaggttctgttaccccatcctccctcccccagccaccaccctcaggtgcctccaattggtgcttcagccctggcccctgtggggaacaggtcttggggtcatgaagggctggaaacaagtgaccccagggcctgtctcccttcttgggtagggcagacatgccttggtgccggtcacactctacacggactgaggtgcctgctcaggtgctatgtcccaagagccataagggggtgggaattggggagggagaaagggtagttcaaagagtctgtcttgagatctgattttttccccctttacctagctgtgccccctctggttatttatttccttagtgccaggagggcacagcaggggagccctgatttttaataaatccggaattgtatttattaa

SEQ ID NO: 384829 - DNA, 314 bp, Homo sapiens
  misc_feature (18)..(18): n is a, c, g, or t
  misc_feature (51)..(51): n is a, c, g, or t
cggcacgaggctaggttntgttaccccatcctccctccccctcggcagtgnacacatttactctcctacagacatgccttggtgccggtcacactctacacggactgaggtgcctgctcaggtgctatgtcccaagagccataagggggtgggaattggggagggagaaagggtagttcaaagagtctgtcttgagatctgattttttccccctttacctagctgtgccccctctggttatttatttccttagtgccaggagggcacagcaggggagccctgatttttaataaatccggaattgtatttattaa

SEQ ID NO: 384830 - DNA, 2004 bp, Homo sapiens
gggctgtgagcgtaatccatggacggtgggcgttcgtggggccgccgcgtgcctggccccgctcgcccgtgccggccgctcgcccgccatgcctggcttcgactacaagttcctggagaagcccaagcgacggctgctgtgcccactgtgcgggaagcccatgcgcgagcctgtgcaggtttccacctgcggccaccgtttctgcgatacctgcctgcaggagttcctcagtgaaggagtcttcaagtgccctgaggaccagcttcctctggactatgccaagatctacccagacccggagctggaagtacaagtattgggcctgcctatccgctgcatccacagtgaggagggctgccgctggagtgggccactacgtcatctacagggccacctgaatacctgcagcttcaatgtcattccctgccctaatcgctgccccatgaagctgagccgccgtgatctacctgcacacttgcagcatgactgccccaagcggcgcctcaagtgcgagttttgtggctgtgacttcagtggggaggcctatgagagccatgagggtatgtgcccccaggagagtgtctactgtgagaataagtgtggtgcccgcatgatgcggcggctgctggcccagcatgccacctctgagtgccccaagcgcactcagccctgcacctactgcactaaggagttcgtctttgacaccatccagagccaccagtaccagtgcccaaggctgcctgttgcctgccccaaccaatgtggtgtgggcactgtggctcgggaggacctgccaggccatctgaaggacagctgtaacaccgccctggtgctctgcccattcaaagactccggctgcaagcacaggtgccctaagctggcaatggcacggcatgtggaggagagtgtgaagccacatctggccatgatgtgtgccctggtgagccggcaacggcaggagctgcaggagcttcggcgagagctggaggagctatcagtgggcagtgatggcgtgctcatctggaagattggcagctatggacggcggctacaggaggccaaggccaagcccaaccttgagtgcttcagcccagccttctacacacataagtatggttacaagctgcaggtgtctgcattcctcaatggcaatggcagtggtgagggcacacacctctcactgtacattcgtgtgctgcctggtgcctttgacaatctccttgagtggccctttgcccgccgtgtcaccttctccctgctggatcagagcgaccctgggctggctaaaccacagcacgtcactgagaccttccaccccgacccaaactggaagaatttccagaagccaggcacgtggcggggctccctggatgagagttctctgggctttggttatcccaagttcatctcccaccaggacattcgaaagcgaaactatgtgcgggatgatgcagtcttcatccgtgctgctgttgaactgccccggaagatcctcagctgagtgcaggtggggttcgaggggaaaggacgatggggcatgacctcagtcaggcactggctgaacttggagagggggccggacccccgtcagctgcttctgctgcctaggttctgttaccccatcctccctcccccagccaccaccctcaggtgcctccaattggtgcttcagccctggcccctgtggggaacaggtcttggggtcatgaagggctggaaacaagtgaccccagggcctgtctcccttcttgggtagggcagacatgccttggtgccggtcacactctacacggactgaggtgcctgctcaggtgctatgtcccaagagccataagggggtgggaattggggagggagaaagggtagttcaaagagtctgtcttgagatctgattttttccccctttacctagctgtgccccctctggttatttatttccttagtgccaggagggcacagcaggggagccctgatttttaataaatccggaattgtatttattaa

SEQ ID NO: 384831 - DNA, 1877 bp, Homo sapiens
ttcccaggacaggggctggggtcttctgggatcctggggaagtagagcccctcaggcctctgcttgcccttttgtctcatctaggctggttgggaaccggtctgtgaaggagtcttcaagtgccctgaggaccagcttcctctggactatgccaagatctacccagacccggagctggaagtacaagtattgggcctgcctatccgctgcatccacagtgaggagggctgccgctggagtgggccactacgtcatctacagggccacctgaatacctgcagcttcaatgtcattccctgccctaatcgctgccccatgaagctgagccgccgtgatctacctgcacacttgcagcatgactgccccaagcggcgcctcaagtgcgagttttgtggctgtgacttcagtggggaggcctatgagagccatgagggtatgtgcccccaggagagtgtctactgtgagaataagtgtggtgcccgcatgatgcggcggctgctggcccagcatgccacctctgagtgccccaagcgcactcagccctgcacctactgcactaaggagttcgtctttgacaccatccagagccaccagtaccagtgcccaaggctgcctgttgcctgccccaaccaatgtggtgtgggcactgtggctcgggaggacctgccaggccatctgaaggacagctgtaacaccgccctggtgctctgcccattcaaagactccggctgcaagcacaggtgccctaagctggcaatggcacggcatgtggaggagagtgtgaagccacatctggccatgatgtgtgccctggtgagccggcaacggcaggagctgcaggagcttcggcgagagctggaggagctatcagtgggcagtgatggcgtgctcatctggaagattggcagctatggacggcggctacaggaggccaaggccaagcccaaccttgagtgcttcagcccagccttctacacacataagtatggttacaagctgcaggtgtctgcattcctcaatggcaatggcagtggtgagggcacacacctctcactgtacattcgtgtgctgcctggtgcctttgacaatctccttgagtggccctttgcccgccgtgtcaccttctccctgctggatcagagcgaccctgggctggctaaaccacagcacgtcactgagaccttccaccccgacccaaactggaagaatttccagaagccaggcacgtggcggggctccctggatgagagttctctgggctttggttatcccaagttcatctcccaccaggacattcgaaagcgaaactatgtgcgggatgatgcagtcttcatccgtgctgctgttgaactgccccggaagatcctcagctgagtgcaggtggggttcgaggggaaaggacgatggggcatgacctcagtcaggcactggctgaacttggagagggggccggacccccgtcagctgcttctgctgcctaggttctgttaccccatcctccctcccccagccaccaccctcaggtgcctccaattggtgcttcagccctggcccctgtggggaacaggtcttggggtcatgaagggctggaaacaagtgaccccagggcctgtctcccttcttgggtagggcagacatgccttggtgccggtcacactctacacggactgaggtgcctgctcaggtgctatgtcccaagagccataagggggtgggaattggggagggagaaagggtagttcaaagagtctgtcttgagatctgattttttccccctttacctagctgtgccccctctggttatttatttccttagtgccaggagggcacagcaggggagccctgatttttaataaatccggaattgtatttattaa

SEQ ID NO: 384832 - DNA, 1970 bp, Homo sapiens
ttcccaggacaggggctggggtcttctgggatcctggggaagtagagcccctcaggcctctgcttgcccttttgtctcatctaggctggttgggaaccggtctggtgaggaagggaggctgcctcagtggagggggtggggccaggcctccctttcccctaatgagaaacctttttcctgcccctcccccatttcagtgaaggagtcttcaagtgccctgaggaccagcttcctctggactatgccaagatctacccagacccggagctggaagtacaagtattgggcctgcctatccgctgcatccacagtgaggagggctgccgctggagtgggccactacgtcatctacagggccacctgaatacctgcagcttcaatgtcattccctgccctaatcgctgccccatgaagctgagccgccgtgatctacctgcacacttgcagcatgactgccccaagcggcgcctcaagtgcgagttttgtggctgtgacttcagtggggaggcctatgagagccatgagggtatgtgcccccaggagagtgtctactgtgagaataagtgtggtgcccgcatgatgcggcggctgctggcccagcatgccacctctgagtgccccaagcgcactcagccctgcacctactgcactaaggagttcgtctttgacaccatccagagccaccagtaccagtgcccaaggctgcctgttgcctgccccaaccaatgtggtgtgggcactgtggctcgggaggacctgccaggccatctgaaggacagctgtaacaccgccctggtgctctgcccattcaaagactccggctgcaagcacaggtgccctaagctggcaatggcacggcatgtggaggagagtgtgaagccacatctggccatgatgtgtgccctggtgagccggcaacggcaggagctgcaggagcttcggcgagagctggaggagctatcagtgggcagtgatggcgtgctcatctggaagattggcagctatggacggcggctacaggaggccaaggccaagcccaaccttgagtgcttcagcccagccttctacacacataagtatggttacaagctgcaggtgtctgcattcctcaatggcaatggcagtggtgagggcacacacctctcactgtacattcgtgtgctgcctggtgcctttgacaatctccttgagtggccctttgcccgccgtgtcaccttctccctgctggatcagagcgaccctgggctggctaaaccacagcacgtcactgagaccttccaccccgacccaaactggaagaatttccagaagccaggcacgtggcggggctccctggatgagagttctctgggctttggttatcccaagttcatctcccaccaggacattcgaaagcgaaactatgtgcgggatgatgcagtcttcatccgtgctgctgttgaactgccccggaagatcctcagctgagtgcaggtggggttcgaggggaaaggacgatggggcatgacctcagtcaggcactggctgaacttggagagggggccggacccccgtcagctgcttctgctgcctaggttctgttaccccatcctccctcccccagccaccaccctcaggtgcctccaattggtgcttcagccctggcccctgtggggaacaggtcttggggtcatgaagggctggaaacaagtgaccccagggcctgtctcccttcttgggtagggcagacatgccttggtgccggtcacactctacacggactgaggtgcctgctcaggtgctatgtcccaagagccataagggggtgggaattggggagggagaaagggtagttcaaagagtctgtcttgagatctgattttttccccctttacctagctgtgccccctctggttatttatttccttagtgccaggagggcacagcaggggagccctgatttttaataaatccggaattgtatttattaa

SEQ ID NO: 384833 - DNA, 2059 bp, Homo sapiens
  misc_feature (16)..(17): n is a, c, g, or t
aagtgctggtactgcnncggagtcggcgccgcccggagccgggagcgccgctccagcgaggcgcgggctgtggggccgccgcgtgcctggccccgctcgcccgtgccggccgctcgcccgccatgcctggcttcgactacaagttcctggagaagcccaagcgacggctgctgtgcccactgtgcgggaagcccatgcgcgagcctgtgcaggtttccacctgcggccaccgtttctgcgatacctgcctgcaggagttcctcagtgaaggagtcttcaagtgccctgaggaccagcttcctctggactatgccaagttcccccatccctacccccagatctacccagacccggagctggaagtacaagtattgggcctgcctatccgctgcatccacagtgaggagggctgccgctggagtgggccactacgtcatctacagggccacctgaatacctgcagcttcaatgtcattccctgccctaatcgctgccccatgaagctgagccgccgtgatctacctgcacacttgcagcatgactgccccaagcggcgcctcaagtgcgagttttgtggctgtgacttcagtggggaggcctatgagagccatgagggtatgtgcccccaggagagtgtctactgtgagaataagtgtggtgcccgcatgatgcggcggctgctggcccagcatgccacctctgagtgccccaagcgcactcagccctgcacctactgcactaaggagttcgtctttgacaccatccagagccaccagtaccagtgcccaaggctgcctgttgcctgccccaaccaatgtggtgtgggcactgtggctcgggaggacctgccaggccatctgaaggacagctgtaacaccgccctggtgctctgcccattcaaagactccggctgcaagcacaggtgccctaagctggcaatggcacggcatgtggaggagagtgtgaagccacatctggccatgatgtgtgccctggtgagccggcaacggcaggagctgcaggagcttcggcgagagctggaggagctatcagtgggcagtgatggcgtgctcatctggaagattggcagctatggacggcggctacaggaggccaaggccaagcccaaccttgagtgcttcagcccagccttctacacacataagtatggttacaagctgcaggtgtctgcattcctcaatggcaatggcagtggtgagggcacacacctctcactgtacattcgtgtgctgcctggtgcctttgacaatctccttgagtggccctttgcccgccgtgtcaccttctccctgctggatcagagcgaccctgggctggctaaaccacagcacgtcactgagaccttccaccccgacccaaactggaagaatttccagaagccaggcacgtggcggggctccctggatgagagttctctgggctttggttatcccaagttcatctcccaccaggacattcgaaagcgaaactatgtgcgggatgatgcagtcttcatccgtgctgctgttgaactgccccggaagatcctcagctgagtgcaggtggggttcgaggggaaaggacgatggggcatgacctcagtcaggcactggctgaacttggagagggggccggacccccgtcagctgcttctgctgcctaggttctgttaccccatcctccctcccccagccaccaccctcaggtgcctccaattggtgcttcagccctggcccctgtggggaacaggtcttggggtcatgaagggctggaaacaagtgaccccagggcctgtctcccttcttgggtagggcagacatgccttggtgccggtcacactctacacggactgaggtgcctgctcaggtgctatgtcccaagagccataagggggtgggaattggggagggagaaagggtagttcaaagagtctgtcttgagatctgattttttccccctttacctagctgtgccccctctggttatttatttccttagtgccaggagggcacagcaggggagccctgatttttaataaatccggaattgtatttattaa

SEQ ID NO: 384834 - DNA, 2316 bp, Homo sapiens
  misc_feature (16)..(17): n is a, c, g, or t
aagtgctggtactgcnncggagtcggcgccgcccggagccgggagcgccgctccagcgaggcgcgggctgtggggccgccgcgtgcctggccccgctcgcccgtgccggccgctcgcccgccatgcctggcttcgactacaagttcctggagaagcccaagcgacggctgctgtgcccactgtgcgggaagcccatgcgcgagcctgtgcaggtttccacctgcggccaccgtttctgcgatacctgcctgcaggagttcctcagtgaaggagtcttcaagtgccctgaggaccagcttcctctggactatgccaagatctacccagacccggagctggaagtacaagtattgggcctgcctatccgctgcatccacagtgaggagggctgccgctggagtgggccactacgtcatctacagggccacctgaatacctgcagcttcaatgtcattccctgccctaatcgctgccccatgaagctgagccgccgtgatctacctgcacacttgcagcatgactgccccaagcggcgcctcaagtgcgagttttgtggctgtgacttcagtggggaggcctatgagagccatgagggtatgtgcccccaggagagtgtctactgtgagaataagtgtggtgcccgcatgatgcggcggctgctggcccagcatgccacctctgagtgccccaagcgcactcagccctgcacctactgcactaaggagttcgtctttgacaccatccagagccaccagtaccagtgcccaaggctgcctgttgcctgccccaaccaatgtggtgtgggcactgtggctcgggaggacctgccaggccatctgaaggacagctgtaacaccgccctggtgctctgcccattcaaagactccggctgcaagcacagggtgagatgccccttttcctgtcagcccccttttgcccttgaagccctagacagaggctcagcttctgatgtacttaggccttggtggtccctgctgtgctgctctgaaaccctcagtccttccctctgctgccagctccagcctcttcctaacaccctctgtcttcctcacgtagagctgggtgcctgctaccctgtacccactcctctcctctccctggacctccccctactgataactctcctcccttcccccatggcctggggctttgccaacagtgccctaagctggcaatggcacggcatgtggaggagagtgtgaagccacatctggccatgatgtgtgccctggtgagccggcaacggcaggagctgcaggagcttcggcgagagctggaggagctatcagtgggcagtgatggcgtgctcatctggaagattggcagctatggacggcggctacaggaggccaaggccaagcccaaccttgagtgcttcagcccagccttctacacacataagtatggttacaagctgcaggtgtctgcattcctcaatggcaatggcagtggtgagggcacacacctctcactgtacattcgtgtgctgcctggtgcctttgacaatctccttgagtggccctttgcccgccgtgtcaccttctccctgctggatcagagcgaccctgggctggctaaaccacagcacgtcactgagaccttccaccccgacccaaactggaagaatttccagaagccaggcacgtggcggggctccctggatgagagttctctgggctttggttatcccaagttcatctcccaccaggacattcgaaagcgaaactatgtgcgggatgatgcagtcttcatccgtgctgctgttgaactgccccggaagatcctcagctgagtgcaggtggggttcgaggggaaaggacgatggggcatgacctcagtcaggcactggctgaacttggagagggggccggacccccgtcagctgcttctgctgcctaggttctgttaccccatcctccctcccccagccaccaccctcaggtgcctccaattggtgcttcagccctggcccctgtggggaacaggtcttggggtcatgaagggctggaaacaagtgaccccagggcctgtctcccttcttgggtagggcagacatgccttggtgccggtcacactctacacggactgaggtgcctgctcaggtgctatgtcccaagagccataagggggtgggaattggggagggagaaagggtagttcaaagagtctgtcttgagatctgattttttccccctttacctagctgtgccccctctggttatttatttccttagtgccaggagggcacagcaggggagccctgatttttaataaatccggaattgtatttattaa

SEQ ID NO: 384835 - DNA, 1496 bp, Homo sapiens
tcaggcagtagaggctgggtgtgaatcggccgaggctatgagagccatgagggtatgtgcccccaggagagtgtctactgtgagaataagtgtggtgcccgcatgatgcggcggctgctggcccagcatgccacctctgagtgccccaagcgcactcagccctgcacctactgcactaaggagttcgtctttgacaccatccagagccaccagtaccagtgcccaaggctgcctgttgcctgccccaaccaatgtggtgtgggcactgtggctcgggaggacctgccaggccatctgaaggacagctgtaacaccgccctggtgctctgcccattcaaagactccggctgcaagcacaggtgccctaagctggcaatggcacggcatgtggaggagagtgtgaagccacatctggccatgatgtgtgccctggtgagccggcaacggcaggagctgcaggagcttcggcgagagctggaggagctatcagtgggcagtgatggcgtgctcatctggaagattggcagctatggacggcggctacaggaggccaaggccaagcccaaccttgagtgcttcagcccagccttctacacacataagtatggttacaagctgcaggtgtctgcattcctcaatggcaatggcagtggtgagggcacacacctctcactgtacattcgtgtgctgcctggtgcctttgacaatctccttgagtggccctttgcccgccgtgtcaccttctccctgctggatcagagcgaccctgggctggctaaaccacagcacgtcactgagaccttccaccccgacccaaactggaagaatttccagaagccaggcacgtggcggggctccctggatgagagttctctgggctttggttatcccaagttcatctcccaccaggacattcgaaagcgaaactatgtgcgggatgatgcagtcttcatccgtgctgctgttgaactgccccggaagatcctcagctgagtgcaggtggggttcgaggggaaaggacgatggggcatgacctcagtcaggcactggctgaacttggagagggggccggacccccgtcagctgcttctgctgcctaggttctgttaccccatcctccctcccccagccaccaccctcaggtgcctccaattggtgcttcagccctggcccctgtggggaacaggtcttggggtcatgaagggctggaaacaagtgaccccagggcctgtctcccttcttgggtagggcagacatgccttggtgccggtcacactctacacggactgaggtgcctgctcaggtgctatgtcccaagagccataagggggtgggaattggggagggagaaagggtagttcaaagagtctgtcttgagatctgattttttccccctttacctagctgtgccccctctggttatttatttccttagtgccaggagggcacagcaggggagccctgatttttaataaatccggaattgtatttattaa

SEQ ID NO: 384836 - DNA, 2046 bp, Homo sapiens
  misc_feature (16)..(17): n is a, c, g, or t
aagtgctggtactgcnncggagtcggcgccgcccggagccgggagcgccgctccagcgaggcgcgggctgtggggccgccgcgtgcctggccccgctcgcccgtgccggccgctcgcccgccatgcctggcttcgactacaagttcctggagaagcccaagcgacggctgctgtgcccactgtgcgggaagcccatgcgcgagcctgtgcaggtttccacctgcggccaccgtttctgcgatacctgcctgcaggagttcctcagtgaaggagtcttcaagtgccctgaggaccagcttcctctggactatgccaagatctacccagacccggagctggaagtacaagtattgggcctgcctatccgctgcatccacagtgaggagggctgccgctggagtgggccactacgtcatctacagggccacctgaatacctgcagcttcaatgtcattccctgccctaatcgctgccccatgaagctgagccgccgtgatctacctgcacacttgcagcatgactgccccaagcggcgcctcaagtgcgagttttgtggctgtgacttcagtggggaggcctatgagagccatgagggtatgtgcccccaggagagtgtctactgtgagaataagtgtggtgcccgcatgatgcggcggctgctggcccagcatgccacctctgagtgccccaagcgcactcagccctgcacctactgcactaaggagttcgtctttgacaccatccagagccaccagtaccagtgcccaaggctgcctgttgcctgccccaaccaatgtggtgtgggcactgtggctcgggaggacctgccaggccatctgaaggacagctgtaacaccgccctggtgctctgcccattcaaagactccggctgcaagcacaggtgccctaagctggcaatggcacggcatgtggaggagagtgtgaagccacatctggccatgatgtgtgccctggtgagccggcaacggcaggagctgcaggagcttcggcgagagctggaggagctatcagtgggcagtgatggcgtgctcatctggaagattggcagctatggacggcggctacaggaggccaaggccaagcccaaccttgagtgcttcagcccagccttctacacacataagtatggttacaagctgcaggtgtctgcattcctcaatggcaatggcagtggtgagggcacacacctctcactgtacattcgtgtgctgcctggtgcctttgacaatctccttgagtggccctttgcccgccgtgtcaccttctccctgctggatcagagcgaccctgggctggctaaaccacagcacgtcactgagaccttccaccccgacccaaactggaagaatttccagaagccaggcacgtggcggggctccctggatgagagttctctgggctttggttatcccaagttcatctcccaccaggacattcgaaagcgaaactatgtgcgggatgatgcagtcttcatccgtgctgctgttgaactgccccggaagatcctcagctgagtgcaggtggggttcgaggggaaaggacgatggggcatgacctcagtcaggcactggctgaacttggagagggggccggacccccgtcagctgcttctgctgcctaggttctgttaccccatcctccctcccccagccaccaccctcaggtgcctccaattggtgcttcagccctggcccctgtggggaacaggtcttggggtcatgaagggctggaaacaagtgaccccagggcctgtctcccttcttgggtagggcagacatgccttggtgccggtcacactctacacggactgaggtgcctgctcaggtgctatgtcccaagagccataagggggtgggaattggggagggagaaagggtgattcatgtaatctttcacgatactagattttgcatgaccttacctgggtgagccctctgtgtgtatttgaaaccttagaccctctatggcaacaaatgagatccccttatcattgtataaaacctgttgtgttcatctatggggaga

SEQ ID NO: 384837 - DNA, 1319 bp, Homo sapiens
taaatacaattccggatttattaaaaatcagggctcccctgctgtgccctcctggcactaaggaaataaataaccagagggggcacagctaggtaaagggggaaaaaatcagatctcaagacagactctttgaactaccctttctccctccccaattcccacccccttatggctcttgggacatgccctaagctggcaatggcacggcatgtggaggagagtgtgaagccacatctggccatgatgtgtgccctggtgagccggcaacggcaggagctgcaggagcttcggcgagagctggaggagctatcagtgggcagtgatggcgtgctcatctggaagattggcagctatggacggcggctacaggaggccaaggccaagcccaaccttgagtgcttcagcccagccttctacacacataagtatggttacaagctgcaggtgtctgcattcctcaatggcaatggcagtggtgagggcacacacctctcactgtacattcgtgtgctgcctggtgcctttgacaatctccttgagtggccctttgcccgccgtgtcaccttctccctgctggatcagagcgaccctgggctggctaaaccacagcacgtcactgagaccttccaccccgacccaaactggaagaatttccagaagccaggcacgtggcggggctccctggatgagagttctctgggctttggttatcccaagttcatctcccaccaggacattcgaaagcgaaactatgtgcgggatgatgcagtcttcatccgtgctgctgttgaactgccccggaagatcctcagctgagtgcaggtggggttcgaggggaaaggacgatggggcatgacctcagtcaggcactggctgaacttggagagggggccggacccccgtcagctgcttctgctgcctaggttctgttaccccatcctccctcccccagccaccaccctcaggtgcctccaattggtgcttcagccctggcccctgtggggaacaggtcttggggtcatgaagggctggaaacaagtgaccccagggcctgtctcccttcttgggtagggcagacatgccttggtgccggtcacactctacacggactgaggtgcctgctcaggtgctatgtcccaagagccataagggggtgggaattggggagggagaaagggtagttcaaagagtctgtcttgagatctgattttttccccctttacctagctgtgccccctctggttatttatttccttagtgccaggagggcacagcaggggagccctgatttttaataaatccggaattgtatttattaa

SEQ ID NO: 384838 - DNA, 1221 bp, Homo sapiens
  misc_feature (16)..(17): n is a, c, g, or t
aagtgctggtactgcnncggagtcggcgccgcccggagccgggagcgccgctccagcgaggcgcgggctgtggggccgccgcgtgcctggccccgctcgcccgtgccggccgctcgcccgccatgcctggcttcgactacaagttcctggagaagcccaagcgacggctgctgtgcccactgtgcgggaagcccatgcgcgagcctgtgcaggtttccacctgcggccaccgtttctgcgatacctgcctgcaggagttcctcagtgaaggagtcttcaagtgccctgaggaccagcttcctctggactatgccaagatctacccagacccggagctggaagtacaagtattgggcctgcctatccgctgcatccacagtgaggagggctgccgctggagtgggccactacgtcatctacagggccacctgaatacctgcagcttcaatgtcattccctgccctaatcgctgccccatgaagctgagccgccgtgatctacctgcacacttgcagcatgactgccccaagcggcgcctcaagtgcgagttttgtggctgtgacttcagtggggaggcctatgagtggatgagagttctctgggctttggttatcccaagttcatctcccaccaggacattcgaaagcgaaactatgtgcgggatgatgcagtcttcatccgtgctgctgttgaactgccccggaagatcctcagctgagtgcaggtggggttcgaggggaaaggacgatggggcatgacctcagtcaggcactggctgaacttggagagggggccggacccccgtcagctgcttctgctgcctaggttctgttaccccatcctccctcccccagccaccaccctcaggtgcctccaattggtgcttcagccctggcccctgtggggaacaggtcttggggtcatgaagggctggaaacaagtgaccccagggcctgtctcccttcttgggtagggcagacatgccttggtgccggtcacactctacacggactgaggtgcctgctcaggtgctatgtcccaagagccataagggggtgggaattggggagggagaaagggtagttcaaagagtctgtcttgagatctgattttttccccctttacctagctgtgccccctctggttatttatttccttagtgccaggagggcacagcaggggagccctgatttttaataaatccggaattgtatttattaa

SEQ ID NO: 384839 - DNA, 523 bp, Homo sapiens
ctagaggatcctacagaggacaaggaggcagacagtatgagtcatgaccaggggagcaggtactagtcatcctccagaaagagttggagagggggccggacccccgtcagctgcttctgctgcctaggttctgttaccccatcctccctcccccagccaccaccctcaggtgcctccaattggtgcttcagccctggcccctgtggggaacaggtcttggggtcatgaagggctggaaacaagtgaccccagggcctgtctcccttcttgggtagggcagacatgccttggtgccggtcacactctacacggactgaggtgcctgctcaggtgctatgtcccaagagccataagggggtgggaattggggagggagaaagggtagttcaaagagtctgtcttgagatctgattttttccccctttacctagctgtgccccctctggttatttatttccttagtgccaggagggcacagcaggggagccctgatttttaataaatccggaattgtatttattaa

SEQ ID NO: 384840 - DNA, 412 bp, Homo sapiens
gtgaaggagtcttcaagtgccctgaggaccagcttcctctggactatgccaaggtgagtccacactgccaggaagaagcccaagcacagtctgttgcccttggaggccggagctgctggcagccagtgggctcagggccagtgtcaaccaaaagccttgggatggtgcgcctccacaaaggtagcctgttccctcccaccaggccagtttgcaaacgaggcccctgtttgccctggagggcatgcacaatgcccagcctgtaggggtgcacagagctgctctgtgcccgcaagaagtgttccctccccttccggtggcaagccagacctgtggctgagggccagtatccctccaccaggggaaaggaagcagagccccagggacagcctgggattgagcaggctgattggct

SEQ ID NO: 384841 - DNA, 266 bp, Homo sapiens
ggcccagcatgccacctctgagtgccccaagcgcactcagccctgcacctactgcactaaggagttcgtctttgacaccatccaggtgaggccttccctgaactgtgggttgcagggtaggtgacaggtagtcaggatattgactcctgcctctctacttctgtggccccagagccaccagtaccagtgcccaaggctgcctgttgcctgccccaaccaatgtggtgtgggcactgtggctcgggaggacctgccaggccatctga

SEQ ID NO: 384842 - DNA, 2074 bp, Homo sapiens
  misc_feature (16)..(17): n is a, c, g, or t
aagtgctggtactgcnncggagtcggcgccgcccggagccgggagcgccgctccagcgaggcgcgggctgtggggccgccgcgtgcctggccccgctcgcccgtgccggccgctcgcccgccatgcctggcttcgactacaagttcctggagaagcccaagcgacggctgctgtgcccactgtgcgggaagcccatgcgcgagcctgtgcaggtttccacctgcggccaccgtttctgcgatacctgcctgcaggagttcctcagtgaaggagtcttcaagtgccctgaggaccagcttcctctggactatgccaagatctacccagacccggagctggaagtacaagtattgggcctgcctatccgctgcatccacagtgaggagggctgccgctggagtgggccactacgtcatctacagggccacctgaatacctgcagcttcaatgtcattccctgccctaatcgctgccccatgaagctgagccgccgtgatctacctgcacacttgcagcatgactgccccaagcggcgcctcaagtgcgagttttgtggctgtgacttcagtggggaggcctatgagagccatgagggtatgtgcccccaggagagtgtctactgtgagaataagtgtggtgcccgcatgatgcggcggctgctggcccagcatgccacctctgagtgccccaagcgcactcagccctgcacctactgcactaaggagttcgtctttgacaccatccagagccaccagtaccagtgcccaaggctgcctgttgcctgccccaaccaatgtggtgtgggcactgtggctcgggaggacctgccaggccatctgaaggacagctgtaacaccgccctggtgctctgcccattcaaagactccggctgcaagcacaggtgccctaagctggcaatggcacggcatgtggaggagagtgtgaagccacatctggccatgatgtgtgccctggtgagccggcaacggcaggagctgcaggagcttcggcgagagctggaggagctatcagtgggcagtgatggcgtgctcatctggaagattggcagctatggacggcggctacaggaggccaaggccaagcccaaccttgagtgcttcagcccagccttctacacacataagtatggttacaagctgcaggtgtctgcattcctcaatggcaatggcagtggtgagggcacacacctctcactgtacattcgtgtgctgcctggtgcctttgacaatctccttgagtggccctttgcccgccgtgtcaccttctccctgctggatcagagcgaccctgggctggctaaaccacagcacgtcactgagaccttccaccccgacccaaactggaagaatttccagaagccaggcacgtggcggggctccctggatgagagttctctgggctttggttatcccaagttcatctcccaccaggacattcgaaagcgaaactatgtgcgggatgatgcagtcttcatccgtgctgctgttgaactgccccggaagatcctcagctgagtgcaggtggggttcgaggggaaaggacgatggggcatgacctcagtcaggcactggctgaacttggagagggggccggacccccgtcagctgcttctgctgcctaggttctgttaccccatcctccctcccccagccaccaccctcaggtgcctccaattggtgcttcagccctggcccctgtggggaacaggtcttggggtcatgaagggctggaaacaagtgaccccagggcctgtctcccttcttgggtagggcagacatgccttggtgccggtcacactctacacggactgaggtgcctgctcaggtgctatgtcccaagagccataagggggtgggaattggggagggagaaagggtagttcaaagagtctgtcttgagatctgattttttccccctttacctagctgtgccccctctggttatttatttccttagtgccaggagggcacagcaggggagccctgatttttaataaatccggaattgtatttattaaaaaaaaaaaaacacacacacaacccccacagcgggc

SEQ ID NO: 384843 - DNA, 2927 bp, Homo sapiens
  misc_feature (16)..(17): n is a, c, g, or t
aagtgctggtactgcnncggagtcggcgccgcccggagccgggagcgccgctccagcgaggcgcgggctgtggggccgccgcgtgcctggccccgctcgcccgtgccggccgctcgcccgccatgcctggcttcgactacaagttcctggagaagcccaagcgacggctgctgtgcccactgtgcgggaagcccatgcgcgagcctgtgcaggtttccacctgcggccaccgtttctgcgatacctgcctgcaggagttcctcagtgaaggagtcttcaagtgccctgaggaccagcttcctctggactatgccaagatctacccagacccggagctggaagtacaagtattgggcctgcctatccgctgcatccacagtgaggagggctgccgctggagtgggccactacgtcatctacagggccacctgaatacctgcagcttcaatgtcattccctgccctaatcgctgccccatgaagctgagccgccgtgatctacctgcacacttgcagcatgactgccccaagcggcgcctcaagtgcgagttttgtggctgtgacttcagtggggaggcctatgagagccatgagggtatgtgcccccaggagagtgtctactgtgagaataagtgtggtgcccgcatgatgcggcggctgctggcccagcatgccacctctgagtgccccaagcgcactcagccctgcacctactgcactaaggagttcgtctttgacaccatccagagccaccagtaccagtgcccaaggctgcctgttgcctgccccaaccaatgtggtgtgggcactgtggctcgggaggacctgccaggccatctgaaggacagctgtaacaccgccctggtgctctgcccattcaaagactccggctgcaagcacaggtgccctaagctggcaatggcacggcatgtggaggagagtgtgaagccacatctggccatgatgtgtgccctggtgagccggcaacggcaggagctgcaggagcttcggcgagagctggaggagctatcagtgggcagtgatggcgtgctcatctggaagattggcagctatggacggcggctacaggaggccaaggccaagcccaaccttgagtgcttcagcccagccttctacacacataagtatggttacaagctgcaggtgtctgcattcctcaatggcaatggcagtggtgagggcacacacctctcactgtacattcgtgtgctgcctggtgcctttgacaatctccttgagtggccctttgcccgccgtgtcaccttctccctgctggatcagagcgaccctgggctggctaaaccacagcacgtcactgagaccttccaccccgacccaaactggaagaatttccagaagccaggcacgtggcggggctccctggatgagagttctctgggctttggttatcccaagttcatctcccaccaggacattcgaaagcgaaactatgtgcgggatgatgcagtcttcatccgtgctgctgttgaactgccccggaagatcctcagctgagtgcaggtggggttcgaggggaaaggacgatggggcatgacctcagtcaggcactggctgaacttggagagggggccggacccccgtcagctgcttctgctgcctaggttctgttaccccatcctccctcccccagccaccaccctcaggtgcctccaattggtgcttcagccctggcccctgtggggaacaggtcttggggtcatgaagggctggaaacaagtgaccccagggcctgtctcccttcttgggtagggcagacatgccttggtgccggtcacactctacacggactgaggtgcctgctcaggtgctatgtcccaagagccataagggggtgggaattggggagggagaaagggtagttcaaagagtctgtcttgagatctgattttttccccctttacctagctgtgccccctctggttatttatttccttagtgccaggagggcacagcaggggagccctgatttttaataaatccggaattgtatttattaatttgcttccagcctgacttacctgggttggttaggtccctgggaggctcaaccaaactgaaggcaaagaaaggaccagtcagagaagggccgctgcctgggtctggccccaggatccagcttacctgctggctcgccctctgatggacgccgggaaaactgcatcgggctttgtgtggaagacggtccctgccactgccctctgccgatgaaatgcgggaagtgtatggcctagatgtttcataaggctggagtccctggtcagccccaccagattagtgcttctaccctaggcagggctttcttggtctaatggtaataagcaccgacactgctaagcactttacgtgcattattatttcattgaaaagaactgtcaagtgaaatactttttagcacagtaactggctttgtgggctctagagaagagttaatgaggcagtgcatgttcttggcccagagtaagtgcttagtgaatgctttctaactccgaaccccagccacatccagggactgggtgttgagcaaaaggggccttcaagatgttcaaggcacttggattttctcctgtctctcatcggcttttcttaacgggcctcagtgggtgcatgtgattatccacgtttcacctatgaaacatgaacagaggagactgacttatcagtgattcttccgcgggttcggacagggcctcgattctgttttaaactccagtagtccctagaaattgtagctccctctagttgtggcaataggtgtgggtccttgtgcttgcttttggcaagtttctgagctacacagggcctccattaccgtcactggtgaaatgcggctcacctcccagatttgttgtaaagattaaatgaactggtcagcaaaaaatgccttac

SEQ ID NO: 384844 - DNA, 2895 bp, Homo sapiens
  misc_feature (16)..(17): n is a, c, g, or t
aagtgctggtactgcnncggagtcggcgccgcccggagccgggagcgccgctccagcgaggcgcgggctgtggggccgccgcgtgcctggccccgctcgcccgtgccggccgctcgcccgccatgcctggcttcgactacaagttcctggagaagcccaagcgacggctgctgtgcccactgtgcgggaagcccatgcgcgagcctgtgcaggtttccacctgcggccaccgtttctgcgatacctgcctgcaggagttcctcagtgaaggagtcttcaagtgccctgaggaccagcttcctctggactatgccaagatctacccagacccggagctggaagtacaagtattgggcctgcctatccgctgcatccacagtgaggagggctgccgctggagtgggccactacgtcatctacagggccacctgaatacctgcagcttcaatgtcattccctgccctaatcgctgccccatgaagctgagccgccgtgatctacctgcacacttgcagcatgactgccccaagcggcgcctcaagtgcgagttttgtggctgtgacttcagtggggaggcctatgagagccatgagggtatgtgcccccaggagagtgtctactgtgagaataagtgtggtgcccgcatgatgcggcggctgctggcccagcatgccacctctgagtgccccaagcgcactcagccctgcacctactgcactaaggagttcgtctttgacaccatccagagccaccagtaccagtgcccaaggctgcctgttgcctgccccaaccaatgtggtgtgggcactgtggctcgggaggacctgccaggccatctgaaggacagctgtaacaccgccctggtgctctgcccattcaaagactccggctgcaagcacaggtgccctaagctggcaatggcacggcatgtggaggagagtgtgaagccacatctggccatgatgtgtgccctggtgagccggcaacggcaggagctgcaggagcttcggcgagagctggaggagctatcagtgggcagtgatggcgtgctcatctggaagattggcagctatggacggcggctacaggaggccaaggccaagcccaaccttgagtgcttcagcccagccttctacacacataagtatggttacaagctgcaggtgtctgcattcctcaatggcaatggcagtggtgagggcacacacctctcactgtacattcgtgtgctgcctggtgcctttgacaatctccttgagtggccctttgcccgccgtgtcaccttctccctgctggatcagagcgaccctgggctggctaaaccacagcacgtcactgagaccttccaccccgacccaaactggaagaatttccagaagccaggcacgtggcggggctccctggatgagagttctctgggctttggttatcccaagttcatctcccaccaggacattcgaaagcgaaactatgtgcgggatgatgcagtcttcatccgtgctgctgttgaactgccccggaagatcctcagctgagtgcaggtggggttcgaggggaaaggacgatggggcatgacctcagtcaggcactggctgaacttggagagggggccggacccccgtcagctgcttctgctgcctaggttctgttaccccatcctccctcccccagccaccaccctcaggtgcctccaattggtgcttcagccctggcccctgtggggaacaggtcttggggtcatgaagggctggaaacaagtgaccccagggcctgtctcccttcttgggtagggcagacatgccttggtgccggtcacactctacacggactgaggtgcctgctcaggtgctatgtcccaagagccataagggggtgggaattggggagggagaaagggtagttcaaagagtctgtcttgagatctgattttttccccctttacctagctgtgccccctctggttatttatttccttagtgccaggagggcacagcaggggagccctgatttttaataaatccggaattgtatttattaatttgcttccagcctgacttacctgggttggttaggtccctgggaggctcaaccaaactgaaggcaaagaaaggaccagtcagagaagggccgctgcctgggtctggccccaggatccagcttacctgctggctcgccctctgatggacgccgggaaaactgcatcgggctttgtgtggaagacggtccctgccactgccctctgccgatgaaatgcgggaagtgtatggcctagatgtttcataaggctggagtccctggtcagccccaccagattagtgcttctaccctaggcagggctttcttggtctaatggtaataagcaccgacactgctaagcactttacgtgcattattatttcattgaaaagaactgtcaagtgaaatactttttagcacagtaactggctttgtgggctctagagaagagttaatgaggcagtgcatgttcttggcccagagtaagtgcttagtgaatgctttctaactccgaaccccagccacatccagggactgggtgttgagcaaaaggggccttcaagatgttcaaggcacttggattttctcctgtctctcatcggcttttcttaacgggcctcagtgggtgcatgtgattatccacgtttcacctatgaaacatgaacagaggagactgacttatcagtgattcttccgcgggttcggacagggcctcgattctgttttaaactccagtagtccctaagctggcaatggcacggcatgtggaggagagtgtgaagctacacagggcctccattaccgtcactggtgaaatgcggctcacctcccagatttgttgtaaagattaaatgaactggtcagcaaaaaatgccttac

SEQ ID NO: 384845 - DNA, 2097 bp, Homo sapiens
ttcccaggacaggggctggggtcttctgggatcctggggaagtagagcccctcaggcctctgcttgcccttttgtctcatctaggctggttgggaaccggtctggtgaggaagggaggctgcctcagtggagggggtggggccaggcctccctttcccctaatgagaaacctttttcctgcccctcccccatttcagtgaaggagtcttcaagtgccctgaggaccagcttcctctggactatgccaaggtgagtccacactgccaggaagaagcccaagcacagtctgttgcccttggaggccggagctgctggcagccagtgggctcagggccagtgtcaaccaaaagccttgggatggtgcgcctccacaaagatctacccagacccggagctggaagtacaagtattgggcctgcctatccgctgcatccacagtgaggagggctgccgctggagtgggccactacgtcatctacagggccacctgaatacctgcagcttcaatgtcattccctgccctaatcgctgccccatgaagctgagccgccgtgatctacctgcacacttgcagcatgactgccccaagcggcgcctcaagtgcgagttttgtggctgtgacttcagtggggaggcctatgagagccatgagggtatgtgcccccaggagagtgtctactgtgagaataagtgtggtgcccgcatgatgcggcggctgctggcccagcatgccacctctgagtgccccaagcgcactcagccctgcacctactgcactaaggagttcgtctttgacaccatccagagccaccagtaccagtgcccaaggctgcctgttgcctgccccaaccaatgtggtgtgggcactgtggctcgggaggacctgccaggccatctgaaggacagctgtaacaccgccctggtgctctgcccattcaaagactccggctgcaagcacaggtgccctaagctggcaatggcacggcatgtggaggagagtgtgaagccacatctggccatgatgtgtgccctggtgagccggcaacggcaggagctgcaggagcttcggcgagagctggaggagctatcagtgggcagtgatggcgtgctcatctggaagattggcagctatggacggcggctacaggaggccaaggccaagcccaaccttgagtgcttcagcccagccttctacacacataagtatggttacaagctgcaggtgtctgcattcctcaatggcaatggcagtggtgagggcacacacctctcactgtacattcgtgtgctgcctggtgcctttgacaatctccttgagtggccctttgcccgccgtgtcaccttctccctgctggatcagagcgaccctgggctggctaaaccacagcacgtcactgagaccttccaccccgacccaaactggaagaatttccagaagccaggcacgtggcggggctccctggatgagagttctctgggctttggttatcccaagttcatctcccaccaggacattcgaaagcgaaactatgtgcgggatgatgcagtcttcatccgtgctgctgttgaactgccccggaagatcctcagctgagtgcaggtggggttcgaggggaaaggacgatggggcatgacctcagtcaggcactggctgaacttggagagggggccggacccccgtcagctgcttctgctgcctaggttctgttaccccatcctccctcccccagccaccaccctcaggtgcctccaattggtgcttcagccctggcccctgtggggaacaggtcttggggtcatgaagggctggaaacaagtgaccccagggcctgtctcccttcttgggtagggcagacatgccttggtgccggtcacactctacacggactgaggtgcctgctcaggtgctatgtcccaagagccataagggggtgggaattggggagggagaaagggtagttcaaagagtctgtcttgagatctgattttttccccctttacctagctgtgccccctctggttatttatttccttagtgccaggagggcacagcaggggagccctgatttttaataaatccggaattgtatttattaa

SEQ ID NO: 384846 - DNA, 2107 bp, Homo sapiens
  misc_feature (16)..(17): n is a, c, g, or t
aagtgctggtactgcnncggagtcggcgccgcccggagccgggagcgccgctccagcgaggcgcgggctgtggggccgccgcgtgcctggccccgctcgcccgtgccggccgctcgcccgccatgcctggcttcgactacaagttcctggagaagcccaagcgacggctgctgtgcccactgtgcgggaagcccatgcgcgagcctgtgcaggtttccacctgcggccaccgtttctgcgatacctgcctgcaggagttcctcagtgaaggagtcttcaagtgccctgaggaccagcttcctctggactatgccaagatctacccagacccggagctggaagtacaagtattgggcctgcctatccgctgcatccacagtgaggagggctgccgctggagtgggccactacgtcatctacaggtgaggctctgatgtgagggctggcaccacctctcccttggcaggcactaattgcagccttcccaccagggccacctgaatacctgcagcttcaatgtcattccctgccctaatcgctgccccatgaagctgagccgccgtgatctacctgcacacttgcagcatgactgccccaagcggcgcctcaagtgcgagttttgtggctgtgacttcagtggggaggcctatgagagccatgagggtatgtgcccccaggagagtgtctactgtgagaataagtgtggtgcccgcatgatgcggcggctgctggcccagcatgccacctctgagtgccccaagcgcactcagccctgcacctactgcactaaggagttcgtctttgacaccatccagagccaccagtaccagtgcccaaggctgcctgttgcctgccccaaccaatgtggtgtgggcactgtggctcgggaggacctgccaggccatctgaaggacagctgtaacaccgccctggtgctctgcccattcaaagactccggctgcaagcacaggtgccctaagctggcaatggcacggcatgtggaggagagtgtgaagccacatctggccatgatgtgtgccctggtgagccggcaacggcaggagctgcaggagcttcggcgagagctggaggagctatcagtgggcagtgatggcgtgctcatctggaagattggcagctatggacggcggctacaggaggccaaggccaagcccaaccttgagtgcttcagcccagccttctacacacataagtatggttacaagctgcaggtgtctgcattcctcaatggcaatggcagtggtgagggcacacacctctcactgtacattcgtgtgctgcctggtgcctttgacaatctccttgagtggccctttgcccgccgtgtcaccttctccctgctggatcagagcgaccctgggctggctaaaccacagcacgtcactgagaccttccaccccgacccaaactggaagaatttccagaagccaggcacgtggcggggctccctggatgagagttctctgggctttggttatcccaagttcatctcccaccaggacattcgaaagcgaaactatgtgcgggatgatgcagtcttcatccgtgctgctgttgaactgccccggaagatcctcagctgagtgcaggtggggttcgaggggaaaggacgatggggcatgacctcagtcaggcactggctgaacttggagagggggccggacccccgtcagctgcttctgctgcctaggttctgttaccccatcctccctcccccagccaccaccctcaggtgcctccaattggtgcttcagccctggcccctgtggggaacaggtcttggggtcatgaagggctggaaacaagtgaccccagggcctgtctcccttcttgggtagggcagacatgccttggtgccggtcacactctacacggactgaggtgcctgctcaggtgctatgtcccaagagccataagggggtgggaattggggagggagaaagggtagttcaaagagtctgtcttgagatctgattttttccccctttacctagctgtgccccctctggttatttatttccttagtgccaggagggcacagcaggggagccctgatttttaataaatccggaattgtatttattaa

SEQ ID NO: 384847 - DNA, 2427 bp, Homo sapiens
  misc_feature (16)..(17): n is a, c, g, or t
aagtgctggtactgcnncggagtcggcgccgcccggagccgggagcgccgctccagcgaggcgcgggctgtggggccgccgcgtgcctggccccgctcgcccgtgccggccgctcgcccgccatgcctggcttcgactacaagttcctggagaagcccaagcgacggctgctgtgcccactgtgcgggaagcccatgcgcgagcctgtgcaggtttccacctgcggccaccgtttctgcgatacctgcctgcaggagttcctcagtgaaggagtcttcaagtgccctgaggaccagcttcctctggactatgccaagatctacccagacccggagctggaagtacaagtattgggcctgcctatccgctgcatccacagtgaggagggctgccgctggagtgggccactacgtcatctacagggccacctgaatacctgcagcttcaatgtcattccctgccctaatcgctgccccatgaagctgagccgccgtgatctacctgcacacttgcagcatgactgccccaagcggcgcctcaagtgcgagttttgtggctgtgacttcagtggggaggcctatgagagccatgagggtatgtgcccccaggagagtgtctactgtgagaataagtgtggtgcccgcatgatgcggcggctgctggcccagcatgccacctctgagtgccccaagcgcactcagccctgcacctactgcactaaggagttcgtctttgacaccatccagagccaccagtaccagtgcccaaggctgcctgttgcctgccccaaccaatgtggtgtgggcactgtggctcgggaggacctgccaggccatctgaaggacagctgtaacaccgccctggtgctctgcccattcaaagactccggctgcaagcacaggtgccctaagctggcaatggcacggcatgtggaggagagtgtgaagccacatctggccatgatgtgtgccctggtgagccggcaacggcaggagctgcaggagcttcggcgagagctggaggagctatcagtgggcagtgatggcgtgctcatctggaagattggcagctatggacggcggctacaggaggccaaggccaagcccaaccttgagtgcttcagcccagccttctacacacataagtatggttacaagctgcaggtgtctgcattcctcaatggcaatggcagtggtgagggcacacacctctcactgtacattcgtgtgctgcctggtgcctttgacaatctccttgagtggccctttgcccgccgtgtcaccttctccctgctggatcagagcgaccctgggctggctaaaccacagcacgtcactgagaccttccaccccgacccaaactggaagaatttccagaagccaggcacgtggcggggctccctggatgagagttctctgggctttggttatcccaagttcatctcccaccaggacattcgaaagcgaaactatgtgcgggatgatgcagtcttcatccgtgctgctgttgaactgccccggaagatcctcagctgagtgtttgcttccagcctgacttacctgggttggttaggtccctgggaggctcaaccaaactgaaggcaaagaaaggaccagtcagagaagggccgctgcctgggtctggccccaggatccagcttacctgctggctcgccctctgatggacgccgggaaaactgcatcgggctttgtgtggaagacggtccctgccactgccctctgccgatgaaatgcgggaagtgtatggcctagatgtttcataaggctggagtccctggtcagccccaccagattagtgcttctaccctaggcagggctttcttggtctaatggtaataagcaccgacactgctaagcactttacgtgcattattatttcattgaaaagaactgtcaagtgaaatactttttagcacagtaactggctttgtgggctctagagaagagttaatgaggcagtgcatgttcttggcccagagtaagtgcttagtgaatgctttctaactccgaaccccagccacatccagggactgggtgttgagcaaaaggggccttcaagatgttcaaggcacttggattttctcctgtctctcatcggcttttcttaacgggcctcagtgggtgcatgtgattatccacgtttcacctatgaaacatgaacagaggagactgacttatcagtgattcttccgcgggttcggacagggcctcgattctgttttaaactccagtagtccctagaaattgtagctccctctagttgtggcaataggtgtgggtccttgtgcttgcttttggcaagtttctgagctacacagggcctccattaccgtcactggtgaaatgcggctcacctcccagatttgttgtaaagattaaatgaactggtcagcaaaaaatgccttac

SEQ ID NO: 384848 - DNA, 1617 bp, Homo sapiens
  misc_feature (16)..(17): n is a, c, g, or t
aagtgctggtactgcnncggagtcggcgccgcccggagccgggagcgccgctccagcgaggcgcgggctgtggggccgccgcgtgcctggccccgctcgcccgtgccggccgctcgcccgccatgcctggcttcgactacaagttcctggagaagcccaagcgacggctgctgtgcccactgtgcgggaagcccatgcgcgagcctgtgcaggtttccacctgcggccaccgtttctgcgatacctgcctgcaggagttcctcagtgaaggagtcttcaagtgccctgaggaccagcttcctctggactatgccaagatctacccagacccggagctggaagtacaagtattgggcctgcctatccgctgcatccacagtgaggagggctgccgctggagtgggccactacgtcatctacagggccacctgaatacctgcagcttcaatgtcattccctgccctaatcgctgccccatgaagctgagccgccgtgatctacctgcacacttgcagcatgactgccccaagcggcgcctcaagtgcgagttttgtggctgtgacttcagtggggaggcctatgagagccatgagggtatgtgcccccaggagagtgtctactgtgagaataagtgtggtgcccgcatgatgcggcggctgctggcccagcatgccacctctgagtgccccaagcgcactcagccctgcacctactgcactaaggagttcgtctttgacaccatccagagccaccagtaccagtgcccaaggctgcctgttgcctgccccaaccaatgtggtgtgggcactgtggctcgggaggacctgccaggccatctgaaggacagctgtaacaccgccctggtgctctgcccattcaaagactccggctgcaagcacaggtgccctaagctggcaatggcacggcatgtggaggagagtgtgaagccacatctggccatgatgtgtgccctggtgagccggcaacggcaggagctgcaggagcttcggcgagagctggaggagctatcagtgggcagtgatggcgtgctcatctggaagattggcagctatggacggcggctacaggaggccaaggccaagcccaaccttgagtgcttcagcccagccttctacacacataagtatggttacaagctgcaggtgtctgcattcctcaatggcaatggcagtggtgagggcacacacctctcactgtacattcgtgtgctgcctggtgcctttgacaatctccttgagtggccctttgcccgccgtgtcaccttctccctgctggatcagagcgaccctgggctggctaaacctcagtgggtgcatgtgattatccacgtttcacctatgaaacatgaacagaggagactgacttatcagtgattcttccgcgggttcggacagggcctcgattctgttttaaactccagtagtccctagaaattgtagctccctctagttgtggcaataggtgtgggtccttgtgcttgcttttggcaagtttctgagctacacagggcctccattaccgtcactggtgaaatgcggctcacctcccagatttgttgtaaagattaaatgaactggtcagcaaaaaatgccttac

SEQ ID NO: 384849 - DNA, 795 bp, Homo sapiens
gagctgcaggtatttcaggtggccctgtagcttcaatgtcttctccctgctggatcagagcgaccctgggctggctaaaccacagcacgtcactgagaccttccaccccgacccaaactggaagaatttccagaagccaggcacgtggcggggctccctggatgagagttctctgggctttggttatcccaagttcatctcccaccaggacattcgaaagcgaaactatgtgcgggatgatgcagtcttcatccgtgctgctgttgaactgccccggaagatcctcagctgagtgcaggtggggttcgaggggaaaggacgatggggcatgacctcagtcaggcactggctgaacttggagagggggccggacccccgtcagctgcttctgctgcctaggttctgttaccccatcctccctcccccagccaccaccctcaggtgcctccaattggtgcttcagccctggcccctgtggggaacaggtcttggggtcatgaagggctggaaacaagtgaccccagggcctgtctcccttcttgggtagggcagacatgccttggtgccggtcacactctacacggactgaggtgcctgctcaggtgctatgtcccaagagccataagggggtgggaattggggagggagaaagggtagttcaaagagtctgtcttgagatctgattttttccccctttacctagctgtgccccctctggttatttatttccttagtgccaggagggcacagcaggggagccctgatttttaataaatccggaattgtatttattaa

SEQ ID NO: 384850 - DNA, 319 bp, Homo sapiens
ctataaaacaataacacaatgaagaaaacaacgtatgtaggtaacaattaacatgatgactgaaacagtacctcacatcttgatattaatgttcaacataaatgggcctaaatgctccacttaaaagatacagattggcagaatggatacaaaatcacaaaccaaatatctgctatcttcaagagactcacttaacacacaaggacccatataaattcaaggtataagggtgaaaaaagatattccatgcaaatggaaaccaaaagtaaacaggagtagcttttctcatatcagataaaacagactttaaagcaacaac

SEQ ID NO: 384851 - DNA, 186 bp, Homo sapiens
gttgaactgaactaaactgaaggggacatagaaacagtctgggcaaagcagggaaccagagttgctggtcattccagtgacaggcacagaatgtcccttctgtgcagtgtgctaaaggcctgccaaggatcctagatgctttaaaacatttttcggctgggcacggtggctcacgcctgtaatccc

SEQ ID NO: 384852 - DNA, 1302 bp, Homo sapiens
tatttttctgttcattttttaattgagcaaatgtctattgaacacttaaaattaattagaatgtggtaatggacatattactgagcctctccatttggaacccagtggagttgggatttctagaccctctttctgtttggatggtgtatgtgtatatgcatggggaaaggcacctggggcctgggggaggctataggatataagcattagggaccctgaggctttaagtggtttctatttcttcttagttattatgtgccaccttcttagttattatgtgccacctcccctatgagtgacgtgtttgatcactagcagaatagcaagcagagtatcattcatgctggggccagaatgatggccggttgccagatataactgctttggagcaaatctcttctgtttagagagatagaagttatgacatatgtaatacacatctgtgtacacagaaaccggcacctgccagacagagctggttctaagatttaatacagtgctttttttcctctttgaaatattttactttaataccagtgccttttcttgttgaacttcttggaaaagccaccaattctagatcttgatttgaattaatacacacaatatctgagacacttacacttttcaaaagatttgtgtatgcattgcctaattagagtagggggagaagggcaactattattatccctattttacaaaactgaggcttagtgaggttcagccacatgcctagacttatatactagttagtggtgcagccagggagaggactcagatttcctggaggcaaagtctatctctgaaactccatgaagacttttgcagccagttcccaccaatatgccccagacgtgagacaaacaaggacttttttttttatatagagccatccataaaatcctaagcccttttattaatgtataaccaggagaacatctgtgccaacggttggactttttatggctgagattcgggaggaagtgtgacaccaagcaggagaggaagaatgattttctttgtacttaggttttctaaggacattgttttaatctgtatcgtgccaaagttgtatcactgttaaacttctgaagacataaccagttgagtcttatttcaagatatgttctcaagccaattgtgtgcttctcttgtttctgtgatggctttctagccaaagcgaagcttgtacaggttgagtatcccttatccaaaatgctgggaaccagaagtgttcaaattttagattattttcagattttggaatgtttgcatatacataatgagatattttgggaatag

SEQ ID NO: 384853 - DNA, 660 bp, Homo sapiens
  misc_feature (14)..(14): n is a, c, g, or t
  misc_feature (32)..(32): n is a, c, g, or t
  misc_feature (54)..(54): n is a, c, g, or t
  misc_feature (82)..(82): n is a, c, g, or t
  misc_feature (87)..(87): n is a, c, g, or t
  misc_feature (103)..(103): n is a, c, g, or t
ttttgcagtacctnttttaaccccgaaacccnggaggggaggtgaatatcaggngcatccgggtgagtttggggaacccagnggaantgacattttgtacagnagaccctgagaacaccagcatattccccaggccgggagttttggttttcgcaagtgtcgggatggctggaggatgaaaaacgaaaccagtcccactgtggagcttccctgagggtgcccgggcaagtcttgccagcaaggcagcaagacttcctgctatccaacccttttattaatgtataaccaggagaacatctgtgccaacggttggactttttatggctgagattcgggaggaagtgtgacaccaagcaggagaggaagaatgattttctttgtacttaggttttctaaggacattgttttaatctgtatcgtgccaaagttgtatcactgttaaacttctgaagacataaccagttgagtcttatttcaagatatgttctcaagccaattgtgtgcttctcttgtttctgtgatggctttctagccaaagcgaagcttgtacaggttgagtatcccttatccaaaatgctgggaaccagaagtgttcaaattttagattattttcagattttggaatgtttgcatatacataatgagatattttgggaatag

SEQ ID NO: 384854 - DNA, 3938 bp, Homo sapiens
  misc_feature (11)..(11): n is a, c, g, or t
  misc_feature (13)..(13): n is a, c, g, or t
aattcggcacnangatgagtatagggctgtttcttgcagggttctttcgaaattattgctaggttgacttttaactaaatccaagtgatgttatttgtaatgtagtacttaaatgtttttcttgttgttttagccaaaactggacaagccaaggcatctgtagccaaagtaaacaaatctacagggaaatcagcaagttctgtaaaatctgtggtaacggtagctgttaaaggtaataaagcttcaatcaaaacagcaaaatctggtggaaagaagtctctagaagccaaaaagactgggaatgtcaaaaacaaagactctaacaaacctgtgactataccagaaaactctgaaataaagaccagtattgaagtcaaagccactgaaaactgtgctaaagaagctatttctgatgctgctttggaggccacagagaatgaaccacttaacaaggaaacagaagaaatgtgtgtgatgcttgtctctaatttgcctaataaaggatattctgtagaagaagtttatgacttagcaaaaccatttggtggtttaaaggatatcttgattttatcatctcataaaaaggcatatatagaaataaatagaaaagctgctgagtctatggtaaaattttatacctgcttcccagtattgatggatggaaatcaactctcaataagtatggctcctgaaaacatgaatataaaagatgaggaagctatatttataaccttggtaaaagaaaatgacccagaggcaaacatagatacaatttatgatcgatttgtacatcttgataatttaccggaagatggacttcagtgtgtactttgtgttggacttcagtttggaaaagtggatcaccatgtattcataagtaatagaaacaaggcaattcttcagttagatagtcctgaatctgctcagtcaatgtatagctttctgaaacaaaatccacaaaatattggtgaccatatgttgacctgctcattatctccaaagatagacttaccagaggtgcaaattgagcatgacccagaattagaaaaagaaagccctggcttgaaaaacagtccaattgatgaaagtgaggtgcaaacagcaactgatagtccctctgttaaacctaatgagcttgaagaagaaagtactcccagcattcaaacagaaactttggtacagcaggaagagccttgtgaggaagaagctgaaaaagcaacatgtgattctgactttgctgttgaaactttggagcttgaaactcaaggagaggaggtcaaagaagaaattcctcttgtagcatccgcttcagtcagtattgaacaattcactgaaaatgccgaggagtgtgctttaaatcagcagatgtttaacagtgacttggagaagaaaggggcagaaattattaaccctaaaacagcattgttaccatctgacagtgtgtttgcagaagaaaggaacctcaaaggaattctagaagaatctccatctgaagcagaagatttcatttctggaattacacagactatggtagaagctgtagctgaagtagaaaaaaatgaaactgtttcggaaatattgccatcaacttgtattgtgacgttagtaccaggaattcccactggggatgagaagacagtggacaaaaagaatatttctgaaaaaaaaggtaacatggatgaaaaggaggagaaggaatttaatactaaggaaaccagaatggatcttcaaataggaacagagaaggctgaaaagaatgaaggtaggatggatgcagaaaaggtggaaaagatggcagcaatgaaagaaaagcctgcagaaaacactttattcaaggcatacccaaataaaggagtgggtcaggctaataagcctgatgaaactagtaaaactagtattctggctgtatcagatgtatctagcagtaaaccaagcatcaaggctgttatagtctcttctcctaaggcaaaagctacagtttcaaaaactgaaaatcagaaaagttttccaaaatctgtgcccagagatcaaataaatgctgaaaagaaactttcagccaaggaatttggtctgcttaaacccacaagtgccaggtcaggcttggcagaaagcagcagtaaattcaaacctactcagagcagtcttaccagaggaggcagtggaaggatctcagccctgcaaggcaagctttctaaactggattacagagatataacaaaacaatctcaggaaacagaggctagaccttccatcatgaaacgggatgacagcaacaataagactttggctgagcaaaacactaagaatcctaaaagcactactggtagaagttccaaatctaaagaggagccattatttccatttaatttggatgaatttgttactgtggatgaggttatagaagaagtgaatccttctcaggccaagcagaatccactaaagggaaaaaggaaagaaactctcaaaaatgttcctttctctgaacttaacttaaagaagaaaaaggggaaaacttccactcctcgtggtgttgagggagaactatcttttgtgacattggatgagattggggaagaggaagatgcagctgcacatctagcacaagctctagtcactgtggatgaagtaattgatgaagaagaactaaatatggaagaaatggtaaaaaattcaaattcactttttacattagatgaattaattgaccaagatgattgcatttcccacagtgaacctaaagatgttactgttctgtcagtggctgaagaacaagatctcctcaaacaggaacgcttggtaactgtggatgaaattggagaagtggaagagctacctttgaatgagtcagcagacataacttttgccactttaaatactaaaggaaatgaaggagatatcgtaagggattccattggcttcatttcttctcaggtgcccgaagacccttctactttagttactgtagatgaaatacaagatgacagcagtgatttgcatttagtgactttggatgaagtaactgaagaggatgaagactctctggcggattttaacaaccttaaagaagagcttaattttgttactgttgatgaagttggagaggaggaagatggagataatgatttaaaagttgagttagcacaaagcaaaaatgaccatcccacagataaaaaagggaatagaaagaagagagctgtggacacaaaaaagacaaaacttgaatccttgtcccaagtgggtccagtaaatgagaatgttatggaagaagatctaaaaaccatgattgaaagacacttaacagctaaaactccaaccaagagagttagaattgggaaaactctgccatcagaaaaagctgttgtgacagaaccagcaaaaggtgaagaggccttccagatgagtgaagttgatgaggaatctggattaaaggattcagaaccagagcgaaaacgcaagaagactgaagactcttcttcaggcaaatcagtggcgtctgatgtccctgaggaattagactttcttgtacctaaggctggattcttctgtccaatttgttccctcttctactcaggtgaaaaagcaatgacaaatcactgcaagagtacacgtcataagcaaaatactgagaaatttatggccaagcaaagaaaggaaaaggagcagaatgaggctgaagaaagaagctctaggtgattgggggaaaggaaagaattcactagaaatttgtttagggtccagttgatttgtgtatttttgttatcatttaatttgtaattttcgtttcagaagcaaatattcgtgttgtacaaatttctgattgccctaaatgtagagagactgatggggaaagtatgatgggtttgatttttatatcaaatcatcaggcatggagaaatatcttttagaagtgttaaaataaatgttcctactgtatattt

SEQ ID NO: 384855 - DNA, 896 bp, Homo sapiens
  misc_feature (729)..(729): n is a, c, g, or t
  misc_feature (737)..(737): n is a, c, g, or t
aggcgcgcatgcgtgcagctctttggaggcggtagctttttcggcgtcgagactggaggctgagtgctaaactgtgtggggcgcggatgggatccagctgttagtcgggtaggcataggattggattcagcatcaaaatacatctactcatattgagagctgtcgacagttacgtcaacagtatcctgattggaatcctgagatcctcccatcgagaagaaatgagggcaatagaaaagaaaatgaaactccacgaagacgttctcattcccccagtcctaggcgttctagaagatcaagctcaagtcacagattccgtcggtctcgaagcccaatgcattacatgtataggccgagaagtcgaagtccaagaatttgccatcgtttcatttctagatacagatccagatccagatcccgttcaccatatcgaattagaaatccatttagaggtagtccaaaatgctttcgatcagttagccctgagaggatgtcaaggagatcagtgagatcatcagatagaaaaaaagcattagaagatgtagtacaacgatctgggcatgggacagaatttaataaacagaagcatcttgaagctgctgataagggacattcaccagcacaaaagcctaaaactagcagtggaacaaaaccatcagttaaacctacaagcgctacaaagagtgattcaaatctaggaggacattctattcgttgtaaatcaaaatntgagatgnccttgtgagtaccgggttgttaagggttctcaggaagttgaaaaagctgtatgggggttttaacgatcacggggtggaaagggaattctggaggggtaggcaaaagcaagtagggttttgatgaaaaaaggggaatggggggttgttgtacgtggaatg

SEQ ID NO: 384856 - DNA, 763 bp, Homo sapiens
  misc_feature (712)..(712): n is a, c, g, or t
  misc_feature (718)..(718): n is a, c, g, or t
  misc_feature (721)..(721): n is a, c, g, or t
  misc_feature (725)..(725): n is a, c, g, or t
  misc_feature (729)..(729): n is a, c, g, or t
  misc_feature (736)..(736): n is a, c, g, or t
ctaacgaatgtgcgtgtcatccttgcgcaggggccatgctaattaccgtatcattccaattttagtatatgtgctgctgaagggagcgtttttctattttattattgttgatcttttactatgtctaatttataaattaaactttcatgtatatacaggaaaaaaaacatagtatatatagggttcaccatgagcacggtttcaaggcatccaccaggggtcttggataaggagaaactgctgtagttaatgataagaaaatgcagatgagttgtgaaagatgagatgtaaaattaggctgtgtaatcacaaattgaaaaaaatgtctttataaataggaaaaggtaataatcatgtgtcctttagaataggaagattttagatttttgttctatattttctaaattgctttatactaaatttcttttgttcaaaatatttttcctacgtagaacaaagaggtgaagaaaaagactttagagtcaaagaaagtatctgcatctaccttaaaaagagatgcagatgcttcaaaagctgttgaaattgttacttcaacttctgctggtaagtggttacttttaatattctttcaaatgagtgtatctgtcaggttagtagaaacttagatgatgatgctatgaagacactatgtgcttaatgaaggagacccaattacattcttaattggcctgtttaagcaggggttaataanggcggnatncgancctntgggtantcaccactggtggcagtctggaaactc

SEQ ID NO: 384857 - DNA, 902 bp, Homo sapiens
tcctgggtgatttctttcctgtcagtctttaaggacatctcccttacgtacataaactcttctatccccttgagtatactcttctcattttcttatattatttaacagttaccactaatcatccggtagagtagttcttaaccctgtcttctcttttcttctgttcaacataattcagatttagataacatccttccccttttcagccaatcagtggcggatccatattagttttccactgactctacttcagctctcaaattctttatatgtagctccatcatgcctgtaactccttttaattcagacctgtcgtctcacatttgaactttggaagatagcctcctgactggtattttttattccatactctgctttattatacacgttgttgcccagaggtctctttaaagcagatctgatcattctacttctagcaaccagtggaataaagtccaaattctttggctttccataaattattctttgccctttgaccccagattatcttttgaacctattaacagtcaactgtgtattattttgtagtcactcagaatagtttattttccatgttacttcattccttggttctttatttatgctgtctatttgcatggaattgatggctgacttcatttaacttcagtaagcacttaataggtcgcaggcaaggtactgaagataaaaagtcagttaagacttcttttggggagagttggaggacagattctgatttatcctgtaaggctcatctctgatgaaacttccttgatcgaatgatttttttctcttgttatggcttttctcttttttagaaataatatgtccccttttctttttaccttttcagttcccagctgaaaatgacattcttttaaatctaagtataaaagtaatga

SEQ ID NO: 384858 - DNA, 545 bp, Homo sapiens
atcctaccagtttccatttcacattgggaaggttgatcatttcagttaaccatgttaggtttttgtaggagattggtcagggtggtgggaaaagttataaggagagacgcaaaccttcttggaagtcctgggaggttttgcaaagcttcgggagagaataaaggctgaaggcagctaaattctcttaccctgaggctaagggcaagtagtaggtaacaaaggagtgtaaaggaatttatctagataagtttatttacttttgccgacctttgatcatccgacctttgatcatccgacctttgatcatctgacctttgatcatctgacctttgatcatccgacctttgatcatctgacctttgatcatccgcgtgcaggactgctccctacaggcgggggcaacaattacccacagattgtgttggctccaggcctttgtcattaaatctgtactaaataaatacaagcagctccagcttattggggctgcgttctctcttcggcgtctctaaggccgagcagtttcctagctgcgctcacgcaaa

SEQ ID NO: 384859 - DNA, 3555 bp, Homo sapiens
aggcgcgcatgcgtgcagctctttggaggcggtagctttttcggcgtcgagactggaggctgagtgctaaactgtgtggggcgcggatgggatccagctgttagtcgggtaggcatagctttgtgttattcttggaaaatttcgcaccacttgtgaattccttgaacctgggcattgcaaacccacttctgttgggcccatctcctttgcactttgctcagattaagactcagttggcgcttcagcagctgaatgccgttgcctcacatggttcaacaccaccttatactttattaaatcaggctttcttgaaaatagccatgtcgagacccaggtttaatcctcgaggagactttccacttcaaaggccacgagcacctaacccttctgggatgaggcctccaggaccatttatgaggcctggatctatgggtctcccaagattttacccagcagggagagcacgtggaattccacacagatttgctggccatgaatcttatcagaacatggggccacagagaatgaatgttcaggtaactcaacacagaactgatccaagattgaccaaagaaaaactggattttcatgaagcacaacagaagaaggggaagcctcatggtagccggtgggatgatgagcctcatatatctgcatcagtggcagtgaaacagagttctgtaacacaggttacagagcagagtcccaaagtacagagccgctatacaaaagagagtgcctcaagtatcttagcaagttttggattatctaatgaagacctagaagaacttagtcgctatcctgatgaacaactaactcctgaaaatatgccattaattttgagggatataagaatgcgaaaaatggggcgccgattacctaatttaccttctcagagcagaaataaagaaacacttggtagtgaagcagtttcaagtaatgtgatcgattatgggcatgcaagcaaatatggctacacagaagatccacttgaagtacgtatttatgatcctgaaattccaactgatgaggtcgagaatgaatttcagtcacagcagaacatttctgcatctgttcccaatccaaatgtgatatgtaattctatgtttcctgttgaagacgtatttcgccaaatggacttccccggtgagtcctccaataatcggtcctttttctcagttgagagtggaaccaagatgtcaggcttacacatttcaggaggacagtcagtccttgaacccataaaatccgtcaaccaatccattaaccaaacagttagccagacaatgagtcaatctctgattcctccatctatgaaccagcaacctttttcgtcggaattaatttcatctgtaagccagcaagagcggatcccacatgaacctgtgattaattcatctaacgtacatgttggatcaagaggaagtaaaaagaattaccagtcacaggctgacattcccattcggtctccctttggtattgtgaaagcatcctggctaccaaagttttcacatgctgatgcccagaagatgaagagacttccaactccttctatgatgaatgattattatgcagcatctccaagaatatttccacatttgtgttctctgtgtaacgtagaatgtagtcatttgaaggattggattcagcatcaaaatacatctactcatattgagagctgtcgacagttacgtcaacagtatcctgattggaatcctgagatcctcccatcgagaagaaatgagggcaatagaaaagaaaatgaaactccacgaagacgttctcattcccccagtcctaggcgttctagaagatcaagctcaagtcacagattccgtcggtctcgaagcccaatgcattacatgtataggccgagaagtcgaagtccaagaatttgccatcgtttcatttctagatacagatccagatccagatcccgttcaccatatcgaattagaaatccatttagaggtagtccaaaatgctttcgatcagttagccctgagaggatgtcaaggagatcagtgagatcatcagatagaaaaaaagcattagaagatgtagtacaacgatctgggcatgggacagaatttaataaacagaagcatcttgaagctgctgataagggacattcaccagcacaaaagcctaaaactagcagtggaacaaaaccatcagttaaacctacaagcgctacaaagagtgattcaaatctaggaggacattctattcgttgtaaatcaaagaatcttgaagatgacactttgtcagaatgtaaacaggtgtctgataaagctgtttctctccagcgaaagcttcggaaagaacagtcattgcattatggttcggttcttcttataactgaattaccagaggatggttgtactgaagaagatgtgagaaaattatttcaaccatttgggaaagtgaatgatgtcctaattgttccatatagaaaagaggcttacctagaaatggaatttaaagaggcaattactgcaattatgaagtacattgaaacaacacctcttacgataaaaggaaaaagtgtgaaaatatgtgttccaggaaagaaaaaagcacagaacaaagaggtgaagaaaaagactttagagtcaaagaaagtatctgcatctaccttaaaaagagatgcagatgcttcaaaagctgttgaaattgttacttcaacttctgctgagtcggtggatcagactcagcagctggtgcccctcgtgaggaacactgcaagggatcacgacggaacccccgaaaatgaaggcgaagagactgtgcagtcagccctctttggattccagtacgatgcatcagaccataccatggcgtggctaggacccaacacagtaccagaagtgaaggaaatgatcctgcaggacccgcagctccagacaacacagcttcctcagacgacacaagccccggacattacctgggggatgctgaagaagacaacttacaaggctgagcaaatcctgctccagacacagaaaccattcactccagataatttgttccttgctctgctctctggtgatgcaaagccggaatacgagcagtaatcgctacgcctgacaaacctgctgctgtgcacatctgtactcttcaatcaacaaaacctgatgcaaaaaacaaaagggggagatgtaggagatcagtcagggtggtgggaaaagttataaggagagacgcaaaccttcttggaagtccaggaggttttgcaaagcttcgggagagaataaaggctgaaggcagctaaattctcttaccctgacgctaagggcaagaagtaggtaacaaaggagtgtaaaggaatttatctagacgagttttatttacttttgcagacctttgatcatcctattgcgcgcaggactgctcccaaggcggtgggggtgacaattacctacagattgtgttggctccaggcctttgtcattaaatctgtactgaataaatacaagcggctccagcttatcagggctgcattctctctttggtgtctctaaggccgaacagtcccctagccgcactcatgca

SEQ ID NO: 384860 - DNA, 4151 bp, Homo sapiens
  misc_feature (3602)..(3602): n is a, c, g, or t
aggcgcgcatgcgtgcagctctttggaggcggtagctttttcggcgtcgagactggaggctgagtgctaaactgtgtggggcgcggatgggatccagctgttagtcgggtaggcatagctttgtgttattcttggaaaatttcgcaccacttgtgaattccttgaacctgggcattgcaaacccacttctgttgggcccatctcctttgcactttgctcagattaagactcagttggcgcttcagcagctgaatgccgttgcctcacatggttcaacaccaccttatactttattaaatcaggctttcttgaaaatagccatgtcgagacccaggtttaatcctcgaggagactttccacttcaaaggccacgagcacctaacccttctgggatgaggcctccaggaccatttatgaggcctggatctatgggtctcccaagattttacccagcagggagagcacgtggaattccacacagatttgctggccatgaatcttatcagaacatggggccacagagaatgaatgttcaggtaactcaacacagaactgatccaagattgaccaaagaaaaactggattttcatgaagcacaacagaagaaggggaagcctcatggtagccggtgggatgatgagcctcatatatctgcatcagtggcagtgaaacagagttctgtaacacaggttacagagcagagtcccaaagtacagagccgctatacaaaagagagtgcctcaagtatcttagcaagttttggattatctaatgaagacctagaagaacttagtcgctatcctgatgaacaactaactcctgaaaatatgccattaattttgagggatataagaatgcgaaaaatggggcgccgattacctaatttaccttctcagagcagaaataaagaaacacttggtagtgaagcagtttcaagtaatgtgatcgattatgggcatgcaagcaaatatggctacacagaagatccacttgaagtacgtatttatgatcctgaaattccaactgatgaggtcgagaatgaatttcagtcacagcagaacatttctgcatctgttcccaatccaaatgtgatatgtaattctatgtttcctgttgaagacgtatttcgccaaatggacttccccggtgagtcctccaataatcggtcctttttctcagttgagagtggaaccaagatgtcaggcttacacatttcaggaggacagtcagtccttgaacccataaaatccgtcaaccaatccattaaccaaacagttagccagacaatgagtcaatctctgattcctccatctatgaaccagcaacctttttcgtcggaattaatttcatctgtaagccagcaagagcggatcccacatgaacctgtgattaattcatctaacgtacatgttggatcaagaggaagtaaaaagaattaccagtcacaggctgacattcccattcggtctccctttggtattgtgaaagcatcctggctaccaaagttttcacatgctgatgcccagaagatgaagagacttccaactccttctatgatgaatgattattatgcagcatctccaagaatatttccacatttgtgttctctgtgtaacgtagaatgtagtcatttgaaggattggattcagcatcaaaatacatctactcatattgagagctgtcgacagttacgtcaacagtatcctgattggaatcctgagatcctcccatcgagaagaaatgagggcaatagaaaagaaaatgaaactccacgaagacgttctcattcccccagtcctaggcgttctagaagatcaagctcaagtcacagattccgtcggtctcgaagcccaatgcattacatgtataggccgagaagtcgaagtccaagaatttgccatcgtttcatttctagatacagatccagatccagatcccgttcaccatatcgaattagaaatccatttagaggtagtccaaaatgctttcgatcagttagccctgagaggatgtcaaggagatcagtgagatcatcagatagaaaaaaagcattagaagatgtagtacaacgatctgggcatgggacagaatttaataaacagaagcatcttgaagctgctgataagggacattcaccagcacaaaagcctaaaactagcagtggaacaaaaccatcagttaaacctacaagcgctacaaagagtgattcaaatctaggaggacattctattcgttgtaaatcaaagaatcttgaagatgacactttgtcagaatgtaaacaggtgtctgataaagctgtttctctccagcgaaagcttcggaaagaacagtcattgcattatggttcggttcttcttataactgaattaccagaggatggttgtactgaagaagatgtgagaaaattatttcaaccatttgggaaagtgaatgatgtcctaattgttccatatagaaaagaggcttacctagaaatggaatttaaagaggcaattactgcaattatgaagtacattgaaacaacacctcttacgataaaaggaaaaagtgtgaaaatatgtgttccaggaaagaaaaaagcacagaacaaagaggtgaagaaaaagactttagagtcaaagaaagtatctgcatctaccttaaaaagagatgcagatgcttcaaaagctgttgaaattgttacttcaacttctgctgccaaaactggacaagccaaggcatctgtagccaaagtaaacaaatctacagggaaatcagcaagttctgtaaaatctgtggtaacggtagctgttaaaggtaataaagcttcaatcaaaacagcaaaatctggtggaaagaagtctctagaagccaaaaagactgggaatgtcaaaaacaaagactctaacaaacctgtgactataccagaaaactctgaaataaagaccagtattgaagtcaaagccactgaaaactgtgctaaagaagctatttctgatgctgctttggaggccacagagaatgaaccacttaacaaggaaacagaagaaatgtgtgtgatgcttgtctctaatttgcctaataaaggatattctgtagaagaagtttatgacttagcaaaaccatttggtggtttaaaggatatcttgattttatcatctcataaaaaggcatatatagaaataaatagaaaagctgctgagtctatggtaaaattttatacctgcttcccagtattgatggatggaaatcaactctcaataagtatggctcctgaaaacatgaatataaaagatgaggaagctatatttataaccttggtaaaagaaaatgacccagaggcaaacatagatacaatttatgatcgatttgtacatcttgataatttaccggaagatggacttcagtgtgtactttgtgttggacttcagtttggaaaagtggatcaccatgtattcataagtaatagaaacaaggcaattcttcagttagatagtcctgaatctgctcagtcaatgtatagctttctgaaacaaaatccacaaaatattggtgaccatatgttgacctgctcattatctccaaagatagacttaccagaggtgcaaattgagcatgacccngaattagaaaaagaaagttgatgaggaatctggattaaaggattcagaaccagagcgaaaacgcaagaagactgaagactcttcttcaggcaaatcagtggcgtctgatgtccctgaggaattagactttcttgtacctaaggctggattcttctgtccaatttgttccctcttctactcaggtgaaaaagcaatgacaaatcactgcaagagtacacgtcataagcaaaatactgagaaatttatggccaagcaaagaaaggaaaaggagcagaatgaggctgaagaaagaagctctaggtgattgggggaaaggaaagaattcactagaaatttgtttagggtccagttgatttgtgtatttttgttatcatttaatttgtaattttcgtttcagaagcaaatattcgtgttgtacaaatttctgattgccctaaatgtagagagactgatggggaaagtatgatgggtttgatttttatatcaaatcatcaggcatggagaaatatcttttagaagtgttaaaataaatgttcctactgtatattt

SEQ ID NO: 384861 - DNA, 2843 bp, Homo sapiens
aggcgcgcatgcgtgcagctctttggaggcggtagctttttcggcgtcgagactggaggctgagtgctaaactgtgtggggcgcggatgggatccagctgttagtcgggtaggcatagctttgtgttattcttggaaaatttcgcaccacttgtgaattccttgaacctgggcattgcaaacccacttctgttgggcccatctcctttgcactttgctcagattaagactcagttggcgcttcagcagctgaatgccgttgcctcacatggttcaacaccaccttatactttattaaatcaggctttcttgaaaatagccatgtcgagacccaggtttaatcctcgaggagactttccacttcaaaggccacgagcacctaacccttctgggatgaggcctccaggaccatttatgaggcctggatctatgggtctcccaagattttacccagcagggagagcacgtggaattccacacagatttgctggccatgaatcttatcagaacatggggccacagagaatgaatgttcaggtaactcaacacagaactgatccaagattgaccaaagaaaaactggattttcatgaagcacaacagaagaaggggaagcctcatggtagccggtgggatgatgagcctcatatatctgcatcagtggcagtgaaacagagttctgtaacacaggttacagagcagagtcccaaagtacagagccgctatacaaaagagagtgcctcaagtatcttagcaagttttggattatctaatgaagacctagaagaacttagtcgctatcctgatgaacaactaactcctgaaaatatgccattaattttgagggatataagaatgcgaaaaatggggcgccgattacctaatttaccttctcagagcagaaataaagaaacacttggtagtgaagcagtttcaagtaatgtgatcgattatgggcatgcaagcaaatatggctacacagaagatccacttgaagtacgtatttatgatcctgaaattccaactgatgaggtcgagaatgaatttcagtcacagcagaacatttctgcatctgttcccaatccaaatgtgatatgtaattctatgtttcctgttgaagacgtatttcgccaaatggacttccccggtgagtcctccaataatcggtcctttttctcagttgagagtggaaccaagatgtcaggcttacacatttcaggaggacagtcagtccttgaacccataaaatccgtcaaccaatccattaaccaaacagttagccagacaatgagtcaatctctgattcctccatctatgaaccagcaacctttttcgtcggaattaatttcatctgtaagccagcaagagcggatcccacatgaacctgtgattaattcatctaacgtacatgttggatcaagaggaagtaaaaagaattaccagtcacaggctgacattcccattcggtctccctttggtattgtgaaagcatcctggctaccaaagttttcacatgctgatgcccagaagatgaagagacttccaactccttctatgatgaatgattattatgcagcatctccaagaatatttccacatttgtgttctctgtgtaacgtagaatgtagtcatttgaaggattggattcagcatcaaaatacatctactcatattgagagctgtcgacagttacgtcaacagtatcctgattggaatcctgagatcctcccatcgagaagaaatgagggcaatagaaaagaaaatgaaactccacgaagacgttctcattcccccagtcctaggcgttctagaagatcaagctcaagtcacagattccgtcggtctcgaagcccaatgcattacatgtataggccgagaagtcgaagtccaagaatttgccatcgtttcatttctagatacagatccagatccagatcccgttcaccatatcgaattagaaatccatttagaggtagtccaaaatgctttcgatcagttagccctgagaggatgtcaaggagatcagtgagatcatcagatagaaaaaaagcattagaagatgtagtacaacgatctgggcatgggacagaatttaataaacagaagcatcttgaagctgctgataagggacattcaccagcacaaaagcctaaaactagcagtggaacaaaaccatcagttaaacctacaagcgctacaaagagtgattcaaatctaggaggacattctattcgttgtaaatcaaagaatcttgaagatgacactttgtcagaatgtaaacaggtgtctgataaagctgtttctctccagcgaaagcttcggaaagaacagtcattgcattatggttcggttcttcttataactgaattaccagaggatggttgtactgaagaagatgtgagaaaattatttcaaccatttgggaaagtgaatgatgtcctaattgttccatatagaaaagaggcttacctagaaatggaatttaaagaggcaattactgcaattatgaagtacattgaaacaacacctcttacgataaaaggaaaaagtgtgaaaatatgtgttccaggaaagaaaaaagcacagaacaaagaggtgaagaaaaagactttagagtcaaagaaagtatctgcatctaccttaaaaagagatgcagatgcttcaaaagctgttgaaattgttacttcaacttctgctgccaaaactggacaagccaaggcatctgtagccaaagtaaacaaatctacagccaggcatggtggctcacgcctataatcccatcactttgggagaccgaagagggtggatcacctgaagtcaggagttaagtccagcttggccaac

SEQ ID NO: 384862 - DNA, 3881 bp, Homo sapiens
aggcgcgcatgcgtgcagctctttggaggcggtagctttttcggcgtcgagactggaggctgagtgctaaactgtgtggggcgcggatgggatccagctgttagtcgggtaggcatagtattacagcgtgaaataaattcccagtatttttcaagattatgtaaaaggagttgtaattactgctcagcacctaggacagcacccagtgcaacacaatgtacatgaactctggcttgaggtttggggcttgtgttctgcattcaggaaagaaaagaagagaaagtttttgggaaatttaaatcttcgtaagcccttactctaaaagtatatgaaatgcagaatggtttcatggctttatttcaaaatgttttacactggctgtagaacccacttcatgaagtagtttgagttaaaatgatctaatatttgtgttttaactttcagctttgtgttattcttggaaaatttcgcaccacttgtgaattccttgaacctgggcattgcaaacccacttctgttgggcccatctcctttgcactttgctcagattaagactcagttggcgcttcagcagctgaatgccgttgcctcacatggttcaacaccaccttatactttattaaatcaggctttcttgaaaatagccatgtcgagacccaggtttaatcctcgaggagactttccacttcaaaggccacgagcacctaacccttctgggatgaggcctccaggaccatttatgaggcctggatctatgggtctcccaagattttacccagcagggagagcacgtggaattccacacagatttgctggccatgaatcttatcagaacatggggccacagagaatgaatgttcaggtaactcaacacagaactgatccaagattgaccaaagaaaaactggattttcatgaagcacaacagaagaaggggaagcctcatggtagccggtgggatgatgagcctcatatatctgcatcagtggcagtgaaacagagttctgtaacacaggttacagagcagagtcccaaagtacagagccgctatacaaaagagagtgcctcaagtatcttagcaagttttggattatctaatgaagacctagaagaacttagtcgctatcctgatgaacaactaactcctgaaaatatgccattaattttgagggatataagaatgcgaaaaatggggcgccgattacctaatttaccttctcagagcagaaataaagaaacacttggtagtgaagcagtttcaagtaatgtgatcgattatgggcatgcaagcaaatatggctacacagaagatccacttgaagtacgtatttatgatcctgaaattccaactgatgaggtcgagaatgaatttcagtcacagcagaacatttctgcatctgttcccaatccaaatgtgatatgtaattctatgtttcctgttgaagacgtatttcgccaaatggacttccccggtgagtcctccaataatcggtcctttttctcagttgagagtggaaccaagatgtcaggcttacacatttcaggaggacagtcagtccttgaacccataaaatccgtcaaccaatccattaaccaaacagttagccagacaatgagtcaatctctgattcctccatctatgaaccagcaacctttttcgtcggaattaatttcatctgtaagccagcaagagcggatcccacatgaacctgtgattaattcatctaacgtacatgttggatcaagaggaagtaaaaagaattaccagtcacaggctgacattcccattcggtctccctttggtattgtgaaagcatcctggctaccaaagttttcacatgctgatgcccagaagatgaagagacttccaactccttctatgatgaatgattattatgcagcatctccaagaatatttccacatttgtgttctctgtgtaacgtagaatgtagtcatttgaaggattggattcagcatcaaaatacatctactcatattgagagctgtcgacagttacgtcaacagtatcctgattggaatcctgagatcctcccatcgagaagaaatgagggcaatagaaaagaaaatgaaactccacgaagacgttctcattcccccagtcctaggcgttctagaagatcaagctcaagtcacagattccgtcggtctcgaagcccaatgcattacatgtataggccgagaagtcgaagtccaagaatttgccatcgtttcatttctagatacagatccagatccagatcccgttcaccatatcgaattagaaatccatttagaggtagtccaaaatgctttcgatcagttagccctgagaggatgtcaaggagatcagtgagatcatcagatagaaaaaaagcattagaagatgtagtacaacgatctgggcatgggacagaatttaataaacagaagcatcttgaagctgctgataagggacattcaccagcacaaaagcctaaaactagcagtggaacaaaaccatcagttaaacctacaagcgctacaaagagtgattcaaatctaggaggacattctattcgttgtaaatcaaagaatcttgaagatgacactttgtcagaatgtaaacaggtgtctgataaagctgtttctctccagcgaaagcttcggaaagaacagtcattgcattatggttcggttcttcttataactgaattaccagaggatggttgtactgaagaagatgtgagaaaattatttcaaccatttgggaaagtgaatgatgtcctaattgttccatatagaaaagaggcttacctagaaatggaatttaaagaggcaattactgcaattatgaagtacattgaaacaacacctcttacgataaaaggaaaaagtgtgaaaatatgtgttccaggaaagaaaaaagcacagaacaaagaggtgaagaaaaagactttagagtcaaagaaagtatctgcatctaccttaaaaagagatgcagatgcttcaaaagctgttgaaattgttacttcaacttctgctgagtcggtggatcagactcagcagctggtgcccctcgtgaggaacactgcaagggatcacgacggaacccccgaaaatgaaggcgaagagactgtgcagtcagccctctttggattccagtacgatgcatcagaccataccatggcgtggctaggacccaacacagtaccagaagtgaaggaaatgatcctgcaggacccgcagctccagacaacacagcttcctcagacgacacaagccccggacattacctgggggatgctgaagaagacaacttacaaggctgagcaaatcctgctccagacacagaaaccattcactccagataatttgttccttgctctgctctctggtgatgcaaagccggaatacgagcagtaatcgctacgcctgacaaacctgctgctgtgcacatctgtactcttcaatcaacaaaacctgatgcaaaaaacaaaagggggagatgtaggagatcagtcagggtggtgggaaaagttataaggagagacgcaaaccttcttggaagtccaggaggttttgcaaagcttcgggagagaataaaggctgaaggcagctaaattctcttaccctgacgctaagggcaagaagtaggtaacaaaggagtgtaaaggaatttatctagacgagttttatttacttttgcagacctttgatcatcctattgcgcgcaggactgctcccaaggcggtgggggtgacaattacctacagattgtgttggctccaggcctttgtcattaaatctgtactgaataaatacaagcggctccagcttatcagggctgcattctctctttggtgtctctaaggccgaacagtcccctagccgcactcatgca

SEQ ID NO: 384863 - DNA, 2108 bp, Homo sapiens
aggcgcgcatgcgtgcagctctttggaggcggtagctttttcggcgtcgagactggaggctgagtgctaaactgtgtggggcgcggatgggatccagctgttagtcgggtaggcataggattggattcagcatcaaaatacatctactcatattgagagctgtcgacagttacgtcaacactcactgcaacctccacctcctgggttcaagtgatcctcccacctcagcctcctgagtagctaggaccactggtatcctgattggaatcctgagatcctcccatcgagaagaaatgagggcaatagaaaagaaaatgaaactccacgaagacgttctcattcccccagtcctaggcgttctagaagatcaagctcaagtcacagattccgtcggtctcgaagcccaatgcattacatgtataggccgagaagtcgaagtccaagaatttgccatcgtttcatttctagatacagatccagatccagatcccgttcaccatatcgaattagaaatccatttagaggtagtccaaaatgctttcgatcagttagccctgagaggatgtcaaggagatcagtgagatcatcagatagaaaaaaagcattagaagatgtagtacaacgatctgggcatgggacagaatttaataaacagaagcatcttgaagctgctgataagggacattcaccagcacaaaagcctaaaactagcagtggaacaaaaccatcagttaaacctacaagcgctacaaagagtgattcaaatctaggaggacattctattcgttgtaaatcaaagaatcttgaagatgacactttgtcagaatgtaaacaggtgtctgataaagctgtttctctccagcgaaagcttcggaaagaacagtcattgcattatggttcggttcttcttataactgaattaccagaggatggttgtactgaagaagatgtgagaaaattatttcaaccatttgggaaagtgaatgatgtcctaattgttccatatagaaaagaggcttacctagaaatggaatttaaagaggcaattactgcaattatgaagtacattgaaacaacacctcttacgataaaaggaaaaagtgtgaaaatatgtgttccaggaaagaaaaaagcacagaacaaagaggtgaagaaaaagactttagagtcaaagaaagtatctgcatctaccttaaaaagagatgcagatgcttcaaaagctgttgaaattgttacttcaacttctgctgagtcggtggatcagactcagcagctggtgcccctcgtgaggaacactgcaagggatcacgacggaacccccgaaaatgaaggcgaagagactgtgcagtcagccctctttggattccagtacgatgcatcagaccataccatggcgtggctaggacccaacacagtaccagaagtgaaggaaatgatcctgcaggacccgcagctccagacaacacagcttcctcagacgacacaagccccggacattacctgggggatgctgaagaagacaacttacaaggctgagcaaatcctgctccagacacagaaaccattcactccagataatttgttccttgctctgctctctggtgatgcaaagccggaatacgagcagtaatcgctacgcctgacaaacctgctgctgtgcacatctgtactcttcaatcaacaaaacctgatgcaaaaaacaaaagggggagatgtaggagatcagtcagggtggtgggaaaagttataaggagagacgcaaaccttcttggaagtccaggaggttttgcaaagcttcgggagagaataaaggctgaaggcagctaaattctcttaccctgacgctaagggcaagaagtaggtaacaaaggagtgtaaaggaatttatctagacgagttttatttacttttgcagacctttgatcatcctattgcgcgcaggactgctcccaaggcggtgggggtgacaattacctacagattgtgttggctccaggcctttgtcattaaatctgtactgaataaatacaagcggctccagcttatcagggctgcattctctctttggtgtctctaaggccgaacagtcccctagccgcactcatgca

SEQ ID NO: 384864 - DNA, 2018 bp, Homo sapiens
  misc_feature (1469)..(1469): n is a, c, g, or t
ctaacgaatgtgcgtgtcatccttgcgcaggggccatgctaattaccgtatcattccaattttagtatatgtgctgctgaagggagcgtttttctattttattattgttgatcttttactatgtctaatttataaattaaactttcatgtatatacaggaaaaaaaacatagtatatatagggttcaccatgagcacggtttcaaggcatccaccaggggtcttggataaggagaaactgctgtagttaatgataagaaaatgcagatgagttgtgaaagatgagatgtaaaattaggctgtgtaatcacaaattgaaaaaaatgtctttataaataggaaaaggtaataatcatgtgtcctttagaataggaagattttagatttttgttctatattttctaaattgctttatactaaatttcttttgttcaaaatatttttcctacgtagaacaaagaggtgaagaaaaagactttagagtcaaagaaagtatctgcatctaccttaaaaagagatgcagatgcttcaaaagctgttgaaattgttacttcaacttctgctgccaaaactggacaagccaaggcatctgtagccaaagtaaacaaatctacagggaaatcagcaagttctgtaaaatctgtggtaacggtagctgttaaaggtaataaagcttcaatcaaaacagcaaaatctggtggaaagaagtctctagaagccaaaaagactgggaatgtcaaaaacaaagactctaacaaacctgtgactataccagaaaactctgaaataaagaccagtattgaagtcaaagccactgaaaactgtgctaaagaagctatttctgatgctgctttggaggccacagagaatgaaccacttaacaaggaaacagaagaaatgtgtgtgatgcttgtctctaatttgcctaataaaggatattctgtagaagaagtttatgacttagcaaaaccatttggtggtttaaaggatatcttgattttatcatctcataaaaaggcatatatagaaataaatagaaaagctgctgagtctatggtaaaattttatacctgcttcccagtattgatggatggaaatcaactctcaataagtatggctcctgaaaacatgaatataaaagatgaggaagctatatttataaccttggtaaaagaaaatgacccagaggcaaacatagatacaatttatgatcgatttgtacatcttgataatttaccggaagatggacttcagtgtgtactttgtgttggacttcagtttggaaaagtggatcaccatgtattcataagtaatagaaacaaggcaattcttcagttagatagtcctgaatctgctcagtcaatgtatagctttctgaaacaaaatccacaaaatattggtgaccatatgttgacctgctcattatctccaaagatagacttaccagaggtgcaaattgagcatgacccngaattagaaaaagaaagttgatgaggaatctggattaaaggattcagaaccagagcgaaaacgcaagaagactgaagactcttcttcaggcaaatcagtggcgtctgatgtccctgaggaattagactttcttgtacctaaggctggattcttctgtccaatttgttccctcttctactcaggtgaaaaagcaatgacaaatcactgcaagagtacacgtcataagcaaaatactgagaaatttatggccaagcaaagaaaggaaaaggagcagaatgaggctgaagaaagaagctctaggtgattgggggaaaggaaagaattcactagaaatttgtttagggtccagttgatttgtgtatttttgttatcatttaatttgtaattttcgtttcagaagcaaatattcgtgttgtacaaatttctgattgccctaaatgtagagagactgatggggaaagtatgatgggtttgatttttatatcaaatcatcaggcatggagaaatatcttttagaagtgttaaaataaatgttcctactgtatattt

SEQ ID NO: 384865 - DNA, 2163 bp, Homo sapiens
  misc_feature (488)..(488): n is a, c, g, or t
gatttttcttgttaccttaatttctgttttaaaaggcatatatagaaataaatagaaaagctgctgagtctatggtaaaattttatacctgcttcccagtattgatggatggaaatcaactctcaataagtatggctcctgaaaacatgaatataaaagatgaggaagctatatttataaccttggtaaaagaaaatgacccagaggcaaacatagatacaatttatgatcgatttgtacatcttgataatttaccggaagatggacttcagtgtgtactttgtgttggacttcagtttggaaaagtggatcaccatgtattcataagtaatagaaacaaggcaattcttcagttagatagtcctgaatctgctcagtcaatgtatagctttctgaaacaaaatccacaaaatattggtgaccatatgttgacctgctcattatctccaaagatagacttaccagaggtgcaaattgagcatgacccngaattagaaaaagaaagactttggctgagcaaaacactaagaatcctaaaagcactactggtagaagttccaaatctaaagaggagccattatttccatttaatttggatgaatttgttactgtggatgaggttatagaagaagtgaatccttctcaggccaagcagaatccactaaagggaaaaaggaaagaaactctcaaaaatgttcctttctctgaacttaacttaaagaagaaaaaggggaaaacttccactcctcgtggtgttgagggagaactatcttttgtgacattggatgagattggggaagaggaagatgcagctgcacatctagcacaagctctagtcactgtggatgaagtaattgatgaagaagaactaaatatggaagaaatggtaaaaaattcaaattcactttttacattagatgaattaattgaccaagatgattgcatttcccacagtgaacctaaagatgttactgttctgtcagtggctgaagaacaagatctcctcaaacaggaacgcttggtaactgtggatgaaattggagaagtggaagagctacctttgaatgagtcagcagacataacttttgccactttaaatactaaaggaaatgaaggagatatcgtaagggattccattggcttcatttcttctcaggtgcccgaagacccttctactttagttactgtagatgaaatacaagatgacagcagtgatttgcatttagtgactttggatgaagtaactgaagaggatgaagactctctggcggattttaacaaccttaaagaagagcttaattttgttactgttgatgaagttggagaggaggaagatggagataatgatttaaaagttgagttagcacaaagcaaaaatgaccatcccacagataaaaaagggaatagaaagaagagagctgtggacacaaaaaagacaaaacttgaatccttgtcccaagtgggtccagtaaatgagaatgttatggaagaagatctaaaaaccatgattgaaagacacttaacagctaaaactccaaccaagagagttagaattgggaaaactctgccatcagaaaaagctgttgtgacagaaccagcaaaaggtgaagaggccttccagatgagtgaagttgatgaggaatctggattaaaggattcagaaccagagcgaaaacgcaagaagactgaagactcttcttcaggcaaatcagtggcgtctgatgtccctgaggaattagactttcttgtacctaaggctggattcttctgtccaatttgttccctcttctactcaggtgaaaaagcaatgacaaatcactgcaagagtacacgtcataagcaaaatactgagaaatttatggccaagcaaagaaaggaaaaggagcagaatgaggctgaagaaagaagctctaggtgattgggggaaaggaaagaattcactagaaatttgtttagggtccagttgatttgtgtatttttgttatcatttaatttgtaattttcgtttcagaagcaaatattcgtgttgtacaaatttctgattgccctaaatgtagagagactgatggggaaagtatgatgggtttgatttttatatcaaatcatcaggcatggagaaatatcttttagaagtgttaaaataaatgttcctactgtatattt

SEQ ID NO: 384866 - DNA, 326 bp, Homo sapiens
tggattatgtggttattctaattccaatttttttaaagaactattcataactttttaatcttctccaaaggcaattcttcagttagatagtcctgaatctgctcagtcaatgtatagctttctgaaacaaaatccacaaaatattggtgaccatatgttgacctgctcattatctccaaagatagacttaccagaggtaagatttatctttcttcagcttttgtgattttagaaaatacagagaacataaaggtcattctcaggtagtagtcaaactgtttctgtgtttagagatgatttttataatttgtgttgcaatcagtgtt

SEQ ID NO: 384867 - DNA, 821 bp, Homo sapiens
gttatttcatcacccagatattaagcctaggacccattagttatttttcctgatcctctccttcgtcccatcctccaccttccaataggccccagtgtgttgtttccctctatgggtccatttattttctttagatcatctttaaggtatattttgaaattttgcctaaaaattatcaaagtggggattgctgtcttttgtttttcaaagagagatgtttggcttatgtcaggtcagcctaaggagacttgaaatgtcaaactagcttaagttcctgtttagattcattagtttaattatattagtgttttactagactattaaagcagactatttcatgcagaaaactctgaaataaagaccagtattgaagtcaaagccactgaaaactgtgctaaagaagctatttctggtaggtcaatagaaattttattttgttctttacttattttaattaccaatgccatacctaagtgaaattaagagtattacgattcatgtctttatctcttaatctgaaattttgatctcagaatgaaatttaaatgtattttttaaaagccaatgtcacttttgtagtcattttgtactaattctctagacttgttgtattacacgttttcatgtagctactgtttaacctattgtggaataaagtaggatcttgataagtatgtctgcattgtttttaattttattttgtattaagatgctgctttggaggccacagagaatgaaccacttaacaaggtcagttttcatgttttatttatttctttaaagctcaagacattttaacaaaagatatttttcttataaac

SEQ ID NO: 384868 - DNA, 302 bp, Homo sapiens
gaggtgtttccaaattctgcttgcagaatgtatacatgctttatctttctgctctgggcagcagagatgagaacatgtgttacctagtgaacaggtctgaacttggtgaacctgaacctaatgaagatcaacaatattatttattgctatctcagctcactgcaacctccacctcctgggttcaagtgatcctcccacctcagcctcctgagtagctaggaccactggtgagtgccaccacgctcagctaattttttgtatttttggtagagacagggttgccaaagctggtctcaaactcc

SEQ ID NO: 384869 - DNA, 802 bp, Homo sapiens
ggaataaagtccaaattctttggctttccataaattattctttgccctttgaccccagattatcttttgaacctattaacagtcaactgtgtattattttgtagtcactcagaatagtttattttccatgttacttcattccttggttctttatttatgctgtctatttgcatggaattgatggctgacttcatttaacttcagtaagcacttaataggtcgcaggcaaggtactgaagataaaaagtcagttaagacttcttttggggagagttggaggacagattctgatttatcctgtaaggctcatctctgatgaaacttccttgatcgaatgatttttttctcttgttatggcttttctcttttttagaaataatatgtccccttttctttttaccttttcagttcccagctgaaaatgacattcttttaaatctaagtataaaagtaatgaatgtttattgtgaaaattttaaaatatttcagaaaatgtttaaagaaagtgatttacaccattcagagatcacctcttgtttatttgcttaagtcagttattttcccaataaaagccctttgctcacctgtgggaactcccacatgtgagttccaccaaatctttcagaaagcaatatcgatttcagctataccatggcattcaggagaagggaaagcttcctgtaaaaggggaaatgagaaaaggtgggggaacaggctaatacatcaaatactgacaaagacactacacacctatcagaatggctaaaataaaaaatactgatagcaccaaatgctgatgagt

SEQ ID NO: 384870 - DNA, 6502 bp, Homo sapiens
aggcgcgcatgcgtgcagctctttggaggcggtagctttttcggcgtcgagactggaggctgagtgctaaactgtgtggggcgcggatgggatccagctgttagtcgggtaggcatagctttgtgttattcttggaaaatttcgcaccacttgtgaattccttgaacctgggcattgcaaacccacttctgttgggcccatctcctttgcactttgctcagattaagactcagttggcgcttcagcagctgaatgccgttgcctcacatggttcaacaccaccttatactttattaaatcaggctttcttgaaaatagccatgtcgagacccaggtttaatcctcgaggagactttccacttcaaaggccacgagcacctaacccttctgggatgaggcctccaggaccatttatgaggcctggatctatgggtctcccaagattttacccagcagggagagcacgtggaattccacacagatttgctggccatgaatcttatcagaacatggggccacagagaatgaatgttcaggtaactcaacacagaactgatccaagattgaccaaagaaaaactggattttcatgaagcacaacagaagaaggggaagcctcatggtagccggtgggatgatgagcctcatatatctgcatcagtggcagtgaaacagagttctgtaacacaggttacagagcagagtcccaaagtacagagccgctatacaaaagagagtgcctcaagtatcttagcaagttttggattatctaatgaagacctagaagaacttagtcgctatcctgatgaacaactaactcctgaaaatatgccattaattttgagggatataagaatgcgaaaaatggggcgccgattacctaatttaccttctcagagcagaaataaagaaacacttggtagtgaagcagtttcaagtaatgtgatcgattatgggcatgcaagcaaatatggctacacagaagatccacttgaagtacgtatttatgatcctgaaattccaactgatgaggtcgagaatgaatttcagtcacagcagaacatttctgcatctgttcccaatccaaatgtgatatgtaattctatgtttcctgttgaagacgtatttcgccaaatggacttccccggtgagtcctccaataatcggtcctttttctcagttgagagtggaaccaagatgtcaggcttacacatttcaggaggacagtcagtccttgaacccataaaatccgtcaaccaatccattaaccaaacagttagccagacaatgagtcaatctctgattcctccatctatgaaccagcaacctttttcgtcggaattaatttcatctgtaagccagcaagagcggatcccacatgaacctgtgattaattcatctaacgtacatgttggatcaagaggaagtaaaaagaattaccagtcacaggctgacattcccattcggtctccctttggtattgtgaaagcatcctggctaccaaagttttcacatgctgatgcccagaagatgaagagacttccaactccttctatgatgaatgattattatgcagcatctccaagaatatttccacatttgtgttctctgtgtaacgtagaatgtagtcatttgaaggattggattcagcatcaaaatacatctactcatattgagagctgtcgacagttacgtcaacagtatcctgattggaatcctgagatcctcccatcgagaagaaatgagggcaatagaaaagaaaatgaaactccacgaagacgttctcattcccccagtcctaggcgttctagaagatcaagctcaagtcacagattccgtcggtctcgaagcccaatgcattacatgtataggccgagaagtcgaagtccaagaatttgccatcgtttcatttctagatacagatccagatccagatcccgttcaccatatcgaattagaaatccatttagaggtagtccaaaatgctttcgatcagttagccctgagaggatgtcaaggagatcagtgagatcatcagatagaaaaaaagcattagaagatgtagtacaacgatctgggcatgggacagaatttaataaacagaagcatcttgaagctgctgataagggacattcaccagcacaaaagcctaaaactagcagtggaacaaaaccatcagttaaacctacaagcgctacaaagagtgattcaaatctaggaggacattctattcgttgtaaatcaaagaatcttgaagatgacactttgtcagaatgtaaacaggtgtctgataaagctgtttctctccagcgaaagcttcggaaagaacagtcattgcattatggttcggttcttcttataactgaattaccagaggatggttgtactgaagaagatgtgagaaaattatttcaaccatttgggaaagtgaatgatgtcctaattgttccatatagaaaagaggcttacctagaaatggaatttaaagaggcaattactgcaattatgaagtacattgaaacaacacctcttacgataaaaggaaaaagtgtgaaaatatgtgttccaggaaagaaaaaagcacagaacaaagaggtgaagaaaaagactttagagtcaaagaaagtatctgcatctaccttaaaaagagatgcagatgcttcaaaagctgttgaaattgttacttcaacttctgctgccaaaactggacaagccaaggcatctgtagccaaagtaaacaaatctacagggaaatcagcaagttctgtaaaatctgtggtaacggtagctgttaaaggtaataaagcttcaatcaaaacagcaaaatctggtggaaagaagtctctagaagccaaaaagactgggaatgtcaaaaacaaagactctaacaaacctgtgactataccagaaaactctgaaataaagaccagtattgaagtcaaagccactgaaaactgtgctaaagaagctatttctgatgctgctttggaggccacagagaatgaaccacttaacaaggaaacagaagaaatgtgtgtgatgcttgtctctaatttgcctaataaaggatattctgtagaagaagtttatgacttagcaaaaccatttggtggtttaaaggatatcttgattttatcatctcataaaaaggcatatatagaaataaatagaaaagctgctgagtctatggtaaaattttatacctgcttcccagtattgatggatggaaatcaactctcaataagtatggctcctgaaaacatgaatataaaagatgaggaagctatatttataaccttggtaaaagaaaatgacccagaggcaaacatagatacaatttatgatcgatttgtacatcttgataatttaccggaagatggacttcagtgtgtactttgtgttggacttcagtttggaaaagtggatcaccatgtattcataagtaatagaaacaaggcaattcttcagttagatagtcctgaatctgctcagtcaatgtatagctttctgaaacaaaatccacaaaatattggtgaccatatgttgacctgctcattatctccaaagatagacttaccagaggtgcaaattgagcatgacccagaattagaaaaagaaagccctggcttgaaaaacagtccaattgatgaaagtgaggtgcaaacagcaactgatagtccctctgttaaacctaatgagcttgaagaagaaagtactcccagcattcaaacagaaactttggtacagcaggaagagccttgtgaggaagaagctgaaaaagcaacatgtgattctgactttgctgttgaaactttggagcttgaaactcaaggagaggaggtcaaagaagaaattcctcttgtagcatccgcttcagtcagtattgaacaattcactgaaaatgccgaggagtgtgctttaaatcagcagatgtttaacagtgacttggagaagaaaggggcagaaattattaaccctaaaacagcattgttaccatctgacagtgtgtttgcagaagaaaggaacctcaaaggaattctagaagaatctccatctgaagcagaagatttcatttctggaattacacagactatggtagaagctgtagctgaagtagaaaaaaatgaaactgtttcggaaatattgccatcaacttgtattgtgacgttagtaccaggaattcccactggggatgagaagacagtggacaaaaagaatatttctgaaaaaaaaggtaacatggatgaaaaggaggagaaggaatttaatactaaggaaaccagaatggatcttcaaataggaacagagaaggctgaaaagaatgaaggtaggatggatgcagaaaaggtggaaaagatggcagcaatgaaagaaaagcctgcagaaaacactttattcaaggcatacccaaataaaggagtgggtcaggctaataagcctgatgaaactagtaaaactagtattctggctgtatcagatgtatctagcagtaaaccaagcatcaaggctgttatagtctcttctcctaaggcaaaagctacagtttcaaaaactgaaaatcagaaaagttttccaaaatctgtgcccagagatcaaataaatgctgaaaagaaactttcagccaaggaatttggtctgcttaaacccacaagtgccaggtcaggcttggcagaaagcagcagtaaattcaaacctactcagagcagtcttaccagaggaggcagtggaaggatctcagccctgcaaggcaagctttctaaactggattacagagatataacaaaacaatctcaggaaacagaggctagaccttccatcatgaaacgggatgacagcaacaataagactttggctgagcaaaacactaagaatcctaaaagcactactggtagaagttccaaatctaaagaggagccattatttccatttaatttggatgaatttgttactgtggatgaggttatagaagaagtgaatccttctcaggccaagcagaatccactaaagggaaaaaggaaagaaactctcaaaaatgttcctttctctgaacttaacttaaagaagaaaaaggggaaaacttccactcctcgtggtgttgagggagaactatcttttgtgacattggatgagattggggaagaggaagatgcagctgcacatctagcacaagctctagtcactgtggatgaagtaattgatgaagaagaactaaatatggaagaaatggtaaaaaattcaaattcactttttacattagatgaattaattgaccaagatgattgcatttcccacagtgaacctaaagatgttactgttctgtcagtggctgaagaacaagatctcctcaaacaggaacgcttggtaactgtggatgaaattggagaagtggaagagctacctttgaatgagtcagcagacataacttttgccactttaaatactaaaggaaatgaaggagatatcgtaagggattccattggcttcatttcttctcaggtgcccgaagacccttctactttagttactgtagatgaaatacaagatgacagcagtgatttgcatttagtgactttggatgaagtaactgaagaggatgaagactctctggcggattttaacaaccttaaagaagagcttaattttgttactgttgatgaagttggagaggaggaagatggagataatgatttaaaagttgagttagcacaaagcaaaaatgaccatcccacagataaaaaagggaatagaaagaagagagctgtggacacaaaaaagacaaaacttgaatccttgtcccaagtgggtccagtaaatgagaatgttatggaagaagatctaaaaaccatgattgaaagacacttaacagctaaaactccaaccaagagagttagaattgggaaaactctgccatcagaaaaagctgttgtgacagaaccagcaaaaggtgaagaggccttccagatgagtgaagttgatgaggaatctggattaaaggattcagaaccagagcgaaaacgcaagaagactgaagactcttcttcaggcaaatcagtggcgtctgatgtccctgaggaattagactttcttgtacctaaggctggattcttctgtccaatttgttccctcttctactcaggtgaaaaagcaatgacaaatcactgcaagagtacacgtcataagcaaaatactgagaaatttatggccaagcaaagaaaggaaaaggagcagaatgaggctgaagaaagaagctctaggtgattgggggaaaggaaagaattcactagaaatttgtttagggtccagttgatttgtgtatttttgttatcatttaatttgtaattttcgtttcagaagcaaatattcgtgttgtacaaatttctgattgccctaaatgtagagagactgatggggaaagtatgatgggtttgatttttatatcaaatcatcaggcatggagaaatatcttttagaagtgttaaaataaatgttcctactgtatattt

SEQ ID NO: 384871 - DNA, 2889 bp, Homo sapiens
aggcgcgcatgcgtgcagctctttggaggcggtagctttttcggcgtcgagactggaggctgagtgctaaactgtgtggggcgcggatgggatccagctgttagtcgggtaggcatagctttgtgttattcttggaaaatttcgcaccacttgtgaattccttgaacctgggcattgcaaacccacttctgttgggcccatctcctttgcactttgctcagattaagactcagttggcgcttcagcagctgaatgccgttgcctcacatggttcaacaccaccttatactttattaaatcaggctttcttgaaaatagccatgtcgagacccaggtttaatcctcgaggagactttccacttcaaaggccacgagcacctaacccttctgggatgaggcctccaggaccatttatgaggcctggatctatgggtctcccaagattttacccagcagggagagcacgtggaattccacacagatttgctggccatgaatcttatcagaacatggggccacagagaatgaatgttcaggtaactcaacacagaactgatccaagattgaccaaagaaaaactggattttcatgaagcacaacagaagaaggggaagcctcatggtagccggtgggatgatgagcctcatatatctgcatcagtggcagtgaaacagagttctgtaacacaggttacagagcagagtcccaaagtacagagccgctatacaaaagagagtgcctcaagtatcttagcaagttttggattatctaatgaagacctagaagaacttagtcgctatcctgatgaacaactaactcctgaaaatatgccattaattttgagggatataagaatgcgaaaaatggggcgccgattacctaatttaccttctcagagcagaaataaagaaacacttggtagtgaagcagtttcaagtaatgtgatcgattatgggcatgcaagcaaatatggctacacagaagatccacttgaagtacgtatttatgatcctgaaattccaactgatgaggtcgagaatgaatttcagtcacagcagaacatttctgcatctgttcccaatccaaatgtgatatgtaattctatgtttcctgttgaagacgtatttcgccaaatggacttccccggtgagtcctccaataatcggtcctttttctcagttgagagtggaaccaagatgtcaggcttacacatttcaggaggacagtcagtccttgaacccataaaatccgtcaaccaatccattaaccaaacagttagccagacaatgagtcaatctctgattcctccatctatgaaccagcaacctttttcgtcggaattaatttcatctgtaagccagcaagagcggatcccacatgaacctgtgattaattcatctaacgtacatgttggatcaagaggaagtaaaaagaattaccagtcacaggctgacattcccattcggtctccctttggtattgtgaaagcatcctggctaccaaagttttcacatgctgatgcccagaagatgaagagacttccaactccttctatgatgaatgattattatgcagcatctccaagaatatttccacatttgtgttctctgtgtaacgtagaatgtagtcatttgaaggattggattcagcatcaaaatacatctactcatattgagagctgtcgacagttacgtcaacagtatcctgattggaatcctgagatcctcccatcgagaagaaatgagggcaatagaaaagaaaatgaaactccacgaagacgttctcattcccccagtcctaggcgttctagaagatcaagctcaagtcacagattccgtcggtctcgaagcccaatgcattacatgtataggccgagaagtcgaagtccaagaatttgccatcgtttcatttctagatacagatccagatccagatcccgttcaccatatcgaattagaaatccatttagaggtagtccaaaatgctttcgatcagttagccctgagaggatgtcaaggagatcagtgagatcatcagatagaaaaaaagcattagaagatgtagtacaacgatctgggcatgggacagaatttaataaacagaagcatcttgaagctgctgataagggacattcaccagcacaaaagcctaaaactagcagtggaacaaaaccatcagttaaacctacaagcgctacaaagagtgattcaaatctaggaggacattctattcgttgtaaatcaaagaatcttgaagatgacactttgtcagaatgtaaacaggtgtctgataaagctgtttctctccagcgaaagcttcggaaagaacagtcattgcattatggttcggttcttcttataactgaattaccagaggatggttgtactgaagaagatgtgagaaaattatttcaaccatttgggaaagtgaatgatgtcctaattgttccatatagaaaagaggcttacctagaaatggaatttaaagaggcaattactgcaattatgaagtacattgaaacaacacctcttacgataaaaggaaaaagtgtgaaaatatgtgttccaggaaagaaaaaagcacagaacaaagaggtgaagaaaaagactttagagtcaaagaaagtatctgcatctaccttaaaaagagatgcagatgcttcaaaagctgttgaaattgttacttcaacttctgctggctggagttcagttgtggaatctcagttcattgcagtctccacctcccaggttcaagtgcttcttccacctcatcctcctgagtagctggtattacaggccagagacacctcatccagctaaaccttttttttctttatacactaagtataaagaataatagcaataaaacattttaaattacaaaagctga

SEQ ID NO: 384872 - DNA, 2865 bp, Homo sapiens
aggcgcgcatgcgtgcagctctttggaggcggtagctttttcggcgtcgagactggaggctgagtgctaaactgtgtggggcgcggatgggatccagctgttagtcgggtaggcatagctttgtgttattcttggaaaatttcgcaccacttgtgaattccttgaacctgggcattgcaaacccacttctgttgggcccatctcctttgcactttgctcagattaagactcagttggcgcttcagcagctgaatgccgttgcctcacatggttcaacaccaccttatactttattaaatcaggctttcttgaaaatagccatgtcgagacccaggtttaatcctcgaggagactttccacttcaaaggccacgagcacctaacccttctgggatgaggcctccaggaccatttatgaggcctggatctatgggtctcccaagattttacccagcagggagagcacgtggaattccacacagatttgctggccatgaatcttatcagaacatggggccacagagaatgaatgttcaggtaactcaacacagaactgatccaagattgaccaaagaaaaactggattttcatgaagcacaacagaagaaggggaagcctcatggtagccggtgggatgatgagcctcatatatctgcatcagtggcagtgaaacagagttctgtaacacaggttacagagcagagtcccaaagtacagagccgctatacaaaagagagtgcctcaagtatcttagcaagttttggattatctaatgaagacctagaagaacttagtcgctatcctgatgaacaactaactcctgaaaatatgccattaattttgagggatataagaatgcgaaaaatggggcgccgattacctaatttaccttctcagagcagaaataaagaaacacttggtagtgaagcagtttcaagtaatgtgatcgattatgggcatgcaagcaaatatggctacacagaagatccacttgaagtacgtatttatgatcctgaaattccaactgatgaggtcgagaatgaatttcagtcacagcagaacatttctgcatctgttcccaatccaaatgtgatatgtaattctatgtttcctgttgaagacgtatttcgccaaatggacttccccggtgagtcctccaataatcggtcctttttctcagttgagagtggaaccaagatgtcaggcttacacatttcaggaggacagtcagtccttgaacccataaaatccgtcaaccaatccattaaccaaacagttagccagacaatgagtcaatctctgattcctccatctatgaaccagcaacctttttcgtcggaattaatttcatctgtaagccagcaagagcggatcccacatgaacctgtgattaattcatctaacgtacatgttggatcaagaggaagtaaaaagaattaccagtcacaggctgacattcccattcggtctccctttggtattgtgaaagcatcctggctaccaaagttttcacatgctgatgcccagaagatgaagagacttccaactccttctatgatgaatgattattatgcagcatctccaagaatatttccacatttgtgttctctgtgtaacgtagaatgtagtcatttgaaggattggattcagcatcaaaatacatctactcatattgagagctgtcgacagttacgtcaacagtatcctgattggaatcctgagatcctcccatcgagaagaaatgagggcaatagaaaagaaaatgaaactccacgaagacgttctcattcccccagtcctaggcgttctagaagatcaagctcaagtcacagattccgtcggtctcgaagcccaatgcattacatgtataggccgagaagtcgaagtccaagaatttgccatcgtttcatttctagatacagatccagatccagatcccgttcaccatatcgaattagaaatccatttagaggtagtccaaaatgctttcgatcagttagccctgagaggatgtcaaggagatcagtgagatcatcagatagaaaaaaagcattagaagatgtagtacaacgatctgggcatgggacagaatttaataaacagaagcatcttgaagctgctgataagggacattcaccagcacaaaagcctaaaactagcagtggaacaaaaccatcagttaaacctacaagcgctacaaagagtgattcaaatctaggaggacattctattcgttgtaaatcaaagaatcttgaagatgacactttgtcagaatgtaaacaggtgtctgataaagctgtttctctccagcgaaagcttcggaaagaacagtcattgcattatggttcggttcttcttataactgaattaccagaggatggttgtactgaagaagatgtgagaaaattatttcaaccatttgggaaagtgaatgatgtcctaattgttccatatagaaaagaggcttacctagaaatggaatttaaagaggcaattactgcaattatgaagtacattgaaacaacacctcttacgataaaaggaaaaagtgtgaaaatatgtgttccaggaaagaaaaaagcacagaacaaagaggtgaagaaaaagactttagagtcaaagaaagtatctgcatctaccttaaaaagagatgcagatgcttcaaaagctgttgaaattgttacttcaacttctgctggactgctccctacaggcgggggcaacaattacccacagattgtgttggctccaggcctttgtcattaaatctgtactaaataaatacaagcagctccagcttattggggctgcgttctctcttcggcgtctctaaggccgagcagtttcctagctgcgctcacgcaaa

SEQ ID NO: 384873 - DNA, 2212 bp, Homo sapiens
aggcgcgcatgcgtgcagctctttggaggcggtagctttttcggcgtcgagactggaggctgagtgctaaactgtgtggggcgcggatgggatccagctgttagtcgggtaggcatagctttgtgttattcttggaaaatttcgcaccacttgtgaattccttgaacctgggcattgcaaacccacttctgttgggcccatctcctttgcactttgctcagattaagactcagttggcgcttcagcagctgaatgccgttgcctcacatggttcaacaccaccttatactttattaaatcaggctttcttgaaaatagccatgtcgagacccaggtttaatcctcgaggagactttccacttcaaaggccacgagcacctaacccttctgggatgaggcctccaggaccatttatgaggcctggatctatgggtctcccaagattttacccagcagggagagcacgtggaattccacacagatttgctggccatgaatcttatcagaacatggggccacagagaatgaatgttcaggtaactcaacacagaactgatccaagattgaccaaagaaaaactggattttcatgaagcacaacagaagaaggggaagcctcatggtagccggtgggatgatgagcctcatatatctgcatcagtggcagtgaaacagagttctgtaacacaggttacagagcagagtcccaaagtacagagccgctatacaaaagagagtgcctcaagtatcttagcaagttttggattatctaatgaagacctagaagaacttagtcgctatcctgatgaacaactaactcctgaaaatatgccattaattttgagggatataagaatgcgaaaaatggggcgccgattacctaatttaccttctcagagcagaaataaagaaacacttggtagtgaagcagtttcaagtaatgtgatcgattatgggcatgcaagcaaatatggctacacagaagatccacttgaagtacgtatttatgatcctgaaattccaactgatgaggtcgagaatgaatttcagtcacagcagaacatttctgcatctgttcccaatccaaatgtgatatgtaattctatgtttcctgttgaagacgtatttcgccaaatggacttccccggtgagtcctccaataatcggtcctttttctcagttgagagtggaaccaagatgtcaggcttacacatttcaggaggacagtcagtccttgaacccataaaatccgtcaaccaatccattaaccaaacagttagccagacaatgagtcaatctctgattcctccatctatgaaccagcaacctttttcgtcggaattaatttcatctgtaagccagcaagagcggatcccacatgaacctgtgattaattcatctaacgtacatgttggatcaagaggaagtaaaaagaattaccagtcacaggctgacattcccattcggtctccctttggtattgtgaaagcatcctggctaccaaagttttcacatgctgatgcccagaagatgaagagacttccaactccttctatgatgaatgattattatgcagcatctccaagaatatttccacatttgtgttctctgtgtaacgtagaatgtagtcatttgaaggattggattcagcatcaaaatacatctactcatattgagagctgtcgacagttacgtcaacactcactgcaacctccacctcctgggttcaagtgatcctcccacctcagcctcctgagtagctaggaccactggtatcctgattggaatcctgagatcctcccatcgagaagaaatgagggcaatagaaaagaaaatgaaactccacgaagacgttctcattcccccagtcctaggcgttctagaagatcaagctcaagtcacagattccgtcggtctcgaagcccaatgcattacatgtataggccgagaagtcgaagtccaagaatttgccatcgtttcatttctagatacagatccagatccagatcccgttcaccatatcgaattagaaatccatttagaggtagtccaaaatgctttcgatcagttagccctgtgggaactcccacatgtgagttccaccaaatctttcagaaagcaatatcgatttcagctataccatggcaacagcaaaggagtgccctaaaagcgtgctgttcactcaattatcgtactctaaaaccccacaccac

SEQ ID NO: 384874 - DNA, 520 bp, Homo sapiens
tccgcgtgcaggactgctccctacaggcgggggcaacaattacccacagattgtgttggctccaggcctttgtcattaaatctgtactaaataaatacaagcagctccagcttattggggctgcgttctctcttcggcgtctctaaggccgagcagtttcctagctgcgctcacgcaaaatacctgtgtctgcgtacttttttcatccgtcgctcggccagagtcggtggatcagactcagcagctggtgcccctcgtgaggaacactgcaagggatcacgacggaacccccgaaaatgaaggcgaagagactgtgcagtcagtaagtcattggtgcccactcgggatatccaagttcaggggaattctcagactagagtttcatcatgagacaacagctgtccgcacaacagaaacagtatataaaagtattgaaacaactgcttaaagctagcagagcctcggtttcacaggctcagttaagggtcctaaggcaaactgttgtttcccataatccatg

SEQ ID NO: 384875 - DNA, 1709 bp, Homo sapiens
ctcgagcgggacagatccaagttgggagcagctctgcgtgcggggcctcagagaatgaggccggcgttcgccctgtgcctcctctggcaggcgctctggcccgggccgggcggcggcgaacaccccactgccgaccgtgctggctgctcggcctcgggggcctgctacagcctgcaccacgctaccatgaagcggcaggcggccgaggaggcctgcatcctgcgaggtggggcgctcagcaccgtgcgtgcgggcgccgagctgcgcgctgtgctcgcgctcctgcgggcaggcccaggcccggagggggctccaaagacctgctgttctgggtcgcactggagcgcaggcgttcccactgcaccctggagaacgagcctttgcggggtttctcctggctgtcctccgaccccggcggtctcgaaagcgacacgctgcagtgggtggaggagccccaacgctcctgcaccgcgcggagatgcgcggtactccaggccaccggtggggtcgagcccgcaggctggaaggagatgcgatgccacctgcgcgccaacggctacctgtgcaagtaccagtttgaggtcttgtgtcctgcgccgcgccccggggccgcctctaacttgagctatcgcgcgcccttccagctgcacagcgccgctctggacttcagtccacctgggaccgaggtgagtgcgctctgccggggacagctcccgatctcagttacttgcatcgcggacgaaatcggcgctcgctgggacaaactctcgggcgatgtgttgtgtccctgccccgggaggtacctccgtgctggcaaatgcgcagagctccctaactgcctagacgacttgggaggctttgcctgcgaatgtgctacgggcttcgagctggggaaggacggccgcttcttgtgtgaccagtggggaaggacagccgacccttggggggaccggggtgcccaccaggcgcccgccggccactgcaaccagccccgtgccgcagagaacatggccaatcagggtcgacgagaagctgggagagatattttcttatgtttattcggagaatttggagaagtgattgaacttttcaagacattggaaacaaatagaacacaatataatttacattaaaaaataatttctaccaaaatggaaaggaaatgttctatgttgttcaggctaggagtatattggttcgaaatcccagggaaaaaaataaaaataaaaaattaaaggattgttgataaaaaatcaaatatcattgccttcctccaggagtaattaggaacagctgagggcatgctgggagtaagcagcaagagtgcattctgcttttagattgagggagaggtccttaagttcctcgaatgagacacagatctttaagaactagtaactttttcattgattcttttatcctttcttttcaaagtcactgctacttgtgtgctttgctataaatcgaaagtgtagtgttgccagaattgctggctctggaagaaaattacagttgaccaccagttcaagtgtttactttatgtccatgcccaaggaaaacacataatttgcgttttccctttccagtgtttgtgctttccagcgtaatgacctccccaagcaaatagccctctcctgaacatcaagatgctcatcctcatcttcaattatggtgatgttaattctcaattaaaatgttaatgctaagta

SEQ ID NO: 384876 - DNA, 1623 bp, Homo sapiens
ctcgagcgggacagatccaagttgggagcagctctgcgtgcggggcctcagagaatgaggccggcgttcgccctgtgcctcctctggcaggcgctctggcccgggccgggcggcggcgaacaccccactgccgaccgtgctggctgctcggcctcgggggcctgctacagcctgcaccacgctaccatgaagcggcaggcggccgaggaggcctgcatcctgcgaggtggggcgctcagcaccgtgcgtgcgggcgccgagctgcgcgctgtgctcgcgctcctgcgggcaggcccaggcccggagggggctccaaagacctgctgttctgggtcgcactggagcgcaggcgttcccactgcaccctggagaacgagcctttgcggggtttctcctggctgtcctccgaccccggcggtctcgaaagcgacacgctgcagtgggtggaggagccccaacgctcctgcaccgcgcggagatgcgcggtactccaggccaccggtggggtcgagcccgcaggctggaaggagatgcgatgccacctgcgcgccaacggctacctgtgcaagtaccagtttgaggtcttgtgtcctgcgccgcgccccggggccgcctctaacttgagctatcgcgcgcccttccagctgcacagcgccgctctggacttcagtccacctgggaccgaggtgagtgcgctctgccggggacagctcccgatctcagttacttgcatcgcggacgaaatcggcgctcgctgggacaaactctcgggcgatgtgttgtgtccctgccccgggaggtacctccgtgctggcaaatgcgcagagctccctaactgcctagacgacttgggaggctttgcctgcgaatgtgctacgggcttcgagctggggaaggacggccgcttcttgtgtgaccagtggggaaggacagccgacccttggggggaccggggtgcccaccaggcgcccgccggccactgcaaccagccccgtgccgcagagaacatggccaatcagggtcgacgagaagctgggagagacaccacttgtccctgaacaagacaattcagtaacatctattcctgagattcctcgatggggatcacagagcacgatgtctacccttcaaatgtcccttcaagccgagtcaaaggccactatcaccccatcagggagcgtgatttccaagtttaattctacgacttcctctgccactcctcaggctttcgactcctcctctgccgtggtcttcatatttgtgagcacagcagtagtagtgttggtgatcttgaccatgacagtactggggcttgtcaagctctgctttcacgaaagcccctcttccctgatgatagaggaagtggaagtgcctttaggatggtgatactgggggaccgggtagtgctggggagagatattttcttatgtttattcggagaatttggagaagtgattgaacttttcaagacattggaaacaaatagaacacaatataatttacattaaaaaataatttctaccaaaatggaaaggaaatgttctatgttgttcaggctaggagtatattggttcgaaatcccagggaaaaaaataaaaataaaaaattaaaggattgttgata

SEQ ID NO: 384877 - DNA, 1869 bp, Homo sapiens
ctcgagcgggacagatccaagttgggagcagctctgcgtgcggggcctcagagaatgaggccggcgttcgccctgtgcctcctctggcaggcgctctggcccgggccgggcggcggcgaacaccccactgccgaccgtgctggctgctcggcctcgggggcctgctacagcctgcaccacgctaccatgaagcggcaggcggccgaggaggcctgcatcctgcgaggtggggcgctcagcaccgtgcgtgcgggcgccgagctgcgcgctgtgctcgcgctcctgcgggcaggcccaggcccggagggggctccaaagacctgctgttctgggtcgcactggagcgcaggcgttcccactgcaccctggagaacgagcctttgcggggtttctcctggctgtcctccgaccccggcggtctcgaaagcgacacgctgcagtgggtggaggagccccaacgctcctgcaccgcgcggagatgcgcggtactccaggccaccggtggggtcgagcccgcaggctggaaggagatgcgatgccacctgcgcgccaacggctacctgtgcaagtaccagtttgaggtcttgtgtcctgcgccgcgccccggggccgcctctaacttgagctatcgcgcgcccttccagctgcacagcgccgctctggacttcagtccacctgggaccgaggtgagtgcgctctgccggggacagctcccgatctcagttacttgcatcgcggacgaaatcggcgctcgctgggacaaactctcgggcgatgtgttgtgtccctgccccgggaggtacctccgtgctggcaaatgcgcagagctccctaactgcctagacgacttgggaggctttgcctgcgaatgtgctacgggcttcgagctggggaaggacggccgcttcttgtgtgaccagtggggaaggacagccgacccttggggggaccggggtgcccaccaggcgcccgccggccactgcaaccagccccgtgccgcagagaacatggccaatcagggtcgacgagaagctgggagagacaccacttgtccctgaacaagacaattcagtaacatctattcctgagattcctcgatggggatcacagagcacgatgtctacccttcaaatgtcccttcaagccgagtcaaaggccactatcaccccatcagggagcgtgatttccaagtttaattctacgacttcctctgccactcctcaggctttcgactcctcctctgccgtggtcttcatatttgtgagcacagcagtagtagtgttggtgatcttgaccatgacagtactggggcttgtcaagctctgctttcacgaaagcccctcttcccagccaaggaaggagtctatgggcccgccgggcctggagagtgatcctgagcccgctgctttgggctccagttctgcacattgcacaaacaatggggtgaaagtcggggactgtgatctgcgggacagagcagagggtgccttgctggcggagtcccctcttggctctagtgatgcatagggaaacaggggacatgggcactcctgtgaacagtttttcacttttgatgaaacggggaaccaagaggaacttacttgtgtaactgacaatttctgcagaaatcccccttcctctaaattccctttactccactgaggagctaaatcagaactgcacactccttccctgatgatagaggaagtggaagtgcctttaggatggtgatactgggggaccgggtagtgctggggagagatattttcttatgtttattcggagaatttggagaagtgattgaacttttcaagacattggaaacaaatagaacacaatataatttacattaaaaaataatttctacca

SEQ ID NO: 384878 - DNA, 1968 bp, Homo sapiens
ctcgagcgggacagatccaagttgggagcagctctgcgtgcggggcctcagagaatgaggccggcgttcgccctgtgcctcctctggcaggcgctctggcccgggccgggcggcggcgaacaccccactgccgaccgtgctggctgctcggcctcgggggcctgctacagcctgcaccacgctaccatgaagcggcaggcggccgaggaggcctgcatcctgcgaggtggggcgctcagcaccgtgcgtgcgggcgccgagctgcgcgctgtgctcgcgctcctgcgggcaggcccaggcccggagggggctccaaagacctgctgttctgggtcgcactggagcgcaggcgttcccactgcaccctggagaacgagcctttgcggggtttctcctggctgtcctccgaccccggcggtctcgaaagcgacacgctgcagtgggtggaggagccccaacgctcctgcaccgcgcggagatgcgcggtactccaggccaccggtggggtcgagcccgcaggctggaaggagatgcgatgccacctgcgcgccaacggctacctgtgcaagtaccagtttgaggtcttgtgtcctgcgccgcgccccggggccgcctctaacttgagctatcgcgcgcccttccagctgcacagcgccgctctggacttcagtccacctgggaccgaggtgagtgcgctctgccggggacagctcccgatctcagttacttgcatcgcggacgaaatcggcgctcgctgggacaaactctcgggcgatgtgttgtgtccctgccccgggaggtacctccgtgctggcaaatgcgcagagctccctaactgcctagacgacttgggaggctttgcctgcgaatgtgctacgggcttcgagctggggaaggacggccgcttcttgtgtgaccagtggggaaggacagccgacccttggggggaccggggtgcccaccaggcgcccgccggccactgcaaccagccccgtgccgcagagaacatggccaatcagggtcgacgagaagctgggagagacaccacttgtccctgaacaagacaattcagtaacatctattcctgagattcctcgatggggatcacagagcacgatgtctacccttcaaatgtcccttcaagccgagtcaaaggccactatcaccccatcagggagcgtgatttccaagtttaattctacgacttcctctgccactcctcaggctttcgactcctcctctgccgtggtcttcatatttgtgagcacagcagtagtagtgttggtgatcttgaccatgacagtactggggcttgtcaagctctgctttcacgaaagcccctcttcccagccaaggaaggagtctatgggcccgccgggcctggagagtgatcctgagcccgctgctttgggctccagttctgcacattgcacaaacaatggggtgaaagtcggggactgtgatctgcgggacagagcagagggtgccttgctggcggagtcccctcttggctctagtgatgcatagggaaacaggggacatgggcactcctgtgaacagtttttcacttttgatgaaacggggaaccaagaggaacttacttgtgtaactgacaatttctgcagaaatcccccttcctctaaattccctttactccactgaggagctaaatcagaactgcacactccttccctgatgatagaggaagtggaagtgcctttaggatggtgatactgggggaccgggtagtgctggggagagatattttcttatgtttattcggagaatttggagaagtgattgaacttttcaagacattggaaacaaatagaacacaatataatttacattaaaaaataatttctaccaaaatggaaaggaaatgttctatgttgttcaggctaggagtatattggttcgaaatcccagggaaaaaaataaaaataaaaaattaaaggattgttgata

SEQ ID NO: 384879 - DNA, 2429 bp, Homo sapiens
ctcgagcgggacagatccaagttgggagcagctctgcgtgcggggcctcagagaatgaggccggcgttcgccctgtgcctcctctggcaggcgctctggcccgggccgggcggcggcgaacaccccactgccgaccgtgctggctgctcggcctcgggggcctgctacagcctgcaccacgctaccatgaagcggcaggcggccgaggaggcctgcatcctgcgaggtggggcgctcagcaccgtgcgtgcgggcgccgagctgcgcgctgtgctcgcgctcctgcgggcaggcccaggcccggagggggctccaaagacctgctgttctgggtcgcactggagcgcaggcgttcccactgcaccctggagaacgagcctttgcggggtttctcctggctgtcctccgaccccggcggtctcgaaagcgacacgctgcagtgggtggaggagccccaacgctcctgcaccgcgcggagatgcgcggtactccaggccaccggtggggtcgagcccgcaggctggaaggagatgcgatgccacctgcgcgccaacggctacctgtgcaagtaccagtttgaggtcttgtgtcctgcgccgcgccccggggccgcctctaacttgagctatcgcgcgcccttccagctgcacagcgccgctctggacttcagtccacctgggaccgaggtgagtgcgctctgccggggacagctcccgatctcagttacttgcatcgcggacgaaatcggcgctcgctgggacaaactctcgggcgatgtgttgtgtccctgccccgggaggtacctccgtgctggcaaatgcgcagagctccctaactgcctagacgacttgggaggctttgcctgcgaatgtgctacgggcttcgagctggggaaggacggccgcttcttgtgtgaccagtggggaaggacagccgacccttggggggaccggggtgcccaccaggcgcccgccggccactgcaaccagccccgtgccgcagagaacatggccaatcagggtcgacgagaagctgggagagacaccacttgtccctgaacaagacaattcagtaacatctattcctgagattcctcgatggggatcacagagcacgatgtctacccttcaaatgtcccttcaagccgagtcaaaggccactatcaccccatcagggagcgtgatttccaagtttaattctacgacttcctctgccactcctcaggctttcgactcctcctctgccgtggtcttcatatttgtgagcacagcagtagtagtgttggtgatcttgaccatgacagtactggggcttgtcaagctctgctttcacgaaagcccctcttcccagccaaggaaggagtctatgggcccgccgggcctggagagtgatcctgagcccgctgctttgggctccagttctgcacattgcacaaacaatggggtgaaagtcggggactgtgatctgcgggacagagcagagggtgccttgctggcggagtcccctcttggctctagtgatgcatagggaaacaggggacatgggcactcctgtgaacagtttttcacttttgatgaaacggggaaccaagaggaacttacttgtgtaactgacaatttctgcagaaatcccccttcctctaaattccctttactccactgaggagctaaatcagaactgcacactccttccctgatgatagaggaagtggaagtgcctttaggatggtgatactgggggaccgggtagtgctggggagagatattttcttatgtttattcggagaatttggagaagtgattgaacttttcaagacattggaaacaaatagaacacaatataatttacattaaaaaataatttctaccaaaatggaaaggaaatgttctatgttgttcaggctaggagtatattggttcgaaatcccagggaaaaaaataaaaataaaaaattaaaggattgttgataaaaaatcaaatatcattgccttcctccaggagtaattaggaacagctgagggcatgctgggagtaagcagcaagagtgcattctgcttttagattgagggagaggtccttaagttcctcgaatgagacacagatctttaagaactagtaactttttcattgattcttttatcctttcttttcaaagtcactgctacttgtgtgctttgctataaatcgaaagtgtagtgttgccagaattgctggctctggaagaaaattacagttgaccaccagttcaagtgtttactttatgtccatgcccaaggaaaacacataatttgcgttttccctttccagtgtttgtgctttccagcgtaatgacctccccaagcaaatagccctctcctgaacatcaagatgctcatcctcatcttcaattatggtgatgttaattctcaattaaaatgttaatgctaagta

SEQ ID NO: 384880 - DNA, 282 bp, Homo sapiens
attacccagttcaggtccccggttccccacctggtagctgttcgtccttaagcatgatacttttccttgaagcatcagcttcagcaacatttaaataagactaataatgatacatatttcatagggttcatgtgaaaattaaatgacacttaaaaaaaatgaagtgcttagcaaaataccaaacatataacaaatattcacggaatgccgactgttagtgcttatggtccaactaaaggattctttgatttaattaactgttatgaaggtctctttataact

SEQ ID NO: 384881 - DNA, 245 bp, Homo sapiens
gtataccatttaacagataatgcaagcaattagaaagataatagtttgctgtgcctccttctttagtctaactcttgactactataacctttatgaagtcatttgacttgtttcttaatggtagtcaccagaacatatgggtgagtgtgagaatgtataaataaatgctaataatatacagttaaaagcctatagaagtggaaaatgggcccaacttgtcactggtgagctttaatccagcctaa

SEQ ID NO: 384882 - DNA, 657 bp, Homo sapiens
cacacacattcacacacacaaacacacacacaaactttggaagtgcaatctcttccaacagcagagtgaatgatttgaaacgggggcttttccaataacccttgtggaagatttcacttataagagcaaaactaacggatatattagaagttgtgcgaacatgtgacacagattcctgatttttttttctttttcccagaagatttacagaatttacaaaaagagattatccctacaccttccacccctccctatcccacccccatgaccccaagcaatgaaggatttagggcagatttaccttcagtaaacacctttggacaccttgcggggaaagtgggagtctgtttgcaaaaggaggcttttgttaagtgaggtacggggataatgctttacccaggcagctgtgatattaacctacccagcaatgcgggaacactctttaactctttgagtgcctggccccttgcgctcagcagataaaatcctggctctccaaagacactcagaattctggctctagcagtttattattcagacaagtcttataggcatgaaaactgttcaagcttttaaaacaatgtggtttaattagatgaggtggacttacattgctcataagccctccaaatggtggtttataattggcaagggaaa

SEQ ID NO: 384883 - DNA, 407 bp, Homo sapiens
gaatgaattgggggataaagggattagattccaggagtaatgagttagatgcaaaggtaaagaaattagttgataatgattgggaactcaaagacaatgtaactgtctagttagagtggtgggtctttttgctagaaatctgaagttctgtttcacacctgagcccagccacccaagcagaaatcctaactgcctggagcagtatagtgcttctatattctgttgcagtctctatgaaagctccggtaccaaaggagtccagctgactcatatcaagtgataagaaattcatctttgcaaaactggaagcaactcaaatgaaaatgattgcagtacattcactggagtgaatagataattaagactatataactccgtggaaccaggtttttcttctcatttaggtt

SEQ ID NO: 384884 - DNA, 316 bp, Homo sapiens
gtttaacaagcctgctaaatactaagtcaatgtaaaaaatcaattgtaagcccatctatcagaaaaacactattagcaagcaaaatttacatttttactgcttaacatagcatcccaaatatcaagtacctagcaacaaatctaacgaaagatatgcaagacttatagagaaaacagcaacagcaacaactttgtttagatacattagcgaagatctcattacatggagacatacactatgctcatggactggaagactccatatggaagatgccaattcacatctcagaatctcagcaggtgttgcaaagaacct

SEQ ID NO: 384885 - DNA, 907 bp, Homo sapiens
tgttctgtttgattgatttattgggcttctctttttatatccagtaggggaatcagattgtggccaaaggtagtgtattaactctagaaaaggagattatatctacagttcctcaaacaattttagatttttcttttcaaggacagctagagaagataatgacataataactatttccttttttaggatctgaatctaaaaatggtgaagcagacagttcagataaagaaatgaaacatgggcaaaaatctcccactggaaaacaaacaagtcagcacttaaaacgattaaaaaagtctggtttaggtgagtgtttaatagactatgccatttcacattttagaaatttgtgttttctcaaataaattatctaaaattttcagaacattttttaatgattaaacaaggaaattaaaatttccctccatttatcaaaaccaaaaagaatgctaaataaggaaacattctagttacaactgaatggtcttaagcccattactaaatttgtgaatgataatattggatgaagcagagggtaaaaatgagacttaaaatggtacatgtaaaataattatctgccgggtcatgatactatctaatgtgcagtgttttgtctgtgcaactaggtttcactttattggaatatgctgtcttggaagaaaaaaatgcagtctttataaagggttcactgaactggagagtacattgtcagtggggtctgctgcagtaaaattgctcttccttgctttttgtctatgcttcttaaaatatttagtagtgcctgtctgaaaaaatgtaaaattgctgagaaatgttggagacacaggccacgggtctttcaaatcagcaccaggttttcttcaacatacttctttcctgataacttttcatcaggaacccccaacag

SEQ ID NO: 384886 - DNA, 633 bp, Homo sapiens
tgttctgtttgattgatttattgggcttctctttttatatccagtaggggaatcagattgtggccaaaggtagtgtattaactctagaaaaggagattatatctacagttcctcaaacaattttagatttttcttttcaaggacagctagagaagataatgacataataactatttccttttttaggatctgaatctaaaaatggtgaagcagacagttcagataaagaaatgaaacatgggcaaaaatctcccactggaaaacaaacaagtcagcacttaaaacgattaaaaaagtctggtttagggcacttgaaatggaccaaagctgaggacattgacatagaaaccccaggatctattcttgtcaacactaacttgagggcattaataaataaacatacgtttgcttccttacctcagcattttcaacaatacctcctgcttttgctcccagaagtggataggcagatgggaagtgatggaattttacgcctcagtacttcagctctaaataatgaattctttgcatatgcagcacaagggtggaaacagcgactggcagaaggtaaatttgtattttctattattatgtgacatattggagtacacataccgtactgagcttgtacct

SEQ ID NO: 384887 - DNA, 302 bp, Homo sapiens
tttttttttaatgctgttgccatggtatatctttatcatttgctttcaacaaatctttctacttaaagtgcatacgtcatagacaacatggaactcggtcttgctatttagctggtctgatcatttctggctaattcagatattcagtctatgtatatttaatttaattgttggttttattaggttcaaatgtaccatcttgggatttgttttctatttgttgaatctgtttttgctcctcttgtcctgcttccctgtggttttatcaaatgtacttttactattcaatatttttgtctact

SEQ ID NO: 384888 - DNA, 646 bp, Homo sapiens
aaaacctgtaataacagtgtggcaaacctatagcagaccatgaataagctgtagccattgttgttgacaatggatgggacaaggtcctcatgatgtggaaaggaatgtctagagcccgttagaggctcttcctaggaaaggtggggaacgagttttccgctgagtagggcaggagcaagggaaggactgatgtgatgcaagggaggctggcgaccttgagcagactctccttccagtctcatccccaaatctaacttgctgccacataatcagtcattgatctcatggtgctgggaaaagagtggcaaagtggaagaataaaaaccttccaggaattagtctctttttactctcttttttcatattgcttctgttctttagaaaaattcaaaataaaaagtcgaaattcacatctggggcttcacacagtagatgcaaatccactctgctgaggacagcatatgcctatgtgttttgctgaaatttcagtcgttcccgtggctgtttcagcacttgagctggttctcagaagatcctgctgtggagcagtgtgctgttaaccaccagcagcacggtctttgcctcagactccttggtcagcaaagtagagcaaaggtaatgtgatctggtgaataagaaacagctc

SEQ ID NO: 384889 - DNA, 430 bp, Homo sapiens
gggttgtgatggagaagactgagacggggcaatctaaggcccaaacgtggcccagtgttaagcatattgagaaacccaataccaatctggtgaattgaatagttttgcaaaactaaggaaaattaacagtctccacaaaaaagtgtttatccaagtgttaaagtacttaattgttctcaaaaaaccaaattgtccccattctgaacatttttttgaactttctcaattgcagttagtcttctgggacattgaagaaggcctagaactcaatcaaggaacaaaaatatctaagcattgtatttaaaaaacatgtgttagaggtttattaccttaggagatttttaaatatcatttatctgttaaatttagttgttgcatcagacattttgctcatttttccctttaataattatatctttataccactaac

SEQ ID NO: 384890 - DNA, 281 bp, Homo sapiens
ataattcatgatagaatatcactatgtgctttggaagacactgaggaaagacaaaaggtcattgggcagaaccaccctagattgaatgttaaggccatcttctagtttgcaggacttgtggtagacagacagaataatatcctggacctcttgggtgtatacaggacaaactgaaataaactctcatttttagatcataatgtcatcatgaaacatatcaatttggtctatttctgaagaaaacaagcacaatgataaagtttgaatgtttgtctcctcca

SEQ ID NO: 384891 - DNA, 337 bp, Homo sapiens
tgggccagcactcaatgtgaatcaggctaacattgacgataacagagtagtctgtgcctgcctgtgcctggacactaattggaaaaacccaacagctacctccttggtgatctctgcccatttgggcaagttccaaagagccagctccactcaaagtaacttctctcttttttttttctgtaacccagtgcctgaaaaccaggaggaaatcatttccctgatttctgtttagccttctaaaatcatggcagtagttgtcttatattcaagggccactgacattgggggtttttggtttctaagtcatttcctatctctgtttcactcttaccttttc

SEQ ID NO: 384892 - DNA, 167 bp, Homo sapiens
ctgactactagctgtttcttttctattatctaacagagtttatgttagtctttttgacgagtattcattatttttaacatgcatatttagggaatcataataattttagaagatactgttttaagttatggacattaaagccataggtaaaagaatatgaaggtaaa

SEQ ID NO: 384893 - DNA, 664 bp, Homo sapiens
cgcctgtaatctcagtactttgggaggccgaggcaggtggatcacctgaggtcagcagtttgaaaccagcctggccaacatggcgaaaccccatctctactaaaaatacaaaattagcagggcgtggtggtgcactcctgtaatcctagctacttgggaggctgagacaggagaatcacttgaacccaggagccagaagtcgcagtgagccgtgatcatgccattgcaccccagcctgggcaaaaagagcgaaactccatctcaaaaaataaaaacaaaaaacaaaaaaaaaatgtgatatcataagacagaccttttcccttctcatcagtgactggaattaactgcccatgtggaatgggttgtgggtgttggttcctttactgggtcatctggtaaactgcaaggtttctgctgtgacattgaaggcagacatcaaccctctaagacatttttttcctatcctctgggaatattactttttggacaatcttggtccattggtaagctcatgggaatttgtcagagtttttttgtttcttttggctcatgtttagcatcgattggcagagtgtttggagtcatcctcagaaaggaattacagtggttcggaggtgttttctgtagtgggccctcatttgggaattggcttgaaaaaaatgta

SEQ ID NO: 384894 - DNA, 219 bp, Homo sapiens
aagaacttgagattgatttcgtattctgcagttttccaaagaagctgcttacagataactgcggaagggttgatcttatttagataggctactagacctcagaagctagacttttgtttttcaaatagtggctgtggattctatatcctatgtccaagctaccgtttgggacaacatggttcccttcaggtggttgcaagtacgtgagaggctgatctt

SEQ ID NO: 384895 - DNA, 791 bp, Homo sapiens
ctcattttattgcgatatgcactttatggtggggttctggaaccaaacctgaaatatctctgaggtatgcctgtatttgttttcccctgctgtacaaaagtacaaaactatgtttaagtagcatgtttaattcttgatgccattattaccacataacatctttatatttttatacaaaacacctcgccgtgagagtttcttaaggctgtgcttagtgttaactggaagccaatgctaatactgaaaaaaaaaaaaagggtgggggaattggatttgggatcaggatgtagataggcttcccaggatttcaggaaaaaaattcagaacaggaaagagcatcttgaagatataccataaaaagatggtctttttgagtggtatagtcagtttctaatttaagagtaatttctctctcagatgtgttaaagtgtaaaaaaaaatctaataagatttaacacttcaaagtcattaactaactaattaactaatgaatccacacaacagctctatgaggtttatgctaaatatctatcatttcacagatcttgtgtcatttagaaactcttctagcttttctcgtctctgctcttttcaaagtctttaaaaagaacgaattattttcatgtctccagtgaaggacatgtatcaaatttgtctcttgagaaaatccaatgctttgtgaagtaaatttccaaagccagtcaattaactcagtgcttttcctattaatgtgactccaaatttctgatatcccttgccctgagaagctattttgtttgccctgggaagaa

SEQ ID NO: 384896 - DNA, 584 bp, Homo sapiens
ggttttcttagttttgaactttttcttccttaccgttgtcttccacctcatttcctggaaagggaaatcgtttccttctcatgatctgcgaggcttccttccctcctctctcttgtcgttgtttcattttgttttcgtcttttggccccaaggaagcagacgaagaatcctggagtgagagagacccgggttcccattccaactttcccctcacttgctgtgagactttggcaagttcgttggcttgtctgagcctcagttttcctccttgtaaaatggatataaaaatctctgcaccactgagttgcagcagtattaatgtcatactttatacagcatgcctagtgcctgccccagtgcagatgctcaggaaatatcgtccttacttaggagcactcctgtcaatgaaaacaggacctcttgccaaagagaaatattttgtgattagtgcttgctcctgtccctgcccccatgagcaagtgtcctccctttctcctcctgcattgttgaggacacgtttcttgatacaaatttaactacagccactaaatcagaaattcccacccaaagtcataccataagca

SEQ ID NO: 384897 - DNA, 243 bp, Homo sapiens
ccgcctcggcctcccaaagtgctgggaataataattttaaataatctgtaatgtatgtaaaaattctgccatggaaaatattcttcactgaaactcaagcttccaaaggtaaagaattcatgtttgttttacaaatgtcagttattaatatagtacaatgcctcatacgcaaaacttttagttttattttttaatttctcctcaaaatgtgctagtaggcaaatttaaagaaaattatatata

SEQ ID NO: 384898 - DNA, 343 bp, Homo sapiens
gcaacctcatcccaggttcaagtgattctcctgcctcagcctcctgagtagctgggattactggcgcaccaccacacccggctaattttgtatttttagtagagacagggtttcgccatgttggccaggctggtcttgaactcctgacctcaggtgatccacccacctcagcctcccaaagtgctgggattccaggcatgagctactgtctcggcccaaatctttcttaagttgtgtctggcctttggcagaaatagccacaaagccagggtaggaacgttttactcttcaagtgatgatggcatccgataaccttttagagggaggttttaaaatgcaacgt

SEQ ID NO: 384899 - DNA, 1622 bp, Homo sapiens
cggacgcgtgggtcgcccacgcgtcggcaacagcaaaaagaaaaaattagttgtccagccagtgctggaggaaaatgtttctggggaagatgactcagtcattttgtggcgagacaccctttggtaactcccactgaccagtcttgggagccttcctggaatgatcgtgggctgagcggagatgttttttgcaaaatgaaactgaagctgaaagaaaggagaattcgagtgaaccaagagaaatccaaagacctggggaaggaggacttaagatgaaagtgaagcaagagagggaaggggaaatgaagtgaaaatggcgtgagggtgtgagagaggtttgggttaggaaacatgtttttagtgctatttccaaccaggggtcgcaaactcagcagcctgtagaaacaggggtgggaggtgggggggaagctgtgcccacctttaaagagggggccattgctcagccatgcagaaaaaaatggggcaacaagctggaaatcaggttttttttttttaaagtgaaacttgatgatttttaaacaagtaattaaaaaaatgtccaaaacaccatgtgggccaaacatttgtttgagcctgggggccaccagtttgcgaccactgccttacgtagttaacaccctgagtatgtatacagtcatattttttgttttggatatggtagtgttatatatacttgggggcgtgatatttgaagtcatctttatctctcagagttaagctttattgtagaagaaaaaaaaaaaagttaacacagccatagataacacttaactcacagttcccaggaggacacttgatctcgaagctgctctttttgagtcagatcctacatcaaaccacttagggccagtttttggcatttccttcctggtgatttggggtaaacttctttgctctgtcggagtttgcagatgagtaatcagaaggattgcagaataacttgtttctttgtattttattcttacatttaaattaattttggggggttagtggtatcctagctcgtgcctttacagggatgattggtggctagatttggggtgcaagcttcttaggctcataccatttcaactaccaagaacacaggtttttgtttttgttttttgagacagggtctcagtctgttgcccaggctggagtgcagtggcaagattgcagctcattgcagccttgacctcctgggctcaagcgatcctcctgcctcggcctcccaactagctgggaccacaggtatgtgccactacacccagcgaatttttaaattatttgtagagtcagggtctccctatgttgcccaggctggtcttgaactactggactcaagccatcctcccacctcggcctcccaaagtgttgggattataggcgcgagccaccacacctggcctaaaagcgtcgttctgatcagacttcacccctgaatgtttctatcattttcttttctttttttttttttttcgagacagagttttgctcttgttttacaggctggggtgcggtgggatgatcttggctcactgcaatctcctcctcccaggttcaagtgattcttgggccttagcctcccgagtagctgggattacaggcacctgccaccacgc

SEQ ID NO: 384900 - DNA, 2160 bp, Homo sapiens
cctgggtgaccgagcgagactccgtctcaaaaaaaaaaaaaaaaaagctttaaaaagctgaattttagaaatatttctagcagtgtcagtgagttcctcttttaatagtgttttaaagtataaatctggtaacatactgttcttgtagttttttgttagttttgtttttcaggttaattacccaaagcctcatccatcctcaaggtttttaaattttatttttttaaaataaattgtgcattgtatttgtgaatttttaaaatattactgttttatttaaatgccatgctgagcaattgttctctgtacatggtaaccaaaacttagagatttcgatcaattttgatcaatgtttagtaaaccaaaacatgtactgtgtacaacggaaataatatggcatattagccaggcatgatggttgcccaagacagttaaattaagctcaattctgtattttattagggctctgttatgtccttcatctgaaatgtacacatttttggtgtatgcttggtactggagattcatatatgcaaatattctcatgcaagaagttccacagtaacaacagcaaaaagaaaaaattagttgtccagccagtgctggaggaaaatgtttctggggaagatgactcagtcattttgtggcgagacaccctttggtaactcccactgaccagtcttgggagccttcctggaatgatcgtgggctgagcggagatgttttttgcaaaatgaaactgaagctgaaagaaaggagaattcgagtgaaccaagagaaatccaaagacctggggaaggaggacttaagatgaaagtgaagcaagagagggaaggggaaatgaagtgaaaatggcgtgagggtgtgagagaggtttgggttaggaaacatgtttttagtgctatttccaaccaggggtcgcaaactcagcagcctgtagaaacaggggtgggaggtgggggggaagctgtgcccacctttaaagagggggccattgctcagccatgcagaaaaaaatggggcaacaagctggaaatcaggttttttttttttaaagtgaaacttgatgatttttaaacaagtaattaaaaaaatgtccaaaacaccatgtgggccaaacatttgtttgagcctgggggccaccagtttgcgaccactgccttacgtagttaacaccctgagtatgtatacagtcatattttttgttttggatatggtagtgttatatatacttgggggcgtgatatttgaagtcatctttatctctcagagttaagctttattgtagaagaaaaaaaaaaaagttaacacagccatagataacacttaactcacagttcccaggaggacacttgatctcgaagctgctctttttgagtcagatcctacatcaaaccacttagggccagtttttggcatttccttcctggtgatttggggtaaacttctttgctctgtcggagtttgcagatgagtaatcagaaggattgcagaataacttgtttctttgtattttattcttacatttaaattaattttggggggttagtggtatcctagctcgtgcctttacagggatgattggtggctagatttggggtgcaagcttcttaggctcataccatttcaactaccaagaacacaggtttttgtttttgttttttgagacagggtctcagtctgttgcccaggctggagtgcagtggcaagattgcagctcattgcagccttgacctcctgggctcaagcgatcctcctgcctcggcctcccaactagctgggaccacaggtatgtgccactacacccagcgaatttttaaattatttgtagagtcagggtctccctatgttgcccaggctggtcttgaactactggactcaagccatcctcccacctcggcctcccaaagtgttgggattataggcgcgagccaccacacctggcctaaaagcgtcgttctgatcagacttcacccctgaatgtttctatcattttcttttctttttttttttttttcgagacagagttttgctcttgttttacaggctggggtgcggtgggatgatcttggctcactgcaatctcctcctcccaggttcaagtgattcttgggccttagcctcccgagtagctgggattacaggcacctgccaccacgc

SEQ ID NO: 384901 - DNA, 2069 bp, Homo sapiens
cggacgcgtgggtcgcccacgcgtcggtataaatctggtaacatactgttcttgtagttttttgttagttttgtttttcaggttaattacccaaagcctcatccatcctcaaggtttttaaattttatttttttaaaataaattgtgcattgtatttgtgaatttttaaaatattactgttttatttaaatgccatgctgagcaattgttctctgtacatggtaaccaaaacttagagatttcgatcaattttgatcaatgtttagtaaaccaaaacatgtactgtgtacaacggaaataatatggcatattagccaggcatgatggttgcccaagacagttaaattaagctcaattctgtattttattagggctctgttatgtccttcatctgaaatgtacacatttttggtgtatgcttggtactggagattcatatatgcaaatattctcatgcaagaagttccacagtaacaacagcaaaaagaaaaaattagttgtccagccagtgctggaggaaaatgtttctggggaagatgactcagtcattttgtggcgagacaccctttggtaactcccactgaccagtcttgggagccttcctggaatgatcgtgggctgagcggagatgttttttgcaaaatgaaactgaagctgaaagaaaggagaattcgagtgaaccaagagaaatccaaagacctggggaaggaggacttaagatgaaagtgaagcaagagagggaaggggaaatgaagtgaaaatggcgtgagggtgtgagagaggtttgggttaggaaacatgtttttagtgctatttccaaccaggggtcgcaaactcagcagcctgtagaaacaggggtgggaggtgggggggaagctgtgcccacctttaaagagggggccattgctcagccatgcagaaaaaaatggggcaacaagctggaaatcaggttttttttttttaaagtgaaacttgatgatttttaaacaagtaattaaaaaaatgtccaaaacaccatgtgggccaaacatttgtttgagcctgggggccaccagtttgcgaccactgccttacgtagttaacaccctgagtatgtatacagtcatattttttgttttggatatggtagtgttatatatacttgggggcgtgatatttgaagtcatctttatctctcagagttaagctttattgtagaagaaaaaaaaaaaagttaacacagccatagataacacttaactcacagttcccaggaggacacttgatctcgaagctgctctttttgagtcagatcctacatcaaaccacttagggccagtttttggcatttccttcctggtgatttggggtaaacttctttgctctgtcggagtttgcagatgagtaatcagaaggattgcagaataacttgtttctttgtattttattcttacatttaaattaattttggggggttagtggtatcctagctcgtgcctttacagggatgattggtggctagatttggggtgcaagcttcttaggctcataccatttcaactaccaagaacacaggtttttgtttttgttttttgagacagggtctcagtctgttgcccaggctggagtgcagtggcaagattgcagctcattgcagccttgacctcctgggctcaagcgatcctcctgcctcggcctcccaactagctgggaccacaggtatgtgccactacacccagcgaatttttaaattatttgtagagtcagggtctccctatgttgcccaggctggtcttgaactactggactcaagccatcctcccacctcggcctcccaaagtgttgggattataggcgcgagccaccacacctggcctaaaagcgtcgttctgatcagacttcacccctgaatgtttctatcattttcttttctttttttttttttttcgagacagagttttgctcttgttttacaggctggggtgcggtgggatgatcttggctcactgcaatctcctcctcccaggttcaagtgattcttgggccttagcctcccgagtagctgggattacaggcacctgccaccacgc

SEQ ID NO: 384902 - DNA, 1623 bp, Homo sapiens
  misc_feature (14)..(14): n is a, c, g, or t
tctcgagtatcccntccccgtacgcccacaacagcaaaaagaaaaaattagttgtccagccagtgctggaggaaaatgtttctggggaagatgactcagtcattttgtggcgagacaccctttggtaactcccactgaccagtcttgggagccttcctggaatgatcgtgggctgagcggagatgttttttgcaaaatgaaactgaagctgaaagaaaggagaattcgagtgaaccaagagaaatccaaagacctggggaaggaggacttaagatgaaagtgaagcaagagagggaaggggaaatgaagtgaaaatggcgtgagggtgtgagagaggtttgggttaggaaacatgtttttagtgctatttccaaccaggggtcgcaaactcagcagcctgtagaaacaggggtgggaggtgggggggaagctgtgcccacctttaaagagggggccattgctcagccatgcagaaaaaaatggggcaacaagctggaaatcaggttttttttttttaaagtgaaacttgatgatttttaaacaagtaattaaaaaaatgtccaaaacaccatgtgggccaaacatttgtttgagcctgggggccaccagtttgcgaccactgccttacgtagttaacaccctgagtatgtatacagtcatattttttgttttggatatggtagtgttatatatacttgggggcgtgatatttgaagtcatctttatctctcagagttaagctttattgtagaagaaaaaaaaaaaagttaacacagccatagataacacttaactcacagttcccaggaggacacttgatctcgaagctgctctttttgagtcagatcctacatcaaaccacttagggccagtttttggcatttccttcctggtgatttggggtaaacttctttgctctgtcggagtttgcagatgagtaatcagaaggattgcagaataacttgtttctttgtattttattcttacatttaaattaattttggggggttagtggtatcctagctcgtgcctttacagggatgattggtggctagatttggggtgcaagcttcttaggctcataccatttcaactaccaagaacacaggtttttgtttttgttttttgagacagggtctcagtctgttgcccaggctggagtgcagtggcaagattgcagctcattgcagccttgacctcctgggctcaagcgatcctcctgcctcggcctcccaactagctgggaccacaggtatgtgccactacacccagcgaatttttaaattatttgtagagtcagggtctccctatgttgcccaggctggtcttgaactactggactcaagccatcctcccacctcggcctcccaaagtgttgggattataggcgcgagccaccacacctggcctaaaagcgtcgttctgatcagacttcacccctgaatgtttctatcattttcttttctttttttttttttttcgagacagagttttgctcttgttttacaggctggggtgcggtgggatgatcttggctcactgcaatctcctcctcccaggttcaagtgattcttgggccttagcctcccgagtagctgggattacaggcacctgccaccacgc

SEQ ID NO: 384903 - DNA, 941 bp, Homo sapiens
cctgggtgaccgagcgagactccgtctcaaaaaaaaaaaaaaaaaagctttaaaaagctgaattttagaaatatttctagcagtgtcagtgagttcctcttttaatagtgttttaaagtataaatctggtaacatactgttcttgtagttttttgttagttttgtttttcaggttaattacccaaagcctcatccatcctcaaggtttttaaattttatttttttaaaataaattgtgcattgtatttgtgaatttttaaaatattactgttttatttaaatgccatgctgagcaattgttctctgtacatggtaaccaaaacttagagatttcgatcaattttgatcaatgtttagtaaaccaaaacatgtactgtgtacaacggaaataatatggcatattagccaggcatgatggttgcccaagacagttaaattaagctcaattctgtattttattagggctctgttatgtccttcatctgaaatgtacacatttttggtgtatgcttggtactggagattcatatatgcaaatattctcatgcaagaagttccacagtaacaacagcaaaaagaaaaaattagttgtccagccagtgctggaggaaaatgtttctggggaagatgactcagtcattttgtggcgagacaccctttggtaactcccactgaccagtcttgggagccttcctggaatgatcgtgggctgagcggagatgttttttgcaaaatgaaactgaagctgaaagaaaggagaattcgagtgaaccaagagaaatccaaagacctggggaaggaggacttaagatgaaagtgaagcaagagagggaaggggaaatgaagtgaaaatggcgtgagggtgtgagagaggtttgggttaggaaacatgtttttagtgctatttccaacccaaacctctctcacaccactcgaacgca

SEQ ID NO: 384904 - DNA, 190 bp, Homo sapiens
atgttggaattcgagatttcctgtgtgcagataattgcatgattctaataaaaataatgtacaggcttgttttagtcattataccaatgccctgcttcactctgctctgctgtaatgagggttcagagcttaattcatatagaaggctagctgcctttctgctaaatggcttgttttgcatttcttttgt

SEQ ID NO: 384905 - DNA, 324 bp, Homo sapiens
caggcctctctgattcccagtgaagaacttggggagtgaaatggacatggagttccatgaccttgatgaattttccttgcttgcctcagtttcctttctctgaagacctgagttccctttcatcttggctgttgtgtgctccacctcagtgaggctggctccctggccctgtcctcccactccagcaagactctgctctcccaccccaacaagactgctgactcctccctcagcagaggggagactttgccttgaggagggttggttaaagtaggaaagtgccccagagtcatgggcgtgggcaggcactgaggtatttgtggc

SEQ ID NO: 384906 - DNA, 2053 bp, Homo sapiens
tacaagtgtggctgcaaagtttgcccctcttgttaccctcaggcaaatgattgatttagaaaggccccaggggctattttttgcaggaacggtcactccctaaatccaggcagggaaagggaggagtctgagccgagtcacgccccttctcctgtaaactttgggtcgcctctagcttagcgagcgctggagtttgaagagcgggcagtggctgcacacgccaaactttccctatggcttcggtgaccagggccgtgtttggagagctgccctcgggaggagggacagtggagaagttccagctgcagtcagacctcttgagagtggacatcatctcctggggctgcacgatcacagccctagaggtcaaagacaggcaggggagagcctcggacgtggtgcttggcttcgccgagttggaaggatacctccaaaagcagccatactttggagcagttattgggagggtggccaaccgaatcgccaaaggaaccttcaaggtggatgggaaggagtatcacctggccattaacaaggaacccaacagtctgcatggaggagtcagagggtttgataaagtgctctggacccctcgggtgctgtcaaatggcgtccagttctcgcgcatcagtccagatggtgaagaaggctaccccggagagttaaaagtctgggtgacatacaccctggatggcggagagctcatagtcaactacagagcacaagccagtcaggccacaccagtcaacctgaccaaccattcttacttcaacctggcaggccaggcttccccaaatataaatgaccatgaagtcaccatagaagcggatacttatttgcctgtggatgaaaccctgattcctacaggtggcaccaacagaaggtttctgcaaggctgagagctccttttacccatggaccaggagcaaagtttgcaggctgtgtgcggtggctcatgcctgtaaacccagcactttgggaggccgaggtggactgatcacctgaggtcaggagttcaagaccagcctggacaacatagcaagaaccatcttaaaaaagaaaagagaagaatatttaaaattttcttcactgatcattcaggagcatattgtttaatttctgtgtatttgtacaatttcaaaagttcacctcgctgttgagttctagttttattccactgtggtcaggaaagatactcgatataatttcaattattttaaatttgttgagacttgttttgtgggctaacatatggtctattctggaaaatgtttcttgtgctgatgaaataatgtgttttctgaatctgttggatgaaatgttctgtaaatgtctctttgttagtctaaaatgcagggttttttgtttttttgagagagtctcactctgttgcccaggctgggagtgcagtagcatgatcttgactcactgcaacctccacttcccaggttcaagcaattctcgtgcctcagcctgccaagtagctgggattacaggtgcccgccaccacacccagctaatttttgtatttttagtagagacagggttttaccatgttgaccaggctggttttaaactcctggcctcaagtgatccgcccacctcagcctcccaacgtactaggataacagatgtgaaccaccgcgctcagcctaaagtgcagtttaaatctagtgttttgttgttgattttctgtctagatgatctgttcagtgcagagaatggggtgttgaattccccagctattgtattggtgtctatgtctccctttagatctaataatatttgctttatattatgtatctgggcgctccagtgttgggtgcatatatatttagaattgttacctcctcttactgaattgatccctttatcattatataataacctttttcttttttttaatcgttttttacttgacgtctgtttcatctgatacaagtacagctaccctgcttgcttttggtttctgtttgcatggaatatctttttccaccctttcagtctatgtgtgtcgttacagatgaagtgagtttcttgtaggcaaccgtag

SEQ ID NO: 384907 - DNA, 807 bp, Homo sapiens
  misc_feature (671)..(672): n is a, c, g, or t
atttttttttgagacaaagtctcactctgttgcccaagctggagtgcagtgacacgattttggctcactgcaacctccgcctcccaggttcaacctcctgagtagctgggattacaggcgcgcaccaccacacctggctaatttttttttttttttattttttttttttttgagacggagtctcgctctgtcgcccaggctggagttgcagtgagccgagatcatgccactgcactgggcaacagagcaaaactcgatctcaaaaaaaaaaaaaaaaaaaaaaggaaaaaaaagcagctctctctctcgggagagggaggggacttccgagaggaaaaggcctgcaagagcctttgggttaactgagaaagcacagcccggccaacgcttgggaagaaagacaggcaagcactggaaacaggagctattagggtgaggagagagccttgcctttcacagcacagtgaggatgacattgcaccagggacagagattgtatgtgacaaggctggggctccttctttcctagacaatcaaagtatcagtgatgggttttggttggtgattttgaaaaaaaaaaaaaaaagtatgttatactagtgtatgctgtactgaattgaaataaaaccaaaatctgcatcttttaaaaaaaaaaaaaaaaaaaaaaaaannccctggtgggccgccttggccaatgcgattttgattgaacaagcttttgatgcggcccgcattgagcttacttggcaattgccttataggggggggtttaaattaattgggcgggttttaacaaaggggaaatgg

SEQ ID NO: 384908 - DNA, 2572 bp, Homo sapiens
  misc_feature (2436)..(2437): n is a, c, g, or t
tacaagtgtggctgcaaagtttgcccctcttgttaccctcaggcaaatgattgatttagaaaggccccaggggctattttttgcaggaacggtcactccctaaatccaggcagggaaagggaggagtctgagccgagtcacgccccttctcctgtaaactttgggtcgcctctagcttagcgagcgctggagtttgaagagcgggcagtggctgcacacgccaaactttccctatggcttcggtgaccagggccgtgtttggagagctgccctcgggaggagggacagtggagaagttccagctgcagtcagacctcttgagagtggacatcatctcctggggctgcacgatcacagccctagaggtcaaagacaggcaggggagagcctcggacgtggtgcttggcttcgccgagttggaaggatacctccaaaagcagccatactttggagcagttattgggagggtggccaaccgaatcgccaaaggaaccttcaaggtggatgggaaggagtatcacctggccattaacaaggaacccaacagtctgcatggaggagtcagagggtttgataaagtgctctggacccctcgggtgctgtcaaatggcgtccagttctcgcgcatcagtccagatggtgaagaaggctaccccggagagttaaaagtctgggtgacatacaccctggatggcggagagctcatagtcaactacagagcacaagccagtcaggccacaccagtcaacctgaccaaccattcttacttcaacctggcaggccaggcttccccaaatataaatgaccatgaagtcaccatagaagcggatacttatttgcctgtggatgaaaccctgattcctacaggagaagttgccccagtgcaaggcactgcattcgacctgagaaagccagtggagcttggaaaacacctgcaggacttccatctcaatggttttgaccacaatttctgtctgaagggatctaaagaaaagcatttttgtgcaagggtgcatcatgctgcaagcgggcgggtactagaagtatacaccacccagcccggggtccagttttacacgggcaacttcctggatggcacattaaagggcaagaatggagctgtctatcccaagcactccggtttctgcctggagactcagaactggcctgatgcagtcaatcagccccgcttccctcctgtgctgctgaggcctggtgaggagtatgaccacaccacctggttcaagttttctgtggcttaaggaagtgtgaagatatgatccagtccagggctaggctcagccacctgtctcctgtccagaaaaaaggtgaagattaagaagctttcagaatgattctatggattaaaatcatacaaatggtggctgttctgagaatcagtctgggtattgatttccttttccagtgactggctccaggccatgtctaatgaccagctcgattccctgtgcagttcagagggcaagtgaacccaaccaacaatgtcgtcatctaagccctgaccctagccagggactcccatgctgctgttggctccatctctccacactgcctctttcttttcaactttttgcccttcctttctttaaagctattctcacattgcttttatttcctcctccttcacctccaaccactgtcagcagcactctggagttttcaaatgtcacattagcctcaccctgcatgctaggagatggacctgtctctatacagcagtagatgattgataagtgaggaaactgaggcttacagaggttgaagaccaacaagctaataaatagccgaggcaggcggatcacgaggtcaggagatcgagaccatcctggctaacacggtgaaaccccgtctctacataaaaaattagctgggtgtggtagcacgcacccgtagttccagctacttgggaggctgaagcaggagaatcgcttgaacctgggaggtggaggttgcagtgagccgagatcatgccactgcactgggcaacagagcaaaactcgatctcaaaaaaaaaaaaaaaaaaaaaaggaaaaaaaagcagctctctctctcgggagagggaggggacttccgagaggaaaaggcctgcaagagcctttgggttaactgagaaagcacagcccggccaacgcttgggaagaaagacaggcaagcactggaaacaggagctattagggtgaggagagagccttgcctttcacagcacagtgaggatgacattgcaccagggacagagattgtatgtgacaaggctggggctccttctttcctagacaatcaaagtatcagtgatgggttttggttggtgattttgaaaaaaaaaaaaaaaagtatgttatactagtgtatgctgtactgaattgaaataaaaccaaaatctgcatcttttaaaaaaaaaaaaaaaaaaaaaaaaannccctggtgggccgccttggccaatgcgattttgattgaacaagcttttgatgcggcccgcattgagcttacttggcaattgccttataggggggggtttaaattaattgggcgggttttaacaaaggggaaatgg

SEQ ID NO: 384909 - DNA, 2568 bp, Homo sapiens
  misc_feature (2432)..(2433): n is a, c, g, or t
tacaagtgtggctgcaaagtttgcccctcttgttaccctcaggcaaatgattgatttagaaaggccccaggggctattttttgcaggaacggtcactccctaaatccaggcagggaaagggaggagtctgagccgagtcacgccccttctcctgtaaactttgggtcgcctctagcttagcgagcgctggagtttgaagagcgggcagtggctgcacacgccaaactttccctatggcttcggtgaccagggccgtgtttggagagctgccctcgggaggagggacagtggagaagttccagctgcagtcagacctcttgagagtggacatcatctcctggggctgcacgatcacagccctagaggtcaaagacaggcaggggagagcctcggacgtggtgcttggcttcgccgagttggaaggatacctccaaaagcagccatactttggagcagttattgggagggtggccaaccgaatcgccaaaggaaccttcaaggtggatgggaaggagtatcacctggccattaacaaggaacccaacagtctgcatggaggagtcagagggtttgataaagtgctctggacccctcgggtgctgtcaaatggcgtccagttctcgcgcatcagtccagatggtgaagaaggctaccccggagagttaaaagtctgggtgacatacaccctggatggcggagagctcatagtcaactacagagcacaagccagtcaggccacaccagtcaacctgaccaaccattcttacttcaacctggcaggccaggcttccccaaatataaatgaccatgaagtcaccatagaagcggatacttatttgcctgtggatgaaaccctgattcctacaggagaagttgccccagtgcaaggcactgcattcgacctgagaaagccagtggagcttggaaaacacctgcaggacttccatctcaatggttttgaccacaatttctgtctgaagggatctaatacaccacccagcccggggtccagttttacacgggcaacttcctggatggcacattaaagggcaagaatggagctgtctatcccaagcactccggtttctgcctggagactcagaactggcctgatgcagtcaatcagccccgcttccctcctgtgctgctgaggcctggtgaggagtatgaccacaccacctggttcaagttttctgtggcttaaggaagtgtgaagatatgatccagtccagggctaggctcagccacctgtctcctgtccagaaaaaaggtgaagattaagaagctttcagaatgattctatggattaaaatcatacaaatggtggctgttctgagaatcagtctgggtattgatttccttttccagtgactggctccaggccatgtctaatgaccagctcgattccctgtgcagttcagagggcaagtgaacccaaccaacaatgtcgtcatctaagccctgaccctagccagggactcccatgctgctgttggctccatctctccacactgcctctttcttttcaactttttgcccttcctttctttaaagctattctcacattgcttttatttcctcctccttcacctccaaccactgtcagcagcactctggagttttcaaatgtcacattagcctcaccctgcatgctaggagatggacctgtctctatacagcagtagatgattgataagtgaggaaactgaggcttacagaggttgaagaccaacaagctaataaataaaaagttgaggccgggcacggtggctcacgcctgtaatcccagcactttggaaggccgaggcaggcggatcacgaggtcaggagatcgagaccatcctggctaacacggtgaaaccccgtctctacataaaaaattagctgggtgtggtagcacgcacccgtagttccagctacttgggaggctgaagcaggagaatcgcttgaacctgggaggtggaggttgcagtgagccgagatcatgccactgcactgggcaacagagcaaaactcgatctcaaaaaaaaaaaaaaaaaaaaaaggaaaaaaaagcagctctctctctcgggagagggaggggacttccgagaggaaaaggcctgcaagagcctttgggttaactgagaaagcacagcccggccaacgcttgggaagaaagacaggcaagcactggaaacaggagctattagggtgaggagagagccttgcctttcacagcacagtgaggatgacattgcaccagggacagagattgtatgtgacaaggctggggctccttctttcctagacaatcaaagtatcagtgatgggttttggttggtgattttgaaaaaaaaaaaaaaaagtatgttatactagtgtatgctgtactgaattgaaataaaaccaaaatctgcatcttttaaaaaaaaaaaaaaaaaaaaaaaaannccctggtgggccgccttggccaatgcgattttgattgaacaagcttttgatgcggcccgcattgagcttacttggcaattgccttataggggggggtttaaattaattgggcgggttttaacaaaggggaaatgg

SEQ ID NO: 384910 - DNA, 1592 bp, Homo sapiens
  misc_feature (1456)..(1457): n is a, c, g, or t
tacaagtgtggctgcaaagtttgcccctcttgttaccctcaggcaaatgattgatttagaaaggccccaggggctattttttgcaggaacggtcactccctaaatccaggcagggaaagggaggagtctgagccgagtcacgccccttctcctgtaaactttgggtcgcctctagcttagcgagcgctggagtttgaagagcgggcagtggctgcacacgccaaactttccctatggcttcggtgaccagggccgtgtttggagagctgccctcgggaggagggacagtggagaagttccagctgcagtcagacctcttgagagtggacatcatctcctggggctgcacgatcacagccctagaggtcaaagacaggcaggggagagcctcggacgtggtgcttggcttcgccgagttggaaggatacctccaaaagcagccatactttggagcagttattgggagggtggccaaccgaatcgccaaaggaaccttcaaggtggatgggaaggagtatcacctggccattaacaaggaacccaacagtctgcatggaggagtcagagggtttgataaagtgctctggacccctcgggtgctgtcaaatggcgtccagttctcgcgcatcagtccagatggtgaagaaggctaccccggagagttaaaagtctgggtgacatacaccctggatggcggagagctcatagtcaactacagagcacaagccagtcaggccacaccagtcaacctgaccaaccattcttacttcaacctggcaggccaggcttccccaaatataaatgaccatgaagtcaccatagaagcggatacttatttgcctgtggatgaaaccctgattcctacaggagaagttgccccagtgcaaggcactgcattcgacctgagaaagccagtggagcttggaaaacacctgcaggacttccatctcaatggttttgaccacaatttctgtctgaagggatctaaagaaaagcatttttgtgcaagggtgcatcatgctgcaagcgggcgggtactagaagtatacaccacccagcccggggtccagttttacacgggcaacttcctggatggcacattaaagggcaagaatggagctgtctatcccaagcactccggtttctgcctggagactcagaaccggccaacgcttgggaagaaagacaggcaagcactggaaacaggagctattagggtgaggagagagccttgcctttcacagcacagtgaggatgacattgcaccagggacagagattgtatgtgacaaggctggggctccttctttcctagacaatcaaagtatcagtgatgggttttggttggtgattttgaaaaaaaaaaaaaaaagtatgttatactagtgtatgctgtactgaattgaaataaaaccaaaatctgcatcttttaaaaaaaaaaaaaaaaaaaaaaaaannccctggtgggccgccttggccaatgcgattttgattgaacaagcttttgatgcggcccgcattgagcttacttggcaattgccttataggggggggtttaaattaattgggcgggttttaacaaaggggaaatgg

SEQ ID NO: 384911 - DNA, 1616 bp, Homo sapiens
  misc_feature (1480)..(1481): n is a, c, g, or t
tacaagtgtggctgcaaagtttgcccctcttgttaccctcaggcaaatgattgatttagaaaggccccaggggctattttttgcaggaacggtcactccctaaatccaggcagggaaagggaggagtctgagccgagtcacgccccttctcctgtaaactttgggtcgcctctagcttagcgagcgctggagtttgaagagcgggcagtggctgcacacgccaaactttccctatggcttcggtgaccagggccgtgtttggagagctgccctcgggaggagggacagtggagaagttccagctgcagtcagacctcttgagagtggacatcatctcctggggctgcacgatcacagccctagaggtcaaagacaggcaggggagagcctcggacgtggtgcttggcttcgccgagttggaaggatacctccaaaagcagccatactttggagcagttattgggagggtggccaaccgaatcgccaaaggaaccttcaaggtggatgggaaggagtatcacctggccattaacaaggaacccaacagtctgcatggaggagtcagagggtttgataaagtgctctggacccctcgggtgctgtcaaatggcgtccagttctcgcgcatcagtccagatggtgaagaaggctaccccggagagttaaaagtctgggtgacatacaccctggatggcggagagctcatagtcaactacagagcacaagccagtcaggccacaccagtcaacctgaccaaccattcttacttcaacctggcaggccaggcttccccaaatataaatgaccatgaagtcaccatagaagcggatacttatttgcctgtggatgaaaccctgattcctacaggagaagttgccccagtgcaaggcactgcattcgacctgagaaagccagtggagcttggaaaacacctgcaggacttccatctcaatggttttgaccacaatttctgtctgaagggatctaaagaaaagcatttttgtgcaagggtgcatcatgctgcaagcgggcgggtactagaagtaccacctggttcaagttttctgtggcttaaggaagtgtgaagatatgatccagtccagggctaggctcagccacctgtctcctgtccagaaaaaaggtgaagattaagaagctttcagaatgattctatggattaaaatcatacaaatggtggctgttctgagaatcagtctgggtattgatttccttttccagtgactggctccaggccatgtctttcacagcacagtgaggatgacattgcaccagggacagagattgtatgtgacaaggctggggctccttctttcctagacaatcaaagtatcagtgatgggttttggttggtgattttgaaaaaaaaaaaaaaaagtatgttatactagtgtatgctgtactgaattgaaataaaaccaaaatctgcatcttttaaaaaaaaaaaaaaaaaaaaaaaaannccctggtgggccgccttggccaatgcgattttgattgaacaagcttttgatgcggcccgcattgagcttacttggcaattgccttataggggggggtttaaattaattgggcgggttttaacaaaggggaaatgg

SEQ ID NO: 384912 - DNA, 1502 bp, Homo sapiens
  misc_feature (1366)..(1367): n is a, c, g, or t
agtactctacaggatcttaaacggagctggactgatcagaatggctgatgcagtcatcagccccgcttccctcctgtgctgctgaggcctggtgaggagtatgaccacaccacctggttcaagttttctgtggcttaaggaagtgtgaagatatgatccagtccagggctaggctcagccacctgtctcctgtccagaaaaaaggtgaagattaagaagctttcagaatgattctatggattaaaatcatacaaatggtggctgttctgagaatcagtctgggtattgatttccttttccagtgactggctccaggccatgtctaatgaccagctcgattccctgtgcagttcagagggcaagtgaacccaaccaacaatgtcgtcatctaagccctgaccctagccagggactcccatgctgctgttggctccatctctccacactgcctctttcttttcaactttttgcccttcctttctttaaagctattctcacattgcttttatttcctcctccttcacctccaaccactgtcagcagcactctggagttttcaaatgtcacattagcctcaccctgcatgctaggagatggacctgtctctatacagcagtagatgattgataagtgaggaaactgaggcttacagaggttgaagaccaacaagctaataaataaaaagttgaggccgggcacggtggctcacgcctgtaatcccagcactttggaaggccgaggcaggcggatcacgaggtcaggagatcgagaccatcctggctaacacggtgaaaccccgtctctacataaaaaattagctgggtgtggtagcacgcacccgtagttccagctacttgggaggctgaagcaggagaatcgcttgaacctgggaggtggaggttgcagtgagccgagatcatgccactgcactgggcaacagagcaaaactcgatctcaaaaaaaaaaaaaaaaaaaaaaggaaaaaaaagcagctctctctctcgggagagggaggggacttccgagaggaaaaggcctgcaagagcctttgggttaactgagaaagcacagcccggccaacgcttgggaagaaagacaggcaagcactggaaacaggagctattagggtgaggagagagccttgcctttcacagcacagtgaggatgacattgcaccagggacagagattgtatgtgacaaggctggggctccttctttcctagacaatcaaagtatcagtgatgggttttggttggtgattttgaaaaaaaaaaaaaaaagtatgttatactagtgtatgctgtactgaattgaaataaaaccaaaatctgcatcttttaaaaaaaaaaaaaaaaaaaaaaaaannccctggtgggccgccttggccaatgcgattttgattgaacaagcttttgatgcggcccgcattgagcttacttggcaattgccttataggggggggtttaaattaattgggcgggttttaacaaaggggaaatgg

SEQ ID NO: 384913 - DNA, 641 bp, Homo sapiens
  misc_feature (505)..(506): n is a, c, g, or t
cagtccgctttttttaaaagtttaggcccaatttttcaggtaaggctgagttaaaacaagacataggcccccccctttgcccgcgtgaaaaaaggggttttagaaaaaaaaaaaaaaggaaaaaaaagcagctctctctctcgggagagggaggggacttccgagaggaaaaggcctgcaagagcctttgggttaactgagaaagcacagcccggccaacgcttgggaagaaagacaggcaagcactggaaacaggagctattagggtgaggagagagccttgcctttcacagcacagtgaggatgacattgcaccagggacagagattgtatgtgacaaggctggggctccttctttcctagacaatcaaagtatcagtgatgggttttggttggtgattttgaaaaaaaaaaaaaaaagtatgttatactagtgtatgctgtactgaattgaaataaaaccaaaatctgcatcttttaaaaaaaaaaaaaaaaaaaaaaaaannccctggtgggccgccttggccaatgcgattttgattgaacaagcttttgatgcggcccgcattgagcttacttggcaattgccttataggggggggtttaaattaattgggcgggttttaacaaaggggaaatgg

SEQ ID NO: 384914 - DNA, 2626 bp, Homo sapiens
  misc_feature (2490)..(2491): n is a, c, g, or t
tacaagtgtggctgcaaagtttgcccctcttgttaccctcaggcaaatgattgatttagaaaggccccaggggctattttttgcaggaacggtcactccctaaatccaggcagggaaagggaggagtctgagccgagtcacgccccttctcctgtaaactttgggtcgcctctagcttagcgagcgctggagtttgaagagcgggcagtggctgcacacgccaaactttccctatggcttcggtgaccagggccgtgtttggagagctgccctcgggaggagggacagtggagaagttccagctgcagtcagacctcttgagagtggacatcatctcctggggctgcacgatcacagccctagaggtcaaagacaggcaggggagagcctcggacgtggtgcttggcttcgccgagttggaaggatacctccaaaagcagccatactttggagcagttattgggagggtggccaaccgaatcgccaaaggaaccttcaaggtggatgggaaggagtatcacctggccattaacaaggaacccaacagtctgcatggaggagtcagagggtttgataaagtgctctggacccctcgggtgctgtcaaatggcgtccagttctcgcgcatcagtccagatggtgaagaaggctaccccggagagttaaaagtctgggtgacatacaccctggatggcggagagctcatagtcaactacagagcacaagccagtcaggccacaccagtcaacctgaccaaccattcttacttcaacctggcaggccaggcttccccaaatataaatgaccatgaagtcaccatagaagcggatacttatttgcctgtggatgaaaccctgattcctacaggagaagttgccccagtgcaaggcactgcattcgacctgagaaagccagtggagcttggaaaacacctgcaggacttccatctcaatggttttgaccacaatttctgtctgaagggatctaaagaaaagcatttttgtgcaagggtgcatcatgctgcaagcgggcgggtactagaagtatacaccacccagcccggggtccagttttacacgggcaacttcctggatggcacattaaagggcaagaatggagctgtctatcccaagcactccggtttctgcctggagactcagaactggcctgatgcagtcaatcagccccgcttccctcctgtgctgctgaggcctggtgaggagtatgaccacaccacctggttcaagttttctgtggcttaaggaagtgtgaagatatgatccagtccagggctaggctcagccacctgtctcctgtccagaaaaaaggtgaagattaagaagctttcagaatgattctatggattaaaatcatacaaatggtggctgttctgagaatcagtctgggtattgatttccttttccagtgactggctccaggccatgtctaatgaccagctcgattccctgtgcagttcagagggcaagtgaacccaaccaacaatgtcgtcatctaagccctgaccctagccagggactcccatgctgctgttggctccatctctccacactgcctctttcttttcaactttttgcccttcctttctttaaagctattctcacattgcttttatttcctcctccttcacctccaaccactgtcagcagcactctggagttttcaaatgtcacattagcctcaccctgcatgctaggagatggacctgtctctatacagcagtagatgattgataagtgaggaaactgaggcttacagaggttgaagaccaacaagctaataaataaaaagttgaggccgggcacggtggctcacgcctgtaatcccagcactttggaaggccgaggcaggcggatcacgaggtcaggagatcgagaccatcctggctaacacggtgaaaccccgtctctacataaaaaattagctgggtgtggtagcacgcacccgtagttccagctacttgggaggctgaagcaggagaatcgcttgaacctgggaggtggaggttgcagtgagccgagatcatgccactgcactgggcaacagagcaaaactcgatctcaaaaaaaaaaaaaaaaaaaaaaggaaaaaaaagcagctctctctctcgggagagggaggggacttccgagaggaaaaggcctgcaagagcctttgggttaactgagaaagcacagcccggccaacgcttgggaagaaagacaggcaagcactggaaacaggagctattagggtgaggagagagccttgcctttcacagcacagtgaggatgacattgcaccagggacagagattgtatgtgacaaggctggggctccttctttcctagacaatcaaagtatcagtgatgggttttggttggtgattttgaaaaaaaaaaaaaaaagtatgttatactagtgtatgctgtactgaattgaaataaaaccaaaatctgcatcttttaaaaaaaaaaaaaaaaaaaaaaaaannccctggtgggccgccttggccaatgcgattttgattgaacaagcttttgatgcggcccgcattgagcttacttggcaattgccttataggggggggtttaaattaattgggcgggttttaacaaaggggaaatgg

SEQ ID NO: 384915 - DNA, 2439 bp, Homo sapiens
  misc_feature (2303)..(2304): n is a, c, g, or t
tacaagtgtggctgcaaagtttgcccctcttgttaccctcaggcaaatgattgatttagaaaggccccaggggctattttttgcaggaacggtcactccctaaatccaggcagggaaagggaggagtctgagccgagtcacgccccttctcctgtaaactttgggtcgcctctagcttagcgagcgctggagtttgaagagcgggcagtggctgcacacgccaaactttccctatggcttcggtgaccagggccgtgtttggagagctgccctcgggaggagggacagtggagaagttccagctgcagtcagacctcttgagagtggacatcatctcctggggctgcacgatcacagccctagaggtcaaagacaggcaggggagagcctcggacgtggtgcttggcttcgccgagttggaaggatacctccaaaagcagccatactttggagcagttattgggagggtggccaaccgaatcgccaaaggaaccttcaaggtggatgggaaggagtatcacctggccattaacaaggaacccaacagtctgcatggaggagtcagagggtttgataaagtgctctggacccctcgggtgctgtcaaatggcgtccagttctcgcgcatcagtccagatggtgaagaaggctaccccggagagttaaaagtctgggtgacatacaccctggatggcggagagctcatagtcaactacagagcacaagccagtcaggccacaccagtcaacctgaccaaccattcttacttcaacctggcaggccaggcttccccaaatataaatgaccatgaagtcaccatagaagcggatacttatttgcctgtggatgaaaccctgattcctacaggagaagttgccccagtgcaaggcactgcattcgacctgagaaagccagtggagcttggaaaacacctgcaggacttccatctcaatggttttgaccacaatttctgtctgaagggatctaaagaaaagcatttttgtgcaagggtgcatcatgctgcaagcgggcgggtactagaagtaccacctggttcaagttttctgtggcttaaggaagtgtgaagatatgatccagtccagggctaggctcagccacctgtctcctgtccagaaaaaaggtgaagattaagaagctttcagaatgattctatggattaaaatcatacaaatggtggctgttctgagaatcagtctgggtattgatttccttttccagtgactggctccaggccatgtctaatgaccagctcgattccctgtgcagttcagagggcaagtgaacccaaccaacaatgtcgtcatctaagccctgaccctagccagggactcccatgctgctgttggctccatctctccacactgcctctttcttttcaactttttgcccttcctttctttaaagctattctcacattgcttttatttcctcctccttcacctccaaccactgtcagcagcactctggagttttcaaatgtcacattagcctcaccctgcatgctaggagatggacctgtctctatacagcagtagatgattgataagtgaggaaactgaggcttacagaggttgaagaccaacaagctaataaataaaaagttgaggccgggcacggtggctcacgcctgtaatcccagcactttggaaggccgaggcaggcggatcacgaggtcaggagatcgagaccatcctggctaacacggtgaaaccccgtctctacataaaaaattagctgggtgtggtagcacgcacccgtagttccagctacttgggaggctgaagcaggagaatcgcttgaacctgggaggtggaggttgcagtgagccgagatcatgccactgcactgggcaacagagcaaaactcgatctcaaaaaaaaaaaaaaaaaaaaaaggaaaaaaaagcagctctctctctcgggagagggaggggacttccgagaggaaaaggcctgcaagagcctttgggttaactgagaaagcacagcccggccaacgcttgggaagaaagacaggcaagcactggaaacaggagctattagggtgaggagagagccttgcctttcacagcacagtgaggatgacattgcaccagggacagagattgtatgtgacaaggctggggctccttctttcctagacaatcaaagtatcagtgatgggttttggttggtgattttgaaaaaaaaaaaaaaaagtatgttatactagtgtatgctgtactgaattgaaataaaaccaaaatctgcatcttttaaaaaaaaaaaaaaaaaaaaaaaaannccctggtgggccgccttggccaatgcgattttgattgaacaagcttttgatgcggcccgcattgagcttacttggcaattgccttataggggggggtttaaattaattgggcgggttttaacaaaggggaaatgg

SEQ ID NO: 384916 - DNA, 2697 bp, Homo sapiens
  misc_feature (2561)..(2562): n is a, c, g, or t
tacaagtgtggctgcaaagtttgcccctcttgttaccctcaggcaaatgattgatttagaaaggccccaggggctattttttgcaggaacggtcactccctaaatccaggcagggaaagggaggagtctgagccgagtcacgccccttctcctgtaaactttgggtcgcctctagcttagcgagcgctggagtttgaagagcgggcagtggctgcacacgccaaactttccctatggcttcggtgaccagggccgtgtttggagagctgccctcgggaggagggacagtggagaagttccagctgcagtcagacctcttgagagtggacatcatctcctggggctgcacgatcacagccctagaggtcaaagacaggcaggggagagcctcggacgtggtgcttggcttcgccgagttggaaggatacctccaaaagcagccatactttggagcagttattgggagggtggccaaccgaatcgccaaaggaaccttcaaggtggatgggaaggagtatcacctggccattaacaaggaacccaacagtctgcatggaggagtcagagggtttgataaagtgctctggacccctcgggtgctgtcaaatggcgtccagttctcgcgcatcagtccagatggtgaagaaggctaccccggagagttaaaagtctgggtgacatacaccctggatggcggagagctcatagtcaactacagagcacaagccagtcaggccacaccagtcaacctgaccaaccattcttacttcaacctggcaggccaggcttccccaaatataaatgaccatgaagtcaccatagaagcggatacttatttgcctgtggatgaaaccctgattcctacaggtggcaccaacagaaggtttctgcaaggctgagagctccttttacccatggaccaggagcaaagtttgcaggagaagttgccccagtgcaaggcactgcattcgacctgagaaagccagtggagcttggaaaacacctgcaggacttccatctcaatggttttgaccacaatttctgtctgaagggatctaaagaaaagcatttttgtgcaagggtgcatcatgctgcaagcgggcgggtactagaagtatacaccacccagcccggggtccagttttacacgggcaacttcctggatggcacattaaagggcaagaatggagctgtctatcccaagcactccggtttctgcctggagactcagaactggcctgatgcagtcaatcagccccgcttccctcctgtgctgctgaggcctggtgaggagtatgaccacaccacctggttcaagttttctgtggcttaaggaagtgtgaagatatgatccagtccagggctaggctcagccacctgtctcctgtccagaaaaaaggtgaagattaagaagctttcagaatgattctatggattaaaatcatacaaatggtggctgttctgagaatcagtctgggtattgatttccttttccagtgactggctccaggccatgtctaatgaccagctcgattccctgtgcagttcagagggcaagtgaacccaaccaacaatgtcgtcatctaagccctgaccctagccagggactcccatgctgctgttggctccatctctccacactgcctctttcttttcaactttttgcccttcctttctttaaagctattctcacattgcttttatttcctcctccttcacctccaaccactgtcagcagcactctggagttttcaaatgtcacattagcctcaccctgcatgctaggagatggacctgtctctatacagcagtagatgattgataagtgaggaaactgaggcttacagaggttgaagaccaacaagctaataaataaaaagttgaggccgggcacggtggctcacgcctgtaatcccagcactttggaaggccgaggcaggcggatcacgaggtcaggagatcgagaccatcctggctaacacggtgaaaccccgtctctacataaaaaattagctgggtgtggtagcacgcacccgtagttccagctacttgggaggctgaagcaggagaatcgcttgaacctgggaggtggaggttgcagtgagccgagatcatgccactgcactgggcaacagagcaaaactcgatctcaaaaaaaaaaaaaaaaaaaaaaggaaaaaaaagcagctctctctctcgggagagggaggggacttccgagaggaaaaggcctgcaagagcctttgggttaactgagaaagcacagcccggccaacgcttgggaagaaagacaggcaagcactggaaacaggagctattagggtgaggagagagccttgcctttcacagcacagtgaggatgacattgcaccagggacagagattgtatgtgacaaggctggggctccttctttcctagacaatcaaagtatcagtgatgggttttggttggtgattttgaaaaaaaaaaaaaaaagtatgttatactagtgtatgctgtactgaattgaaataaaaccaaaatctgcatcttttaaaaaaaaaaaaaaaaaaaaaaaaannccctggtgggccgccttggccaatgcgattttgattgaacaagcttttgatgcggcccgcattgagcttacttggcaattgccttataggggggggtttaaattaattgggcgggttttaacaaaggggaaatgg

SEQ ID NO: 384917 - DNA, 1177 bp, Homo sapiens
tacaagtgtggctgcaaagtttgcccctcttgttaccctcaggcaaatgattgatttagaaaggccccaggggctattttttgcaggaacggtcactccctaaatccaggcagggaaagggaggagtctgagccgagtcacgccccttctcctgtaaactttgggtcgcctctagcttagcgagcgctggagtttgaagagcgggcagtggctgcacacgccaaactttccctatggcttcggtgaccagggccgtgtttggagagctgccctcgggaggagggacagtggagaagttccagctgcagtcagacctcttgagagtggacatcatctcctggggctgcacgatcacagccctagaggtcaaagacaggcaggggagagcctcggacgtggtgcttggcttcgccgagttggaaggatacctccaaaagcagccatactttggagcagttattgggagggtggccaaccgaatcgccaaaggaaccttcaaggtggatgggaaggagtatcacctggccattaacaaggaacccaacagtctgcatggaggagtcagagggtttgataaagtgctctggacccctcgggtgctgtcaaatggcgtccagttctcgcgcatcagtccagatggtgaagaaggctaccccggagagttaaaagtctgggtgacatacaccctggatggcggagagctcatagtcaactacagagcacaagccagtcaggccacaccagtcaacctgaccaaccattcttacttcaacctggcaggccaggcttccccaaatataaatgaccatgaagtcaccatagaagcggatacttatttgcctgtggatgaaaccctgattcctacaggagaagttgccccagtgcaaggcactgcattcgacctgagaaagccagtggagcttggaaaacacctgcaggacttccatctcaatggttttgaccacaatttctgtctgaagggatctaatacaccacccagcccggggtccagttttacacgggcaacttcctggatggcacattaaagggcaagaatggagctgtctatcccaagcactccggtttctgcctggagactcagaactggcctgatgcagtcaatcaggcccgcttccttctgtgctgctgaggcccttggaggtgaaggtgcagtgaa

SEQ ID NO: 384918 - DNA, 536 bp, Homo sapiens
ggaccttattcaaggggagaggagtctggagggaatgccgcttggcttcactaccaaaggttttatgacttagcattttaaaaggttttccttttaccaagaaatgcagaaaccaagagcaaaccccacgtaccagatcactgattcctactgaagcagctagcccgagaaaggactctctcatactggtcttgggaaatgacttggcagcctgagccatcccagcagtggacaaggatggttaattcttattctgtagacgtccacaggaacagactaggatggaaaacacagttaagcacagccatgcaccctgtggctgtagaaatgcccctgtgtgaaagaaaaataaattcaagactggagttttggaggaaaaaaaatacaagtagcatttacaacagctctttgctctttaaatttcttaccattcaataaagtgatccagtcactcacatttgaactgagatgccttctccagactgttctgacaaggtaatgaaaataaaatgcacttggatttttccagacatcca

SEQ ID NO: 384919 - DNA, 400 bp, Homo sapiens
ggaccttattcaaggggagaggagtctggagggaatgccgcttggcttcactaccaaaggttttatgacttagcattttaaaaggttttccttttaccaagaaatgcagaaaccaagagcaaaccccacgtaccagatcactgattcctactgaagcagctagcccgagaaaggactctctcatactggtcttgggaaatgacttggcagcctgagccatcccagcagtggacaaggatggttaattcttattctgtagacgtccacaggaacagactaggatggaaaacacagttaagcacagccatgcaccctgtggctgtagaaatgcccctgtgtgaaagaaaaataaattcaagactggagttttggaggaaaaaaaatacaagtagcatttaca

SEQ ID NO: 384920 - DNA, 522 bp, Homo sapiens
aagggttggggagactgtcccgtgcattgtaggatattcagcagcagccctggcctttacccactagatgtcagtagcagcccccatttgtgaaaaccaaaaaattttctcaagatgttgctaattgtcccctgcggtgcagaatcgctcctggttgagaaccgtctctattggatatcaagtcttagtgtagagcaacagtaattaaaagtgtgatattgagacaatgagaaacaattagatcagtggaacagaatagaaaaaaccagaagcagatcctcacatgcatagacaatgattctatcatatttattacagtggactatccatatgttaaataagtttaacttctcaacaccacacgcaaaagtcagttttggtggatttttgacacaaatgtgagtggcaatatgataaaactttagaaaaaaatgtaagagcttatcttcatgctcttgatagcatggaatgatccgttaaagagacacaagaaacactaatatgaaagaaacgctaataagg

SEQ ID NO: 384921 - DNA, 325 bp, Homo sapiens
tcacagtaaccctaggaaagagtaaaccttaatagttacaatagcacaccccgtcacgtaaccctagggaagagtaaacctcaatagttaaaacagcacaccccgtcacagtagccctaggaaagagtaaacctcaatagttacaacagcacaccctgtcacggtaaccttaggaaagagtaatctcagtagtacaacagctacaacacgccctgtcacggtaactctaggaaagagtaaaccttaatagttacaatagcacacagttgtcacagtgaccctaggaaggactggccaggccagggctgtgtacagttgggtcttg

SEQ ID NO: 384922 - DNA, 124 bp, Homo sapiens
aaaaaaaaaaaaaatgtaaatctttcaagaaaaatctagtaggctgcatgtaaaatctaggagttgaggtcactatcttaatcaaaacttaattagctcaaaagctgtaggagacagatggatt

SEQ ID NO: 384923 - DNA, 288 bp, Homo sapiens
aagctaaaaatccagacagagacaagcaggccagcactgaaagaagaatggaattacttaaccccagctcataaacatccaagcagaactctactatgatggatgcaggtgacatgtccagccttgctcagctggccagttgactatagtttttcctcggactttgctgagattttaataaggggcagttgcgagaggaagaaggaaaagatggaggtagaggagacaaaggaaaaagagatggcatgggatagaaagagggcagcagaaagaagtaggcaggcaaag

SEQ ID NO: 384924 - DNA, 4089 bp, Homo sapiens
caggcaccttttttgatccagtcaaggaagaggatttgttgttttcgaaatcagagtgaaggaagcaccgaagcgaaacttaaggaatcctgccttcccggagccgcgggcgatgcgactagggctgccgggcgccgccgccgcccgtccggcttcgtccttcccggcagtcgggaactagttctgaccctcgccccccgaccccggatcgaatccccgccctccgcaccctggatatgttttctcccagacctggatatttttttgatatcgtgaaactacgagggaaataatttgggggatttcttcttggctccctgctttccccacagacatgccttccgtttggagggccgcggcaccccgtccgaggcgaaggaacccccccagccgcgagggagagaaatgaagggaatttctgcagcggcatgaaagctctgcagctaggtcctctcatcagccatttgtcctttcaaactgtattgtgatacgggcaggatcagtccacgggagagaagacgagcctcccggctgtttctccgccggtctacttcccatatttcttttctttgccctcctgattcttggctggcccagggatgacttcctcgctgcagcggccctggcgggtgccctggctaccatggaccatcctgctggtcagcactgcggctgcttcgcagaatcaagaacggctatgtgcgtttaaagatccgtatcagcaagaccttgggataggtgagagtagaatctctcatgaaaatgggacaatattatgctcgaaaggtagcacctgctatggcctttgggagaaatcaaaaggggacataaatcttgtaaaacaaggatgttggtctcacattggagatccccaagagtgtcactatgaagaatgtgtagtaactaccactcctccctcaattcagaatggaacataccgtttctgctgttgtagcacagatttatgtaatgtcaactttactgagaattttccacctcctgacacaacaccactcagtccacctcattcatttaaccgagatgagacaataatcattgctttggcatcagtctctgtattagctgttttgatagttgccttatgctttggatacagaatgttgacaggagaccgtaaacaaggtcttcacagtatgaacatgatggaggcagcagcatccgaaccctctcttgatctagataatctgaaactgttggagctgattggccgaggtcgatatggagcagtatataaaggctccttggatgagcgtccagttgctgtaaaagtgttttcctttgcaaaccgtcagaattttatcaacgaaaagaacatttacagagtgcctttgatggaacatgacaacattgcccgctttatagttggagatgagagagtcactgcagatggacgcatggaatatttgcttgtgatggagtactatcccaatggatctttatgcaagtatttaagtctccacacaagtgactgggtaagctcttgccgtcttgctcattctgttactagaggactggcttatcttcacacagaattaccacgaggagatcattataaacctgcaatttcccatcgagatttaaacagcagaaatgtcctagtgaaaaatgatggaacctgtgttattagtgactttggactgtccatgaggctgactggaaatagactggtgcgcccaggggaggaagataatgcagccataagcgaggttggcactatcagatatatggcaccagaagtgctagaaggagctgtgaacttgagggactgtgaatcagctttgaaacaagtagacatgtatgctcttggactaatctattgggagatatttatgagatgtacagacctcttcccaggggaatccgtaccagagtaccagatggcttttcagacagaggttggaaaccatcccacttttgaggatatgcaggttctcgtgtctagggaaaaacagagacccaagttcccagaagcctggaaagaaaatagcctggcagtgaggtcactcaaggagacaatcgaagactgttgggaccaggatgcagaggctcggcttactgcacagtgtgctgaggaaaggatggctgaacttatgatgatttgggaaagaaacaaatctgtgagcccaacagtcaatccaatgtctactgctatgcagaatgaacgcaacctgtcacataataggcgtgtgccaaaaattggtccttatccagattattcttcctcctcatacattgaagactctatccatcatactgacagcatcgtgaagaatatttcctctgagcattctatgtccagcacacctttgactataggggaaaaaaaccgaaattcaattaactatgaacgacagcaagcacaagctcgaatccccagccctgaaacaagtgtcaccagcctctccaccaacacaacaaccacaaacaccacaggactcacgccaagtactggcatgactactatatctgagatgccatacccagatgaaacaaatctgcataccacaaatgttgcacagtcaattgggccaacccctgtctgcttacagctgacagaagaagacttggaaaccaacaagctagacccaaaagaagttgataagaacctcaaggaaagctctgatgagaatctcatggagcactctcttaaacagttcagtggcccagacccactgagcagtactagttctagcttgctttacccactcataaaacttgcagtagaagcaactggacagcaggacttcacacagactgcaaatggccaagcatgtttgattcctgatgttctgcctactcagatctatcctctccccaagcagcagaaccttcccaagagacctactagtttgcctttgaacaccaaaaattcaacaaaagagccccggctaaaatttggcagcaagcacaaatcaaacttgaaacaagtcgaaactggagttgccaagatgaatacaatcaatgcagcagaacctcatgtggtgacagtcaccatgaatggtgtggcaggtagaaaccacagtgttaactcccatgctgccacaacccaatatgccaatgggacagtactatctggccaaacaaccaacatagtgacacatagggcccaagaaatgttgcagaatcagtttattggtgaggacacccggctgaatattaattccagtcctgatgagcatgagcctttactgagacgagagcaacaagctggccatgatgaaggtgttctggatcgtcttgtggacaggagggaacggccactagaaggtggccgaactaattccaataacaacaacagcaatccatgttcagaacaagatgttcttgcacagggtgttccaagcacagcagcagatcctgggccatcaaagcccagaagagcacagaggcctaattctctggatctttcagccacaaatgtcctggatggcagcagtatacagataggtgagtcaacacaagatggcaaatcaggatcaggtgaaaagatcaagaaacgtgtgaaaactccctattctcttaagcggtggcgcccctccacctgggtcatctccactgaatcgctggactgtgaagtcaacaataatggcagtaacagggcagttcattccaaatccagcactgctgtttaccttgcagaaggaggcactgctacaaccatggtgtctaaagatataggaatgaactgtctgtgaaatgttttcaagcctatggagtgaaattattttttgcatcatttaaacatgcagaagatgtttaccgggcggggtgacaggagagagcgtcagcggcaagctgtggaggatggggctcagaatgcagacctgggctggccgcatggcctctccctgagccctgatttgtggtagggaagcagtatgggtgcagtcccctcctaggcctccctctggggtcccccgatcctatcccacctcttcagggtgagccagcctcacctcttcctagtcctgagggtgagggcaggctgaggcaacgagtgggaggttcaaacaagagtgggctggagccaagggaaaatagagatgatgtaatttctttccggaattc

SEQ ID NO: 384925 - DNA, 288 bp, Homo sapiens
agttacaacagcttccacctcctgacacagcaccactcagtccacctcattcatttaaccgagatgagacaataatcattgctttggcatcagtctctgtattagctgttttgatagttgccttatgctttggatacagaatgttgacaggagaccgtaaacaaggtcttcacagtatgaacatgatggaggcagcagcatccgaaccctctcttgatctagataatctgaaactgttggaggtaagtttgccgttagattatggactgttgtttctactgtgatact

SEQ ID NO: 384926 - DNA, 11516 bp, Homo sapiens
caggcaccttttttgatccagtcaaggaagaggatttgttgttttcgaaatcagagtgaaggaagcaccgaagcgaaacttaaggaatcctgccttcccggagccgcgggcgatgcgactagggctgccgggcgccgccgccgcccgtccggcttcgtccttcccggcagtcgggaactagttctgaccctcgccccccgaccccggatcgaatccccgccctccgcaccctggatatgttttctcccagacctggatatttttttgatatcgtgaaactacgagggaaataatttgggggatttcttcttggctccctgctttccccacagacatgccttccgtttggagggccgcggcaccccgtccgaggcgaaggaacccccccagccgcgagggagagaaatgaagggaatttctgcagcggcatgaaagctctgcagctaggtcctctcatcagccatttgtcctttcaaactgtattgtgatacgggcaggatcagtccacgggagagaagacgagcctcccggctgtttctccgccggtctacttcccatatttcttttctttgccctcctgattcttggctggcccagggatgacttcctcgctgcagcggccctggcgggtgccctggctaccatggaccatcctgctggtcagcactgcggctgcttcgcagaatcaagaacggctatgtgcgtttaaagatccgtatcagcaagaccttgggataggtgagagtagaatctctcatgaaaatgggacaatattatgctcgaaaggtagcacctgctatggcctttgggagaaatcaaaaggggacataaatcttgtaaaacaaggatgttggtctcacattggagatccccaagagtgtcactatgaagaatgtgtagtaactaccactcctccctcaattcagaatggaacataccgtttctgctgttgtagcacagatttatgtaatgtcaactttactgagaattttccacctcctgacacaacaccactcagtccacctcattcatttaaccgagatgagacaataatcattgctttggcatcagtctctgtattagctgttttgatagttgccttatgctttggatacagaatgttgacaggagaccgtaaacaaggtcttcacagtatgaacatgatggaggcagcagcatccgaaccctctcttgatctagataatctgaaactgttggagctgattggccgaggtcgatatggagcagtatataaaggctccttggatgagcgtccagttgctgtaaaagtgttttcctttgcaaaccgtcagaattttatcaacgaaaagaacatttacagagtgcctttgatggaacatgacaacattgcccgctttatagttggagatgagagagtcactgcagatggacgcatggaatatttgcttgtgatggagtactatcccaatggatctttatgcaagtatttaagtctccacacaagtgactgggtaagctcttgccgtcttgctcattctgttactagaggactggcttatcttcacacagaattaccacgaggagatcattataaacctgcaatttcccatcgagatttaaacagcagaaatgtcctagtgaaaaatgatggaacctgtgttattagtgactttggactgtccatgaggctgactggaaatagactggtgcgcccaggggaggaagataatgcagccataagcgaggttggcactatcagatatatggcaccagaagtgctagaaggagctgtgaacttgagggactgtgaatcagctttgaaacaagtagacatgtatgctcttggactaatctattgggagatatttatgagatgtacagacctcttcccaggggaatccgtaccagagtaccagatggcttttcagacagaggttggaaaccatcccacttttgaggatatgcaggttctcgtgtctagggaaaaacagagacccaagttcccagaagcctggaaagaaaatagcctggcagtgaggtcactcaaggagacaatcgaagactgttgggaccaggatgcagaggctcggcttactgcacagtgtgctgaggaaaggatggctgaacttatgatgatttgggaaagaaacaaatctgtgagcccaacagtcaatccaatgtctactgctatgcagaatgaacgcaacctgtcacataataggcgtgtgccaaaaattggtccttatccagattattcttcctcctcatacattgaagactctatccatcatactgacagcatcgtgaagaatatttcctctgagcattctatgtccagcacacctttgactataggggaaaaaaaccgaaattcaattaactatgaacgacagcaagcacaagctcgaatccccagccctgaaacaagtgtcaccagcctctccaccaacacaacaaccacaaacaccacaggactcacgccaagtactggcatgactactatatctgagatgccatacccagatgaaacaaatctgcataccacaaatgttgcacagtcaattgggccaacccctgtctgcttacagctgacagaagaagacttggaaaccaacaagctagacccaaaagaagttgataagaacctcaaggaaagctctgatgagaatctcatggagcactctcttaaacagttcagtggcccagacccactgagcagtactagttctagcttgctttacccactcataaaacttgcagtagaagcaactggacagcaggacttcacacagactgcaaatggccaagcatgtttgattcctgatgttctgcctactcagatctatcctctccccaagcagcagaaccttcccaagagacctactagtttgcctttgaacaccaaaaattcaacaaaagagccccggctaaaatttggcagcaagcacaaatcaaacttgaaacaagtcgaaactggagttgccaagatgaatacaatcaatgcagcagaacctcatgtggtgacagtcaccatgaatggtgtggcaggtagaaaccacagtgttaactcccatgctgccacaacccaatatgccaatgggacagtactatctggccaaacaaccaacatagtgacacatagggcccaagaaatgttgcagaatcagtttattggtgaggacacccggctgaatattaattccagtcctgatgagcatgagcctttactgagacgagagcaacaagctggccatgatgaaggtgttctggatcgtcttgtggacaggagggaacggccactagaaggtggccgaactaattccaataacaacaacagcaatccatgttcagaacaagatgttcttgcacagggtgttccaagcacagcagcagatcctgggccatcaaagcccagaagagcacagaggcctaattctctggatctttcagccacaaatgtcctggatggcagcagtatacagataggtgagtcaacacaagatggcaaatcaggatcaggtgaaaagatcaagaaacgtgtgaaaactccctattctcttaagcggtggcgcccctccacctgggtcatctccactgaatcgctggactgtgaagtcaacaataatggcagtaacagggcagttcattccaaatccagcactgctgtttaccttgcagaaggaggcactgctacaaccatggtgtctaaagatataggaatgaactgtctgtgaaatgttttcaagcctatggagtgaaattattttttgcatcatttaaacatgcagaagatgtttaaaaataaaaaaaaaactgctttatcctcctgtcagcaccccctcccacccctgcaacaaagacttgctttaaatagatttcagctatgcagaaaaatttagcttatgcttccatatttttaaattttgttttttaagttttgcacttttgtttagtctcgctaaagttatatttgtctgttatgaccacagagttatatgtgtgtgtatcaaaagtggtctcaaaatatttttttaagaaaaaaagcaaaaacaatgtattgctgataatcagtttggaccagtttcttaaggtcattaaaacagaagcaaattaagacaggtttgactgcagtggtgtctggtatccatgttttatttctgggcacaagctagtttttatgttgatacgttcctgaacatattatcttgttggacatcttttctcttgtgttttgtttgaatgtgcaatagtttataggccacaaataagctttcttgtaagctctcttcctaacagggcacatattcttccataatataaacacttttctgccccatctcccatacttttgaaggtcagttctatgacagtgaattttgcacaggagaagcagctacctgatttcttactttctctctccttatcatggagaatacagaaacattgtctgaaagggctctaaagaaggaactaccaaaacctgacttgaaatgccatttcttttaaccttccaaatcctaaatgtttccttcaaggcatcttaataaacttatttgcttctggttttgggagttcataagagagaatagaacaaaatacaggacatcaaatattagccatttcccattttattttatttttctatgtaggttcatgttccatgttcatttatttaagaaatacatttttattggtaagcttatagagctacacttatggaatttttaagtaggtaaataaatggttaagacaaaatagtgttatagccttcattctctgaataggccatctttgactcataaaattacccttactgtttattataacttcagaagtaatttatagttctgaacctatagtatcttttaccctgttcccaagcaaagactggtgactttatctgaaaatgattcctcttcccatgacctaaaacactgtgaggaaaaatcattcaagtggcatgccaagtccctatgaaggaagggctgctatcaaacctaccttttttgagcaaactgagactaaacttctctcttttcaaaattgtgttatcttccttaatcctattttcataatttttccttttgccagtttttcacattatctttgatatgtgagcaacatttattatttacattagagtataccttttagtaataaaatgacttgaaatcatattatttttaaaagccctttgcttctttcattacttataatctcctctaaaacaacctctgcatgttttttttaaataaagcactttctgtcaaataatggacttttttctaaacagaaattattttctattaatttgcaaactgatgatttcacttttttttacttttttttcgattatcagagtacttagtaaatgttatatagtttagttctaagatagttccagggattaaaaggttaagaggaaaacacaaatcaccaaatttctgatttatgtttttatctcctgaacaatattttctcactcatattcctctatcttatcacttagctaaagacagcctaaatttcccaattttctgtccaaaatatttgtgatttacttgtatataagccttctcatttgccatgtgctgtgatcttacaagttagatgttactatacctaccatttattcagctggattgctgaacacagttctggattcatagaattaagaatatcttgttagtgcccaggatttccacgtttgtgttttattggcccttttctttattcagccccttaatctattttcagtcttctggcacgtaatttttttcacagttattattcttctattaacaaattatttttatcttgcctagtacattttcacttagttctcttgcccttaaatatctttcacatgcattttaggatattcttttcaaatatttgtaggacaactttgaatcaaaataaattatgttccttctccaatttgaagcattgaggataaatgaccatttgaggtctaactgatcttttcctgccagaagagttatcttacgttctgctatatttgtatttgggccagttgattgtaggttgtccaacattttttaatattgggaaaattatgataaaatgctttaaaaattaatatgccagattaaaataactgaatagtttactatttcattcaagcatgtttaaaacaaataatttcctttcaccagtttttcttagtaaactcctgaaaaagtaggaaaggtggaaagtatatatcatttttataaattttaaattgtacatcagacttttaaaatctgtaatatacaagcaagcaaaattattttaaatgacttaattgtatgctaatactcatctgataataaatgcttcttaaagttgacatttaactgctatcacaaagttttatatgtagaaaagtggggtccttttgaataaaagatcattcaactaaaaatattaaaatttatttcactggatggtaatgtaaccttaaaagcatcataataggtaaagtctaatattagttcccttaacaaaatcctaactgtataccagaattaggtcactgaaagaacttgatttgaattacgtttagacaaaaatgatttaattgtaaattcttaaaactttctaaatgcataattggcaaaaaaaaaaacccactgttaccagtgtaggaagttacaagaaggcacatactgaatgctgaagtatacatatgctatttctcttaaacctcagagcaaccatatgagcattgtaattaatattcccattttacagatgaggaaactgaagctaagagaagctaagtaatatgcccaaggtccacatctagtaacagacaaagctgggatttcagtctatgtctgcctctctccacatctctttcatccataccacactgcctacatgccatatgacaggatgtgtaatgggctaacgtttatttaaaaagttcaggccaggtgcagtggcttatgcctataatccccgcactttgggaggccgagccgggtggatcatgaggtcagacgttcaacaccagcctggccaagatggtgaaaccccgtctctattaaaaatattttttaaaaattaactgagcgtggtggtgggcgcctgtagtcccagctactcaggaggctaaggcaggagaatctcttgaacccgagaggtggaggttgcagtgagctgagatcgcgccactgcactgcagcctaggcgacagagcaagactgcctcaaaaaaaaaacataaaaattcagtcactatactctggcacaattttcatttgtatatgagccaaaccacataccttaatgatttgggaagttaggcaaatatgagatatgtagacatatctatgctgattgttgcttgagaaataattactaattctagacaaaactcaatcctgtatcttccatcatgaatcttaaaatcatttcacttcactcctaacatttcttacattgcagaactaatggtaaagtaaattttacggaaaaagttaagatagctttgggaacagagacctttccctaaattgattccatagcagatttgggggaattaacaaagaatttcagtctcatcaatcctttgaatccatcttcaaaacttctgcttttaataactttagaaaatttactaatctatagaactaattgagtaggatataggaaggatacaaggatataatgtcctttttataaaagtttagtatagcttctttacatgtatccacttgttccagaaaatgtgcattggttctgaatgtgaaaatatttaaagagagaaaggaacactcaagtaagtgtgggcttcagtgggaattatcacaaaacattggcaagtatttttatttaaattattttcaaatttgacttctacagccaagtggaattggtaggctgtagctgttacactgaaatttctagtctttgtaagtgcctcctgaaagtcatttaaaatggaaaaatatttcaatgagcttttccttttttcatatttatggacatgaatattttattggagatcattaactcctagaatttgagattatatttccatacaacattttataaagttatgttgaacttactacctgttatgtgcaggttattatgtaactattcacagattgcttcatatattgctttatcttcccatctaacttcttaaagttaaaatccggacacacatgttgattatctagaccagtcattctggaaattgtaacactcccacataaaccccaggagactttttcagaatgcaatgtttctaaatgtactgttactggcagtttactctccagcatataaggttgcattttaacttttagattatgaactgtgcaaactttacccaaaactatcttgcatgattccctcctaaatatattccttgattaagtaaatctggcaaatcactgtttgagctagttacataaaatttgttatcaagagaaggcttttctacaagtttccagattaacataaagaaaagagggaatcacagggcatttaagtgcaccttcccattactttccttaaatcacctcatagttaggctgggcgcggtggctcacgcctgtaatcccagcactttgggaggccgagacggtggatcacgaggtcaggggactgagatcatcctggctaacacgatgaaacctcatctctactaaaaatacaaataattagccaggcatggtggcacgcgcctgtagtcccagctactcgggaggcagagacaggagaatcgtttgcacccgggaggcggaggttgttgcagtgagccgagatcgcgccaatgcactccagcctgggctacagagtgagactccatctcaaaaaaaaacaaaaaaaatcacctcatagtttatgtctgacttactccaaacctcagttatctgatttgtagtctgtgtcaggaaagttttcttcatatctattctgtctccctcctctttgattttaaatttttttcttttacccagtaggacaaaaaagagcagttggtcatcatccccaatattcttagtcttcagtatgcttcaggcctctcaatgaacacttaagtctcaattcttcagacaaaattgcttaagctcttctcctcagtcctattttaatgactttatatttaagaatatagaattatattttcttttatattcaaattcattactccagttaagtaatagtttgatagtttgatagaatcgagagttaagatgtttctatttgaaagtggattcaaccatcagaccaccagcaaatcggcacttaatttttgtgttatctaacattttctattgtggaattttatgattttatattctcattagttataactaaaaagccatgcacacagaattgtatatcattttgccattaaaattttttaacatattgcagcaagcttagttttatgattgagccacaaccttttacatattttttgtatgaaatattaaacactaaatgcaagattaactttcaaaagcaaaccctacattaatcaggtattatcgatggacatttttgtagaccacttttgaaatacttattattttgcaacatagactggactatacaactttcatttaacttttaggtgactgatttaagttgagtgtgcatatagagaaaaacctagaaatttatctcatggcagatacatttgaaagtacttcagaagaatttatgctgtatattaaaactaggctcaaaataaatctatcgtatctttaaaagtccaattctgttattactgtgatgtttgtagtgttactattaaacattgtgaacatacacatttttaaaacaacttgaaacccattttaaaatctgggtaagagagaaggaatcttcagaacaaaatcacatcattagggtgtccagtttatgattgaatttttaagcaaattactgtatttgaaactacaacttgatttggttttcagttttaaaaggcaacatgtgggttttatccattttatttatacctttagatttcagaaacatcttcatgttttagatgcattctacagacatcatgttacttaaaaactcagggcccctttcatccctttgtacactgaaaaagttcaattgttagcaagtaagcaattagatccagttgaatatttaaagtgtttgttgcacagttcatttaatgtttcatcttatttgactttttcacatagatataatatcagatttcattaattataaaaagttgcccagttctgtaattactgaacagagggaatgactcaactaattggctacatgttgcaacaaatttaggcctttagagttgaagcactgacttaaaacgacttacatttctgttctttggtcaaatgaccatacatgatatgggacaaattgtttcattttgtttgttttttaataagggaacttggtaaagtagttcctgtcagataggattttctcaagagacaatttaacgttataaagccttctaaaagtgaactaaatattttataactttagtaatagcttggatggttttgagaaaataacctgtatttatcacattgtcaaacagaatttttctttgaatcagacaagttcaagctctaaattgatgtgctatatacttaaaatcctaggaagttatctgtaaccagtctcttgtctcaggctcttcaccttgttaccaatcctcgtaagtatgtaaaggaaacatatttttaaagaagcttaacagtaagaaaaaattactaaaagatgcaattcaaagataggtcccagtttaacactgaattgcttgacttctgtggcttttctttttctggccacatttatttatttaagcaatttttgtatgccttgttatttcatttccatagagattatattgtatcagtgtttatgtaagctggaatcatcctcagttttttgctgataatttttcaaataaagatacatggataattgtaaaatacactaactcttagggtgttgtagtagctgaaacatggagatgcgtagctgtcatgctttttctgaatggacaggagaaacataagctacggagtattcacttctgaggatgcttttccggaaaaagaaaggctagaaaatactcgcacttcctcagaaccctctttcttgttaacgggtatcttttgttggtgtgttttgctcttacattacagatagactatcatatatgactttatgaataatttcagttattttgcttttgtataagctgtctgaagccttgctatgctgtataagttgtgtttgatggatcagtgtgagtataaaataaagcaaatcacttttcttttgtattatctatggatgccactatgaaagctgacattaagccactaaagagttttctatgaataagtgtaagtaaatgctttgatatatataaacctaaataaaaagattgtattgatacagagacattggagaaggagattttaaggcagttctttaggtttaaaaaggcttgctgtaaaatggtgcgttattccgtttattaaagatcatattaatgac

SEQ ID NO: 384927 - DNA, 11464 bp, Homo sapiens
caggcaccttttttgatccagtcaaggaagaggatttgttgttttcgaaatcagagtgaaggaagcaccgaagcgaaacttaaggaatcctgccttcccggagccgcgggcgatgcgactagggctgccgggcgccgccgccgcccgtccggcttcgtccttcccggcagtcgggaactagttctgaccctcgccccccgaccccggatcgaatccccgccctccgcaccctggatatgttttctcccagacctggatatttttttgatatcgtgaaactacgagggaaataatttgggggatttcttcttggctccctgctttccccacagacatgccttccgtttggagggccgcggcaccccgtccgaggcgaaggaacccccccagccgcgagggagagaaatgaagggaatttctgcagcggcatgaaagctctgcagctaggtcctctcatcagccatttgtcctttcaaactgtattgtgatacgggcaggatcagtccacgggagagaagacgagcctcccggctgtttctccgccggtctacttcccatatttcttttctttgccctcctgattcttggctggcccagggatgacttcctcgctgcagcggccctggcgggtgccctggctaccatggaccatcctgctggtcagcactgcggctgcttcgcagaatcaagaacggctatgtgcgtttaaagatccgtatcagcaagaccttgggataggtgagagtagaatctctcatgaaaatgggacaatattatgctcgaaaggtagcacctgctatggcctttgggagaaatcaaaaggggacataaatcttgtaaaacaaggatgttggtctcacattggagatccccaagagtgtcactatgaagaatgtgtagtaactaccactcctccctcaattcagaatggaacataccgtttctgctgttgtagcacagatttatgtaatgtcaactttactgagaattttccacctcctgacacaacaccactcagtccacctcattcatttaaccgagatgagacaataatcattgctttggcatcagtctctgtattagctgttttgatagttgccttatgctttggatacagaatgttgacaggagaccgtaaacaaggtcttcacagtatgaacatgatggaggcagcagcatccgaaccctctcttgatctagataatctgaaactgttggagctgattggccgaggtcgatatggagcagtatataaaggctccttggatgagcgtccagttgctgtaaaagtgttttcctttgcaaaccgtcagaattttatcaacgaaaagaacatttacagagtgcctttgatggaacatgacaacattgcccgctttatagttggagatgagagagtcactgcagatggacgcatggaatatttgcttgtgatggagtactatcccaatggatctttatgcaagtatttaagtctccacacaagtgactgggtaagctcttgccgtcttgctcattctgttactagaggactggcttatcttcacacagaattaccacgaggagatcattataaacctgcaatttcccatcgagatttaaacagcagaaatgtcctagtgaaaaatgatggaacctgtgttattagtgactttggactgtccatgaggctgactggaaatagactggtgcgcccaggggaggaagataatgcagccataagcgaggttggcactatcagatatatggcaccagaagtgctagaaggagctgtgaacttgagggactgtgaatcagctttgaaacaagtagacatgtatgctcttggactaatctattgggagatatttatgagatgtacagacctcttcccaggggaatccgtaccagagtaccagatggcttttcagacagaggttggaaaccatcccacttttgaggatatgcaggttctcgtgtctagggaaaaacagagacccaagttcccagaagcctggaaagaaaatagcctggcagtgaggtcactcaaggagacaatcgaagactgttgggaccaggatgcagaggctcggcttactgcacagtgtgctgaggaaaggatggctgaacttatgatgatttgggaaagaaacaaatctgtgagcccaacagtcaatccaatgtctactgctatgcagaatgaacgcaacctgtcacataataggcgtgtgccaaaaattggtccttatccagattattcttcctcctcatacattgaagactctatccatcatactgacagcatcgtgaagaatatttcctctgagcattctatgtccagcacacctttgactataggggaaaaaaaccgaaattcaattaactatgaacgacagcaagcacaagctcgaatccccagccctgaaacaagtgtcaccagcctctccaccaacacaacaaccacaaacaccacaggactcacgccaagtactggcatgactactatatctgagatgccatacccagatgaaacaaatctgcataccacaaatgttgcacagtcaattgggccaacccctgtctgcttacagctgacagaagaagacttggaaaccaacaagctagacccaaaagaagttgataagaacctcaaggaaagctctgatgagaatctcatggagcactctcttaaacagttcagtggcccagacccactgagcagtactagttctagcttgctttacccactcataaaacttgcagtagaagcaactggacagcaggacttcacacagactgcaaatggccaagcatgtttgattcctgatgttctgcctactcagatctatcctctccccaagcagcagaaccttcccaagagacctactagtttgcctttgaacaccaaaaattcaacaaaagagccccggctaaaatttggcagcaagcacaaatcaaacttgaaacaagtcgaaactggagttgccaagatgaatacaatcaatgcagcagaacctcatgtggtgacagtcaccatgaatggtgtggcaggtagaaaccacagtgttaactcccatgctgccacaacccaatatgccaatgggacagtactatctggccaaacaaccaacatagtgacacatagggcccaagaaatgttgcagaatcagtttattggtgaggacacccggctgaatattaattccagtcctgatgagcatgagcctttactgagacgagagcaacaagctggccatgatgaaggtgttctggatcgtcttgtggacaggagggaacggccactagaaggtggccgaactaattccaataacaacaacagcaatccatgttcagaacaagatgttcttgcacagggtgttccaagcacagcagcagatcctgggccatcaaagcccagaagagcacagaggcctaattctctggatctttcagccacaaatgtcctggatggcagcagtatacagataggtgagtcaacacaagatggcaaatcaggatcaggtgaaaagatcaagaaacgtgtgaaaactccctattctcttaagcggtggcgcccctccacctgggtcatctccactgaatcgctggactgtgaagtcaacaataatggcagtaacagggcagttcattccaaatccagcactgctgtttaccttgcagaaggaggcactgctacaaccatggtgtctaaagatataggaatgaactgtctgtgaaatgttttcaagcctatggagtgaaattattttttgcatcatttaaacatgcagaagatgtttaaaaataaaaaaaaaactgctttatcctcctgtcagcaccccctcccacccctgcaacaaagacttgctttaaatagatttcagctatgcagaaaaatttagcttatgcttccatatttttaaattttgttttttaagttttgcacttttgtttagtctcgctaaagttatatttgtctgttatgaccacagagttatatgtgtgtgtatcaaaagtggtctcaaaatatttttttaagaaaaaaagcaaaaacaatgtattgctgataatcagtttggaccagtttcttaaggtcattaaaacagaagcaaattaagacaggtttgactgcagtggtgtctggtatccatgttttatttctgggcacaagctagtttttatgttgatacgttcctgaacatattatcttgttggacatcttttctcttgtgttttgtttgaatgtgcaatagtttataggccacaaataagctttcttgtaagctctcttcctaacagggcacatattcttccataatataaacacttttctgccccatctcccatacttttgaaggtcagttctatgacagtgaattttgcacaggagaagcagctacctgatttcttactttctctctccttatcatggagaatacagaaacattgtctgaaagggctctaaagaaggaactaccaaaacctgacttgaaatgccatttcttttaaccttccaaatcctaaatgtttccttcaaggcatcttaataaacttatttgcttctggttttgggagttcataagagagaatagaacaaaatacaggacatcaaatattagccatttcccattttattttatttttctatgtaggttcatgttccatgttcatttatttaagaaatacatttttattggtaagcttatagagctacacttatggaatttttaagtaggtaaataaatggttaagacaaaatagtgttatagccttcattctctgaataggccatctttgactcataaaattacccttactgtttattataacttcagaagtaatttatagttctgaacctatagtatcttttaccctgttcccaagcaaagactggtgactttatctgaaaatgattcctcttcccatgacctaaaacactgtgaggaaaaatcattcaagtggcatgccaagtccctatgaaggaagggctgctatcaaacctaccttttttgagcaaactgagactaaacttctctcttttcaaaattgtgttatcttccttaatcctattttcataatttttccttttgccagtttttcacattatctttgatatgtgagcaacatttattatttacattagagtataccttttagtaataaaatgacttgaaatcatattatttttaaaagccctttgcttctttcattacttataatctcctctaaaacaacctctgcatgttttttttaaataaagcactttctgtcaaataatggacttttttctaaacagaaattattttctattaatttgcaaactgatgatttcacttttttttacttttttttcgattatcagagtacttagtaaatgttatatagtttagttctaagatagttccagggattaaaaggttaagaggaaaacacaaatcaccaaatttctgatttatgtttttatctcctgaacaatattttctcactcatattcctctatcttatcacttagctaaagacagcctaaatttcccaattttctgtccaaaatatttgtgatttacttgtatataagccttctcatttgccatgtgctgtgatcttacaagttagatgttactatacctaccatttattcagctggattgctgaacacagttctggattcatagaattaagaatatcttgttagtgcccaggatttccacgtttgtgttttattggcccttttctttattcagccccttaatctattttcagtcttctggcacgtaatttttttcacagttattattcttctattaacaaattatttttatcttgcctagtacattttcacttagttctcttgcccttaaatatctttcacatgcattttaggatattcttttcaaatatttgtaggacaactttgaatcaaaataaattatgttccttctccaatttgaagcattgaggataaatgaccatttgaggtctaactgatcttttcctgccagaagagttatcttacgttctgctatatttgtatttgggccagttgattgtaggttgtccaacattttttaatattgggaaaattatgataaaatgctttaaaaattaatatgccagattaaaataactgaatagtttactatttcattcaagcatgtttaaaacaaataatttcctttcaccagtttttcttagtaaactcctgaaaaagtaggaaaggtggaaagtatatatcatttttataaattttaaattgtacatcagacttttaaaatctgtaatatacaagcaagcaaaattattttaaatgacttaattgtatgctaatactcatctgataataaatgcttcttaaagttgacatttaactgctatcacaaagttttatatgtagaaaagtggggtccttttgaataaaagatcattcaactaaaaatattaaaatttatttcactggatggtaatgtaaccttaaaagcatcataataggtaaagtctaatattagttcccttaacaaaatcctaactgtataccagaattaggtcactgaaagaacttgatttgaattacgtttagacaaaaatgatttaattgtaaattcttaaaactttctaaatgcataattggcaaaaaaaaaaacccactgttaccagtgtaggaagttacaagaaggcacatactgaatgctgaagtatacatatgctatttctcttaaacctcagagcaaccatatgagcattgtaattaatattcccattttacagatgaggaaactgaagctaagagaagctaagtaatatgcccaaggtccacatctagtaacagacaaagctgggatttcagtctatgtctgcctctctccacatctctttcatccataccacactgcctacatgccatatgacaggatgtgtaatgggctaacgtttatttaaaaagttcaggccaggtgcagtggcttatgcctataatccccgcactttgggaggccgagccgggtggatcatgaggtcagacgttcaacaccagcctggccaagatggtgaaaccccgtctctattaaaaatattttttaaaaattaactgagcgtggtggtgggcgcctgtagtcccagctactcaggaggctaaggcaggagaatctcttgaacccgagaggtggaggttgcagtgagctgagatcgcgccactgcactgcagcctaggcgacagagcaagactgcctcaaaaaaaaaacatacacataccttaatgatttgggaagttaggcaaatatgagatatgtagacatatctatgctgattgttgcttgagaaataattactaattctagacaaaactcaatcctgtatcttccatcatgaatcttaaaatcatttcacttcactcctaacatttcttacattgcagaactaatggtaaagtaaattttacggaaaaagttaagatagctttgggaacagagacctttccctaaattgattccatagcagatttgggggaattaacaaagaatttcagtctcatcaatcctttgaatccatcttcaaaacttctgcttttaataactttagaaaatttactaatctatagaactaattgagtaggatataggaaggatacaaggatataatgtcctttttataaaagtttagtatagcttctttacatgtatccacttgttccagaaaatgtgcattggttctgaatgtgaaaatatttaaagagagaaaggaacactcaagtaagtgtgggcttcagtgggaattatcacaaaacattggcaagtatttttatttaaattattttcaaatttgacttctacagccaagtggaattggtaggctgtagctgttacactgaaatttctagtctttgtaagtgcctcctgaaagtcatttaaaatggaaaaatatttcaatgagcttttccttttttcatatttatggacatgaatattttattggagatcattaactcctagaatttgagattatatttccatacaacattttataaagttatgttgaacttactacctgttatgtgcaggttattatgtaactattcacagattgcttcatatattgctttatcttcccatctaacttcttaaagttaaaatccggacacacatgttgattatctagaccagtcattctggaaattgtaacactcccacataaaccccaggagactttttcagaatgcaatgtttctaaatgtactgttactggcagtttactctccagcatataaggttgcattttaacttttagattatgaactgtgcaaactttacccaaaactatcttgcatgattccctcctaaatatattccttgattaagtaaatctggcaaatcactgtttgagctagttacataaaatttgttatcaagagaaggcttttctacaagtttccagattaacataaagaaaagagggaatcacagggcatttaagtgcaccttcccattactttccttaaatcacctcatagttaggctgggcgcggtggctcacgcctgtaatcccagcactttgggaggccgagacggtggatcacgaggtcaggggactgagatcatcctggctaacacgatgaaacctcatctctactaaaaatacaaataattagccaggcatggtggcacgcgcctgtagtcccagctactcgggaggcagagacaggagaatcgtttgcacccgggaggcggaggttgttgcagtgagccgagatcgcgccaatgcactccagcctgggctacagagtgagactccatctcaaaaaaaaacaaaaaaaatcacctcatagtttatgtctgacttactccaaacctcagttatctgatttgtagtctgtgtcaggaaagttttcttcatatctattctgtctccctcctctttgattttaaatttttttcttttacccagtaggacaaaaaagagcagttggtcatcatccccaatattcttagtcttcagtatgcttcaggcctctcaatgaacacttaagtctcaattcttcagacaaaattgcttaagctcttctcctcagtcctattttaatgactttatatttaagaatatagaattatattttcttttatattcaaattcattactccagttaagtaatagtttgatagtttgatagaatcgagagttaagatgtttctatttgaaagtggattcaaccatcagaccaccagcaaatcggcacttaatttttgtgttatctaacattttctattgtggaattttatgattttatattctcattagttataactaaaaagccatgcacacagaattgtatatcattttgccattaaaattttttaacatattgcagcaagcttagttttatgattgagccacaaccttttacatattttttgtatgaaatattaaacactaaatgcaagattaactttcaaaagcaaaccctacattaatcaggtattatcgatggacatttttgtagaccacttttgaaatacttattattttgcaacatagactggactatacaactttcatttaacttttaggtgactgatttaagttgagtgtgcatatagagaaaaacctagaaatttatctcatggcagatacatttgaaagtacttcagaagaatttatgctgtatattaaaactaggctcaaaataaatctatcgtatctttaaaagtccaattctgttattactgtgatgtttgtagtgttactattaaacattgtgaacatacacatttttaaaacaacttgaaacccattttaaaatctgggtaagagagaaggaatcttcagaacaaaatcacatcattagggtgtccagtttatgattgaatttttaagcaaattactgtatttgaaactacaacttgatttggttttcagttttaaaaggcaacatgtgggttttatccattttatttatacctttagatttcagaaacatcttcatgttttagatgcattctacagacatcatgttacttaaaaactcagggcccctttcatccctttgtacactgaaaaagttcaattgttagcaagtaagcaattagatccagttgaatatttaaagtgtttgttgcacagttcatttaatgtttcatcttatttgactttttcacatagatataatatcagatttcattaattataaaaagttgcccagttctgtaattactgaacagagggaatgactcaactaattggctacatgttgcaacaaatttaggcctttagagttgaagcactgacttaaaacgacttacatttctgttctttggtcaaatgaccatacatgatatgggacaaattgtttcattttgtttgttttttaataagggaacttggtaaagtagttcctgtcagataggattttctcaagagacaatttaacgttataaagccttctaaaagtgaactaaatattttataactttagtaatagcttggatggttttgagaaaataacctgtatttatcacattgtcaaacagaatttttctttgaatcagacaagttcaagctctaaattgatgtgctatatacttaaaatcctaggaagttatctgtaaccagtctcttgtctcaggctcttcaccttgttaccaatcctcgtaagtatgtaaaggaaacatatttttaaagaagcttaacagtaagaaaaaattactaaaagatgcaattcaaagataggtcccagtttaacactgaattgcttgacttctgtggcttttctttttctggccacatttatttatttaagcaatttttgtatgccttgttatttcatttccatagagattatattgtatcagtgtttatgtaagctggaatcatcctcagttttttgctgataatttttcaaataaagatacatggataattgtaaaatacactaactcttagggtgttgtagtagctgaaacatggagatgcgtagctgtcatgctttttctgaatggacaggagaaacataagctacggagtattcacttctgaggatgcttttccggaaaaagaaaggctagaaaatactcgcacttcctcagaaccctctttcttgttaacgggtatcttttgttggtgtgttttgctcttacattacagatagactatcatatatgactttatgaataatttcagttattttgcttttgtataagctgtctgaagccttgctatgctgtataagttgtgtttgatggatcagtgtgagtataaaataaagcaaatcacttttcttttgtattatctatggatgccactatgaaagctgacattaagccactaaagagttttctatgaataagtgtaagtaaatgctttgatatatataaacctaaataaaaagattgtattgatacagagacattggagaaggagattttaaggcagttctttaggtttaaaaaggcttgctgtaaaatggtgcgttattccgtttattaaagatcatattaatgac

SEQ ID NO: 384928 - DNA, 11644 bp, Homo sapiens
caggcaccttttttgatccagtcaaggaagaggatttgttgttttcgaaatcagagtgaaggaagcaccgaagcgaaacttaaggaatcctgccttcccggagccgcgggcgatgcgactagggctgccgggcgccgccgccgcccgtccggcttcgtccttcccggcagtcgggaactagttctgaccctcgccccccgaccccggatcgaatccccgccctccgcaccctggatatgttttctcccagacctggatatttttttgatatcgtgaaactacgagggaaataatttgggggatttcttcttggctccctgctttccccacagacatgccttccgtttggagggccgcggcaccccgtccgaggcgaaggaacccccccagccgcgagggagagaaatgaagggaatttctgcagcggcatgaaagctctgcagctaggtcctctcatcagccatttgtcctttcaaactgtattgtgatacgggcaggatcagtccacgggagagaagacgagcctcccggctgtttctccgccggtctacttcccatatttcttttctttgccctcctgattcttggctggcccagggatgacttcctcgctgcagcggccctggcgggtgccctggctaccatggaccatcctgctggtcagcactgcggctgcttcgcagaatcaagaacggctatgtgcgtttaaagatccgtatcagcaagaccttgggataggtgagagtagaatctctcatgaaaatgggacaatattatgctcgaaaggtagcacctgctatggcctttgggagaaatcaaaaggggacataaatcttgtaaaacaaggatgttggtctcacattggagatccccaagagtgtcactatgaagaatgtgtagtaactaccactcctccctcaattcagaatggaacataccgtttctgctgttgtagcacagatttatgtaatgtcaactttactgagaattttccacctcctgacacaacaccactcagtccacctcattcatttaaccgagatgagacaataatcattgctttggcatcagtctctgtattagctgttttgatagttgccttatgctttggatacagaatgttgacaggagaccgtaaacaaggtcttcacagtatgaacatgatggaggcagcagcatccgaaccctctcttgatctagataatctgaaactgttggagctgattggccgaggtcgatatggagcagtatataaaggctccttggatgagcgtccagttgctgtaaaagtgttttcctttgcaaaccgtcagaattttatcaacgaaaagaacatttacagagtgcctttgatggaacatgacaacattgcccgctttatagttggagatgagagagtcactgcagatggacgcatggaatatttgcttgtgatggagtactatcccaatggatctttatgcaagtatttaagtctccacacaagtgactgggtaagctcttgccgtcttgctcattctgttactagaggactggcttatcttcacacagaattaccacgaggagatcattataaacctgcaatttcccatcgagatttaaacagcagaaatgtcctagtgaaaaatgatggaacctgtgttattagtgactttggactgtccatgaggctgactggaaatagactggtgcgcccaggggaggaagataatgcagccataagcgaggttggcactatcagatatatggcaccagaagtgctagaaggagctgtgaacttgagggactgtgaatcagctttgaaacaagtagacatgtatgctcttggactaatctattgggagatatttatgagatgtacagacctcttcccaggggaatccgtaccagagtaccagatggcttttcagacagaggttggaaaccatcccacttttgaggatatgcaggttctcgtgtctagggaaaaacagagacccaagttcccagaagcctggaaagaaaatagcctggcagtgaggtcactcaaggagacaatcgaagactgttgggaccaggatgcagaggctcggcttactgcacagtgtgctgaggaaaggatggctgaacttatgatgatttgggaaagaaacaaatctgtgagcccaacagtcaatccaatgtctactgctatgcagaatgaacgcaacctgtcacataataggcgtgtgccaaaaattggtccttatccagattattcttcctcctcatacattgaagactctatccatcatactgacagcatcgtgaagaatatttcctctgagcattctatgtccagcacacctttgactataggggaaaaaaaccgaaattcaattaactatgaacgacagcaagcacaagctcgaatccccagccctgaaacaagtgtcaccagcctctccaccaacacaacaaccacaaacaccacaggactcacgccaagtactggcatgactactatatctgagatgccatacccagatgaaacaaatctgcataccacaaatgttgcacagtcaattgggccaacccctgtctgcttacagctgacagaagaagacttggaaaccaacaagctagacccaaaagaagttgataagaacctcaaggaaagctctgatgagaatctcatggagcactctcttaaacagttcagtggcccagacccactgagcagtactagttctagcttgctttacccactcataaaacttgcagtagaagcaactggacagcaggacttcacacagactgcaaatggccaagcatgtttgattcctgatgttctgcctactcagatctatcctctccccaagcagcagaaccttcccaagagacctactagtttgcctttgaacaccaaaaattcaacaaaagagccccggctaaaatttggcagcaagcacaaatcaaacttgaaacaagtcgaaactggagttgccaagatgaatacaatcaatgcagcagaacctcatgtggtgacagtcaccatgaatggtgtggcaggtagaaaccacagtgttaactcccatgctgccacaacccaatatgccaatgggacagtactatctggccaaacaaccaacatagtgacacatagggcccaagaaatgttgcagaatcagtttattggtgaggacacccggctgaatattaattccagtcctgatgagcatgagcctttactgagacgagagcaacaagctggccatgatgaaggtgttctggatcgtcttgtggacaggagggaacggccactagaaggtggccgaactaattccaataacaacaacagcaatccatgttcagaacaagatgttcttgcacagggtgttccaagcacagcagcagatcctgggccatcaaagcccagaagagcacagaggcctaattctctggatctttcagccacaaatgtcctggatggcagcagtatacagataggtgagtcaacacaagatggcaaatcaggatcaggtgaaaagatcaagaaacgtgtgaaaactccctattctcttaagcggtggcgcccctccacctgggtcatctccactgaatcgctggactgtgaagtcaacaataatggcagtaacagggcagttcattccaaatccagcactgctgtttaccttgcagaaggaggcactgctacaaccatggtgtctaaagatataggaatgaactgtctgtgaaatgttttcaagcctatggagtgaaattattttttgcatcatttaaacatgcagaagatgtttaaaaataaaaaaaaaactgctttatcctcctgtcagcaccccctcccacccctgcaacaaagacttgctttaaatagatttcagctatgcagaaaaatttagcttatgcttccatatttttaaattttgttttttaagttttgcacttttgtttagtctcgctaaagttatatttgtctgttatgaccacagagttatatgtgtgtgtatcaaaagtggtctcaaaatatttttttaagaaaaaaagcaaaaacaatgtattgctgataatcagtttggaccagtttcttaaggtcattaaaacagaagcaaattaagacaggtttgactgcagtggtgtctggtatccatgttttatttctgggcacaagctagtttttatgttgatacgttcctgaacatattatcttgttggacatcttttctcttgtgttttgtttgaatgtgcaatagtttataggccacaaataagctttcttgtaagctctcttcctaacagggcacatattcttccataatataaacacttttctgccccatctcccatacttttgaaggtcagttctatgacagtgaattttgcacaggagaagcagctacctgatttcttactttctctctccttatcatggagaatacagaaacattgtctgaaagggctctaaagaaggaactaccaaaacctgacttgaaatgccatttcttttaaccttccaaatcctaaatgtttccttcaaggcatcttaataaacttatttgcttctggttttgggagttcataagagagaatagaacaaaatacaggacatcaaatattagccatttcccattttattttatttttctatgtaggttcatgttccatgttcatttatttaagaaatacatttttattggtaagcttatagagctacacttatggaatttttaagtaggtaaataaatggttaagacaaaatagtgttatagccttcattctctgaataggccatctttgactcataaaattacccttactgtttattataacttcagaagtaatttatagttctgaacctatagtatcttttaccctgttcccaagcaaagactggtgactttatctgaaaatgattcctcttcccatgacctaaaacactgtgaggaaaaatcattcaagtggcatgccaagtccctatgaaggaagggctgctatcaaacctaccttttttgagcaaactgagactaaacttctctcttttcaaaattgtgttatcttccttaatcctattttcataatttttccttttgccagtttttcacattatctttgatatgtgagcaacatttattatttacattagagtataccttttagtaataaaatgacttgaaatcatattatttttaaaagccctttgcttctttcattacttataatctcctctaaaacaacctctgcatgttttttttaaataaagcactttctgtcaaataatggacttttttctaaacagaaattattttctattaatttgcaaactgatgatttcacttttttttacttttttttcgattatcagagtacttagtaaatgttatatagtttagttctaagatagttccagggattaaaaggttaagaggaaaacacaaatcaccaaatttctgatttatgtttttatctcctgaacaatattttctcactcatattcctctatcttatcacttagctaaagacagcctaaatttcccaattttctgtccaaaatatttgtgatttacttgtatataagccttctcatttgccatgtgctgtgatcttacaagttagatgttactatacctaccatttattcagctggattgctgaacacagttctggattcatagaattaagaatatcttgttagtgcccaggatttccacgtttgtgttttattggcccttttctttattcagccccttaatctattttcagtcttctggcacgtaatttttttcacagttattattcttctattaacaaattatttttatcttgcctagtacattttcacttagttctcttgcccttaaatatctttcacatgcattttaggatattcttttcaaatatttgtaggacaactttgaatcaaaataaattatgttccttctccaatttgaagcattgaggataaatgaccatttgaggtctaactgatcttttcctgccagaagagttatcttacgttctgctatatttgtatttgggccagttgattgtaggttgtccaacattttttaatattgggaaaattatgataaaatgctttaaaaattaatatgccagattaaaataactgaatagtttactatttcattcaagcatgtttaaaacaaataatttcctttcaccagtttttcttagtaaactcctgaaaaagtaggaaaggtggaaagtatatatcatttttataaattttaaattgtacatcagacttttaaaatctgtaatatacaagcaagcaaaattattttaaatgacttaattgtatgctaatactcatctgataataaatgcttcttaaagttgacatttaactgctatcacaaagttttatatgtagaaaagtggggtccttttgaataaaagatcattcaactaaaaatattaaaatttatttcactggatggtaatgtaaccttaaaagcatcataataggtaaagtctaatattagttcccttaacaaaatcctaactgtataccagaattaggtcactgaaagaacttgatttgaattacgtttagacaaaaatgatttaattgtaaattcttaaaactttctaaatgcataattggcaaaaaaaaaaacccactgttaccagtgtaggaagttacaagaaggcacatactgaatgctgaagtatacatatgctatttctcttaaacctcagagcaaccatatgagcattgtaattaatattcccattttacagatgaggaaactgaagctaagagaagctaagtaatatgcccaaggtccacatctagtaacagacaaagctgggatttcagtctatgtctgcctctctccacatctctttcatccataccacactgcctacatgccatatgacaggatgtgtaatgggctaacgtttatttaaaaagttcaggccaggtgcagtggcttatgcctataatccccgcactttgggaggccgagccgggtggatcatgaggtcagacgttcaacaccagcctggccaagatggtgaaaccccgtctctattaaaaatattttttaaaaattaactgagcgtggtggtgggcgcctgtagtcccagctactcaggaggctaaggcaggagaatctcttgaacccgagaggtggaggttgcagtgagctgagatcgcgccactgcactgcagcctaggcgacagagcaagactgcctcaaaaaaaaaacataaaaattcagtcactatactctggcacaattttcatttgtatatgagccaaaccacataccttaatgatttgggaagttaggcaaatatgagatatgtagacatatctatgctgattgttgcttgagaaataattactaattctagacaaaactcaatcctgtatcttccatcatgaatcttaaaatcatttcacttcactcctaacatttcttacattgcagaactaatggtaaagtaaattttacggaaaaagttaagatagctttgggaacagagacctttccctaaattgattccatagcagatttgggggaattaacaaagaatttcagtctcatcaatcctttgaatccatcttcaaaacttctgcttttaataactttagaaaatttactaatctatagaactaattgagtaggatataggaaggatacaaggatataatgtcctttttataaaagtttagtatagcttctttacatgtatccacttgttccagaaaatgtgcattggttctgaatgtgaaaatatttaaagagagaaaggaacactcaagtaagtgtgggcttcagtgggaattatcacaaaacattggcaagtatttttatttaaattattttcaaatttgacttctacagccaagtggaattggtaggctgtagctgttacactgaaatttctagtctttgtaagtgcctcctgaaagtcatttaaaatggaaaaatatttcaatgagcttttccttttttcatatttatggacatgaatattttattggagatcattaactcctagaatttgagattatatttccatacaacattttataaagttatgttgaacttactacctgttatgtgcaggttattatgtaactattcacagattgcttcatatattgctttatcttcccatctaacttcttaaagttaaaatccggacacacatgttgattatctagaccagtcattctggaaattgtaacactcccacataaaccccaggagactttttcagaatgcaatgtttctaaatgtactgttactggcagtttactctccagcatataaggttgcattttaacttttagattatgaactgtgcaaactttacccaaaactatcttgcatgattccctcctaaatatattccttgattaagtaaatctggcaaatcactgtttgagctagttacataaaatttgttatcaagagaaggcttttctacaagtttccagattaacataaagaaaagagggaatcacagggcatttaagtgcaccttcccattactttccttaaatcacctcatagttaggctgggcgcggtggctcacgcctgtaatcccagcactttgggaggccgagacggtggatcacgaggtcaggggactgagatcatcctggctaacacgatgaaacctcatctctactaaaaatacaaataattagccaggcatggtggcacgcgcctgtagtcccagctactcgggaggcagagacaggagaatcgtttgcacccgggaggcggaggttgttgcagtgagccgagatcgcgccaatgcactccagcctgggctacagagtgagactccatctcaaaaaaaaacaaaaaaaatcacctcatagtttatgtctgacttactccaaacctcagttatctgatttgtagtctgtgtcaggaaagttttcttcatatctattctgtctccctcctctttgattttaaatttttttcttttacccagtaggacaaaaaagagcagttggtcatcatccccaatattcttagtcttcagtatgcttcaggcctctcaatgaacacttaagtctcaattcttcagacaaaattgcttaagctcttctcctcagtcctattttaatgactttatatttaagaatatagaattatattttcttttatattcaaattcattactccagttaagtaatagtttgatagtttgatagaatcgagagttaagatgtttctatttgaaagtggattcaaccatcagaccaccagcaaatcggcacttaatttttgtgttatctaacattttctattgtggaattttatgattttatattctcattagttataactaaaaagccatgcacacagaattgtatatcattttgccattaaaattttttaacatattgcagcaagcttagttttatgattgagccacaaccttttacatattttttgtatgaaatattaaacactaaatgcaagattaactttcaaaagcaaaccctacattaatcaggtattatcgatggacatttttgtagaccacttttgaaatacttattattttgcaacatagactggactatacaactttcatttaacttttaggtgactgatttaagttgagtgtgcatatagagaaaaacctagaaatttatctcatggcagatacatttgaaagtacttcagaagaatttatgctgtatattaaaactaggctcaaaataaatctatcgtatctttaaaagtccaattctgttattactgtgatgtttgtagtgttactattaaacattgtgaacatacacatttttaaaacaacttgaaacccattttaaaatctgggtaagagagaaggaatcttcagaacaaaatcacatcattagggtgtccagtttatgattgaatttttaagcaaattactgtatttgaaactacaacttgatttggttttcagttttaaaaggcaacatgtgggttttatccattttatttatacctttagatttcagaaacatcttcatgttttagatgcattctacagacatcatgttacttaaaaactcagggcccctttcatccctttgtacactgaaaaagttcaattgttagcaagtaagcaattagatccagttgaatatttaaagtgtttgttgcacagttcatttaatgtttcatcttatttgactttttcacatagatataatatcagatttcattaattataaaaagttgcccagttctgtaattactgaacagagggaatgactcaactaattggctacatgttgcaacaaatttaggcctttagagttgaagcactgacttaaaacgacttacatttctgttctttggtcaaatgaccatacatgatatgggacaaattgtttcattttgtttgttttttaataagggaacttggtaaagtagttcctgtcagataggattttctcaagagacaatttaacgttataaagccttctaaaagtgaactaaatattttataactttagtaatagcttggatggttttgagaaaataacctgtatttatcacattgtcaaacagaatttttctttgaatcagacaagttcaagctctaaattgatgtgctatatacttaaaatcctaggaagttatctgtaaccagtctcttgtctcaggctcttcaccttgttaccaatcctcgtaagtatgtaaaggaaacatatttttaaagaagcttaacagtaagaaaaaattactaaaagatgcaattcaaagataggtcccagtttaacactgaattgcttgacttctgtggcttttctttttctggccacatttatttatttaagcaatttttgtatgccttgttatttcatttccatagagattatattgtatcagtgtttatgtaagctggaatcatcctcagttttttgctgataatttttcaaataaagatacatggataattgtaaaatacactaactcttagggtgttgtagtagctgaaacatggagatgcgtagctgtcatgctttttctgaatggacaggagaaacataagctacggagtattcacttctgaggatgcttttccggaaaaagaaaggctagaaaatactcgcacttcctcagaaccctctttcttgttaacgggtatcttttgttggtgtgttttgctcttacattacagatagactatcatatatgactttatgaataatttcagttattttgcttttgtataagctgtctgaagccttgctatgctgtataagttgtgtttgatggatcagtgtgagtataaaataaagcaaatcacttttcttttgtattatctatggatgccactatgaaagctgacattaagccactaaagagttttctatgaataagtgtaagtaaatgctttgatatatataaacctaaataaaaagattgtattgatacagagacattggagaaggagattttaaggcagttctttaggtttaaaaaggcttgctgtaaaatggtgcgttattccgtttattaaagatcatattaatgacgactgaaaacatttactccctaaaatcacaccaaaacccccaggtgcgcatataaagagaattttaaacggagggcctgttgtctggctcaaatggaggcttgaggggggggccggcccccaatgccc

SEQ ID NO: 384929 - DNA, 11291 bp, Homo sapiens
caggcaccttttttgatccagtcaaggaagaggatttgttgttttcgaaatcagagtgaaggaagcaccgaagcgaaacttaaggaatcctgccttcccggagccgcgggcgatgcgactagggctgccgggcgccgccgccgcccgtccggcttcgtccttcccggcagtcgggaactagttctgaccctcgccccccgaccccggatcgaatccccgccctccgcaccctggatatgttttctcccagacctggatatttttttgatatcgtgaaactacgagggaaataatttgggggatttcttcttggctccctgctttccccacagacatgccttccgtttggagggccgcggcaccccgtccgaggcgaaggaacccccccagccgcgagggagagaaatgaagggaatttctgcagcggcatgaaagctctgcagctaggtcctctcatcagccatttgtcctttcaaactgtattgtgatacgggcaggatcagtccacgggagagaagacgagcctcccggctgtttctccgccggtctacttcccatatttcttttctttgccctcctgattcttggctggcccagggatgacttcctcgctgcagcggccctggcgggtgccctggctaccatggaccatcctgctggtcagcactgcggctgcttcgcagaatcaagaacggctatgtgcgtttaaagatccgtatcagcaagaccttgggataggtgagagtagaatctctcatgaaaatgggacaatattatgctcgaaaggtagcacctgctatggcctttgggagaaatcaaaaggggacataaatcttgtaaaacaaggatgttggtctcacattggagatccccaagagtgtcactatgaagaatgtgtagtaactaccactcctccctcaattcagaatggaacataccgtttctgctgttgtagcacagatttatgtaatgtcaactttactgagaattttccacctcctgacacaacaccactcagtccacctcattcatttaaccgagatgagacaataatcattgctttggcatcagtctctgtattagctgttttgatagttgccttatgctttggatacagaatgttgacaggagaccgtaaacaaggtcttcacagtatgaacatgatggaggcagcagcatccgaaccctctcttgatctagataatctgaaactgttggagctgattggccgaggtcgatatggagcagtatataaaggctccttggatgagcgtccagttgctgtaaaagtgttttcctttgcaaaccgtcagaattttatcaacgaaaagaacatttacagagtgcctttgatggaacatgacaacattgcccgctttatagttggagatgagagagtcactgcagatggacgcatggaatatttgcttgtgatggagtactatcccaatggatctttatgcaagtatttaagtctccacacaagtgactgggtaagctcttgccgtcttgctcattctgttactagaggactggcttatcttcacacagaattaccacgaggagatcattataaacctgcaatttcccatcgagatttaaacagcagaaatgtcctagtgaaaaatgatggaacctgtgttattagtgactttggactgtccatgaggctgactggaaatagactggtgcgcccaggggaggaagataatgcagccataagcgaggttggcactatcagatatatggcaccagaagtgctagaaggagctgtgaacttgagggactgtgaatcagctttgaaacaagtagacatgtatgctcttggactaatctattgggagatatttatgagatgtacagacctcttcccaggggaatccgtaccagagtaccagatggcttttcagacagaggttggaaaccatcccacttttgaggatatgcaggttctcgtgtctagggaaaaacagagacccaagttcccagaagcctggaaagaaaatagcctggcagtgaggtcactcaaggagacaatcgaagactgttgggaccaggatgcagaggctcggcttactgcacagtgtgctgaggaaaggatggctgaacttatgatgatttgggaaagaaacaaatctgtgagcccaacagtcaatccaatgtctactgctatgcagaatgaacgcaacctgtcacataataggcgtgtgccaaaaattggtccttatccagattattcttcctcctcatacattgaagactctatccatcatactgacagcatcgtgaagaatatttcctctgagcattctatgtccagcacacctttgactataggggaaaaaaaccgaaattcaattaactatgaacgacagcaagcacaagctcgaatccccagccctgaaacaagtgtcaccagcctctccaccaacacaacaaccacaaacaccacaggactcacgccaagtactggcatgactactatatctgagatgccatacccagatgaaacaaatctgcataccacaaatgttgcacagtcaattgggccaacccctgtctgcttacagctgacagaagaagacttggaaaccaacaagctagacccaaaagaagttgataagaacctcaaggaaagctctgatgagaatctcatggagcactctcttaaacagttcagtggcccagacccactgagcagtactagttctagcttgctttacccactcataaaacttgcagtagaagcaactggacagcaggacttcacacagactgcaaatggccaagcatgtttgattcctgatgttctgcctactcagatctatcctctccccaagcagcagaaccttcccaagagacctactagtttgcctttgaacaccaaaaattcaacaaaagagccccggctaaaatttggcagcaagcacaaatcaaacttgaaacaagtcgaaactggagttgccaagatgaatacaatcaatgcagcagaacctcatgtggtgacagtcaccatgaatggtgtggcaggtagaaaccacagtgttaactcccatgctgccacaacccaatatgccaatgggacagtactatctggccaaacaaccaacatagtgacacatagggcccaagaaatgttgcagaatcagtttattggtgaggacacccggctgaatattaattccagtcctgatgagcatgagcctttactgagacgagagcaacaagctggccatgatgaaggtgttctggatcgtcttgtggacaggagggaacggccactagaaggtggccgaactaattccaataacaacaacagcaatccatgttcagaacaagatgttcttgcacagggtgttccaagcacagcagcagatcctgggccatcaaagcccagaagagcacagaggcctaattctctggatctttcagccacaaatgtcctggatggcagcagtatacagataggtgagtcaacacaagatggcaaatcaggatcaggtgaaaagatcaagaaacgtgtgaaaactccctattctcttaagcggtggcgcccctccacctgggtcatctccactgaatcgctggactgtgaagtcaacaataatggcagtaacagggcagttcattccaaatccagcactgctgtttaccttgcagaaggaggcactgctacaaccatggtgtctaaagatataggaatgaactgtctgtgaaatgttttcaagcctatggagtgaaattattttttgcatcatttaaacatgcagaagatgtttaaaaataaaaaaaaaactgctttatcctcctgtcagcaccccctcccacccctgcaacaaagacttgctttaaatagatttcagctatgcagaaaaatttagcttatgcttccatatttttaaattttgttttttaagttttgcacttttgtttagtctcgctaaagttatatttgtctgttatgaccacagagttatatgtgtgtgtatcaaaagtggtctcaaaatatttttttaagaaaaaaagcaaaaacaatgtattgctgataatcagtttggaccagtttcttaaggtcattaaaacagaagcaaattaagacaggtttgactgcagtggtgtctggtatccatgttttatttctgggcacaagctagtttttatgttgatacgttcctgaacatattatcttgttggacatcttttctcttgtgttttgtttgaatgtgcaatagtttataggccacaaataagctttcttgtaagctctcttcctaacagggcacatattcttccataatataaacacttttctgccccatctcccatacttttgaaggtcagttctatgacagtgaattttgcacaggagaagcagctacctgatttcttactttctctctccttatcatggagaatacagaaacattgtctgaaagggctctaaagaaggaactaccaaaacctgacttgaaatgccatttcttttaaccttccaaatcctaaatgtttccttcaaggcatcttaataaacttatttgcttctggttttgggagttcataagagagaatagaacaaaatacaggacatcaaatattagccatttcccattttattttatttttctatgtaggttcatgttccatgttcatttatttaagaaatacatttttattggtaagcttatagagctacacttatggaatttttaagtaggtaaataaatggttaagacaaaatagtgttatagccttcattctctgaataggccatctttgactcataaaattacccttactgtttattataacttcagaagtaatttatagttctgaacctatagtatcttttaccctgttcccaagcaaagactggtgactttatctgaaaatgattcctcttcccatgacctaaaacactgtgaggaaaaatcattcaagtggcatgccaagtccctatgaaggaagggctgctatcaaacctaccttttttgagcaaactgagactaaacttctctcttttcaaaattgtgttatcttccttaatcctattttcataatttttccttttgccagtttttcacattatctttgatatgtgagcaacatttattatttacattagagtataccttttagtaataaaatgacttgaaatcatattatttttaaaagccctttgcttctttcattacttataatctcctctaaaacaacctctgcatgttttttttaaataaagcactttctgtcaaataatggacttttttctaaacagaaattattttctattaatttgcaaactgatgatttcacttttttttacttttttttcgattatcagagtacttagtaaatgttatatagtttagttctaagatagttccagggattaaaaggttaagaggaaaacacaaatcaccaaatttctgatttatgtttttatctcctgaacaatattttctcactcatattcctctatcttatcacttagctaaagacagcctaaatttcccaattttctgtccaaaatatttgtgatttacttgtatataagccttctcatttgccatgtgctgtgatcttacaagttagatgttactatacctaccatttattcagctggattgctgaacacagttctggattcatagaattaagaatatcttgttagtgcccaggatttccacgtttgtgttttattggcccttttctttattcagccccttaatctattttcagtcttctggcacgtaatttttttcacagttattattcttctattaacaaattatttttatcttgcctagtacattttcacttagttctcttgcccttaaatatctttcacatgcattttaggatattcttttcaaatatttgtaggacaactttgaatcaaaataaattatgttccttctccaatttgaagcattgaggataaatgaccatttgaggtctaactgatcttttcctgccagaagagttatcttacgttctgctatatttgtatttgggccagttgattgtaggttgtccaacattttttaatattgggaaaattatgataaaatgctttaaaaattaatatgccagattaaaataactgaatagtttactatttcattcaagcatgtttaaaacaaataatttcctttcaccagtttttcttagtaaactcctgaaaaagtaggaaaggtggaaagtatatatcatttttataaattttaaattgtacatcagacttttaaaatctgtaatatacaagcaagcaaaattattttaaatgacttaattgtatgctaatactcatctgataataaatgcttcttaaagttgacatttaactgctatcacaaagttttatatgtagaaaagtggggtccttttgaataaaagatcattcaactaaaaatattaaaatttatttcactggatggtaatgtaaccttaaaagcatcataataggtaaagtctaatattagttcccttaacaaaatcctaactgtataccagaattaggtcactgaaagaacttgatttgaattacgtttagacaaaaatgatttaattgtaaattcttaaaactttctaaatgcataattggcaaaaaaaaaaacccactgttaccagtgtaggaagttacaagaaggcacatactgaatgctgaagtatacatatgctatttctcttaaacctcagagcaaccatatgagcattgtaattaatattcccattttacagatgaggaaactgaagctaagagaagctaagtaatatgcccaaggtccacatctagtaacagacaaagctgggatttcagtctatgtctgcctctctccacatctctttcatccataccacactgcctacatgccatatgacaggatgtgtaatgggctaacgtttatttaaaaagttcaggccaggtgcagtggcttatgcctataatccccgcactttgggaggccgagccgggtggatcatgaggtcagacgttcaacaccagcctggccaagatggtgaaaccccgtctctattaaaaatattttttaaaaattaactgagcgtggtggtgggcgcctgtagtcccagctactcaggaggctaaggcaggagaatctcttgaacccgagaggtggaggttgcagtgagctgagatcgcgccactgcactgcagcctaggcgacagagcaagactgcctcaaaaaaaaaacataaaaattcagtcactatactctggcacaattttcatttgtatatgagccaaaccacataccttaatgatttgggaagttaggcaaatatgagatatgtagacatatctatgctgattgttgcttgagaaataattactaattctagacaaaactcaatcctgtatcttccatcatgaatcttaaaatcatttcacttcactcctaacatttcttacattgcagaactaatggtaaagtaaattttacggaaaaagttaagatagctttgggaacagagacctttccctaaattgattccatagcagatttgggggaattaacaaagaatttcagtctcatcaatcctttgaatccatcttcaaaacttctgcttttaataactttagaaaatttactaatctatagaactaattgagtaggatataggaaggatacaaggatataatgtcctttttataaaagtttagtatagcttctttacatgtatccacttgttccagaaaatgtgcattggttctgaatgtgaaaatatttaaagagagaaaggaacactcaagtaagtgtgggcttcagtgggaattatcacaaaacattggcaagtatttttatttaaattattttcaaatttgacttctacagccaagtggaattggtaggctgtagctgttacactgaaatttctagtctttgtaagtgcctcctgaaagtcatttaaaatggaaaaatatttcaatgagcttttccttttttcatatttatggacatgaatattttattggagatcattaactcctagaatttgagattatatttccatacaacattttataaagttatgttgaacttactacctgttatgtgcaggttattatgtaactattcacagattgcttcatatattgctttatcttcccatctaacttcttaaagttaaaatccggacacacatgttgattatctagaccagtcattctggaaattgtaacactcccacataaaccccaggagactttttcagaatgcaatgtttctaaatgtactgttactggcagtttactctccagcatataaggttgcattttaacttttagattatgaactgtgcaaactttacccaaaactatcttgcatgattccctcctaaatatattccttgattaagtaaatctggcaaatcactgtttgagctagttacataaaatttgttatcaagagaaggcttttctacaagtttccagattaacataaagaaaagagggaatcacagggcatttaagtgcaccttcccattactttccttaaatcacctcatagttaggctgggcgcggtggctcacgcctgtaatcccagcactttgggaggccgagacggtggatcacgaggtcaggggactgagatcatcctggctaacacgatgaaacctcatctctactaaaaatacaaataattagccaggcatggtggcacgcgcctgtagtcccagctactcgggaggcagagacaggagaatcgtttgcacccgggaggcggaggttgttgcagtgagccgagatcgcgccaatgcactccagcctgggctacagagtgagactccatctcaaaaaaaaacaaaaaaaatcacctcatagtttatgtctgacttactccaaacctcagttatctgatttgtagtctgtgtcaggaaagttttcttcatatctattctgtctccctcctctttgattttaaatttttttcttttacccagtaggacaaaaaagagcagttggtcatcatccccaatattcttagtcttcagtatgcttcaggcctctcaatgaacacttaagtctcaattcttcagacaaaattgcttaagctcttctcctcagtcctattttaatgactttatatttaagaatatagaattatattttcttttatattcaaattcattactccagttaagtaatagtttgatagtttgatagaatcgagagttaagatgtttctatttgaaagtggattcaaccatcagaccaccagcaaatcggcacttaatttttgtgttatctaacattttctattgtggaattttatgattttatattctcattagttataactaaaaagccatgcacacagaattgtatatcattttgccattaaaattttttaacatattgcagcaagcttagttttatgattgagccacaaccttttacatattttttgtatgaaatattaaacactaaatgcaagattaactttcaaaagcaaaccctacattaatcaggtattatcgatggacatttttgtagaccacttttgaaatacttattattttgcaacatagactggactatacaactttcatttaacttttaggtgactgatttaagttgagtgtgcatatagagaaaaacctagaaatttatctcatggcagatacatttgaaagtacttcagaagaatttatgctgtatattaaaactaggctcaaaataaatctatcgtatctttaaaagtccaattctgttattactgtgatgtttgtagtgttactattaaacattgtgaacatacacatttttaaaacaacttgaaacccattttaaaatctgggtaagagagaaggaatcttcagaacaaaatcacatcattagggtgtccagtttatgattgaatttttaagcaaattactgtatttgaaactacaacttgatttggttttcagttttaaaaggcaacatgtgggttttatccattttatttatacctttagatttcagaaacatcttcatgttttagatgcattctacagacatcatgttacttaaaaactcagggcccctttcatccctttgtacactgaaaaagttcaattgttagcaagtaagcaattagatccagttgaatatttaaagtgtttgttgcacagttcatttaatgtttcatcttatttgactttttcacatagatataatatcagatttcattaattataaaaagttgcccagttctgtaattactgaacagagggaatgactcaactaattggctacatgttgcaacaaatttaggcctttagagttgaagcactgacttaaaacgacttacatttctgttctttggtcaaatgaccatacatgatatgggacaaattgtttcattttgtttgttttttaataagggaacttggtaaagtagttcctgtcagataggattttctcaagagacaatttaacgttataaagccttctaaaagtgaactaaatattttataactttagtaatagcttggatggttttgagaaaataacctgtatttatcacattgtcaaacagaatttttctttgaatcagacaagttcaagctctaaattgatgtgctatatacttaaaatcctaggaagttatctgtaaccagtctcttgtctcaggctcttcaccttgttaccaatcctcgtaagtatgtaaaggaaacatatttttaaagaagcttaacagtaagaaaaaattactaaaagatgcaattcaaagataggtcccagtttaacactgaattgcttgacttctgtggcttttctttttctggccacatttatttatttaagcaatttttgtatgccttgttatttcatttccatagagattatattgtatcagtgtttatgtaagctggaatcatcctcagttttttgctgataatttttcaaataaagatacatggataattgtaaaatacactaactcttagggtgttgtagtagctgaaacatggagatgcgtagctgtcatgctttttctgaatggacaggagaaacataagctacggagtattcacttctgaggatgcttttccggaaaaagaaaggctagaaaatactcgcacttcctcagaaccctctttcttgttaacgggtatcttttgttggtgtgttttgctcttacattacagatagactatcatatatgactttatgaataatttcagttattttgcttttgtataagctgtctgaagccttgctatgctgtataagttgtgtttgatggatcagtgtgagtataaaataaagcaaatcactttt

SEQ ID NO: 384930 - DNA, 9799 bp, Homo sapiens
gaattccggtgatgatgatggtgatggtgatgatggtgatgaggatgatggtgatgatgatgatggtgttggtgatggtttttgcatcttccattcatgaactaagtactcttattagtgaatttcttttctttgccctcctgattcttggctggcccagggatgacttcctcgctgcagcggccctggcgggtgccctggctaccatggaccatcctgctggtcagcactgcggctgcttcgcagaatcaagaacggctatgtgcgtttaaagatccgtatcagcaagaccttgggataggtgagagtagaatctctcatgaaaatgggacaatattatgctcgaaaggtagcacctgctatggcctttgggagaaatcaaaaggggacataaatcttgtaaaacaaggatgttggtctcacattggagatccccaagagtgtcactatgaagaatgtgtagtaactaccactcctccctcaattcagaatggaacataccgtttctgctgttgtagcacagatttatgtaatgtcaactttactgagaattttccacctcctgacacaacaccactcagtccacctcattcatttaaccgagatgagacaataatcattgctttggcatcagtctctgtattagctgttttgatagttgccttatgctttggatacagaatgttgacaggagaccgtaaacaaggtcttcacagtatgaacatgatggaggcagcagcatccgaaccctctcttgatctagataatctgaaactgttggagctgattggccgaggtcgatatggagcagtatataaaggctccttggatgagcgtccagttgctgtaaaagtgttttcctttgcaaaccgtcagaattttatcaacgaaaagaacatttacagagtgcctttgatggaacatgacaacattgcccgctttatagttggagatgagagagtcactgcagatggacgcatggaatatttgcttgtgatggagtactatcccaatggatctttatgcaagtatttaagtctccacacaagtgactgggtaagctcttgccgtcttgctcattctgttactagaggactggcttatcttcacacagaattaccacgaggagatcattataaacctgcaatttcccatcgagatttaaacagcagaaatgtcctagtgaaaaatgatggaacctgtgttattagtgactttggactgtccatgaggctgactggaaatagactggtgcgcccaggggaggaagataatgcagccataagcgaggttggcactatcagatatatggcaccagaagtgctagaaggagctgtgaacttgagggactgtgaatcagctttgaaacaagtagacatgtatgctcttggactaatctattgggagatatttatgagatgtacagacctcttcccaggggaatccgtaccagagtaccagatggcttttcagacagaggttggaaaccatcccacttttgaggatatgcaggttctcgtgtctagggaaaaacagagacccaagttcccagaagcctggaaagaaaatagcctggcagtgaggtcactcaaggagacaatcgaagactgttgggaccaggatgcagaggctcggcttactgcacagtgtgctgaggaaaggatggctgaacttatgatgatttgggaaagaaacaaatctgtgagcccaacagtcaatccaatgtctactgctatgcagaatgaacgtaggtgagtcaacacaagatggcaaatcaggatcaggtgaaaagatcaagaaacgtgtgaaaactccctattctcttaagcggtggcgcccctccacctgggtcatctccactgaatcgctggactgtgaagtcaacaataatggcagtaacagggcagttcattccaaatccagcactgctgtttaccttgcagaaggaggcactgctacaaccatggtgtctaaagatataggaatgaactgtctgtgaaatgttttcaagcctatggagtgaaattattttttgcatcatttaaacatgcagaagatgtttaaaaataaaaaaaaaactgctttatcctcctgtcagcaccccctcccacccctgcaacaaagacttgctttaaatagatttcagctatgcagaaaaatttagcttatgcttccatatttttaaattttgttttttaagttttgcacttttgtttagtctcgctaaagttatatttgtctgttatgaccacagagttatatgtgtgtgtatcaaaagtggtctcaaaatatttttttaagaaaaaaagcaaaaacaatgtattgctgataatcagtttggaccagtttcttaaggtcattaaaacagaagcaaattaagacaggtttgactgcagtggtgtctggtatccatgttttatttctgggcacaagctagtttttatgttgatacgttcctgaacatattatcttgttggacatcttttctcttgtgttttgtttgaatgtgcaatagtttataggccacaaataagctttcttgtaagctctcttcctaacagggcacatattcttccataatataaacacttttctgccccatctcccatacttttgaaggtcagttctatgacagtgaattttgcacaggagaagcagctacctgatttcttactttctctctccttatcatggagaatacagaaacattgtctgaaagggctctaaagaaggaactaccaaaacctgacttgaaatgccatttcttttaaccttccaaatcctaaatgtttccttcaaggcatcttaataaacttatttgcttctggttttgggagttcataagagagaatagaacaaaatacaggacatcaaatattagccatttcccattttattttatttttctatgtaggttcatgttccatgttcatttatttaagaaatacatttttattggtaagcttatagagctacacttatggaatttttaagtaggtaaataaatggttaagacaaaatagtgttatagccttcattctctgaataggccatctttgactcataaaattacccttactgtttattataacttcagaagtaatttatagttctgaacctatagtatcttttaccctgttcccaagcaaagactggtgactttatctgaaaatgattcctcttcccatgacctaaaacactgtgaggaaaaatcattcaagtggcatgccaagtccctatgaaggaagggctgctatcaaacctaccttttttgagcaaactgagactaaacttctctcttttcaaaattgtgttatcttccttaatcctattttcataatttttccttttgccagtttttcacattatctttgatatgtgagcaacatttattatttacattagagtataccttttagtaataaaatgacttgaaatcatattatttttaaaagccctttgcttctttcattacttataatctcctctaaaacaacctctgcatgttttttttaaataaagcactttctgtcaaataatggacttttttctaaacagaaattattttctattaatttgcaaactgatgatttcacttttttttacttttttttcgattatcagagtacttagtaaatgttatatagtttagttctaagatagttccagggattaaaaggttaagaggaaaacacaaatcaccaaatttctgatttatgtttttatctcctgaacaatattttctcactcatattcctctatcttatcacttagctaaagacagcctaaatttcccaattttctgtccaaaatatttgtgatttacttgtatataagccttctcatttgccatgtgctgtgatcttacaagttagatgttactatacctaccatttattcagctggattgctgaacacagttctggattcatagaattaagaatatcttgttagtgcccaggatttccacgtttgtgttttattggcccttttctttattcagccccttaatctattttcagtcttctggcacgtaatttttttcacagttattattcttctattaacaaattatttttatcttgcctagtacattttcacttagttctcttgcccttaaatatctttcacatgcattttaggatattcttttcaaatatttgtaggacaactttgaatcaaaataaattatgttccttctccaatttgaagcattgaggataaatgaccatttgaggtctaactgatcttttcctgccagaagagttatcttacgttctgctatatttgtatttgggccagttgattgtaggttgtccaacattttttaatattgggaaaattatgataaaatgctttaaaaattaatatgccagattaaaataactgaatagtttactatttcattcaagcatgtttaaaacaaataatttcctttcaccagtttttcttagtaaactcctgaaaaagtaggaaaggtggaaagtatatatcatttttataaattttaaattgtacatcagacttttaaaatctgtaatatacaagcaagcaaaattattttaaatgacttaattgtatgctaatactcatctgataataaatgcttcttaaagttgacatttaactgctatcacaaagttttatatgtagaaaagtggggtccttttgaataaaagatcattcaactaaaaatattaaaatttatttcactggatggtaatgtaaccttaaaagcatcataataggtaaagtctaatattagttcccttaacaaaatcctaactgtataccagaattaggtcactgaaagaacttgatttgaattacgtttagacaaaaatgatttaattgtaaattcttaaaactttctaaatgcataattggcaaaaaaaaaaacccactgttaccagtgtaggaagttacaagaaggcacatactgaatgctgaagtatacatatgctatttctcttaaacctcagagcaaccatatgagcattgtaattaatattcccattttacagatgaggaaactgaagctaagagaagctaagtaatatgcccaaggtccacatctagtaacagacaaagctgggatttcagtctatgtctgcctctctccacatctctttcatccataccacactgcctacatgccatatgacaggatgtgtaatgggctaacgtttatttaaaaagttcaggccaggtgcagtggcttatgcctataatccccgcactttgggaggccgagccgggtggatcatgaggtcagacgttcaacaccagcctggccaagatggtgaaaccccgtctctattaaaaatattttttaaaaattaactgagcgtggtggtgggcgcctgtagtcccagctactcaggaggctaaggcaggagaatctcttgaacccgagaggtggaggttgcagtgagctgagatcgcgccactgcactgcagcctaggcgacagagcaagactgcctcaaaaaaaaaacataaaaattcagtcactatactctggcacaattttcatttgtatatgagccaaaccacataccttaatgatttgggaagttaggcaaatatgagatatgtagacatatctatgctgattgttgcttgagaaataattactaattctagacaaaactcaatcctgtatcttccatcatgaatcttaaaatcatttcacttcactcctaacatttcttacattgcagaactaatggtaaagtaaattttacggaaaaagttaagatagctttgggaacagagacctttccctaaattgattccatagcagatttgggggaattaacaaagaatttcagtctcatcaatcctttgaatccatcttcaaaacttctgcttttaataactttagaaaatttactaatctatagaactaattgagtaggatataggaaggatacaaggatataatgtcctttttataaaagtttagtatagcttctttacatgtatccacttgttccagaaaatgtgcattggttctgaatgtgaaaatatttaaagagagaaaggaacactcaagtaagtgtgggcttcagtgggaattatcacaaaacattggcaagtatttttatttaaattattttcaaatttgacttctacagccaagtggaattggtaggctgtagctgttacactgaaatttctagtctttgtaagtgcctcctgaaagtcatttaaaatggaaaaatatttcaatgagcttttccttttttcatatttatggacatgaatattttattggagatcattaactcctagaatttgagattatatttccatacaacattttataaagttatgttgaacttactacctgttatgtgcaggttattatgtaactattcacagattgcttcatatattgctttatcttcccatctaacttcttaaagttaaaatccggacacacatgttgattatctagaccagtcattctggaaattgtaacactcccacataaaccccaggagactttttcagaatgcaatgtttctaaatgtactgttactggcagtttactctccagcatataaggttgcattttaacttttagattatgaactgtgcaaactttacccaaaactatcttgcatgattccctcctaaatatattccttgattaagtaaatctggcaaatcactgtttgagctagttacataaaatttgttatcaagagaaggcttttctacaagtttccagattaacataaagaaaagagggaatcacagggcatttaagtgcaccttcccattactttccttaaatcacctcatagttaggctgggcgcggtggctcacgcctgtaatcccagcactttgggaggccgagacggtggatcacgaggtcaggggactgagatcatcctggctaacacgatgaaacctcatctctactaaaaatacaaataattagccaggcatggtggcacgcgcctgtagtcccagctactcgggaggcagagacaggagaatcgtttgcacccgggaggcggaggttgttgcagtgagccgagatcgcgccaatgcactccagcctgggctacagagtgagactccatctcaaaaaaaaacaaaaaaaatcacctcatagtttatgtctgacttactccaaacctcagttatctgatttgtagtctgtgtcaggaaagttttcttcatatctattctgtctccctcctctttgattttaaatttttttcttttacccagtaggacaaaaaagagcagttggtcatcatccccaatattcttagtcttcagtatgcttcaggcctctcaatgaacacttaagtctcaattcttcagacaaaattgcttaagctcttctcctcagtcctattttaatgactttatatttaagaatatagaattatattttcttttatattcaaattcattactccagttaagtaatagtttgatagtttgatagaatcgagagttaagatgtttctatttgaaagtggattcaaccatcagaccaccagcaaatcggcacttaatttttgtgttatctaacattttctattgtggaattttatgattttatattctcattagttataactaaaaagccatgcacacagaattgtatatcattttgccattaaaattttttaacatattgcagcaagcttagttttatgattgagccacaaccttttacatattttttgtatgaaatattaaacactaaatgcaagattaactttcaaaagcaaaccctacattaatcaggtattatcgatggacatttttgtagaccacttttgaaatacttattattttgcaacatagactggactatacaactttcatttaacttttaggtgactgatttaagttgagtgtgcatatagagaaaaacctagaaatttatctcatggcagatacatttgaaagtacttcagaagaatttatgctgtatattaaaactaggctcaaaataaatctatcgtatctttaaaagtccaattctgttattactgtgatgtttgtagtgttactattaaacattgtgaacatacacatttttaaaacaacttgaaacccattttaaaatctgggtaagagagaaggaatcttcagaacaaaatcacatcattagggtgtccagtttatgattgaatttttaagcaaattactgtatttgaaactacaacttgatttggttttcagttttaaaaggcaacatgtgggttttatccattttatttatacctttagatttcagaaacatcttcatgttttagatgcattctacagacatcatgttacttaaaaactcagggcccctttcatccctttgtacactgaaaaagttcaattgttagcaagtaagcaattagatccagttgaatatttaaagtgtttgttgcacagttcatttaatgtttcatcttatttgactttttcacatagatataatatcagatttcattaattataaaaagttgcccagttctgtaattactgaacagagggaatgactcaactaattggctacatgttgcaacaaatttaggcctttagagttgaagcactgacttaaaacgacttacatttctgttctttggtcaaatgaccatacatgatatgggacaaattgtttcattttgtttgttttttaataagggaacttggtaaagtagttcctgtcagataggattttctcaagagacaatttaacgttataaagccttctaaaagtgaactaaatattttataactttagtaatagcttggatggttttgagaaaataacctgtatttatcacattgtcaaacagaatttttctttgaatcagacaagttcaagctctaaattgatgtgctatatacttaaaatcctaggaagttatctgtaaccagtctcttgtctcaggctcttcaccttgttaccaatcctcgtaagtatgtaaaggaaacatatttttaaagaagcttaacagtaagaaaaaattactaaaagatgcaattcaaagataggtcccagtttaacactgaattgcttgacttctgtggcttttctttttctggccacatttatttatttaagcaatttttgtatgccttgttatttcatttccatagagattatattgtatcagtgtttatgtaagctggaatcatcctcagttttttgctgataatttttcaaataaagatacatggataattgtaaaatacactaactcttagggtgttgtagtagctgaaacatggagatgcgtagctgtcatgctttttctgaatggacaggagaaacataagctacggagtattcacttctgaggatgcttttccggaaaaagaaaggctagaaaatactcgcacttcctcagaaccctctttcttgttaacgggtatcttttgttggtgtgttttgctcttacattacagatagactatcatatatgactttatgaataatttcagttattttgcttttgtataagctgtctgaagccttgctatgctgtataagttgtgtttgatggatcagtgtgagtataaaataaagcaaatcacttttcttttgtattatctatggatgccactatgaaagctgacattaagccactaaagagttttctatgaataagtgtaagtaaatgctttgatatatataaacctaaataaaaagattgtattgatacagagacattggagaaggagattttaaggcagttctttaggtttaaaaaggcttgctgtaaaatggtgcgttattccgtttattaaagatcatattaatgac

SEQ ID NO: 384931 - DNA, 9672 bp, Homo sapiens
gtctagaggatcccggcatgtggtcataccagggaatccgtaccagagtaccagatggcttttcagacagaggttggaaaccatcccacttttgaggatatgcaggttctcgtgtctagggaaaaacagagacccaagttcccagaagcctggaaagaaaatagcctggcagtgaggtcactcaaggagacaatcgaagactgttgggaccaggatgcagaggctcggcttactgcacagtgtgctgaggaaaggatggctgaacttatgatgatttgggaaagaaacaaatctgtgagcccaacagtcaatccaatgtctactgctatgcagaatgaacgcaacctgtcacataataggcgtgtgccaaaaattggtccttatccagattattcttcctcctcatacattgaagactctatccatcatactgacagcatcgtgaagaatatttcctctgagcattctatgtccagcacacctttgactataggggaaaaaaaccgaaattcaattaactatgaacgacagcaagcacaagctcgaatccccagccctgaaacaagtgtcaccagcctctccaccaacacaacaaccacaaacaccacaggactcacgccaagtactggcatgactactatatctgagatgccatacccagatgaaacaaatctgcataccacaaatgttgcacagtcaattgggccaacccctgtctgcttacagctgacagaagaagacttggaaaccaacaagctagacccaaaagaagttgataagaacctcaaggaaagctctgatgagaatctcatggagcactctcttaaacagttcagtggcccagacccactgagcagtactagttctagcttgctttacccactcataaaacttgcagtagaagcaactggacagcaggacttcacacagactgcaaatggccaagcatgtttgattcctgatgttctgcctactcagatctatcctctccccaagcagcagaaccttcccaagagacctactagtttgcctttgaacaccaaaaattcaacaaaagagccccggctaaaatttggcagcaagcacaaatcaaacttgaaacaagtcgaaactggagttgccaagatgaatacaatcaatgcagcagaacctcatgtggtgacagtcaccatgaatggtgtggcaggtagaaaccacagtgttaactcccatgctgccacaacccaatatgccaatgggacagtactatctggccaaacaaccaacatagtgacacatagggcccaagaaatgttgcagaatcagtttattggtgaggacacccggctgaatattaattccagtcctgatgagcatgagcctttactgagacgagagcaacaagctggccatgatgaaggtgttctggatcgtcttgtggacaggagggaacggccactagaaggtggccgaactaattccaataacaacaacagcaatccatgttcagaacaagatgttcttgcacagggtgttccaagcacagcagcagatcctgggccatcaaagcccagaagagcacagaggcctaattctctggatctttcagccacaaatgtcctggatggcagcagtatacagataggtgagtcaacacaagatggcaaatcaggatcaggtgaaaagatcaagaaacgtgtgaaaactccctattctcttaagcggtggcgcccctccacctgggtcatctccactgaatcgctggactgtgaagtcaacaataatggcagtaacagggcagttcattccaaatccagcactgctgtttaccttgcagaaggaggcactgctacaaccatggtgtctaaagatataggaatgaactgtctgtgaaatgttttcaagcctatggagtgaaattattttttgcatcatttaaacatgcagaagatgtttaaaaataaaaaaaaaactgctttatcctcctgtcagcaccccctcccacccctgcaacaaagacttgctttaaatagatttcagctatgcagaaaaatttagcttatgcttccatatttttaaattttgttttttaagttttgcacttttgtttagtctcgctaaagttatatttgtctgttatgaccacagagttatatgtgtgtgtatcaaaagtggtctcaaaatatttttttaagaaaaaaagcaaaaacaatgtattgctgataatcagtttggaccagtttcttaaggtcattaaaacagaagcaaattaagacaggtttgactgcagtggtgtctggtatccatgttttatttctgggcacaagctagtttttatgttgatacgttcctgaacatattatcttgttggacatcttttctcttgtgttttgtttgaatgtgcaatagtttataggccacaaataagctttcttgtaagctctcttcctaacagggcacatattcttccataatataaacacttttctgccccatctcccatacttttgaaggtcagttctatgacagtgaattttgcacaggagaagcagctacctgatttcttactttctctctccttatcatggagaatacagaaacattgtctgaaagggctctaaagaaggaactaccaaaacctgacttgaaatgccatttcttttaaccttccaaatcctaaatgtttccttcaaggcatcttaataaacttatttgcttctggttttgggagttcataagagagaatagaacaaaatacaggacatcaaatattagccatttcccattttattttatttttctatgtaggttcatgttccatgttcatttatttaagaaatacatttttattggtaagcttatagagctacacttatggaatttttaagtaggtaaataaatggttaagacaaaatagtgttatagccttcattctctgaataggccatctttgactcataaaattacccttactgtttattataacttcagaagtaatttatagttctgaacctatagtatcttttaccctgttcccaagcaaagactggtgactttatctgaaaatgattcctcttcccatgacctaaaacactgtgaggaaaaatcattcaagtggcatgccaagtccctatgaaggaagggctgctatcaaacctaccttttttgagcaaactgagactaaacttctctcttttcaaaattgtgttatcttccttaatcctattttcataatttttccttttgccagtttttcacattatctttgatatgtgagcaacatttattatttacattagagtataccttttagtaataaaatgacttgaaatcatattatttttaaaagccctttgcttctttcattacttataatctcctctaaaacaacctctgcatgttttttttaaataaagcactttctgtcaaataatggacttttttctaaacagaaattattttctattaatttgcaaactgatgatttcacttttttttacttttttttcgattatcagagtacttagtaaatgttatatagtttagttctaagatagttccagggattaaaaggttaagaggaaaacacaaatcaccaaatttctgatttatgtttttatctcctgaacaatattttctcactcatattcctctatcttatcacttagctaaagacagcctaaatttcccaattttctgtccaaaatatttgtgatttacttgtatataagccttctcatttgccatgtgctgtgatcttacaagttagatgttactatacctaccatttattcagctggattgctgaacacagttctggattcatagaattaagaatatcttgttagtgcccaggatttccacgtttgtgttttattggcccttttctttattcagccccttaatctattttcagtcttctggcacgtaatttttttcacagttattattcttctattaacaaattatttttatcttgcctagtacattttcacttagttctcttgcccttaaatatctttcacatgcattttaggatattcttttcaaatatttgtaggacaactttgaatcaaaataaattatgttccttctccaatttgaagcattgaggataaatgaccatttgaggtctaactgatcttttcctgccagaagagttatcttacgttctgctatatttgtatttgggccagttgattgtaggttgtccaacattttttaatattgggaaaattatgataaaatgctttaaaaattaatatgccagattaaaataactgaatagtttactatttcattcaagcatgtttaaaacaaataatttcctttcaccagtttttcttagtaaactcctgaaaaagtaggaaaggtggaaagtatatatcatttttataaattttaaattgtacatcagacttttaaaatctgtaatatacaagcaagcaaaattattttaaatgacttaattgtatgctaatactcatctgataataaatgcttcttaaagttgacatttaactgctatcacaaagttttatatgtagaaaagtggggtccttttgaataaaagatcattcaactaaaaatattaaaatttatttcactggatggtaatgtaaccttaaaagcatcataataggtaaagtctaatattagttcccttaacaaaatcctaactgtataccagaattaggtcactgaaagaacttgatttgaattacgtttagacaaaaatgatttaattgtaaattcttaaaactttctaaatgcataattggcaaaaaaaaaaacccactgttaccagtgtaggaagttacaagaaggcacatactgaatgctgaagtatacatatgctatttctcttaaacctcagagcaaccatatgagcattgtaattaatattcccattttacagatgaggaaactgaagctaagagaagctaagtaatatgcccaaggtccacatctagtaacagacaaagctgggatttcagtctatgtctgcctctctccacatctctttcatccataccacactgcctacatgccatatgacaggatgtgtaatgggctaacgtttatttaaaaagttcaggccaggtgcagtggcttatgcctataatccccgcactttgggaggccgagccgggtggatcatgaggtcagacgttcaacaccagcctggccaagatggtgaaaccccgtctctattaaaaatattttttaaaaattaactgagcgtggtggtgggcgcctgtagtcccagctactcaggaggctaaggcaggagaatctcttgaacccgagaggtggaggttgcagtgagctgagatcgcgccactgcactgcagcctaggcgacagagcaagactgcctcaaaaaaaaaacataaaaattcagtcactatactctggcacaattttcatttgtatatgagccaaaccacataccttaatgatttgggaagttaggcaaatatgagatatgtagacatatctatgctgattgttgcttgagaaataattactaattctagacaaaactcaatcctgtatcttccatcatgaatcttaaaatcatttcacttcactcctaacatttcttacattgcagaactaatggtaaagtaaattttacggaaaaagttaagatagctttgggaacagagacctttccctaaattgattccatagcagatttgggggaattaacaaagaatttcagtctcatcaatcctttgaatccatcttcaaaacttctgcttttaataactttagaaaatttactaatctatagaactaattgagtaggatataggaaggatacaaggatataatgtcctttttataaaagtttagtatagcttctttacatgtatccacttgttccagaaaatgtgcattggttctgaatgtgaaaatatttaaagagagaaaggaacactcaagtaagtgtgggcttcagtgggaattatcacaaaacattggcaagtatttttatttaaattattttcaaatttgacttctacagccaagtggaattggtaggctgtagctgttacactgaaatttctagtctttgtaagtgcctcctgaaagtcatttaaaatggaaaaatatttcaatgagcttttccttttttcatatttatggacatgaatattttattggagatcattaactcctagaatttgagattatatttccatacaacattttataaagttatgttgaacttactacctgttatgtgcaggttattatgtaactattcacagattgcttcatatattgctttatcttcccatctaacttcttaaagttaaaatccggacacacatgttgattatctagaccagtcattctggaaattgtaacactcccacataaaccccaggagactttttcagaatgcaatgtttctaaatgtactgttactggcagtttactctccagcatataaggttgcattttaacttttagattatgaactgtgcaaactttacccaaaactatcttgcatgattccctcctaaatatattccttgattaagtaaatctggcaaatcactgtttgagctagttacataaaatttgttatcaagagaaggcttttctacaagtttccagattaacataaagaaaagagggaatcacagggcatttaagtgcaccttcccattactttccttaaatcacctcatagttaggctgggcgcggtggctcacgcctgtaatcccagcactttgggaggccgagacggtggatcacgaggtcaggggactgagatcatcctggctaacacgatgaaacctcatctctactaaaaatacaaataattagccaggcatggtggcacgcgcctgtagtcccagctactcgggaggcagagacaggagaatcgtttgcacccgggaggcggaggttgttgcagtgagccgagatcgcgccaatgcactccagcctgggctacagagtgagactccatctcaaaaaaaaacaaaaaaaatcacctcatagtttatgtctgacttactccaaacctcagttatctgatttgtagtctgtgtcaggaaagttttcttcatatctattctgtctccctcctctttgattttaaatttttttcttttacccagtaggacaaaaaagagcagttggtcatcatccccaatattcttagtcttcagtatgcttcaggcctctcaatgaacacttaagtctcaattcttcagacaaaattgcttaagctcttctcctcagtcctattttaatgactttatatttaagaatatagaattatattttcttttatattcaaattcattactccagttaagtaatagtttgatagtttgatagaatcgagagttaagatgtttctatttgaaagtggattcaaccatcagaccaccagcaaatcggcacttaatttttgtgttatctaacattttctattgtggaattttatgattttatattctcattagttataactaaaaagccatgcacacagaattgtatatcattttgccattaaaattttttaacatattgcagcaagcttagttttatgattgagccacaaccttttacatattttttgtatgaaatattaaacactaaatgcaagattaactttcaaaagcaaaccctacattaatcaggtattatcgatggacatttttgtagaccacttttgaaatacttattattttgcaacatagactggactatacaactttcatttaacttttaggtgactgatttaagttgagtgtgcatatagagaaaaacctagaaatttatctcatggcagatacatttgaaagtacttcagaagaatttatgctgtatattaaaactaggctcaaaataaatctatcgtatctttaaaagtccaattctgttattactgtgatgtttgtagtgttactattaaacattgtgaacatacacatttttaaaacaacttgaaacccattttaaaatctgggtaagagagaaggaatcttcagaacaaaatcacatcattagggtgtccagtttatgattgaatttttaagcaaattactgtatttgaaactacaacttgatttggttttcagttttaaaaggcaacatgtgggttttatccattttatttatacctttagatttcagaaacatcttcatgttttagatgcattctacagacatcatgttacttaaaaactcagggcccctttcatccctttgtacactgaaaaagttcaattgttagcaagtaagcaattagatccagttgaatatttaaagtgtttgttgcacagttcatttaatgtttcatcttatttgactttttcacatagatataatatcagatttcattaattataaaaagttgcccagttctgtaattactgaacagagggaatgactcaactaattggctacatgttgcaacaaatttaggcctttagagttgaagcactgacttaaaacgacttacatttctgttctttggtcaaatgaccatacatgatatgggacaaattgtttcattttgtttgttttttaataagggaacttggtaaagtagttcctgtcagataggattttctcaagagacaatttaacgttataaagccttctaaaagtgaactaaatattttataactttagtaatagcttggatggttttgagaaaataacctgtatttatcacattgtcaaacagaatttttctttgaatcagacaagttcaagctctaaattgatgtgctatatacttaaaatcctaggaagttatctgtaaccagtctcttgtctcaggctcttcaccttgttaccaatcctcgtaagtatgtaaaggaaacatatttttaaagaagcttaacagtaagaaaaaattactaaaagatgcaattcaaagataggtcccagtttaacactgaattgcttgacttctgtggcttttctttttctggccacatttatttatttaagcaatttttgtatgccttgttatttcatttccatagagattatattgtatcagtgtttatgtaagctggaatcatcctcagttttttgctgataatttttcaaataaagatacatggataattgtaaaatacactaactcttagggtgttgtagtagctgaaacatggagatgcgtagctgtcatgctttttctgaatggacaggagaaacataagctacggagtattcacttctgaggatgcttttccggaaaaagaaaggctagaaaatactcgcacttcctcagaaccctctttcttgttaacgggtatcttttgttggtgtgttttgctcttacattacagatagactatcatatatgactttatgaataatttcagttattttgcttttgtataagctgtctgaagccttgctatgctgtataagttgtgtttgatggatcagtgtgagtataaaataaagcaaatcacttttcttttgtattatctatggatgccactatgaaagctgacattaagccactaaagagttttctatgaataagtgtaagtaaatgctttgatatatataaacctaaataaaaagattgtattgatacagagacattggagaaggagattttaaggcagttctttaggtttaaaaaggcttgctgtaaaatggtgcgttattccgtttattaaagatcatattaatgac

SEQ ID NO: 384932 - DNA, 4349 bp, Homo sapiens
gatctagaggatcccaggagatagcaagactgcctcaaaaaaaaaacataaaaattcagtcactatactctggcacaattttcatttgtatatgagccaaaccacataccttaatgatttgggaagttaggcaaatatgagatatgtagacatatctatgctgattgttgcttgagaaataattactaattctagacaaaactcaatcctgtatcttccatcatgaatcttaaaatcatttcacttcactcctaacatttcttacattgcagaactaatggtaaagtaaattttacggaaaaagttaagatagctttgggaacagagacctttccctaaattgattccatagcagatttgggggaattaacaaagaatttcagtctcatcaatcctttgaatccatcttcaaaacttctgcttttaataactttagaaaatttactaatctatagaactaattgagtaggatataggaaggatacaaggatataatgtcctttttataaaagtttagtatagcttctttacatgtatccacttgttccagaaaatgtgcattggttctgaatgtgaaaatatttaaagagagaaaggaacactcaagtaagtgtgggcttcagtgggaattatcacaaaacattggcaagtatttttatttaaattattttcaaatttgacttctacagccaagtggaattggtaggctgtagctgttacactgaaatttctagtctttgtaagtgcctcctgaaagtcatttaaaatggaaaaatatttcaatgagcttttccttttttcatatttatggacatgaatattttattggagatcattaactcctagaatttgagattatatttccatacaacattttataaagttatgttgaacttactacctgttatgtgcaggttattatgtaactattcacagattgcttcatatattgctttatcttcccatctaacttcttaaagttaaaatccggacacacatgttgattatctagaccagtcattctggaaattgtaacactcccacataaaccccaggagactttttcagaatgcaatgtttctaaatgtactgttactggcagtttactctccagcatataaggttgcattttaacttttagattatgaactgtgcaaactttacccaaaactatcttgcatgattccctcctaaatatattccttgattaagtaaatctggcaaatcactgtttgagctagttacataaaatttgttatcaagagaaggcttttctacaagtttccagattaacataaagaaaagagggaatcacagggcatttaagtgcaccttcccattactttccttaaatcacctcatagttaggctgggcgcggtggctcacgcctgtaatcccagcactttgggaggccgagacggtggatcacgaggtcaggggactgagatcatcctggctaacacgatgaaacctcatctctactaaaaatacaaataattagccaggcatggtggcacgcgcctgtagtcccagctactcgggaggcagagacaggagaatcgtttgcacccgggaggcggaggttgttgcagtgagccgagatcgcgccaatgcactccagcctgggctacagagtgagactccatctcaaaaaaaaacaaaaaaaatcacctcatagtttatgtctgacttactccaaacctcagttatctgatttgtagtctgtgtcaggaaagttttcttcatatctattctgtctccctcctctttgattttaaatttttttcttttacccagtaggacaaaaaagagcagttggtcatcatccccaatattcttagtcttcagtatgcttcaggcctctcaatgaacacttaagtctcaattcttcagacaaaattgcttaagctcttctcctcagtcctattttaatgactttatatttaagaatatagaattatattttcttttatattcaaattcattactccagttaagtaatagtttgatagtttgatagaatcgagagttaagatgtttctatttgaaagtggattcaaccatcagaccaccagcaaatcggcacttaatttttgtgttatctaacattttctattgtggaattttatgattttatattctcattagttataactaaaaagccatgcacacagaattgtatatcattttgccattaaaattttttaacatattgcagcaagcttagttttatgattgagccacaaccttttacatattttttgtatgaaatattaaacactaaatgcaagattaactttcaaaagcaaaccctacattaatcaggtattatcgatggacatttttgtagaccacttttgaaatacttattattttgcaacatagactggactatacaactttcatttaacttttaggtgactgatttaagttgagtgtgcatatagagaaaaacctagaaatttatctcatggcagatacatttgaaagtacttcagaagaatttatgctgtatattaaaactaggctcaaaataaatctatcgtatctttaaaagtccaattctgttattactgtgatgtttgtagtgttactattaaacattgtgaacatacacatttttaaaacaacttgaaacccattttaaaatctgggtaagagagaaggaatcttcagaacaaaatcacatcattagggtgtccagtttatgattgaatttttaagcaaattactgtatttgaaactacaacttgatttggttttcagttttaaaaggcaacatgtgggttttatccattttatttatacctttagatttcagaaacatcttcatgttttagatgcattctacagacatcatgttacttaaaaactcagggcccctttcatccctttgtacactgaaaaagttcaattgttagcaagtaagcaattagatccagttgaatatttaaagtgtttgttgcacagttcatttaatgtttcatcttatttgactttttcacatagatataatatcagatttcattaattataaaaagttgcccagttctgtaattactgaacagagggaatgactcaactaattggctacatgttgcaacaaatttaggcctttagagttgaagcactgacttaaaacgacttacatttctgttctttggtcaaatgaccatacatgatatgggacaaattgtttcattttgtttgttttttaataagggaacttggtaaagtagttcctgtcagataggattttctcaagagacaatttaacgttataaagccttctaaaagtgaactaaatattttataactttagtaatagcttggatggttttgagaaaataacctgtatttatcacattgtcaaacagaatttttctttgaatcagacaagttcaagctctaaattgatgtgctatatacttaaaatcctaggaagttatctgtaaccagtctcttgtctcaggctcttcaccttgttaccaatcctcgtaagtatgtaaaggaaacatatttttaaagaagcttaacagtaagaaaaaattactaaaagatgcaattcaaagataggtcccagtttaacactgaattgcttgacttctgtggcttttctttttctggccacatttatttatttaagcaatttttgtatgccttgttatttcatttccatagagattatattgtatcagtgtttatgtaagctggaatcatcctcagttttttgctgataatttttcaaataaagatacatggataattgtaaaatacactaactcttagggtgttgtagtagctgaaacatggagatgcgtagctgtcatgctttttctgaatggacaggagaaacataagctacggagtattcacttctgaggatgcttttccggaaaaagaaaggctagaaaatactcgcacttcctcagaaccctctttcttgttaacgggtatcttttgttggtgtgttttgctcttacattacagatagactatcatatatgactttatgaataatttcagttattttgcttttgtataagctgtctgaagccttgctatgctgtataagttgtgtttgatggatcagtgtgagtataaaataaagcaaatcacttttcttttgtattatctatggatgccactatgaaagctgacattaagccactaaagagttttctatgaataagtgtaagtaaatgctttgatatatataaacctaaataaaaagattgtattgatacagagacattggagaaggagattttaaggcagttctttaggtttaaaaaggcttgctgtaaaatggtgcgttattccgtttattaaagatcatattaatgac

SEQ ID NO: 384933 - DNA, 324 bp, Homo sapiens
cctgcccagctcccagtggccctggtaggcccacaacttcccgaagccaagttccccaggcccaggtcaggcctcacggtggcctctccaggctcagctcctgccctccgatggcatctgcaggccccaaacggcctccggtcggtgggctcctctaggcccagcttgggcctcccggcggcctctgcaggcccaaatcgtcccgaagtcggcctctccaggcccagcttgggcctcccggcggcctctgcaggcccaagtcatcctcaaatcggcctggaattgggcctggaagagcagcaagtcggcctccccgggcccaac

SEQ ID NO: 384934 - DNA, 326 bp, Homo sapiens
gaacaatatttaaataaactattgataaacgcagtggcacagatgcatctcaagtgtatcatgctaaatggaagaagctgctcaaaagactgtatcctgtatgatccatgtatacaacattccagggaaggcaaaactgtgtggaactgttctatatcttccacatttatcaaaactccgcctgtacctaaagagggcgaaattcactgtacgtaagttacatcttcatcaacctcatgttgcggggagaagaaactcttttccctcttgtgctgaagtcacatgaaagatgatgtaaatgccttgttgaggagtgaacgcgcata

SEQ ID NO: 384935 - DNA, 420 bp, Homo sapiens
tggaatgatgtgtttttaacttgctttggctaataaaatgcagcagaagtgatagtgtgtcagctaagaaccaagaaaccaagaatccaagagctcctgtgtacttctgtgtcttggagaaggcattgccatgtgaaagcctgagctagcctactgggtgataagagatgaatggcccagtcactctgttgccacagccagtagctaatgatcaggtacaggaatgatgcattttagagcagccagcccccagccaatccaccagcagacaacaatcatacccttgagcccagtcaagatcagctatgcctggcccaagtcagtggaaccacccaaaaggcttacaggcttgtgaacaataatacgtgtccattgctttaagctgttgagttttaggatagcttgctatgcagtaattgt

SEQ ID NO: 384936 - DNA, 553 bp, Homo sapiens
ttttgtatgtgtctaatattcagagtctgacacaataaggccataaagagctaagtctgtctatggtagatcttcacctgggaatgttctcctaatagtcacttttgttataaatcttcacctagcatgggagttaagtgcattttaaaactagacctggggactatgtatcctaaaatgcaaaaatagcccccaaaatgaaaattaatgttgagaatctagtcaatctgccagcagtacgtacataactgttctgtgtatatttcacatggccatatatgttttgcttgtgtggtgctaaatgcaaaggcagagaagcttctgctattgaatgcttagcacagaactcctgtcctccctctttgaaattattccgacagttgcccctcatttggcttgccaaggagtaagatcttggcttgtgtgtttctcccatgtgtggtgtatctgtaatctcggtcactgttgagagcctggtgggaggctgattattgttgagggaaagatctgagagcagggccaagaaagggaaagagagagagaggaaaaaaaa

SEQ ID NO: 384937 - DNA, 147 bp, Homo sapiens
cacaaaacagcaacctgatagcaaaagaaagagtgaaactcattggtaaaggtaaatacatagacaaatataggatactgtattattataatggtggtgggtaaattacttttaactctagtataaaagttaatagacaaagtatta

SEQ ID NO: 384938 - DNA, 341 bp, Homo sapiens
attatttttataattaaaatattttaatatgcataaatcaacattatttaaggttgtcactgagcccctccacaacatgtgagatcaacatgtgagatctcagattttgacagagttaaaatctttgtatgcttattcatgaatgatgatgaatctaaagtatatagtatgaaacttgatgttgaattcataaagactttttctatcacacacaagttctttcattaacatagtgaattataacagcactgtttctacatttgccattttttgatgttgaattgtgattgcaggtgatgatgaattgtgattgcaggtgaatgaaagtgattttatgaata

SEQ ID NO: 384939 - DNA, 3334 bp, Homo sapiens
cgctaaggccgccctccgggtagccgccatgtcggtctccagcggcgtccagattctgacaaagccagagaccgtggaccggaggagaagtgcggaaacgaccaaagaggccgggcgaccactggagatggctgtgtccgagcccgaggccagcgccgcggaatggaagcaactggatcctgctcagagcaacctgtataatgatgtgatgctggagaactactgcaaccaagcctcaatggggtgtcaagctcccaaaccagacatgatctccaagttggaaaaaggagaagcaccatggttggggaaggggaaaagacccagtcaaggttgtccaagtaaaatagcaagacccaagcaaaaagaaactgatggaaaagtccagaaagatgatgaccagcttgaaaatatccagaaatctcaaaacaaactcctcagggaagttgcagtcaagaagaaaactcaagctaagaagaatggcagtgactgtggttcactggggaaaaaaaataatttgcataaaaaacatgttccttcaaagaaaaggcttcttaaatttgagtcatgtggaaaaattttgaaacagaatttagatttacctgatcactcaagaaactgtgtaaaaaggaaatctgatgcagctaaagaacacaagaagtcattcaaccatagcttatctgatacaaggaaaggcaaaaagcaaactggaaagaaacatgagaaattatccagccatagctcatctgataagtgtaacaaaactggcaaaaaacatgacaaattatgctgtcatagttcatcccatattaaacaggacaaaattcaaactggagagaaacatgagaaatcacccagccttagctcatctactaagcatgaaaaacctcaagcttgtgtgaaaccctatgaatgtaatcaatgtggaaaggttctcagccataaacaaggactcattgaccatcagagagttcatactggggagaaaccatatgaatgtaatgaatgtgggatagcctttagccaaaagtcacaccttgttgtacatcagagaactcacaccggagaaaaaccatatgaatgtattcagtgtggcaaagcccatggtcataaacatgcactcactgaccatctaagaattcatactggagaaaagccctatgaatgtgctgaatgtgggaaaaccttcagacacagctcaaaccttattcaacatgtgagatctcacacaggtgagaagccatatgaatgtaaggaatgtgggaagtcttttaggtataactcatctcttaccgaacatgtgagaacacatacaggtgaaataccatatgaatgcaatgaatgtggaaaagcctttaagtatagctcatcccttactaaacacatgagaattcatacaggtgagaaaccctttgaatgtaatgaatgtgggaaagctttcagcaagaagtcacacctcattatacatcaaagaactcatactaaggagaaaccttataaatgtaatgagtgtggaaaagcctttggacatagctcatctcttacttaccatatgagaactcatacaggtgaaagtccctttgaatgtaatcaatgtgggaaaggctttaaacaaattgaaggccttactcaacatcagagagttcatactggagagaaaccgtatgagtgtaatgaatgtgggaaagcctttagccaaaagtctcacctcattgtacatcagagaactcatactggggagaaaccttatgaatgtaacgaatgtgaaaaagcctttaatgcaaaatcacagcttgttatacatcagcgatcccacactggagaaaaaccctatgaatgtaatgaatgtgggaaaactttcaaacaaaatgcatccctaaccaaacatgtgaaaactcattcagaagataaatctcatgagtgaagttaatgtgggaaatttgttaactaaatttaaggttttgttgaaccttggaaatatgctgattttaaagagtgttagaaagcctttagcaagatgtcacaccttgttgtacatgagaaactttgaaaatggatcttcatatagaatcagtggatggaaacaagggtttaaacttgatacaaaaccttttataaaaaatattgttttaactactcaattattataaatgatctacatgttcagattgaaattgaaagctttaaaaattgtgaattatttgaatattcaaagcaatggagaaacaagttatatatgctgacagttcctgtgtttcttcttgttttgtacttaagcaccatatattagagttgaatttgcatatctgtttattgccttatgtaaatgagtgtggccatctgtataagcctctttgacattttcacccagctctttcttaatgtctgtgttggcttctgcatcagcagaaatctttttaaaagggttgttatatatgtaaaaaatgttaacaggaaaatgagagaaaataaagcagctgaggatacaaatgtgctggtagggagcgatattcaagatatattgtgaagtgtgaaaaagtaggttgctgaaccatgtatatagtatgttcccctttgtgtacaaaagggtatgtttgtttaacctctgtctcttatctctgtatgtgtatgtatctttgtatgcatatatacatgtatctgtatgtgaatagactttgaaaaaatacagaataaacttcatggtggttgccattgggcagaggagtataggactggggtctaggataggagcaagacttccttgtatatttggatttttaaatcatgcacatgtattatttttataattaaaatattttaatatgcataaatcaacattatttaaggttgtcactgagcccctccacaacatgtgagatcaacatgtgagatctcagattttgacagagttaaaatttgatgttgaattcataaagactttttctatcacacacaagttctttcattaacatagtgaattataacagcactgtttctacatttgccattttttgatgttgaattgtgattgcaggtgatgatgaattgtgattgcaggtgaatgaaagtgattttatgaataatcaccctgttttatctcatattcaaagaactaacacacaaacacctcaatcagggaattcgaatgaaacaaatgtcacccctcccaaagtgctgtgattaaaagtgtgagctaccacatttggccaaatctttaatttcttaaccttcatagtaaaggaaataaagagacatgggcattgaaaaatggatgttgtacaaaccaacctgtagcatctaaaatactaaataaaaaacagtttacaaaaaaaaaaaa

SEQ ID NO: 384940 - DNA, 803 bp, Homo sapiens
gtttcaccatgttgcccaggctggtcttgaactcctggcctcccaaagtgctgcaattataggcatgtgccaccatgcctggctaaattatagttttccattgaaacataaaatttctctctgtagtaaccatcatttttgatcataatcaaagtaagactattattgttttaaaaataagtctagttttgttagattttgcttgattatttacataagtgcagcaagaacaggagatgaccacataggtgctttcaagtttctttgctggaagttttcatacagaatctcagatttgacttttaaaggccttattcaggctaaaacccaagccaagcacatactatcaaatttcagccgcagtccttatggctttgtgtgaattcctctcttcttgaggcccccaaaatatccccaaattcctgggcctaccgggaaatgaccttctttactaacctgaaggctgtgaaccctgtaatctaggtatcaggctggcttttctcagagtgctgttgggaatgaagattttggtgttccaaaaaaaaaaaaaaaaaaaaaacaacgtgggaacaaatgatgtcttagcgaggcgagctttactttctgcataaagggtgctactcaatagctgtccagccacaagagcacaccaaacaaaggagacagagttacttataacctgatgtgtctaccctagtgctgtgtccagtttccactggctgaaataggacctcacattttacactttacccgattgactattagtttaacactttcttaattaggtaaggggaatagaacaa

SEQ ID NO: 384941 - DNA, 352 bp, Homo sapiens
taagtgctctgagtttgtgttgcctcttttgtaaaatgagggtttgacttaatcagtgattttcatagcttaaaatttttttgaagaacagaactttttttaaaaacagttagatgcaaccatattatataaaacagaacagatacaagtagagctaacttgctaaagaaaggatggaggctctgaagctgtgacttcattatcccttaatactgctatgtcctctgtagtaccttagatttctatgggacatcgtttaaaaactattgtttatgcgagagccttgctaatttcctaaaaattgtggatacattttttctcccatgtataattttctcaccttctatttaaa

SEQ ID NO: 384942 - DNA, 391 bp, Homo sapiens
gatactacccttttaatagataacagtttttgccagcttctgtactagatgtgtattggagatacagaaatcaatatggattgggaatgtggttggattcataaaaaggattaagataaaaaagaaagaaaaggaaagaaagaagatatagtagcattttaaaattattttccatggtctaagcagcatgctaatcacatttacatgtaaggagtcgtggaattacagagctggaatggactttgagatcatctctcaaaccttcttattttacagaagtaactatgtcacaaagcatttaagtggctcatccaaggtcatctgactatttggttgtagaaggcatcaaagtccaaacgtcctatctcctagttgagtgttatttccttta

SEQ ID NO: 384943 - DNA, 345 bp, Homo sapiens
ctgatgaaagagttgttgcatgtctaaattacttatgactctcagatgcagggtaggggtcctatggttggttagtactactcttccacctccccaagaagctgtcttaaatgatggttaacctggaattagaacatgctaacaatggcagagtcttttagactatattcacacactgccctgtggaatcctcagcagccctctgtataatgagaaattatgatacttcctggattgttcccgaaaattagcaattagcatatgattaaaaaaactgtgagataagaatttctttttatttatttacttatttttggcagagtcttttgctctgtcgccctggct

SEQ ID NO: 384944 - DNA, 407 bp, Homo sapiens
gcaagctcatccgtggtcatcccgtgggcacgtggcctggccgtcctgtggtcatcctgcaggcatgtggcatgttcatcctgtggtcatcccacaggcacgtggtgtggccatcccgtggtcgtcccgcaggcatgtggcatgctcatctgtggtcatcctgcaggcacatggcctggccgtcctgtggttgcagctatcccttgcgtggctgcagcatcctgtgctcgtgtttggcgttctgctgatggccagtgatgttgagcatctcttcatgtgcttcattcggctaatcatctctcttctttggtgaagtttctgttcagtcttttgcccattttttattgggtgacttgccttcttgttattgagttgtaagaggtcattatctgttttagatagaagtc

SEQ ID NO: 384945 - DNA, 1320 bp, Homo sapiens
aacaccatgagggccctggtgcttctgctgtccctgttcctgctgggtggccaggcccagcatgtgtctgactggacctactcagaaggggcactggacgaagcgcactggccacagcactaccccgcctgtgggggccagagacagtcgcctatcaacctacagaggacgaaggtgcggtacaacccctccttgaaggggctcaatatgacaggctatgagacccaggcaggggagttccccatggtcaacaatggccacacagtgcagatcggcctgccctccaccatgcgcatgacagtggctgacggcattgtatacatagcccagcagatgcactttcactggggaggtgcgtcctcggagatcagcggctctgagcacaccgtggacgggatcagacatgtgatcgagattcacattgttcactacaattctaaatacaagacgctatgatatagcccaagatgcgccggatggtttggctgtactggcagccttcgttgaggtgaagaattaccctgaaaacacttattacagcaacttcatttctcatctggccaacatcaagtacccaggacaaagaacaaccctgactggccttgacgttcaggacatgctgcccaggaacctccagcactactacacctaccatggctcactcaccacgcctccctgcactgagaacgtccactggtttgtgctggcagattttgtcaagctctccaggacacaggtttggaagctggagaattccttactggatcaccgcaacaagaccatccacaacgattaccgcaggacccagcccctgaaacacagagtggtggaatccaacttcccgaatcaggaatacactctaggctctgaattccagttttacctacataagattgaggaaattcttgactacttaagaagagcattgaactgaggaaagctaagaggaagattcaataatattaactagcttgaagcctgacctagccagaagtgcctgtccgctgcagccgcaccctaccttgtctaagaaaccatgtgtgtctggaacacgctgctccccctgggcagctgttgggattctgattaaaagaggggaaacgatcatcctggacaggaagtgagatggcttcagttcatgagacgggatctgagttagacatcaccagtggaaattgattggaatagaaacttaaaggaaatggaaccctaactattctcccatcaaatcatatatgttgacctgtctgaattataaaccagcctgacctttcctttagcattagatgtaataaaataactttggaaatttgtcattta

SEQ ID NO: 384946 - DNA, 831 bp, Homo sapiens
aacaccatgagggccctggtgcttctgctgtccctgttcctgctgggtggccaggcccagcatgtgtctgactggacctactcagaaggggcactggacgaagcgcactggccacagcactaccccgcctgtgggggccagagacagtcgcctatcaacctacagaggacgaaggtgcggtacaacccctccttgaaggggctcaatatgacaggctatgagacccaggcaggggagttccccatggtcaacaatggccacacagattggcaggcggaactcttcctcccctccttgtcctctccttgtggagaaggggcgaagcacaaaggccaaaggcagtggctttgttcaccctccctggacagctggtgggaagcaatcattgatggaggatctctatgggcaacgcttgctgagtgcgggcttcgtgctgagggcccagaagagggaaggcatatggaagagaagagcccagcttcccaaggggcttgcagcggctcccgcctcccaatttccagaggaccctgtaccttcttcctttagggctctgctcaaatttctgtggtccggaagcctgttcctttggggttctcacctcacacgacagcatgtcggacattagagtggacccaaagttcacattaattatatatatattaaaaacaatttttttttttgagatggagtcttgctctgtcaccccggctggagtgcagtggtgcaatcttggctcactgaaacctccacttcccagattcaagcaattctcctgcctcagcttccctggtacctgggactacaggcatgtgccaccacgcccagctaatt

SEQ ID NO: 384947 - DNA, 2162 bp, Homo sapiens
cgcggcgagtcggtgggcggaagcgaggggcgtccggcggggccctggagggtcgcaggagtcgcaggccgaggctgaaccgccccctcttccgcccggtgcgttccccgcagtgtcggtgaaggaggagccggaagcagaggtgcgcatggtgaatgggaagcccaagaaggtccgaaagccgcgtacaatctactccagctaccagctggccgccctgcagcgccgcttccagaaggcccagtacctggcgctgcccgagcgcgccgagctggccgcgcagctgggcctcacgcagacacaggtgaaaatctggttccagaaccgccgttccaagttcaagaaactctacaagaacggggaggtgccgctggagcacagtcccaataacagtgattccatggcctgcaactcaccaccatcacccgccctctgggacacctcttcccactccactccggcccctgcccgcagtcagctgcccccgccgctcccatacagtgcctcccccagctacctggacgaccccaccaactcctggtatcacgcacagaacctgagtggaccccacttacagcagcagccgcctcagccagccaccctgcaccatgcctctcccgggcccccgcccaaccctggggctgtgtactgagcacccatctggcctgcacccttgacaaaggaccccaggaccaggcagaaggcgcctccgtcctagccactcaggaatcatcgaggagcacagggaaaaggaactccctttccccctcccttgccccttcctccagggacccaagcgcttccagatgacatttgcatggaccaaggatgccccctgaacctccctccctctgcctagacactggggtacccctccagatgtggggacattccaccccagtggggacagccattcccctacctgctccaggagcctggattggctttaaatggctcatcatcttccagcttcttaaacttagtgcctgttcccagactggagaccttgggatgggggagagtgtggagggtttgcgggtcctgcctgtgctggggcacctggcaccgtggatcttaaaacttgccaggcctagttcctcctgagcctctggtggtctccccctgctcgagcggcccctcggccaataagacagtggacatcatgacgaggactccgggtggggacctgaactggtcaccgccctgcacttctagccctcatttaagatttgagggtgaaaccaaagaaaaccccctaagtgagggaatcttttaatatttgtggctttagaggaaagaactaaaggagccatctctctcccctctcctccgttccgagaggaggggtgggtctcagacgtttttcctatggacttatttcttccatgtccaggactttgcacaactttggttttaaaagctgttgaaaaataggaaaacaaagggcattgttcacagatagggccaagtctccccttgcaagggtgcctctgttctgtccctgcccccacctcaccttctctactcctccagtaagttggcagttttggtgccaaaccccaaatctccaaagagacatgccaggcaagacaaacccccaaacacctcctttccggtggccttggaaacagattgctccgagctggagaatgtcgggtgaggtgtatgggagaggaggggagagttagaacttgtgcctttgggagtaaggggtaactgcctggagggctggtggcactgcccctccctgacccagacatcccaccaaagctaactttcccccacccctgatgcagtaaaacattgaaaaaaaaaaaaaaggagaggtagaagactgtagctatatatataaatatatagtaagttttttttttttaagagcaacagagagaagcagcctcctccctgctgcggtttcctatttatgtggccatgttcctcctggacggatctccctgtgtgtttcaagctgagagatgtgggctccggctggatttgggttttgtgggaggtgcaggggccaagagagacgtggtaggtctccaagagtcccacccgggggggaagaagcaaagccatctcccaccccctcctagccttctcatttctgctttcttactggactcatctttatatataatgttaataaaaaagacgaaaat

SEQ ID NO: 384948 - DNA, 2599 bp, Homo sapiens
gcatttgattgtggcttgggacgcgaggagaggcgcgcagcgaccgcctgacggcaggcaatggtgtaagcgcctctcggcctccccctccccccagacgcggccgggtcctcccttcgccttctggacacacacccctgcctcgtctcttccgcctctctcgcactccggtccgttcctgtcctctgcggaggccagccctggggaggtgcagcgcccgccaggatgagtggctccttcgatcgcaagctcagcagcatcctcaccgacatctccagctcccttagctgccatgcgggctccaaggactcgcctaccctgcccgagtcttctgtcactgacctgggctactacagcgctccccagcacgattactactcgggccagccctatggccagacggtgaacccctacacctaccaccaccaattcaatctcaatgggcttgcaggcacgggcgcttactcgcccaagtcggaatatacctacggagcctcctaccggcaatacggggcgtatcgggagcagccgctgccagcccaggacccagtgtcggtgaaggaggagccggaagcagaggtgcgcatggtgaatgggaagcccaagaaggtccgaaagccgcgtacaatctactccagctaccagctggccgccctgcagcgccgcttccagaaggcccagtacctggcgctgcccgagcgcgccgagctggccgcgcagctgggcctcacgcagacacaggtgaaaatctggttccagaaccgccgttccaagttcaagaaactctacaagaacggggaggtgccgctggagcacagtcccaataacagtgattccatggcctgcaactcaccaccatcacccgccctctgggacacctcttcccactccactccggcccctgcccgcagtcagctgcccccgccgctcccatacagtgcctcccccagctacctggacgaccccaccaactcctggtatcacgcacagaacctgagtggaccccacttacagcagcagccgcctcagccagccaccctgcaccatgcctctcccgggcccccgcccaaccctggggctgtgtactgagcacccatctggcctgcacccttgacaaaggaccccaggaccaggcagaaggcgcctccgtcctagccactcaggaatcatcgaggagcacagggaaaaggaactccctttccccctcccttgccccttcctccagggacccaagcgcttccagatgacatttgcatggaccaaggatgccccctgaacctccctccctctgcctagacactggggtacccctccagatgtggggacattccaccccagtggggacagccattcccctacctgctccaggagcctggattggctttaaatggctcatcatcttccagcttcttaaacttagtgcctgttcccagactggagaccttgggatgggggagagtgtggagggtttgcgggtcctgcctgtgctggggcacctggcaccgtggatcttaaaacttgccaggcctagttcctcctgagcctctggtggtctccccctgctcgagcggcccctcggccaataagacagtggacatcatgacgaggactccgggtggggacctgaactggtcaccgccctgcacttctagccctcatttaagatttgagggtgaaaccaaagaaaaccccctaagtgagggaatcttttaatatttgtggctttagaggaaagaactaaaggagccatctctctcccctctcctccgttccgagaggaggggtgggtctcagacgtttttcctatggacttatttcttccatgtccaggactttgcacaactttggttttaaaagctgttgaaaaataggaaaacaaagggcattgttcacagatagggccaagtctccccttgcaagggtgcctctgttctgtccctgcccccacctcaccttctctactcctccagtaagttggcagttttggtgccaaaccccaaatctccaaagagacatgccaggcaagacaaacccccaaacacctcctttccggtggccttggaaacagattgctccgagctggagaatgtcgggtgaggtgtatgggagaggaggggagagttagaacttgtgcctttgggagtaaggggtaactgcctggagggctggtggcactgcccctccctgacccagacatcccaccaaagctaactttcccccacccctgatgcagtaaaacattgaaaaaaaaaaaaaaggagaggtagaagactgtagctatatatataaatatatagtaagttttttttttttaagagcaacagagagaagcagcctcctccctgctgcggtttcctatttatgtggccatgttcctcctggacggatctccctgtgtgtttcaagctgagagatgtgggctccggctggatttgggttttgtgggaggtgcaggggccaagagagacgtggtaggtctccaagagtcccacccgggggggaagaagcaaagccatctcccaccccctcctagccttctcatttctgctttcttactggactcatctttatatataatgttaataaaaaagacgaaaat

SEQ ID NO: 384949 - DNA, 1659 bp, Homo sapiens
acgggcgatggtactagagagaggcaaacaaattattggttcatgcgacataactgagtggaccccacttacagcagcagccgcctcagccagccaccctgcaccatgcctctcccgggcccccgcccaaccctggggctgtgtactgagcacccatctggcctgcacccttgacaaaggaccccaggaccaggcagaaggcgcctccgtcctagccactcaggaatcatcgaggagcacagggaaaaggaactccctttccccctcccttgccccttcctccagggacccaagcgcttccagatgacatttgcatggaccaaggatgccccctgaacctccctccctctgcctagacactggggtacccctccagatgtggggacattccaccccagtggggacagccattcccctacctgctccaggagcctggattggctttaaatggctcatcatcttccagcttcttaaacttagtgcctgttcccagactggagaccttgggatgggggagagtgtggagggtttgcgggtcctgcctgtgctggggcacctggcaccgtggatcttaaaacttgccaggcctagttcctcctgagcctctggtggtctccccctgctcgagcggcccctcggccaataagacagtggacatcatgacgaggactccgggtggggacctgaactggtcaccgccctgcacttctagccctcatttaagatttgagggtgaaaccaaagaaaaccccctaagtgagggaatcttttaatatttgtggctttagaggaaagaactaaaggagccatctctctcccctctcctccgttccgagaggaggggtgggtctcagacgtttttcctatggacttatttcttccatgtccaggactttgcacaactttggttttaaaagctgttgaaaaataggaaaacaaagggcattgttcacagatagggccaagtctccccttgcaagggtgcctctgttctgtccctgcccccacctcaccttctctactcctccagtaagttggcagttttggtgccaaaccccaaatctccaaagagacatgccaggcaagacaaacccccaaacacctcctttccggtggccttggaaacagattgctccgagctggagaatgtcgggtgaggtgtatgggagaggaggggagagttagaacttgtgcctttgggagtaaggggtaactgcctggagggctggtggcactgcccctccctgacccagacatcccaccaaagctaactttcccccacccctgatgcagtaaaacattgaaaaaaaaaaaaaaggagaggtagaagactgtagctatatatataaatatatagtaagttttttttttttaagagcaacagagagaagcagcctcctccctgctgcggtttcctatttatgtggccatgttcctcctggacggatctccctgtgtgtttcaagctgagagatgtgggctccggctggatttgggttttgtgggaggtgcaggggccaagagagacgtggtaggtctccaagagtcccacccgggggggaagaagcaaagccatctcccaccccctcctagccttctcatttctgctttcttactggactcatctttatatataatgttaataaaaaagacgaaaat

SEQ ID NO: 384950 - DNA, 381 bp, Homo sapiens
tatggcagttactgagctgaaaggattaaatgctgcagcttccccagttgcccttcctccatgagagcagtgcctgcccccagcattctgtggcacttggaagacaagacagaggccaaatgcagatttttaccctgggcttccctctacagtgtggaactcaggttgtttcttctttcctccctgaaatgacatgagtttgcagcggatggtgaactgaagaaaccataggaggctctgtcttcttgcctgaatttcagttggaagcttggagatttggggttcaacagagataaggaagtgtaagccttcatcccgtctggtggttggcgatcacacaccgctctgtgctgaggctaatggccatgatcagagttgacc

SEQ ID NO: 384951 - DNA, 149 bp, Homo sapiens
accccagagtcctcactcctggctgtgcacttgaatcttccctttccttgtagacacacacacacacacacccccacacccctttagaggcatgcttatactttgtacattcatttattgaacggcagtagtgttccaggtagcagcct

SEQ ID NO: 384952 - DNA, 167 bp, Homo sapiens
aaataatagtaatagcaaatttaagtaataagaaatctttgagtactttctaaactgtaggcagaacaatccacagcaatcctatgagataggtactattattattattactgttttattgataagggacttgaggcacaagaatagatgtccaaggtcagacatct

SEQ ID NO: 384953 - DNA, 671 bp, Homo sapiens
gagcagaatgaaaatgaggcccagtggagaagtgatatttccaagatcaccctggcagacaccaggcctgtttgagttgtggcccatgctacctcccacctattctcctaatgcttccatctctaagtgtgtgcattatctacaggtgacactacatcattatttttattgtcttatcttatatacacctaacacattccctaggaagtagatgttagcatcatcaccactgtgcatgttaggaggctggggaagccttgaatacagtgacttttactgggtcccagagatggtaagaaaaacaaagttatgttccagctgtctcttctctcctggaacccaggttgcatttaggtctttccagggaattaaggggaagttgtgtttgcataattgtgtacaaataaagagttgacatggaagaggagactgagcaatcagtagcatagtggggcctttcggtatgtcttacagaaacatagggcccagtagatggaaccttgaagagtttaacacactttcttggtgtcagaacccaacagcagttaagaaaccaggaatccacattcttgagacagctctgtatccacctctgtttgtgagagttgctcaagagagtgagatgctctttcattgtgccctgaaatttctgagtttcagccttacaaagg

SEQ ID NO: 384954 - DNA, 777 bp, Homo sapiens
gaactccggctgcgttaccgacctgcgagctgacgggcccggaccatggggtgctgcccgggggactgcttcacctgctgcacccaggagcaaaactgctgtgaagagtgctgctgtcagccgggctgctgtggctgctgcggctcctgctgtggctgtgggggctctggctgcgggggctctggctgcgggggcagctgctgcggatcgtcttgctgtggatctggctgcggaggctgtggaggctgcggaggctgcgggggtggctgctgtggatccagttgctgtgggtccagttgctgcggctccgggtgctgtgggcctgtgtgctgccagcccacacctatatgcgacacaaaatgaagacctttccctccaccactgatgcagtcccaccgaaagcctccatctgctccagggggacagcccctcgtgtccagaaccttccatacccccaagacagtgtcttgtctttctgtgatttgtagaggagggcttgttctccaacaccttctctggtatttcaaggcaccgagaacaagagccatactctgatgaaacattaaaactcggtcacaactaagtgatcccaagctcaagggtgaatccccaatactttacttattcacatgaagttcaatgtcttgtactataagacatcctcttcttcaaggtgtctttgggactgatcctccgccctggctttctgcagctttgagatgcaaaaaaggtccatcttctttgtgagcctcttaataaatttgagcatgctggcat

SEQ ID NO: 384955 - DNA, 2110 bp, Homo sapiens
tgctccagttcaaattcctagtgttctcatatggtttatattactgaaaaattaatatctttaagctaaaatataagggaaaggaagaagagaaatttagatgtaaaatgtgggtcagatattttataggtttccatttaatatatatatacacacaaaatccagtatattctgagtaggttcttagttttctgatttctacatgtgtctgctatgtgcaaatgtagtatattatttactacatggttattgtggtgtagtgtgcaaatgttagcatgtgcattatcctgattactggacacagttttattcttatcaggaatagaacttgcacatgtaccatacaatttttttttttttaatcacaaaggatgtatttccctaagtagcacttttggagcaggggaaggaagaaaactgctattccctaatcctcctcctataagatatgcatatgcctgaggtgtataaagacatttaggttagttaatgggcatgttaataagagcattgtgatgcaaattcattttcaaaatgaaaataattttttcttccccaaaatgagaatagtagaaattttggtgaactgagcaccatagttatataatatttccctgcgaaggtctagtttgaagaaaaaaaaaacttgaaaacaaacctatgaggttgagcctggttgctataaagactttgggatggtatgtgtttctgggatgagctatatagaaagtttagttgactgctggaccttggatattcttactcggttcaaaatacacaaaaacaagctggtacatatggtgctttataatgcagtcgagagtaagaatacatgttgctgtagccccatttcctttacaaacccccgcacaatttcaaaagtggaagttaccgtggcctctggtttcccagttcctccgtggtgtaatgaagtcccaggttttagaagctgaagccaagcctagggtagcatcgtctgtacggtggtgaggcccagcacagcggtagctgcctagtggggaatgaccccctgagcatgcagagcccagagtcactgtccatctgcgttcccagagaacaattgtgaagagtcctagaacaggaactctgaatcagactgtcaggggcctatgtagccaaaatgttactaaatataaaattcctgtcgtcttcagtcttcatgctttgtcactgtaaaaagaacaaaaagcatttttactataatttaaaggagctgcttttttatagcacatactatttcgctttgtactatatttgatagttgcagaataatttagactgtagaaaaactttgttgtatttgtactgttcttgaatgtttcaaagaaagtgctttacttggttgccataattttcttgtactgctgtattcccctccttcccctgcttcatggaaacctgatatgatacatattttcagtagttttttttttttaatgtgtgttcgtttgtacaattttttttttttggtcagtattctgaatgtttacatctgtttgacattagccatttaatgccttttttaaaggcggtattactcctacagtgtaacagcaaaatgtgaaatcaacccaaacataacatgcatgacaaacacagattgggggcgaaggccctgaacctacatagacattttatatcagcatacagaaaagtaaaatcctccttcagtcctctaccaaagaatatattattcccacaggaaaaactcagaaaaggtgtgtaaaatcctcagaagggggagcagttgattcagtaagactgcgacaatttaatactgttacgcttgctttgatacctgactaaatgtgactgagtgcaacaagcatttaagaaaatttttagacagtgttttgtttagaattcagggatcatgcattctttaatggtgctgtttgttttttatttcttttctacaaagaaaacaagtgttgcctacaaaagtgactgctcacaataccataagttaaatgaaatgaaatgtttgtctcttcatgtttctctgtctttccctttctcaaagtaacaacttgggtttcaatattaagatattctggagaaaataaagaaattaaacatgaaaaaaaaa

SEQ ID NO: 384956 - DNA, 337 bp, Homo sapiens
aaaatatctgtgaagtggctacttcacagatgattaaaaatagaagtaccctattaaggaagtagaaaatataacactttaaataaaatttagaatattactgtaaattggtaccaaatttaaagaaatccagcacagacaaggcattacggagaaaagaccaagatttctcaaagcataagtaagctttaaaaactggaataatgggccacggtggctcacacctgtaatccaagcactttcggaggccaaggtgggtggataacgaggtcaggagatcaagaccatcctggctaacacggtgaaaccccatctctactaaaaatacaaaaaaatt

SEQ ID NO: 384957 - DNA, 377 bp, Homo sapiens
ctccattttgtcctagttacttttaaggtataagctgaagtcattgatttgagatgtttcttcttttctaatataggtgtttaatggtacatatttctccctaagtactgctttagtggcatcctgcaaattctgacatactgtggttcattttaattcattacaaaatacttcttaatttcccttttgatttcctctttaattcatgggttacttagaattgtgttatttaattttcaagtacttggcgatttatctctctctgttattcatgtctaatttaatcccagtgtggtctgagaatatattttgatatcaataaagctactccagctaccttttgattaatgttatcacagtatatctttttctatctt

SEQ ID NO: 384958 - DNA, 306 bp, Homo sapiens
tgggaggctattttcctagtctttctttccactctcacattttatttcatctccagcaatacacccctactaaaagttttctaataaatatatttctaaaaaatataaggaccccattttcgttggaaaaaaatgtggctagacaaaaatatggcatgatatacatagaacattaacattatatatgggtagcagatttgttaaagtcaatttttatcattttttgttcttctatatcttctagaacaaataggtattacttatttgctcagttcagctgatgttaggggaaatccattatcatgt

SEQ ID NO: 384959 - DNA, 415 bp, Homo sapiens
cacagctcctggcacatgctctgtgctgctgctgacacgagctggaagcatttcccaagctcaaggcctgagacattgaggtttgagtggagatggctaataaatgaatttcaagggaacacccctgagtaactcactcagcacaggcatctgcctcccaaagatagtatagggacccctggggtggtacttcgcactccggccttggaaaacacctgaggtatggctggggtgtttaacactcaggttttccctaaaaatccagcaggttcagctaagaaagaatcacagagggccagccatggtggctcaagcctgtaatcccaacactttgggagcctgaggcgggcagattgcctaaggtcaggagtttgagaccagcctggccaacatggtcaaaccctgtctctactaa

SEQ ID NO: 384960 - DNA, 2212 bp, Homo sapiens
  misc_feature (1754)..(1754): n is a, c, g, or t
cccgggtgtacgtgtaaaattatgatcaaataaatttgtatgccttttctcctattaacctgccttttttgtcagcgattgtcagtgaaacttcagagggcaaaggggaagttttccttggcccctccagttttggtgctgtgaacaggataccaaagctgctctgttcttctggaagctgcaatgaagggaaccaaggacctgacaagccagcagaaggagtctaacgtgaagacattttgctccaagaatatcctagccatccttggcttctcctctatcatagctgtgatagctttgcttgctgtggggttgacccagaacaaagcattgccagaaaacgttaagtatgggattgtgctggatgcgggttcttctcacacaagtttatacatctataagtggccagcagaaaaggagaatgacacaggcgtggtgcatcaagtagaagaatgcagggttaaaggtcctggaatctcaaaatttgttcagaaagtaaatgaaataggcatttacctgactgattgcatggaaagagctagggaagtgattccaaggtcccagcaccaagagacacccgtttacctgggagccacggcaggcatgcggttgctcaggatggaaagtgaagagttggcagacagggttctggatgtggtggagaggagcctcagcaactacccctttgacttccagggtgccaggatcattactggccaagaggaaggtgcctatggctggattactatcaactatctgctgggcaaattcagtcagaaaacaaggtggttcagcatagtcccatatgaaaccaataatcaggaaacctttggagctttggaccttgggggagcctctacacaagtcacttttgtaccccaaaaccagactatcgagtccccagataatgctctgcaatttcgcctctatggcaaggactacaatgtctacacacatagcttcttgtgctatgggaaggatcaggcactctggcagaaactggccaaggacattcaggcaagtataactcaatccagacctgcccccttcacatctgcacctccagcccccacatcctgttgttttctgtttcaaattcagtagtttgtctgaacttggttattgtactttccaaacctttttaggcaggatattgaactacatctggttgacccctataaattgtttcagtcagacatcccctcccatgtttgtttactgcgttatctccacagacacaactgagatcttctctcaggaaataatttctccccctcgtggggttgataatgaaaattatgtggtagaatattgtttgttggagggggaattgcaatttataagctcttttagaccactttttaaagctccctttcctacaaactacaaaaaaacagagttgttagaaatgacctggagaggagaaggaaaaaaaaaaaaacacttcaggagaaacacaaaatgtatcaattgacacttcaaatcttgtcatcttgtccccagatgccttctgcattttgaagacaagaaaagttaaacacactttgggaggctgaggtgggtggatcacttgaggtcaggagttggagaccagcctggccaacatggtgaaaccccatctctactaaaaatacaaaaaagaaaaaaaattagctgggcatggtggcacatacctgtaatcccagctacttgggaggctgagaaaggagaatcacttgaactgggaggtggaggttgcagtgagccgagattgngccactacactccagcctgggccacagagcgagactccatctcaaaaagaaaaaaaagaaaagaaaaagaaaaagaaaacaaaagttaaacatactcaacatcatgtgagtaccaggcacaccctgacaagcaaacacaaagccaggatgtcatatccagctgttccctgtctccactgaaaggataacaagttctctgctctcctccaaagcattctctctggttttcaaaaccactaccaataagatggtcctgggagtagggggcgctgagagacatccactgagcctcaaagctccactaaccttcttatccacagcagcctcctttcttccctagtaggttgtgggttagaaattacttttttttgggccaggcgtggtggctcacacctgtaatcccagcactttgggaggccgaggcgggtggatcacttgaggtccggagttcgagacca

SEQ ID NO: 384961 - DNA, 4691 bp, Homo sapiens
agggaaaaagggagaaagagagagagattggaatatacatggcttcaaggatgcaaaaaattacaacctggaaaaggcttcgagtaactttaggaaaatgagctgctggactcctcagtcaatctgtcctttctagtcaatgaaaaagacagggtttgaggttccttccgaaacggggccggctaatttagcccctcccacgagcccaagggtctgttatatctctgtttccttgaggacctctctcacggagacggaccacagcaagcagaggctgggggggggaaagacgaggaaagaggaggaaaacaaaagctgctacttatggaagatacaaaggagtctaacgtgaagacattttgctccaagaatatcctagccatccttggcttctcctctatcatagctgtgatagctttgcttgctgtggggttgacccagaacaaagcattgccagaaaacgttaagtatgggattgtgctggatgcgggttcttctcacacaagtttatacatctataagtggccagcagaaaaggagaatgacacaggcgtggtgcatcaagtagaagaatgcagggttaaaggtcctggaatctcaaaatttgttcagaaagtaaatgaaataggcatttacctgactgattgcatggaaagagctagggaagtgattccaaggtcccagcaccaagagacacccgtttacctgggagccacggcaggcatgcggttgctcaggatggaaagtgaagagttggcagacagggttctggatgtggtggagaggagcctcagcaactacccctttgacttccagggtgccaggatcattactggccaagaggaaggtgcctatggctggattactatcaactatctgctgggcaaattcagtcagaaaacaaggtggttcagcatagtcccatatgaaaccaataatcaggaaacctttggagctttggaccttgggggagcctctacacaagtcacttttgtaccccaaaaccagactatcgagtccccagataatgctctgcaatttcgcctctatggcaaggactacaatgtctacacacatagcttcttgtgctatgggaaggatcaggcactctggcagaaactggccaaggacattcaggttgcaagtaatgaaattctcagggacccatgctttcatcctggatataagaaggtagtgaacgtaagtgacctttacaagaccccctgcaccaagagatttgagatgactcttccattccagcagtttgaaatccagggtattggaaactatcaacaatgccatcaaagcatcctggagctcttcaacaccagttactgcccttactcccagtgtgccttcaatgggattttcttgccaccactccagggggattttggggcattttcagctttttactttgtgatgaagtttttaaacttgacatcagagaaagtctctcaggaaaaggtgactgagatgatgaaaaagttctgtgctcagccttgggaggagataaaaacatcttacgctggagtaaaggagaagtacctgagtgaatactgcttttctggtacctacattctctccctccttctgcaaggctatcatttcacagctgattcctgggagcacatccatttcattggcaagatccagggcagcgacgccggctggactttgggctacatgctgaacctgaccaacatgatcccagctgagcaaccattgtccacacctctctcccactccacctatgtcttcctcatggttctattctccctggtccttttcacagtggccatcataggcttgcttatctttcacaagccttcatatttctggaaagatatggtatagcaaaagcagctgaaatatgctggctggagtgaggaaaaaaatcgtccagggagcattttcctccatcgcagtgttcaaggccatccttccctgtctgccagggccagtcttgacgagtgtgaagcttccttggcttttactgaagcctttcttttggaggtattcaatatcctttgcctcaaggacttcggcagatactgtctctttcatgagtttttcccagctacacctttctcctttgtactttgtgcttgtataggttttaaagacctgacacctttcataatctttgctttataaaagaacaatattgactttgtctagaagaactgagagtcttgagtcctgtgataggaggctgagctggctgaaagaagaatctcaggaactggttcagttgtactctttaagaacccctttctctctcctgtttgccatccattaagaaagccatatgatgcctttggagaaggcagacacacattccattcccagcctgctctgtgggtaggagaattttctacagtaggcaaatatgtgctaaagccaaagagttttataaggaaatatatgtgctcatgcagtcaatacagttctcaatcccacccaaagcaggtatgtcaataaatcacatattcctaggtgatacccaaatgctacagagtggaacactcagacctgagatttgcaaaaagcagatgtaaatatatgcattcaaacatcagggcttactatgaggtaggtggtatatacatgtcacaaataaaaatacagttacaactcagggtcacaaaaaatgcatcttccaatgcatatttttattatggtaaaatatacataaatataattcaccattttaacatttaattcatattaaatacgtacaaatcagtgacatttagtacattcacagtgttgtgccaccatcaccactatttagttccagaacatttgcatcatcaatacattgtctagagacaagactatcctgggtaggcagaaaccatagatcttttgtgtttacagctatggaaaccaactgtaccataaagatagttcactgagttttaaagccaagccacatcttatttttccaaggtttaatttagtgagagggcagcattagtgtggagtggcatgcttttgccctatcgtggaatttacacatcagaatgtgcaggatccaagtctgaaagtgttgccacccgtcacacaacatgggctttgtttgcttattccatgaagcagcagctatagaccttaccatggaaacatgaagagaccctgcacccctttccttaaggattgctgcaagagttacctgttgagcaggattgactggtgatgtttcattctgaccttgtcccaagctctccatctctagatctggggactgactgttgagctgatggggaaagaaaagctctcacacaaaccggaagccaaatgtcccctatctcttgaatgatcaagtcacttttgacaacatccaggtgaatataaaaacttaataaagctgtggaaaggaactcttaatcttcttttctgctacttaggttaaattcactagatcttgattaggaatcaaaattcgaattgggacatgttcaaattctttcttgtggtagttgcctatactgtcatcgctgctgttggttgagcatttgtggtgtaccacgctgtgtgctcaagggtattacattcatcttctcatttaatcctcacaacaatctgaagaaggtaggtattacaattcccacttcatagaaacagaaactgaggttcagagaggttaagtcatttgcccaaatggctgagccaaagcctaccatgtacctaacctttattttctttcccgaacataccaggctgtctcctcataacttccaagcatgcacttaaaactccacatgaatacaaggttcatgggacttggtattcatagaaagggaggcagaaagctggtctgttcctgataggcttgtaatttaatatcattctgttcatgtgctttggatggaagcacatctggcatatgatgctaatcagtggttcccatacccctggcttcctaattttaatgtttgctcacagcatagtagattgacatcaaatagtggccgatgatgatgaaaataaaggtcaaataagttgagccaataacagccgcttttttccttctgtctgcgtatacaaagcactgtcatgcacacaatctattctgaccctcacaacaacccataagggtgtaaatagtatttccattttacaaatgaggatcacacaaactactacattgcagagcagatactccaactcatgtcttctggttgaagcctattgctttttcttttctaaacactttccctcagcaagttggaattagacttcacaagtctccttcagagaacacaaatcttttcttattccattcctgtttggttgcctacgtccaatctccccctccccagagatgccaaaaaaaaaatcctttaaggtatttgggagccaaactcaacttgttaaaatctcaaattatggagacaatcagcagacacaacctaaccccaattattttggcaggaaggttggtttagaggcagatccagcaatctgctttgggccactctgggtggggtaggtgaaataagattggtcactgttaactaattttaatattggattggccattggttatcactgattaccattctcccctggattttcacccaggactcaaaacttggttctgctaaccctgttcctttatgaggaaccttttaaagattcctttataaggtgggagttttttttctatgaacctataggggaga

SEQ ID NO: 384962 - DNA, 4637 bp, Homo sapiens
agggaaaaagggagaaagagagagagattggaatatacatggcttcaaggatgcaaaaaattacaacctggaaaaggcttcgagtaactttaggaaaatgagctgctggactcctcagtcaatctgtcctttctagtcaatgaaaaagacagggtttgaggttccttccgaaacggggccggctaatttagcccctcccacgagcccaagggtctgttatatctctgtttccttgaggacctctctcacggagacggaccacagcaagcagaggctgggggggggaaagacgaggaaagaggaggaaaacaaaagctgctacttatggaagatacaaaggagtctaacgtgaagacattttgctccaagaatatcctagccatccttggcttctcctctatcatagctgtgatagctttgcttgctgtggggttgacccagaacaaagcattgccagaaaacgttaagtatgggattgtgctggatgcgggttcttctcacacaagtttatacatctataagtggccagcagaaaaggagaatgacacaggcgtggtgcatcaagtagaagaatgcagggttaaaggtcctggaatctcaaaatttgttcagaaagtaaatgaaataggcatttacctgactgattgcatggaaagagctagggaagtgattccaaggtcccagcaccaagagacacccgtttacctgggagccacggcaggcatgcggttgctcaggatggaaagtgaagagttggcagacagggttctggatgtggtggagaggagcctcagcaactacccctttgacttccagggtgccaggatcattactggccaagaggaaggtgcctatggctggattactatcaactatctgctgggcaaattcagtcagaaaacaaggtggttcagcatagtcccatatgaaaccaataatcaggaaacctttggagctttggaccttgggggagcctctacacaagtcacttttgtaccccaaaaccagactatcgagtccccagataatgctctgcaatttcgcctctatggcaaggactacaatgtctacacacatagcttcttgtgctatgggaaggatcaggcactctggcagaaactggccaaggacattcaggttgcaagtaatgaaattctcagggacccatgctttcatcctggatataagaaggtagtgaacgtaagtgacctttacaagaccccctgcaccaagagatttgagatgactcttccattccagcagtttgaaatccagggtattggaaactatcaacaatgccatcaaagcatcctggagctcttcaacaccagttactgcccttactcccagtgtgccttcaatgggattttcttgccaccactccagggggattttggggcattttcagctttttactttgtgatgaagtttttaaacttgacatcagagaaagtctctcaggaaaaggtgactgagatgatgaaaaagttctgtgctcagccttgggaggagataaaaacatcttacgctggagtaaaggagaagtacctgagtgaatactgcttttctggtacctacattctctccctccttctgcaaggctatcatttcacagctgattcctgggagcacatccatttcattggcaagatccagggcagcgacgccggctggactttgggctacatgctgaacctgaccaacatgatcccagctgagcaaccattgtccacacctctctcccactccacctatgtcttcctcatggttctattctccctggtccttttcacagtggccatcataggcttgcttatctttcacaagccttcatatttctggaaagatatggtatagcaaaagcagctgaaatatgctggctggagtgaggaaaaaaatcgtccagggagcattttcctccatcgcagtgttcaaggccatccttccctgtctgccagggccagtcttgacgagtgtgaagcttccttggcttttactgaagcctttcttttggaggtattcaatatcctttgcctcaaggacttcggcagatactgtctctttcatgagtttttcccagctacacctttctcctttgtactttgtgcttgtataggttttaaagacctgacacctttcataatctttgctttataaaagaacaatattgactttgtctagaagaactgagagtcttgagtcctgtgataggaggctgagctggctgaaagaagaatctcaggaactggttcagttgtactctttaagaacccctttctctctcctgtttgccatccattaagaaagccatatgatgcctttggagaaggcagacacacattccattcccagcctgctctgtgggtaggagaattttctacagtaggcaaatatgtgctaaagccaaagagttttataaggaaatatatgtgctcatgcagtcaatacagttctcaatcccacccaaagcaggtatgtcaataaatcacatattcctaggtgatacccaaatgctacagagtggaacactcagacctgagatttgcaaaaagcagatgtaaatatatgcattcaaacatcagggcttactatgaggtaggtggtatatacatgtcacaaataaaaatacagttacaactcagggtcacaaaaaatgcatcttccaatgcatatttttattatggtaaaatatacataaatataattcaccattttaacatttaattcatattaaatacgtacaaatcagtgacatttagtacattcacagtgttgtgccaccatcaccactatttagttccagaacatttgcatcatcaatacattgtctagagacaagactatcctgggtaggcagaaaccatagatcttttgtgtttacagctatggaaaccaactgtaccataaagatagttcactgagttttaaagccaagccacatcttatttttccaaggtttaatttagtgagagggcagcattagtgtggagtggcatgcttttgccctatcgtggaatttacacatcagaatgtgcaggatccaagtctgaaagtgttgccacccgtcacacaacatgggctttgtttgcttattccatgaagcagcagctatagaccttaccatggaaacatgaagagaccctgcacccctttccttaaggattgctgcaagagttacctgttgagcaggattgactggtgatgtttcattctgaccttgtcccaagctctccatctctagatctggggactgactgttgagctgatggggaaagaaaagctctcacacaaaccggaagccaaatgtcccctatctcttgaatgatcaagtcacttttgacaacatccaggtgaatatagttaaattcactagatcttgattaggaatcaaaattcgaattgggacatgttcaaattctttcttgtggtagttgcctatactgtcatcgctgctgttggttgagcatttgtggtgtaccacgctgtgtgctcaagggtattacattcatcttctcatttaatcctcacaacaatctgaagaaggtaggtattacaattcccacttcatagaaacagaaactgaggttcagagaggttaagtcatttgcccaaatggctgagccaaagcctaccatgtacctaacctttattttctttcccgaacataccaggctgtctcctcataacttccaagcatgcacttaaaactccacatgaatacaaggttcatgggacttggtattcatagaaagggaggcagaaagctggtctgttcctgataggcttgtaatttaatatcattctgttcatgtgctttggatggaagcacatctggcatatgatgctaatcagtggttcccatacccctggcttcctaattttaatgtttgctcacagcatagtagattgacatcaaatagtggccgatgatgatgaaaataaaggtcaaataagttgagccaataacagccgcttttttccttctgtctgcgtatacaaagcactgtcatgcacacaatctattctgaccctcacaacaacccataagggtgtaaatagtatttccattttacaaatgaggatcacacaaactactacattgcagagcagatactccaactcatgtcttctggttgaagcctattgctttttcttttctaaacactttccctcagcaagttggaattagacttcacaagtctccttcagagaacacaaatcttttcttattccattcctgtttggttgcctacgtccaatctccccctccccagagatgccaaaaaaaaaatcctttaaggtatttgggagccaaactcaacttgttaaaatctcaaattatggagacaatcagcagacacaacctaaccccaattattttggcaggaaggttggtttagaggcagatccagcaatctgctttgggccactctgggtggggtaggtgaaataagattggtcactgttaactaattttaatattggattggccattggttatcactgattaccattctcccctggattttcacccaggactcaaaacttggttctgctaaccctgttcctttatgaggaaccttttaaagattcctttataaggtgggagttttttttctatgaacctataggggaga

SEQ ID NO: 384963 - DNA, 3413 bp, Homo sapiens
agggaaaaagggagaaagagagagagattggaatatacatggcttcaaggatgcaaaaaattacaacctggaaaaggcttcgagtaactttaggaaaatgagctgctggactcctcagtcaatctgtcctttctagtcaatgaaaaagacagggtttgaggttccttccgaaacggggccggctaatttagcccctcccacgagcccaagggtctgttatatctctgtttccttgaggacctctctcacggagacggaccacagcaagcagaggctgggggggggaaagacgaggaaagaggaggaaaacaaaagctgctacttatggaagatacaaaggagtctaacgtgaagacattttgctccaagaatatcctagccatccttggcttctcctctatcatagctgtgatagctttgcttgctgtggggttgacccagaacaaagcattgccagaaaacgttaagtatgggattgtgctggatgcgggttcttctcacacaagtttatacatctataagtggccagcagaaaaggagaatgacacaggcgtggtgcatcaagtagaagaatgcagggttaaaggtcctggaatctcaaaatttgttcagaaagtaaatgaaataggcatttacctgactgattgcatggaaagagctagggaagtgattccaaggtcccagcaccaagagacacccgtttacctgggagccacggcaggcatgcggttgctcaggatggaaagtgaagagttggcagacagggttctggatgtggtggagaggagcctcagcaactacccctttgacttccagggtgccaggatcattactggccaagaggaaggtgcctatggctggattactatcaactatctgctgggcaaattcagtcagaaaacaaggtggttcagcatagtcccatatgaaaccaataatcaggaaacctttggagctttggaccttgggggagcctctacacaagtcacttttgtaccccaaaaccagactatcgagtccccagataatgctctgcaatttcgcctctatggcaaggactacaatgtctacacacatagcttcttgtgctatgggaaggatcaggcactctggcagaaactggccaaggacattcaggttgcaagtaatgaaattctcagggacccatgctttcatcctggatataagaaggtagtgaacgtaagtgacctttacaagaccccctgcaccaagagatttgagatgactcttccattccagcagtttgaaatccagggtattggaaactatcaacaatgccatcaaagcatcctggagctcttcaacaccagttactgcccttactcccagtgtgccttcaatgggattttcttgccaccactccagggggattttggggcattttcagctttttactttgtgatgaagtttttaaacttgacatcagagaaagtctctcaggaaaaggtgactgagatgatgaaaaagttctgtgctcagccttgggaggagataaaaacatcttacgctggagtaaaggagaagtacctgagtgaatactgcttttctggtacctacattctctccctccttctgcaaggctatcatttcacagctgattcctgggagcacatccatttcattggcaagatccagggcagcgacgccggctggactttgggctacatgctgaacctgaccaacatgatcccagctgagcaaccattgtccacacctctctcccactccacctatgtcttcctcatggttctattctccctggtccttttcacagtggccatcataggcttgcttatctttcacaagccttcatatttctggaaagatatggtatagcaaaagcagctgaaatatgctggctggagtgaggaaaaaaatcgtccagggagcattttcctccatcgcagtgttcaaggccatccttccctgtctgccagggccagtcttgacgagtgtgaagcttccttggcttttactgaagcctttcttttggaggtattcaatatcctttgcctcaaggacttcggcagatactgtctctttcatgagtttttcccagctacacctttctcctttgtactttgtgcttgtataggttttaaagacctgacacctttcataatctttgctttataaaagaacaatattgactttgtctagaagaactgagagtcttgagtcctgtgataggaggctgagctggctgaaagaagaatctcaggaactggttcagttgtactctttaagaacccctttctctctcctgtttgccatccattaagaaagccatatgatgcctttggagaaggcagacacacattccattcccagcctgctctgtgggtaggagaattttctacagtaggcaaatatgtgctaaagccaaagagttttataaggaaatatatgtgctcatgcagtcaatacagttctcaatcccacccaaagcaggtatgtcaataaatcacatattcctaggtgatacccaaatgctacagagtggaacactcagacctgagatttgcaaaaagcagatgtaaatatatgcattcaaacatcagggcttactatgaggtaggtggtatatacatgtcacaaataaaaatacagttacaactcagggtcacaaaaaatgcatcttccaatgcatatttttattatggtaaaatatacataaatataattcaccattttaacatttaattcatattaaatacgtacaaatcagtgacatttagtacattcacagtgttgtgccaccatcaccactatttagttccagaacatttgcatcatcaatacattgtctagagacaagactatcctgggtaggcagaaaccatagatcttttgtgtttacagctatggaaaccaactgtaccataaagatagttcactgagttttaaagccaagccacatcttatttttccaaggtttaatttagtgagagggcagcattagtgtggagtggcatgcttttgccctatcgtggaatttacacatcagaatgtgcaggatccaagtctgaaagtgttgccacccgtcacacaacatgggctttgtttgcttattccatgaagcagcagctatagaccttaccatggaaacatgaagagaccctgcacccctttccttaaggattgctgcaagagttacctgttgagcaggattgactggtgatgtttcattctgaccttgtcccaagctctccatctctagatctggggactgactgttgagctgatggggaaagaaaagctctcacacaaaccggaagccaaatgtcccctatctcttgaatgatcaagtcacttttgacaacatccaggtgaatataaaaacttaataaagctgtggaaaggaactcttaatcttcttttctgctacttag

SEQ ID NO: 384964 - DNA, 2181 bp, Homo sapiens
agggaaaaagggagaaagagagagagattggaatatacatggcttcaaggatgcaaaaaattacaacctggaaaaggcttcgagtaactttaggaaaatgagctgctggactcctcagtcaatctgtcctttctagtcaatgaaaaagacagggtttgaggttccttccgaaacggggccggctaatttagcccctcccacgagcccaagggtctgttatatctctgtttccttgaggacctctctcacggagacggaccacagcaagcagaggctgggggggggaaagacgaggaaagaggaggaaaacaaaagctgctacttatggaagatacaaaggagtctaacgtgaagacattttgctccaagaatatcctagccatccttggcttctcctctatcatagctgtgatagctttgcttgctgtggggttgacccagaacaaagcattgccagaaaacgttaagtatgggattgtgctggatgcgggttcttctcacacaagtttatacatctataagtggccagcagaaaaggagaatgacacaggcgtggtgcatcaagtagaagaatgcagggttaaaggtcctggaatctcaaaatttgttcagaaagtaaatgaaataggcatttacctgactgattgcatggaaagagctagggaagtgattccaaggtcccagcaccaagagacacccgtttacctgggagccacggcaggcatgcggttgctcaggatggaaagtgaagagttggcagacagggttctggatgtggtggagaggagcctcagcaactacccctttgacttccagggtgccaggatcattactggccaagaggaaggtgcctatggctggattactatcaactatctgctgggcaaattcagtcagaaaacaaggtggttcagcatagtcccatatgaaaccaataatcaggaaacctttggagctttggaccttgggggagcctctacacaagtcacttttgtaccccaaaaccagactatcgagtccccagataatgctctgcaatttcgcctctatggcaaggactacaatgtctacacacatagcttcttgtgctatgggaaggatcaggcactctggcagaaactggccaaggacattcaggttgcaagtaatgaaattctcagggacccatgctttcatcctggatataagaaggtagtgaacgtaagtgacctttacaagaccccctgcaccaagagatttgagatgactcttccattccagcagtttgaaatccagggtattggaaactatcaacaatgccatcaaagcatcctggagctcttcaacaccagttactgcccttactcccagtgtgccttcaatgggattttcttgccaccactccagggggattttggggcattttcagctttttactttgtgatgaagtttttaaacttgacatcagagaaagtctctcaggaaaaggtgactgagatgatgaaaaagttctgtgctcagccttgggaggagataaaaacatcttacgctggagtaaaggagaagtacctgagtgaatactgcttttctggtacctacattctctccctccttctgcaaggctatcatttcacagctgattcctgggagcacatccatttcattggcaagatccagggcagcgacgccggctggactttgggctacatgctgaacctgaccaacatgatcccagctgagcaaccattgtccacacctctctcccactccacctatgtcttcctcatggttctattctccctggtccttttcacagtggccatcataggcttgcttatctttcacaagccttcatatttctggaaagatatggtatagcaaaagcagctgaaatatgctggctggagtgaggaaaaaaatcgtccagggagcattttcctccatcgcagtgttcaaggccatccttccctgtctgccagggccagtcttgacgagtgtgaagcttccttggcttttactgaagcctttcttttggaggtattcaatatcctttgcctcaaggacttcggcagatactgtctctttcatgagtttttcccagctacacctttctcctttgtactttgtgcttgtataggttttaaagacctgacacctttcataatctttgctttataaaagaacaatattgactttgtctag

SEQ ID NO: 384965 - DNA, 4571 bp, Homo sapiens
cccgggtgtacgtgtaaaattatgatcaaataaatttgtatgccttttctcctattaacctgccttttttgtcagcgattgtcagtgaaacttcagagggcaaaggggaagttttccttggcccctccagttttggtgctgtgaacaggataccaaagctgctctgttcttctggaagctgcaatgaagggaaccaaggacctgacaagccagcagaaggagtctaacgtgaagacattttgctccaagaatatcctagccatccttggcttctcctctatcatagctgtgatagctttgcttgctgtggggttgacccagaacaaagcattgccagaaaacgttaagtatgggattgtgctggatgcgggttcttctcacacaagtttatacatctataagtggccagcagaaaaggagaatgacacaggcgtggtgcatcaagtagaagaatgcagggttaaaggtcctggaatctcaaaatttgttcagaaagtaaatgaaataggcatttacctgactgattgcatggaaagagctagggaagtgattccaaggtcccagcaccaagagacacccgtttacctgggagccacggcaggcatgcggttgctcaggatggaaagtgaagagttggcagacagggttctggatgtggtggagaggagcctcagcaactacccctttgacttccagggtgccaggatcattactggccaagaggaaggtgcctatggctggattactatcaactatctgctgggcaaattcagtcagaaaacaaggtggttcagcatagtcccatatgaaaccaataatcaggaaacctttggagctttggaccttgggggagcctctacacaagtcacttttgtaccccaaaaccagactatcgagtccccagataatgctctgcaatttcgcctctatggcaaggactacaatgtctacacacatagcttcttgtgctatgggaaggatcaggcactctggcagaaactggccaaggacattcaggttgcaagtaatgaaattctcagggacccatgctttcatcctggatataagaaggtagtgaacgtaagtgacctttacaagaccccctgcaccaagagatttgagatgactcttccattccagcagtttgaaatccagggtattggaaactatcaacaatgccatcaaagcatcctggagctcttcaacaccagttactgcccttactcccagtgtgccttcaatgggattttcttgccaccactccagggggattttggggcattttcagctttttactttgtgatgaagtttttaaacttgacatcagagaaagtctctcaggaaaaggtgactgagatgatgaaaaagttctgtgctcagccttgggaggagataaaaacatcttacgctggagtaaaggagaagtacctgagtgaatactgcttttctggtacctacattctctccctccttctgcaaggctatcatttcacagctgattcctgggagcacatccatttcattggcaagatccagggcagcgacgccggctggactttgggctacatgctgaacctgaccaacatgatcccagctgagcaaccattgtccacacctctctcccactccacctatgtcttcctcatggttctattctccctggtccttttcacagtggccatcataggcttgcttatctttcacaagccttcatatttctggaaagatatggtatagcaaaagcagctgaaatatgctggctggagtgaggaaaaaaatcgtccagggagcattttcctccatcgcagtgttcaaggccatccttccctgtctgccagggccagtcttgacgagtgtgaagcttccttggcttttactgaagcctttcttttggaggtattcaatatcctttgcctcaaggacttcggcagatactgtctctttcatgagtttttcccagctacacctttctcctttgtactttgtgcttgtataggttttaaagacctgacacctttcataatctttgctttataaaagaacaatattgactttgtctagaagaactgagagtcttgagtcctgtgataggaggctgagctggctgaaagaagaatctcaggaactggttcagttgtactctttaagaacccctttctctctcctgtttgccatccattaagaaagccatatgatgcctttggagaaggcagacacacattccattcccagcctgctctgtgggtaggagaattttctacagtaggcaaatatgtgctaaagccaaagagttttataaggaaatatatgtgctcatgcagtcaatacagttctcaatcccacccaaagcaggtatgtcaataaatcacatattcctaggtgatacccaaatgctacagagtggaacactcagacctgagatttgcaaaaagcagatgtaaatatatgcattcaaacatcagggcttactatgaggtaggtggtatatacatgtcacaaataaaaatacagttacaactcagggtcacaaaaaatgcatcttccaatgcatatttttattatggtaaaatatacataaatataattcaccattttaacatttaattcatattaaatacgtacaaatcagtgacatttagtacattcacagtgttgtgccaccatcaccactatttagttccagaacatttgcatcatcaatacattgtctagagacaagactatcctgggtaggcagaaaccatagatcttttgtgtttacagctatggaaaccaactgtaccataaagatagttcactgagttttaaagccaagccacatcttatttttccaaggtttaatttagtgagagggcagcattagtgtggagtggcatgcttttgccctatcgtggaatttacacatcagaatgtgcaggatccaagtctgaaagtgttgccacccgtcacacaacatgggctttgtttgcttattccatgaagcagcagctatagaccttaccatggaaacatgaagagaccctgcacccctttccttaaggattgctgcaagagttacctgttgagcaggattgactggtgatgtttcattctgaccttgtcccaagctctccatctctagatctggggactgactgttgagctgatggggaaagaaaagctctcacacaaaccggaagccaaatgtcccctatctcttgaatgatcaagtcacttttgacaacatccaggtgaatataaaaacttaataaagctgtggaaaggaactcttaatcttcttttctgctacttaggttaaattcactagatcttgattaggaatcaaaattcgaattgggacatgttcaaattctttcttgtggtagttgcctatactgtcatcgctgctgttggttgagcatttgtggtgtaccacgctgtgtgctcaagggtattacattcatcttctcatttaatcctcacaacaatctgaagaaggtaggtattacaattcccacttcatagaaacagaaactgaggttcagagaggttaagtcatttgcccaaatggctgagccaaagcctaccatgtacctaacctttattttctttcccgaacataccaggctgtctcctcataacttccaagcatgcacttaaaactccacatgaatacaaggttcatgggacttggtattcatagaaagggaggcagaaagctggtctgttcctgataggcttgtaatttaatatcattctgttcatgtgctttggatggaagcacatctggcatatgatgctaatcagtggttcccatacccctggcttcctaattttaatgtttgctcacagcatagtagattgacatcaaatagtggccgatgatgatgaaaataaaggtcaaataagttgagccaataacagccgcttttttccttctgtctgcgtatacaaagcactgtcatgcacacaatctattctgaccctcacaacaacccataagggtgtaaatagtatttccattttacaaatgaggatcacacaaactactacattgcagagcagatactccaactcatgtcttctggttgaagcctattgctttttcttttctaaacactttccctcagcaagttggaattagacttcacaagtctccttcagagaacacaaatcttttcttattccattcctgtttggttgcctacgtccaatctccccctccccagagatgccaaaaaaaaaatcctttaaggtatttgggagccaaactcaacttgttaaaatctcaaattatggagacaatcagcagacacaacctaaccccaattattttggcaggaaggttggtttagaggcagatccagcaatctgctttgggccactctgggtggggtaggtgaaataagattggtcactgttaactaattttaatattggattggccattggttatcactgattaccattctcccctggattttcacccaggactcaaaacttggttctgctaaccctgttcctttatgaggaaccttttaaagattcctttataaggtgggagttttttttctatgaacctataggggaga

SEQ ID NO: 384966 - DNA, 4376 bp, Homo sapiens
ttttttcttctgcttttggttttagagtctaacgtgaagacattttgctccaagaatatcctagccatccttggcttctcctctatcatagctgtgatagctttgcttgctgtggggttgacccagaacaaagcattgccagaaaacgttaagtatgggattgtgctggatgcgggttcttctcacacaagtttatacatctataagtggccagcagaaaaggagaatgacacaggcgtggtgcatcaagtagaagaatgcagggttaaaggtcctggaatctcaaaatttgttcagaaagtaaatgaaataggcatttacctgactgattgcatggaaagagctagggaagtgattccaaggtcccagcaccaagagacacccgtttacctgggagccacggcaggcatgcggttgctcaggatggaaagtgaagagttggcagacagggttctggatgtggtggagaggagcctcagcaactacccctttgacttccagggtgccaggatcattactggccaagaggaaggtgcctatggctggattactatcaactatctgctgggcaaattcagtcagaaaacaaggtggttcagcatagtcccatatgaaaccaataatcaggaaacctttggagctttggaccttgggggagcctctacacaagtcacttttgtaccccaaaaccagactatcgagtccccagataatgctctgcaatttcgcctctatggcaaggactacaatgtctacacacatagcttcttgtgctatgggaaggatcaggcactctggcagaaactggccaaggacattcaggttgcaagtaatgaaattctcagggacccatgctttcatcctggatataagaaggtagtgaacgtaagtgacctttacaagaccccctgcaccaagagatttgagatgactcttccattccagcagtttgaaatccagggtattggaaactatcaacaatgccatcaaagcatcctggagctcttcaacaccagttactgcccttactcccagtgtgccttcaatgggattttcttgccaccactccagggggattttggggcattttcagctttttactttgtgatgaagtttttaaacttgacatcagagaaagtctctcaggaaaaggtgactgagatgatgaaaaagttctgtgctcagccttgggaggagataaaaacatcttacgctggagtaaaggagaagtacctgagtgaatactgcttttctggtacctacattctctccctccttctgcaaggctatcatttcacagctgattcctgggagcacatccatttcattggcaagatccagggcagcgacgccggctggactttgggctacatgctgaacctgaccaacatgatcccagctgagcaaccattgtccacacctctctcccactccacctatgtcttcctcatggttctattctccctggtccttttcacagtggccatcataggcttgcttatctttcacaagccttcatatttctggaaagatatggtatagcaaaagcagctgaaatatgctggctggagtgaggaaaaaaatcgtccagggagcattttcctccatcgcagtgttcaaggccatccttccctgtctgccagggccagtcttgacgagtgtgaagcttccttggcttttactgaagcctttcttttggaggtattcaatatcctttgcctcaaggacttcggcagatactgtctctttcatgagtttttcccagctacacctttctcctttgtactttgtgcttgtataggttttaaagacctgacacctttcataatctttgctttataaaagaacaatattgactttgtctagaagaactgagagtcttgagtcctgtgataggaggctgagctggctgaaagaagaatctcaggaactggttcagttgtactctttaagaacccctttctctctcctgtttgccatccattaagaaagccatatgatgcctttggagaaggcagacacacattccattcccagcctgctctgtgggtaggagaattttctacagtaggcaaatatgtgctaaagccaaagagttttataaggaaatatatgtgctcatgcagtcaatacagttctcaatcccacccaaagcaggtatgtcaataaatcacatattcctaggtgatacccaaatgctacagagtggaacactcagacctgagatttgcaaaaagcagatgtaaatatatgcattcaaacatcagggcttactatgaggtaggtggtatatacatgtcacaaataaaaatacagttacaactcagggtcacaaaaaatgcatcttccaatgcatatttttattatggtaaaatatacataaatataattcaccattttaacatttaattcatattaaatacgtacaaatcagtgacatttagtacattcacagtgttgtgccaccatcaccactatttagttccagaacatttgcatcatcaatacattgtctagagacaagactatcctgggtaggcagaaaccatagatcttttgtgtttacagctatggaaaccaactgtaccataaagatagttcactgagttttaaagccaagccacatcttatttttccaaggtttaatttagtgagagggcagcattagtgtggagtggcatgcttttgccctatcgtggaatttacacatcagaatgtgcaggatccaagtctgaaagtgttgccacccgtcacacaacatgggctttgtttgcttattccatgaagcagcagctatagaccttaccatggaaacatgaagagaccctgcacccctttccttaaggattgctgcaagagttacctgttgagcaggattgactggtgatgtttcattctgaccttgtcccaagctctccatctctagatctggggactgactgttgagctgatggggaaagaaaagctctcacacaaaccggaagccaaatgtcccctatctcttgaatgatcaagtcacttttgacaacatccaggtgaatataaaaacttaataaagctgtggaaaggaactcttaatcttcttttctgctacttaggttaaattcactagatcttgattaggaatcaaaattcgaattgggacatgttcaaattctttcttgtggtagttgcctatactgtcatcgctgctgttggttgagcatttgtggtgtaccacgctgtgtgctcaagggtattacattcatcttctcatttaatcctcacaacaatctgaagaaggtaggtattacaattcccacttcatagaaacagaaactgaggttcagagaggttaagtcatttgcccaaatggctgagccaaagcctaccatgtacctaacctttattttctttcccgaacataccaggctgtctcctcataacttccaagcatgcacttaaaactccacatgaatacaaggttcatgggacttggtattcatagaaagggaggcagaaagctggtctgttcctgataggcttgtaatttaatatcattctgttcatgtgctttggatggaagcacatctggcatatgatgctaatcagtggttcccatacccctggcttcctaattttaatgtttgctcacagcatagtagattgacatcaaatagtggccgatgatgatgaaaataaaggtcaaataagttgagccaataacagccgcttttttccttctgtctgcgtatacaaagcactgtcatgcacacaatctattctgaccctcacaacaacccataagggtgtaaatagtatttccattttacaaatgaggatcacacaaactactacattgcagagcagatactccaactcatgtcttctggttgaagcctattgctttttcttttctaaacactttccctcagcaagttggaattagacttcacaagtctccttcagagaacacaaatcttttcttattccattcctgtttggttgcctacgtccaatctccccctccccagagatgccaaaaaaaaaatcctttaaggtatttgggagccaaactcaacttgttaaaatctcaaattatggagacaatcagcagacacaacctaaccccaattattttggcaggaaggttggtttagaggcagatccagcaatctgctttgggccactctgggtggggtaggtgaaataagattggtcactgttaactaattttaatattggattggccattggttatcactgattaccattctcccctggattttcacccaggactcaaaacttggttctgctaaccctgttcctttatgaggaaccttttaaagattcctttataaggtgggagttttttttctatgaacctataggggaga

SEQ ID NO: 384967 - DNA, 4513 bp, Homo sapiens
agctttccaggtgattcccgtatgattccaatgtgtagacaagtttggggactatagattaatggctttctattccttccatagtgtctcagctacttcagcatgtggttctgaatcttggctgcacattagaatcacctaagaagcttctaaacaatactgcttcttgggccctgttctgcataagtatgggattgtgctggatgcgggttcttctcacacaagtttatacatctataagtggccagcagaaaaggagaatgacacaggcgtggtgcatcaagtagaagaatgcagggttaaaggtcctggaatctcaaaatttgttcagaaagtaaatgaaataggcatttacctgactgattgcatggaaagagctagggaagtgattccaaggtcccagcaccaagagacacccgtttacctgggagccacggcaggcatgcggttgctcagcacctattatatgtcaggcactgttctaagtactgaggatacaacagtgaacaggacaaagtctctgacttcatggagcttgtgttctaccggatgtgcaaaggatggaaagtgaagagttggcagacagggttctggatgtggtggagaggagcctcagcaactacccctttgacttccagggtgccaggatcattactggccaagaggaaggtgcctatggctggattactatcaactatctgctgggcaaattcagtcagaaaacaaggtggttcagcatagtcccatatgaaaccaataatcaggaaacctttggagctttggaccttgggggagcctctacacaagtcacttttgtaccccaaaaccagactatcgagtccccagataatgctctgcaatttcgcctctatggcaaggactacaatgtctacacacatagcttcttgtgctatgggaaggatcaggcactctggcagaaactggccaaggacattcaggttgcaagtaatgaaattctcagggacccatgctttcatcctggatataagaaggtagtgaacgtaagtgacctttacaagaccccctgcaccaagagatttgagatgactcttccattccagcagtttgaaatccagggtattggaaactatcaacaatgccatcaaagcatcctggagctcttcaacaccagttactgcccttactcccagtgtgccttcaatgggattttcttgccaccactccagggggattttggggcattttcagctttttactttgtgatgaagtttttaaacttgacatcagagaaagtctctcaggaaaaggtgactgagatgatgaaaaagttctgtgctcagccttgggaggagataaaaacatcttacgctggagtaaaggagaagtacctgagtgaatactgcttttctggtacctacattctctccctccttctgcaaggctatcatttcacagctgattcctgggagcacatccatttcattggcaagatccagggcagcgacgccggctggactttgggctacatgctgaacctgaccaacatgatcccagctgagcaaccattgtccacacctctctcccactccacctatgtcttcctcatggttctattctccctggtccttttcacagtggccatcataggcttgcttatctttcacaagccttcatatttctggaaagatatggtatagcaaaagcagctgaaatatgctggctggagtgaggaaaaaaatcgtccagggagcattttcctccatcgcagtgttcaaggccatccttccctgtctgccagggccagtcttgacgagtgtgaagcttccttggcttttactgaagcctttcttttggaggtattcaatatcctttgcctcaaggacttcggcagatactgtctctttcatgagtttttcccagctacacctttctcctttgtactttgtgcttgtataggttttaaagacctgacacctttcataatctttgctttataaaagaacaatattgactttgtctagaagaactgagagtcttgagtcctgtgataggaggctgagctggctgaaagaagaatctcaggaactggttcagttgtactctttaagaacccctttctctctcctgtttgccatccattaagaaagccatatgatgcctttggagaaggcagacacacattccattcccagcctgctctgtgggtaggagaattttctacagtaggcaaatatgtgctaaagccaaagagttttataaggaaatatatgtgctcatgcagtcaatacagttctcaatcccacccaaagcaggtatgtcaataaatcacatattcctaggtgatacccaaatgctacagagtggaacactcagacctgagatttgcaaaaagcagatgtaaatatatgcattcaaacatcagggcttactatgaggtaggtggtatatacatgtcacaaataaaaatacagttacaactcagggtcacaaaaaatgcatcttccaatgcatatttttattatggtaaaatatacataaatataattcaccattttaacatttaattcatattaaatacgtacaaatcagtgacatttagtacattcacagtgttgtgccaccatcaccactatttagttccagaacatttgcatcatcaatacattgtctagagacaagactatcctgggtaggcagaaaccatagatcttttgtgtttacagctatggaaaccaactgtaccataaagatagttcactgagttttaaagccaagccacatcttatttttccaaggtttaatttagtgagagggcagcattagtgtggagtggcatgcttttgccctatcgtggaatttacacatcagaatgtgcaggatccaagtctgaaagtgttgccacccgtcacacaacatgggctttgtttgcttattccatgaagcagcagctatagaccttaccatggaaacatgaagagaccctgcacccctttccttaaggattgctgcaagagttacctgttgagcaggattgactggtgatgtttcattctgaccttgtcccaagctctccatctctagatctggggactgactgttgagctgatggggaaagaaaagctctcacacaaaccggaagccaaatgtcccctatctcttgaatgatcaagtcacttttgacaacatccaggtgaatataaaaacttaataaagctgtggaaaggaactcttaatcttcttttctgctacttaggttaaattcactagatcttgattaggaatcaaaattcgaattgggacatgttcaaattctttcttgtggtagttgcctatactgtcatcgctgctgttggttgagcatttgtggtgtaccacgctgtgtgctcaagggtattacattcatcttctcatttaatcctcacaacaatctgaagaaggtaggtattacaattcccacttcatagaaacagaaactgaggttcagagaggttaagtcatttgcccaaatggctgagccaaagcctaccatgtacctaacctttattttctttcccgaacataccaggctgtctcctcataacttccaagcatgcacttaaaactccacatgaatacaaggttcatgggacttggtattcatagaaagggaggcagaaagctggtctgttcctgataggcttgtaatttaatatcattctgttcatgtgctttggatggaagcacatctggcatatgatgctaatcagtggttcccatacccctggcttcctaattttaatgtttgctcacagcatagtagattgacatcaaatagtggccgatgatgatgaaaataaaggtcaaataagttgagccaataacagccgcttttttccttctgtctgcgtatacaaagcactgtcatgcacacaatctattctgaccctcacaacaacccataagggtgtaaatagtatttccattttacaaatgaggatcacacaaactactacattgcagagcagatactccaactcatgtcttctggttgaagcctattgctttttcttttctaaacactttccctcagcaagttggaattagacttcacaagtctccttcagagaacacaaatcttttcttattccattcctgtttggttgcctacgtccaatctccccctccccagagatgccaaaaaaaaaatcctttaaggtatttgggagccaaactcaacttgttaaaatctcaaattatggagacaatcagcagacacaacctaaccccaattattttggcaggaaggttggtttagaggcagatccagcaatctgctttgggccactctgggtggggtaggtgaaataagattggtcactgttaactaattttaatattggattggccattggttatcactgattaccattctcccctggattttcacccaggactcaaaacttggttctgctaaccctgttcctttatgaggaaccttttaaagattcctttataaggtgggagttttttttctatgaacctataggggaga

SEQ ID NO: 384968 - DNA, 4484 bp, Homo sapiens
agggaaaaagggagaaagagagagagattggaatatacatggcttcaaggatgcaaaaaattacaacctggaaaaggcttcgagtaactttaggaaaatgagctgctggactcctcagtcaatctgtcctttctagtcaatgaaaaagacagggtttgaggttccttccgaaacggggccggctaatttagcccctcccacgagcccaagggtctgttatatctctgtttccttgaggacctctctcacggagacggaccacagcaagcagaggctgggggggggaaagacgaggaaagaggaggaaaacaaaagctgctacttatggaagatacaaaggtatgggattgtgctggatgcgggttcttctcacacaagtttatacatctataagtggccagcagaaaaggagaatgacacaggcgtggtgcatcaagtagaagaatgcagggttaaaggtcctggaatctcaaaatttgttcagaaagtaaatgaaataggcatttacctgactgattgcatggaaagagctagggaagtgattccaaggtcccagcaccaagagacacccgtttacctgggagccacggcaggcatgcggttgctcagggtgccaggatcattactggccaagaggaaggtgcctatggctggattactatcaactatctgctgggcaaattcagtcagaaaacaaggtggttcagcatagtcccatatgaaaccaataatcaggaaacctttggagctttggaccttgggggagcctctacacaagtcacttttgtaccccaaaaccagactatcgagtccccagataatgctctgcaatttcgcctctatggcaaggactacaatgtctacacacatagcttcttgtgctatgggaaggatcaggcactctggcagaaactggccaaggacattcaggttgcaagtaatgaaattctcagggacccatgctttcatcctggatataagaaggtagtgaacgtaagtgacctttacaagaccccctgcaccaagagatttgagatgactcttccattccagcagtttgaaatccagggtattggaaactatcaacaatgccatcaaagcatcctggagctcttcaacaccagttactgcccttactcccagtgtgccttcaatgggattttcttgccaccactccagggggattttggggcattttcagctttttactttgtgatgaagtttttaaacttgacatcagagaaagtctctcaggaaaaggtgactgagatgatgaaaaagttctgtgctcagccttgggaggagataaaaacatcttacgctggagtaaaggagaagtacctgagtgaatactgcttttctggtacctacattctctccctccttctgcaaggctatcatttcacagctgattcctgggagcacatccatttcattggcaagatccagggcagcgacgccggctggactttgggctacatgctgaacctgaccaacatgatcccagctgagcaaccattgtccacacctctctcccactccacctatgtcttcctcatggttctattctccctggtccttttcacagtggccatcataggcttgcttatctttcacaagccttcatatttctggaaagatatggtatagcaaaagcagctgaaatatgctggctggagtgaggaaaaaaatcgtccagggagcattttcctccatcgcagtgttcaaggccatccttccctgtctgccagggccagtcttgacgagtgtgaagcttccttggcttttactgaagcctttcttttggaggtattcaatatcctttgcctcaaggacttcggcagatactgtctctttcatgagtttttcccagctacacctttctcctttgtactttgtgcttgtataggttttaaagacctgacacctttcataatctttgctttataaaagaacaatattgactttgtctagaagaactgagagtcttgagtcctgtgataggaggctgagctggctgaaagaagaatctcaggaactggttcagttgtactctttaagaacccctttctctctcctgtttgccatccattaagaaagccatatgatgcctttggagaaggcagacacacattccattcccagcctgctctgtgggtaggagaattttctacagtaggcaaatatgtgctaaagccaaagagttttataaggaaatatatgtgctcatgcagtcaatacagttctcaatcccacccaaagcaggtatgtcaataaatcacatattcctaggtgatacccaaatgctacagagtggaacactcagacctgagatttgcaaaaagcagatgtaaatatatgcattcaaacatcagggcttactatgaggtaggtggtatatacatgtcacaaataaaaatacagttacaactcagggtcacaaaaaatgcatcttccaatgcatatttttattatggtaaaatatacataaatataattcaccattttaacatttaattcatattaaatacgtacaaatcagtgacatttagtacattcacagtgttgtgccaccatcaccactatttagttccagaacatttgcatcatcaatacattgtctagagacaagactatcctgggtaggcagaaaccatagatcttttgtgtttacagctatggaaaccaactgtaccataaagatagttcactgagttttaaagccaagccacatcttatttttccaaggtttaatttagtgagagggcagcattagtgtggagtggcatgcttttgccctatcgtggaatttacacatcagaatgtgcaggatccaagtctgaaagtgttgccacccgtcacacaacatgggctttgtttgcttattccatgaagcagcagctatagaccttaccatggaaacatgaagagaccctgcacccctttccttaaggattgctgcaagagttacctgttgagcaggattgactggtgatgtttcattctgaccttgtcccaagctctccatctctagatctggggactgactgttgagctgatggggaaagaaaagctctcacacaaaccggaagccaaatgtcccctatctcttgaatgatcaagtcacttttgacaacatccaggtgaatataaaaacttaataaagctgtggaaaggaactcttaatcttcttttctgctacttaggttaaattcactagatcttgattaggaatcaaaattcgaattgggacatgttcaaattctttcttgtggtagttgcctatactgtcatcgctgctgttggttgagcatttgtggtgtaccacgctgtgtgctcaagggtattacattcatcttctcatttaatcctcacaacaatctgaagaaggtaggtattacaattcccacttcatagaaacagaaactgaggttcagagaggttaagtcatttgcccaaatggctgagccaaagcctaccatgtacctaacctttattttctttcccgaacataccaggctgtctcctcataacttccaagcatgcacttaaaactccacatgaatacaaggttcatgggacttggtattcatagaaagggaggcagaaagctggtctgttcctgataggcttgtaatttaatatcattctgttcatgtgctttggatggaagcacatctggcatatgatgctaatcagtggttcccatacccctggcttcctaattttaatgtttgctcacagcatagtagattgacatcaaatagtggccgatgatgatgaaaataaaggtcaaataagttgagccaataacagccgcttttttccttctgtctgcgtatacaaagcactgtcatgcacacaatctattctgaccctcacaacaacccataagggtgtaaatagtatttccattttacaaatgaggatcacacaaactactacattgcagagcagatactccaactcatgtcttctggttgaagcctattgctttttcttttctaaacactttccctcagcaagttggaattagacttcacaagtctccttcagagaacacaaatcttttcttattccattcctgtttggttgcctacgtccaatctccccctccccagagatgccaaaaaaaaaatcctttaaggtatttgggagccaaactcaacttgttaaaatctcaaattatggagacaatcagcagacacaacctaaccccaattattttggcaggaaggttggtttagaggcagatccagcaatctgctttgggccactctgggtggggtaggtgaaataagattggtcactgttaactaattttaatattggattggccattggttatcactgattaccattctcccctggattttcacccaggactcaaaacttggttctgctaaccctgttcctttatgaggaaccttttaaagattcctttataaggtgggagttttttttctatgaacctataggggaga

SEQ ID NO: 384969 - DNA, 2048 bp, Homo sapiens
  misc_feature (1990)..(1990): n is a, c, g, or t
agggaaaaagggagaaagagagagagattggaatatacatggcttcaaggatgcaaaaaattacaacctggaaaaggcttcgagtaactttaggaaaatgagctgctggactcctcagtcaatctgtcctttctagtcaatgaaaaagacagggtttgaggttccttccgaaacggggccggctaatttagcccctcccacgagcccaagggtctgttatatctctgtttccttgaggacctctctcacggagacggaccacagcaagcagaggctgggggggggaaagacgaggaaagaggaggaaaacaaaagctgctacttatggaagatacaaaggagtctaacgtgaagacattttgctccaagaatatcctagccatccttggcttctcctctatcatagctgtgatagctttgcttgctgtggggttgacccagaacaaagcattgccagaaaacgttaagtatgggattgtgctggatgcgggttcttctcacacaagtttatacatctataagtggccagcagaaaaggagaatgacacaggcgtggtgcatcaagtagaagaatgcagggttaaaggtcctggaatctcaaaatttgttcagaaagtaaatgaaataggcatttacctgactgattgcatggaaagagctagggaagtgattccaaggtcccagcaccaagagacacccgtttacctgggagccacggcaggcatgcggttgctcaggatggaaagtgaagagttggcagacagggttctggatgtggtggagaggagcctcagcaactacccctttgacttccagggtgccaggatcattactggccaagaggaaggtgcctatggctggattactatcaactatctgctgggcaaattcagtcagaaaacaaggtggttcagcatagtcccatatgaaaccaataatcaggaaacctttggagctttggaccttgggggagcctctacacaagtcacttttgtaccccaaaaccagactatcgagtccccagataatgctctgcaatttcgcctctatggcaaggactacaatgtctacacacatagcttcttgtgctatgggaaggatcaggcactctggcagaaactggccaaggacattcaggttgcaagtaatgaaattctcagggacccatgctttcatcctggatataagaaggtagtgaacgtaagtgacctttacaagaccccctgcaccaagagatttgagatgactcttccattccagcagtttgaaatccagggtattggaaactatcaacaatgccatcaaagcatcctggagctcttcaacaccagttactgcccttactcccagtgtgccttcaatgggattttcttgccaccactccagggggattttggggcattttcagctttttactttgtgatgaagtttttaaacttgacatcagagaaagtctctcaggaaaaggtgactgagatgatgaaaaagttctgtgctcagccttgggaggagataaaaacatcttacgctggagtaaaggagaagtacctgagtgaatactgcttttctggtacctacattctctccctccttctgcaaggctatcatttcacagctgattcctgggagcacatccatttcattggcaagatccagggcagcgacgccggctggactttgggctacatgctgaacctgaccaacatgatcccagctgagcaaccattgtccacacctctctcccactccacctatgtcttcctcatggttctattctccctggtccttttcacagtggccatcataggcttgcttatctttcacaagccttcatatttctggaaagatatggtatagcaaaagcagctgaaatatgctggctggagtgaggaaaaaaatcgtccagggagcattttcctccatcgcagtgttcaaggccatccttccctgtctgccagggccagtcttgacgagtgtgaaaaggaccagngagaatagaaccatgaggaaacataggtggagtgggagagaggtgtgacaatgtttgc

SEQ ID NO: 384970 - DNA, 1399 bp, Homo sapiens
ggcggtaggagttcggcggaccgagaggttccgcgcccacttcgcggcccagaggactgagcccggcctccggtgcaaggaaaccccagaggccggaactagaattgcaaattttttttcaccccggattccaacggcattctgttataagcaacagagaatgaacgaagacagaaaattggaaccaagaagtgggattttgctgatgacaaatacctgaaaatggggaagcagctttggaactaggttctcactctgttacccagactggagtgcagtgacacgattacagctcattacagcctcaatctcccaggctcaagtgatcttcccacctcagcctcctgagtagctgggactgcaggtacaaaattcagtaggacacgactttctgagtcatatgctggatttgaggagatactgaagccacaagactgaaataacttttaaactgtgggtgatttggctaaaagctactctcatctattatatattcatcttactagttttgctctcagaggaagttcctgtttccaaggacaatgatttaaggcattgaagtggaactgagacacttggatcaaatccctgttctgccacgtgcaagagtctaacgtgaagacattttgctccaagaatatcctagccatccttggcttctcctctatcatagctgtgatagctttgcttgctgtggggttgacccagaacaaagcattgccagaaaacgttaagtatgggattgtgctggatgcgggttcttctcacacaagtttatacatctataagtggccagcagaaaaggagaatgacacaggcgtggtgcatcaagtagaagaatgcagggttaaaggtcctggaatctcaaaatttgttcagaaagtaaatgaaataggcatttacctgactgattgcatggaaagagctagggaagtgattccaaggtcccagcaccaagagacacccgtttacctgggagccacggcaggcatgcggttgctcaggatggaaagtgaagagttggcagacagggttctggatgtggtggagaggagcctcagcaactacccctttgacttccagggtgccaggatcattactggccaagaggaaggtgcctatggctggattactatcaactatctgctgggcaaattcagtcaggtgaatatctcacagcatccatggaggtggctctctggaggccaatgccattgctatctcaggcagtacttgggtcgctagccagaatgaatgaatgaatgatagatggatggatggatggatgactggatgaatgaatttactctcacatttgtaagggtcaccagaggtataattctcttacaagaccttctactattgggagaataaggacatgtctttaccttagggaggc

SEQ ID NO: 384971 - DNA, 2061 bp, Homo sapiens
cccgggtgtacgtgtaaaattatgatcaaataaatttgtatgccttttctcctattaacctgccttttttgtcagcgattgtcagtgaaacttcagagggcaaaggggaagttttccttggcccctccagttttggtgctgtgaacaggataccaaagctgctctgttcttctggaagctgcaatgaagggaaccaaggacctgacaagccagcagaaggagtctaacgtgaagacattttgctccaagaatatcctagccatccttggcttctcctctatcatagctgtgatagctttgcttgctgtggggttgacccagaacaaagcattgccagaaaacgttaagtatgggattgtgctggatgcgggttcttctcacacaagtttatacatctataagtggccagcagaaaaggagaatgacacaggcgtggtgcatcaagtagaagaatgcagggttaaaggtcctggaatctcaaaatttgttcagaaagtaaatgaaataggcatttacctgactgattgcatggaaagagctagggaagtgattccaaggtcccagcaccaagagacacccgtttacctgggagccacggcaggcatgcggttgctcaggatggaaagtgaagagttggcagacagggttctggatgtggtggagaggagcctcagcaactacccctttgacttccagggtgccaggatcattactggccaagaggaaggtgcctatggctggattactatcaactatctgctgggcaaattcagtcagaaaacaaggtggttcagcatagtcccatatgaaaccaataatcaggaaacctttggagctttggaccttgggggagcctctacacaagtcacttttgtaccccaaaaccagactatcgagtccccagataatgctctgcaatttcgcctctatggcaaggactacaatgtctacacacatagcttcttgtgctatgggaaggatcaggcactctggcagaaactggccaaggacattcaggttgcaagtaatgaaattctcagggacccatgctttcatcctggatataagaaggtagtgaacgtaagtgacctttacaagaccccctgcaccaagagatttgagatgactcttccattccagcagtttgaaatccagggtattggaaactatcaacaatgccatcaaagcatcctggagctcttcaacaccagttactgcccttactcccagtgtgccttcaatgggattttcttgccaccactccagggggattttggggcattttcagctttttactttgtgatgaagtttttaaacttgacatcagagaaagtctctcaggaaaaggtgactgagatgatgaaaaagttctgtgctcagccttgggaggagataaaaacatcttacgctggagtaaaggagaagtacctgagtgaatactgcttttctggtacctacattctctccctccttctgcaaggctatcatttcacagctgattcctgggagcacatccatttcattggcaagatccagggcagcgacgccggctggactttgggctacatgctgaacctgaccaacatgatcccagctgagcaaccattgtccacacctctctcccactccacctatgtcttcctcatggttctattctccctggtccttttcacagtggccatcataggcttgcttatctttcacaagccttcatatttctggaaagatatggtatagcaaaagcagctgaaatatgctggctggagtgaggaaaaaaatcgtccagggagcattttcctccatcgcagtgttcaaggccatccttccctgtctgccagggccagtcttgacgagtgtgaagcttccttggcttttactgaagcctttcttttggaggtattcaatatcctttgcctcaaggacttcggcagatactgtctctttcatgagtttttcccagctacacctttctcctttgtactttgtgcttgtataggttttaaagacctgacacctttcataatctttgctttataaaagaacaatattgactttgtctag

SEQ ID NO: 384972 - DNA, 588 bp, Homo sapiens
ggcggtaggagttcggcggaccgagaggttccgcgcccacttcgcggcccagaggactgagcccggcctccggtgcaaggaaaccccagaggccggaactagaattgcaaattttttttcaccccggattccaacggcattctgttataagcaacagagaatgaacgaagacagaaaattggaaccaagaagtgggattttgctgatgacaaatacctgaaaatggggaagcagctttggaactagagccccaactttttactgagcacaatatagccaaaagatgacattgcccagcctctttcgcagatagctgtggctattccaggatcccagaaaatggtagccacaaatgaaggcctctgaagcagaactgccctggatctttactgtgctggtgccctctcggactttctcttgcccttctgtctctggcctctcattctcccccgagaaatggaaactagaattcctcttcccccaggtgggtcatagaagccagcaacaaaacctaaaaatatcactttaactttctctttctcccagcctttctgtataaaaactggccataaagaaatgatctgaaat

SEQ ID NO: 384973 - DNA, 4576 bp, Homo sapiens
agggaaaaagggagaaagagagagagattggaatatacatggcttcaaggatgcaaaaaattacaacctggaaaaggcttcgagtaactttaggaaaatgagctgctggactcctcagtcaatctgtcctttctagtcaatgaaaaagacagggtttgaggttccttccgaaacggggccggctaatttagcccctcccacgagcccaagggtctgttatatctctgtttccttgaggacctctctcacggagacggaccacagcaagcagaggctgggggggggaaagacgaggaaagaggaggaaaacaaaagctgctacttatggaagatacaaaggagtctaacgtgaagacattttgctccaagaatatcctagccatccttggcttctcctctatcatagctgtgatagctttgcttgctgtggggttgacccagaacaaagcattgccagaaaacgttaagtatgggattgtgctggatgcgggttcttctcacacaagtttatacatctataagtggccagcagaaaaggagaatgacacaggcgtggtgcatcaagtagaagaatgcagggttaaaggtcctggaatctcaaaatttgttcagaaagtaaatgaaataggcatttacctgactgattgcatggaaagagctagggaagtgattccaaggtcccagcaccaagagacacccgtttacctgggagccacggcaggcatgcggttgctcaggatggaaagtgaagagttggcagacagggttctggatgtggtggagaggagcctcagcaactacccctttgacttccagggtgccaggatcattactggccaagaggaaggtgcctatggctggattactatcaactatctgctgggcaaattcagtcagaaaacaaggtggttcagcatagtcccatatgaaaccaataatcaggaaacctttggagctttggaccttgggggagcctctacacaagtcacttttgtaccccaaaaccagactatcgagtccccagataatgctctgcaatttcgcctctatggcaaggactacaatgtctacacacatagcttcttgtgctatgggaaggatcaggcactctggcagaaactggccaaggacattcaggttgcaagtaatgaaattctcagggacccatgctttcatcctggatataagaaggtagtgaacgtaagtgacctttacaagaccccctgcaccaagagatttgagatgactcttccattccagcagtttgaaatccagggtattggaaactatcaacaatgccatcaaagcatcctggagctcttcaacaccagttactgcccttactcccagtgtgccttcaatgggattttcttgccaccactccagggggattttggggcattttcagctttttactttgtgatgaagtttttaaacttgacatcagagaaagtctctcaggaaaaggtgactgagatgatgaaaaagttctgtgctcagccttgggaggagataaaaacatcttacgctggagtaaaggagaagtacctgagtgaatactgcttttctggtacctacattctctccctccttctgcaaggctatcatttcacagctgattcctgggagcacatccatttcattggcaagatccagggcagcgacgccggctggactttgggctacatgctgaacctgaccaacatgatcccagctgagcaaccattgtccacacctctctcccactccacctatgtcttcctcatggttctattctccctggtccttttcacagtggccatcataggcttgcttatctttcacaagccttcatatttctggaaagatatggtatagcaaaagcagctgaaatatgctggctggagtgaggaaaaaaatcgtccagggagcattttcctccatcgcagtgttcaaggccatccttccctgtctgccagggccagtcttgacgagtgtgaagcttccttggcttttactgaagcctttcttttggaggtattcaatatcctttgcctcaaggacttcggcagatactgtctctttcatgagtttttcccagctacacctttctcctttgtactttgtgcttgtataggttttaaagacctgacacctttcataatctttgctttataaaagaacaatattgactttgtctagaagaactgagagtcttgagtcctgtgataggaggctgagctggctgaaagaagaatctcaggaactggttcagttgtactctttaagaacccctttctctctcctgtttgccatccattaagaaagccatatgatgcctttggagaaggcagacacacattccattcccagcctgctctgtgggtaggagaattttctacagtaggcaaatatgtgctaaagccaaagagttttataaggaaatatatgtgctcatgcagtcaatacagttctcaatcccacccaaagcaggtatgtcaataaatcacatattcctaggtgatacccaaatgctacagagtggaacactcagacctgagatttgcaaaaagcagatgtaaatatatgcattcaaacatcagggcttactatgaggtaggtggtatatacatgtcacaaataaaaatacagttacaactcagggtcacaaaaaatgcatcttccaatgcatatttttattatggtaaaatatacataaatataattcaccattttaacatttaattcatattaaatacgtacaaatcagtgacatttagtacattcacagtgttgtgccaccatcaccactatttagttccagaacatttgcatcatcaatacattgtctagagacaagactatcctgggtaggcagaaaccatagatcttttgtgtttacagctatggaaaccaactgtaccataaagatagttcactgagttttaaagccaagccacatcttatttttccaaggtttaatttagtgagagggcagcattagtgtggagtggcatgcttttgccctatcgtggaatttacacatcagaatgtgcaggatccaagtctgaaagtgttgccacccgtcacacaacatgggctttgtttgcttattccatgaagcagcagctatagaccttaccatggaaacatgaagagaccctgcacccctttccttaaggattgctgcaagagttacctgttgagcaggattgactggtgatgtttcattctgaccttgtcccaagctctccatctctagatctggggactgactgttgagctgatggggaaagaaaagctctcacacaaaccggaagccaaatgtcccctatctcttgaatgatcaagtcacttttgacaacatccaggtgaatataaaaacttaataaagctgtggaaaggaactcttaatcttcttttctgctacttaggttaaattcactagatcttgattaggaatcaaaattcgaattgggacatgttcaaattctttcttgtggtagttgcctatactgtcatcgctgctgttggttgagcatttgtggtgtaccacgctgtgtgctcaagggtattacattcatcttctcatttaatcctcacaacaatctgaagaaggtaggtattacaattcccacttcatagaaacagaaactgaggttcagagaggttaagtcatttgcccaaatggctgagccaaagcctaccatgtacctaacctttattttctttcccgaacataccaggctgtctcctcataacttccaagcatgcacttaaaactccacatgaatacaaggttcatgggacttggtattcatagaaagggaggcagaaagctggtctgttcctgataggcttgtaatttaatatcattctgttcatgtgctttggatggaagcacatctggcatatgatgctaatcagtggttcccatacccctggcttcctaattttaatgtttgctcacagcatagtagattgacatcaaatagtggccgatgatgatgaaaataaaggtcaaataagttgagccaataacagccgcttttttccttctgtctgcgtatacaaagcactgtcatgcacacaatctattctgaccctcacaacaacccataagggtgtaaatagtatttccattttacaaatgaggatcacacaaactactacattgcagagcagatactccaactcatgtcttctggttgaagcctattgctttttcttttctaaacactttccctcagcaagttggaattagacttcacaagtctccttcagagaacacaaatcttttcttattccattcctgtttggttgcctacgtccaatctccccctccccagagatgccaaaaaaaaaatcctttaaggtatttgggagccaaactcaacttgttaaaatctcaaattatggagacaatcagcagacacaacctaaccccaattattttggcaggaaggttggtttagaggcagatccagcaatctgctttgggccactctgggtggggtaggtgaaataagattggtcactgttaactaattttaatattggattggccattggtaccaatctgaagtgggagcggccg

SEQ ID NO: 384974 - DNA, 3196 bp, Homo sapiens
agggaaaaagggagaaagagagagagattggaatatacatggcttcaaggatgcaaaaaattacaacctggaaaaggcttcgagtaactttaggaaaatgagctgctggactcctcagtcaatctgtcctttctagtcaatgaaaaagacagggtttgaggttccttccgaaacggggccggctaatttagcccctcccacgagcccaagggtctgttatatctctgtttccttgaggacctctctcacggagacggaccacagcaagcagaggctgggggggggaaagacgaggaaagaggaggaaaacaaaagctgctacttatggaagatacaaaggagtctaacgtgaagacattttgctccaagaatatcctagccatccttggcttctcctctatcatagctgtgatagctttgcttgctgtggggttgacccagaacaaagcattgccagaaaacgttaagtatgggattgtgctggatgcgggttcttctcacacaagtttatacatctataagtggccagcagaaaaggagaatgacacaggcgtggtgcatcaagtagaagaatgcagggttaaaggtcctggaatctcaaaatttgttcagaaagtaaatgaaataggcatttacctgactgattgcatggaaagagctagggaagtgattccaaggtcccagcaccaagagacacccgtttacctgggagccacggcaggcatgcggttgctcaggatggaaagtgaagagttggcagacagggttctggatgtggtggagaggagcctcagcaactacccctttgacttccagggtgccaggatcattactggccaagaggaaggtgcctatggctggattactatcaactatctgctgggcaaattcagtcagaaaacaaggtggttcagcatagtcccatatgaaaccaataatcaggaaacctttggagctttggaccttgggggagcctctacacaagtcacttttgtaccccaaaaccagactatcgagtccccagataatgctctgcaatttcgcctctatggcaaggactacaatgtctacacacatagcttcttgtgctatgggaaggatcaggcactctggcagaaactggccaaggacattcaggttgcaagtaatgaaattctcagggacccatgctttcatcctggatataagaaggtagtgaacgtaagtgacctttacaagaccccctgcaccaagagatttgagatgactcttccattccagcagtttgaaatccagggtattggaaactatcaacaatgccatcaaagcatcctggagctcttcaacaccagttactgcccttactcccagtgtgccttcaatgggattttcttgccaccactccagggggattttggggcattttcagctttttactttgtgatgaagtttttaaacttgacatcagagaaagtctctcaggaaaaggtgactgagatgatgaaaaagttctgtgctcagccttgggaggagataaaaacatcttacgctggagtaaaggagaagtacctgagtgaatactgcttttctggtacctacattctctccctccttctgcaaggctatcatttcacagctgattcctgggagcacatccatttcattggcaagatccagggcagcgacgccggctggactttgggctacatgctgaacctgaccaacatgatcccagctgagcaaccattgtccacacctctctcccactccacctatgtcttcctcatggttctattctccctggtccttttcacagtggccatcataggcttgcttatctttcacaagccttcatatttctggaaagatatggtatagcaaaagcagctgaaatatgctggctggagtgaggaaaaaaatcgtccagggagcattttcctccatcgcagtgttcaaggccatccttccctgtctgccagggccagtcttgacgagtgtgaagcttccttggcttttactgaagcctttcttttggaggtattcaatatcctttgcctcaaggacttcggcagatactgtctctttcatgagtttttcccagctacacctttctcctttgtactttgtgcttgtataggttttaaagacctgacacctttcataatctttgctttataaaagaacaatattgactttgtctagaagaactgagagtcttgagtcctgtgataggaggctgagctggctgaaagaagaatctcaggaactggttcagttgtactctttaagaacccctttctctctcctgtttgccatccattaagaaagccatatgatgcctttggagaaggcagacacacattccattcccagcctgctctgtgggtaggagaattttctacagtaggcaaatatgtgctaaagccaaagagttttataaggaaatatatgtgctcatgcagtcaatacagttctcaatcccacccaaagcaggtatgtcaataaatcacatattcctaggtgatacccaaatgctacagagtggaacactcagacctgagatttgcaaaaagcagatgtaaatatatgcattcaaacatcagggcttactatgaggtaggtggtatatacatgtcacaaataaaaatacagttacaactcagggtcacaaaaaatgcatcttccaatgcatatttttattatggtaaaatatacataaatataattcaccattttaacatttaattcatattaaatacgtacaaatcagtgacatttagtacattcacagtgttgtgccaccatcaccactatttagttccagaacatttgcatcatcaatacattgtctagagacaagactatcctgggtaggcagaaaccatagatcttttgtgtttacagctatggaaaccaactgtaccataaagatagttcactgagttttaaagccaagccacatcttatttttccaagagttacctgttgagcaggattgactggtgatgtttcattctgaccttgtcccaagctctccatctctagatctggggactgactgttgagctgatggggaaagaaaagctctcacacaaaccggaagccaaatgtcccctatctcttgaatgatcaagtcacttttgacaacatccaggtgaatataaaaacttaataaagctgtggaaaggaactcttaatcttcttttctgctacttag

SEQ ID NO: 384975 - DNA, 4568 bp, Homo sapiens
agggaaaaagggagaaagagagagagattggaatatacatggcttcaaggatgcaaaaaattacaacctggaaaaggcttcgagtaactttaggaaaatgagctgctggactcctcagtcaatctgtcctttctagtcaatgaaaaagacagggtttgaggttccttccgaaacggggccggctaatttagcccctcccacgagcccaagggtctgttatatctctgtttccttgaggacctctctcacggagacggaccacagcaagcagaggctgggggggggaaagacgaggaaagaggaggaaaacaaaagctgctacttatggaagatacaaaggagtctaacgtgaagacattttgctccaagaatatcctagccatccttggcttctcctctatcatagctgtgatagctttgcttgctgtggggttgacccagaacaaagcattgccagaaaacgttaagtatgggattgtgctggatgcgggttcttctcacacaagtttatacatctataagtggccagcagaaaaggagaatgacacaggcgtggtgcatcaagtagaagaatgcagggttaaaggtcctggaatctcaaaatttgttcagaaagtaaatgaaataggcatttacctgactgattgcatggaaagagctagggaagtgattccaaggtcccagcaccaagagacacccgtttacctgggagccacggcaggcatgcggttgctcaggatggaaagtgaagagttggcagacagggttctggatgtggtggagaggagcctcagcaactacccctttgacttccagggtgccaggatcattactggccaagaggaaggtgcctatggctggattactatcaactatctgctgggcaaattcagtcagaaaacaaggtggttcagcatagtcccatatgaaaccaataatcaggaaacctttggagctttggaccttgggggagcctctacacaagtcacttttgtaccccaaaaccagactatcgagtccccagataatgctctgcaatttcgcctctatggcaaggactacaatgtctacacacatagcttcttgtgctatgggaaggatcaggcactctggcagaaactggccaaggacattcagcagtttgaaatccagggtattggaaactatcaacaatgccatcaaagcatcctggagctcttcaacaccagttactgcccttactcccagtgtgccttcaatgggattttcttgccaccactccagggggattttggggcattttcagctttttactttgtgatgaagtttttaaacttgacatcagagaaagtctctcaggaaaaggtgactgagatgatgaaaaagttctgtgctcagccttgggaggagataaaaacatcttacgctggagtaaaggagaagtacctgagtgaatactgcttttctggtacctacattctctccctccttctgcaaggctatcatttcacagctgattcctgggagcacatccatttcattggcaagatccagggcagcgacgccggctggactttgggctacatgctgaacctgaccaacatgatcccagctgagcaaccattgtccacacctctctcccactccacctatgtcttcctcatggttctattctccctggtccttttcacagtggccatcataggcttgcttatctttcacaagccttcatatttctggaaagatatggtatagcaaaagcagctgaaatatgctggctggagtgaggaaaaaaatcgtccagggagcattttcctccatcgcagtgttcaaggccatccttccctgtctgccagggccagtcttgacgagtgtgaagcttccttggcttttactgaagcctttcttttggaggtattcaatatcctttgcctcaaggacttcggcagatactgtctctttcatgagtttttcccagctacacctttctcctttgtactttgtgcttgtataggttttaaagacctgacacctttcataatctttgctttataaaagaacaatattgactttgtctagaagaactgagagtcttgagtcctgtgataggaggctgagctggctgaaagaagaatctcaggaactggttcagttgtactctttaagaacccctttctctctcctgtttgccatccattaagaaagccatatgatgcctttggagaaggcagacacacattccattcccagcctgctctgtgggtaggagaattttctacagtaggcaaatatgtgctaaagccaaagagttttataaggaaatatatgtgctcatgcagtcaatacagttctcaatcccacccaaagcaggtatgtcaataaatcacatattcctaggtgatacccaaatgctacagagtggaacactcagacctgagatttgcaaaaagcagatgtaaatatatgcattcaaacatcagggcttactatgaggtaggtggtatatacatgtcacaaataaaaatacagttacaactcagggtcacaaaaaatgcatcttccaatgcatatttttattatggtaaaatatacataaatataattcaccattttaacatttaattcatattaaatacgtacaaatcagtgacatttagtacattcacagtgttgtgccaccatcaccactatttagttccagaacatttgcatcatcaatacattgtctagagacaagactatcctgggtaggcagaaaccatagatcttttgtgtttacagctatggaaaccaactgtaccataaagatagttcactgagttttaaagccaagccacatcttatttttccaaggtttaatttagtgagagggcagcattagtgtggagtggcatgcttttgccctatcgtggaatttacacatcagaatgtgcaggatccaagtctgaaagtgttgccacccgtcacacaacatgggctttgtttgcttattccatgaagcagcagctatagaccttaccatggaaacatgaagagaccctgcacccctttccttaaggattgctgcaagagttacctgttgagcaggattgactggtgatgtttcattctgaccttgtcccaagctctccatctctagatctggggactgactgttgagctgatggggaaagaaaagctctcacacaaaccggaagccaaatgtcccctatctcttgaatgatcaagtcacttttgacaacatccaggtgaatataaaaacttaataaagctgtggaaaggaactcttaatcttcttttctgctacttaggttaaattcactagatcttgattaggaatcaaaattcgaattgggacatgttcaaattctttcttgtggtagttgcctatactgtcatcgctgctgttggttgagcatttgtggtgtaccacgctgtgtgctcaagggtattacattcatcttctcatttaatcctcacaacaatctgaagaaggtaggtattacaattcccacttcatagaaacagaaactgaggttcagagaggttaagtcatttgcccaaatggctgagccaaagcctaccatgtacctaacctttattttctttcccgaacataccaggctgtctcctcataacttccaagcatgcacttaaaactccacatgaatacaaggttcatgggacttggtattcatagaaagggaggcagaaagctggtctgttcctgataggcttgtaatttaatatcattctgttcatgtgctttggatggaagcacatctggcatatgatgctaatcagtggttcccatacccctggcttcctaattttaatgtttgctcacagcatagtagattgacatcaaatagtggccgatgatgatgaaaataaaggtcaaataagttgagccaataacagccgcttttttccttctgtctgcgtatacaaagcactgtcatgcacacaatctattctgaccctcacaacaacccataagggtgtaaatagtatttccattttacaaatgaggatcacacaaactactacattgcagagcagatactccaactcatgtcttctggttgaagcctattgctttttcttttctaaacactttccctcagcaagttggaattagacttcacaagtctccttcagagaacacaaatcttttcttattccattcctgtttggttgcctacgtccaatctccccctccccagagatgccaaaaaaaaaatcctttaaggtatttgggagccaaactcaacttgttaaaatctcaaattatggagacaatcagcagacacaacctaaccccaattattttggcaggaaggttggtttagaggcagatccagcaatctgctttgggccactctgggtggggtaggtgaaataagattggtcactgttaactaattttaatattggattggccattggttatcactgattaccattctcccctggattttcacccaggactcaaaacttggttctgctaaccctgttcctttatgaggaaccttttaaagattcctttataaggtgggagttttttttctatgaacctataggggaga

SEQ ID NO: 384976 - DNA, 4958 bp, Homo sapiens
ggcggtaggagttcggcggaccgagaggttccgcgcccacttcgcggcccagaggactgagcccggcctccggtgcaaggaaaccccagaggccggaactagaattgcaaattttttttcaccccggattccaacggcattctgttataagcaacagagaatgaacgaagacagaaaattggaaccaagaagtgggattttgctgatgacaaatacctgaaaatggggaagcagctttggaactaggttctcactctgttacccagactggagtgcagtgacacgattacagctcattacagcctcaatctcccaggctcaagtgatcttcccacctcagcctcctgagtagctgggactgcaggtacaaaattcagtaggacacgactttctgagtcatatgctggatttgaggagatactgaagccacaagactgaaataacttttaaactgtgggtgatttggctaaaagctactctcatctattatatattcatcttactagttttgctctcagaggaagttcctgtttccaaggacaatgatttaaggcattgaagtggaactgagacacttggatcaaatccctgttctgccacgtgcaagagtctaacgtgaagacattttgctccaagaatatcctagccatccttggcttctcctctatcatagctgtgatagctttgcttgctgtggggttgacccagaacaaagcattgccagaaaacgttaagtatgggattgtgctggatgcgggttcttctcacacaagtttatacatctataagtggccagcagaaaaggagaatgacacaggcgtggtgcatcaagtagaagaatgcagggttaaaggtcctggaatctcaaaatttgttcagaaagtaaatgaaataggcatttacctgactgattgcatggaaagagctagggaagtgattccaaggtcccagcaccaagagacacccgtttacctgggagccacggcaggcatgcggttgctcaggatggaaagtgaagagttggcagacagggttctggatgtggtggagaggagcctcagcaactacccctttgacttccagggtgccaggatcattactggccaagaggaaggtgcctatggctggattactatcaactatctgctgggcaaattcagtcagaaaacaaggtggttcagcatagtcccatatgaaaccaataatcaggaaacctttggagctttggaccttgggggagcctctacacaagtcacttttgtaccccaaaaccagactatcgagtccccagataatgctctgcaatttcgcctctatggcaaggactacaatgtctacacacatagcttcttgtgctatgggaaggatcaggcactctggcagaaactggccaaggacattcaggttgcaagtaatgaaattctcagggacccatgctttcatcctggatataagaaggtagtgaacgtaagtgacctttacaagaccccctgcaccaagagatttgagatgactcttccattccagcagtttgaaatccagggtattggaaactatcaacaatgccatcaaagcatcctggagctcttcaacaccagttactgcccttactcccagtgtgccttcaatgggattttcttgccaccactccagggggattttggggcattttcagctttttactttgtgatgaagtttttaaacttgacatcagagaaagtctctcaggaaaaggtgactgagatgatgaaaaagttctgtgctcagccttgggaggagataaaaacatcttacgctggagtaaaggagaagtacctgagtgaatactgcttttctggtacctacattctctccctccttctgcaaggctatcatttcacagctgattcctgggagcacatccatttcattggcaagatccagggcagcgacgccggctggactttgggctacatgctgaacctgaccaacatgatcccagctgagcaaccattgtccacacctctctcccactccacctatgtcttcctcatggttctattctccctggtccttttcacagtggccatcataggcttgcttatctttcacaagccttcatatttctggaaagatatggtatagcaaaagcagctgaaatatgctggctggagtgaggaaaaaaatcgtccagggagcattttcctccatcgcagtgttcaaggccatccttccctgtctgccagggccagtcttgacgagtgtgaagcttccttggcttttactgaagcctttcttttggaggtattcaatatcctttgcctcaaggacttcggcagatactgtctctttcatgagtttttcccagctacacctttctcctttgtactttgtgcttgtataggttttaaagacctgacacctttcataatctttgctttataaaagaacaatattgactttgtctagaagaactgagagtcttgagtcctgtgataggaggctgagctggctgaaagaagaatctcaggaactggttcagttgtactctttaagaacccctttctctctcctgtttgccatccattaagaaagccatatgatgcctttggagaaggcagacacacattccattcccagcctgctctgtgggtaggagaattttctacagtaggcaaatatgtgctaaagccaaagagttttataaggaaatatatgtgctcatgcagtcaatacagttctcaatcccacccaaagcaggtatgtcaataaatcacatattcctaggtgatacccaaatgctacagagtggaacactcagacctgagatttgcaaaaagcagatgtaaatatatgcattcaaacatcagggcttactatgaggtaggtggtatatacatgtcacaaataaaaatacagttacaactcagggtcacaaaaaatgcatcttccaatgcatatttttattatggtaaaatatacataaatataattcaccattttaacatttaattcatattaaatacgtacaaatcagtgacatttagtacattcacagtgttgtgccaccatcaccactatttagttccagaacatttgcatcatcaatacattgtctagagacaagactatcctgggtaggcagaaaccatagatcttttgtgtttacagctatggaaaccaactgtaccataaagatagttcactgagttttaaagccaagccacatcttatttttccaaggtttaatttagtgagagggcagcattagtgtggagtggcatgcttttgccctatcgtggaatttacacatcagaatgtgcaggatccaagtctgaaagtgttgccacccgtcacacaacatgggctttgtttgcttattccatgaagcagcagctatagaccttaccatggaaacatgaagagaccctgcacccctttccttaaggattgctgcaagagttacctgttgagcaggattgactggtgatgtttcattctgaccttgtcccaagctctccatctctagatctggggactgactgttgagctgatggggaaagaaaagctctcacacaaaccggaagccaaatgtcccctatctcttgaatgatcaagtcacttttgacaacatccaggtgaatataaaaacttaataaagctgtggaaaggaactcttaatcttcttttctgctacttaggttaaattcactagatcttgattaggaatcaaaattcgaattgggacatgttcaaattctttcttgtggtagttgcctatactgtcatcgctgctgttggttgagcatttgtggtgtaccacgctgtgtgctcaagggtattacattcatcttctcatttaatcctcacaacaatctgaagaaggtaggtattacaattcccacttcatagaaacagaaactgaggttcagagaggttaagtcatttgcccaaatggctgagccaaagcctaccatgtacctaacctttattttctttcccgaacataccaggctgtctcctcataacttccaagcatgcacttaaaactccacatgaatacaaggttcatgggacttggtattcatagaaagggaggcagaaagctggtctgttcctgataggcttgtaatttaatatcattctgttcatgtgctttggatggaagcacatctggcatatgatgctaatcagtggttcccatacccctggcttcctaattttaatgtttgctcacagcatagtagattgacatcaaatagtggccgatgatgatgaaaataaaggtcaaataagttgagccaataacagccgcttttttccttctgtctgcgtatacaaagcactgtcatgcacacaatctattctgaccctcacaacaacccataagggtgtaaatagtatttccattttacaaatgaggatcacacaaactactacattgcagagcagatactccaactcatgtcttctggttgaagcctattgctttttcttttctaaacactttccctcagcaagttggaattagacttcacaagtctccttcagagaacacaaatcttttcttattccattcctgtttggttgcctacgtccaatctccccctccccagagatgccaaaaaaaaaatcctttaaggtatttgggagccaaactcaacttgttaaaatctcaaattatggagacaatcagcagacacaacctaaccccaattattttggcaggaaggttggtttagaggcagatccagcaatctgctttgggccactctgggtggggtaggtgaaataagattggtcactgttaactaattttaatattggattggccattggttatcactgattaccattctcccctggattttcacccaggactcaaaacttggttctgctaaccctgttcctttatgaggaaccttttaaagattcctttataaggtgggagttttttttctatgaacctataggggaga

SEQ ID NO: 384977 - DNA, 4633 bp, Homo sapiens
agctttccaggtgattcccgtatgattccaatgtgtagacaagtttggggactatagattaatggctttctattccttccatagtgtctcagctacttcagcatgtggttctgaatcttggctgcacattagaatcacctaagaagcttctaaacaatactgcttcttgggccctgttctgcataaggtctgaatatttctaacatgcaaacagcatgaagagccccgttctagcagggttgttgtcctggtagatcttgtgatcggagtgactccagtgccatcccctcaatgttcctctcaaatactttctcctcatgtttttgaaaattccagtcctttcttttgcaagcctaatatggagatgagtgatgtgatactgataagtttttggtctgtgttgctttcagtatgggattgtgctggatgcgggttcttctcacacaagtttatacatctataagtggccagcagaaaaggagaatgacacaggcgtggtgcatcaagtagaagaatgcagggttaaaggtcctggaatctcaaaatttgttcagaaagtaaatgaaataggcatttacctgactgattgcatggaaagagctagggaagtgattccaaggtcccagcaccaagagacacccgtttacctgggagccacggcaggcatgcggttgctcaggatggaaagtgaagagttggcagacagggttctggatgtggtggagaggagcctcagcaactacccctttgacttccagggtgccaggatcattactggccaagaggaaggtgcctatggctggattactatcaactatctgctgggcaaattcagtcagaaaacaaggtggttcagcatagtcccatatgaaaccaataatcaggaaacctttggagctttggaccttgggggagcctctacacaagtcacttttgtaccccaaaaccagactatcgagtccccagataatgctctgcaatttcgcctctatggcaaggactacaatgtctacacacatagcttcttgtgctatgggaaggatcaggcactctggcagaaactggccaaggacattcaggttgcaagtaatgaaattctcagggacccatgctttcatcctggatataagaaggtagtgaacgtaagtgacctttacaagaccccctgcaccaagagatttgagatgactcttccattccagcagtttgaaatccagggtattggaaactatcaacaatgccatcaaagcatcctggagctcttcaacaccagttactgcccttactcccagtgtgccttcaatgggattttcttgccaccactccagggggattttggggcattttcagctttttactttgtgatgaagtttttaaacttgacatcagagaaagtctctcaggaaaaggtgactgagatgatgaaaaagttctgtgctcagccttgggaggagataaaaacatcttacgctggagtaaaggagaagtacctgagtgaatactgcttttctggtacctacattctctccctccttctgcaaggctatcatttcacagctgattcctgggagcacatccatttcattggcaagatccagggcagcgacgccggctggactttgggctacatgctgaacctgaccaacatgatcccagctgagcaaccattgtccacacctctctcccactccacctatgtcttcctcatggttctattctccctggtccttttcacagtggccatcataggcttgcttatctttcacaagccttcatatttctggaaagatatggtatagcaaaagcagctgaaatatgctggctggagtgaggaaaaaaatcgtccagggagcattttcctccatcgcagtgttcaaggccatccttccctgtctgccagggccagtcttgacgagtgtgaagcttccttggcttttactgaagcctttcttttggaggtattcaatatcctttgcctcaaggacttcggcagatactgtctctttcatgagtttttcccagctacacctttctcctttgtactttgtgcttgtataggttttaaagacctgacacctttcataatctttgctttataaaagaacaatattgactttgtctagaagaactgagagtcttgagtcctgtgataggaggctgagctggctgaaagaagaatctcaggaactggttcagttgtactctttaagaacccctttctctctcctgtttgccatccattaagaaagccatatgatgcctttggagaaggcagacacacattccattcccagcctgctctgtgggtaggagaattttctacagtaggcaaatatgtgctaaagccaaagagttttataaggaaatatatgtgctcatgcagtcaatacagttctcaatcccacccaaagcaggtatgtcaataaatcacatattcctaggtgatacccaaatgctacagagtggaacactcagacctgagatttgcaaaaagcagatgtaaatatatgcattcaaacatcagggcttactatgaggtaggtggtatatacatgtcacaaataaaaatacagttacaactcagggtcacaaaaaatgcatcttccaatgcatatttttattatggtaaaatatacataaatataattcaccattttaacatttaattcatattaaatacgtacaaatcagtgacatttagtacattcacagtgttgtgccaccatcaccactatttagttccagaacatttgcatcatcaatacattgtctagagacaagactatcctgggtaggcagaaaccatagatcttttgtgtttacagctatggaaaccaactgtaccataaagatagttcactgagttttaaagccaagccacatcttatttttccaaggtttaatttagtgagagggcagcattagtgtggagtggcatgcttttgccctatcgtggaatttacacatcagaatgtgcaggatccaagtctgaaagtgttgccacccgtcacacaacatgggctttgtttgcttattccatgaagcagcagctatagaccttaccatggaaacatgaagagaccctgcacccctttccttaaggattgctgcaagagttacctgttgagcaggattgactggtgatgtttcattctgaccttgtcccaagctctccatctctagatctggggactgactgttgagctgatggggaaagaaaagctctcacacaaaccggaagccaaatgtcccctatctcttgaatgatcaagtcacttttgacaacatccaggtgaatataaaaacttaataaagctgtggaaaggaactcttaatcttcttttctgctacttaggttaaattcactagatcttgattaggaatcaaaattcgaattgggacatgttcaaattctttcttgtggtagttgcctatactgtcatcgctgctgttggttgagcatttgtggtgtaccacgctgtgtgctcaagggtattacattcatcttctcatttaatcctcacaacaatctgaagaaggtaggtattacaattcccacttcatagaaacagaaactgaggttcagagaggttaagtcatttgcccaaatggctgagccaaagcctaccatgtacctaacctttattttctttcccgaacataccaggctgtctcctcataacttccaagcatgcacttaaaactccacatgaatacaaggttcatgggacttggtattcatagaaagggaggcagaaagctggtctgttcctgataggcttgtaatttaatatcattctgttcatgtgctttggatggaagcacatctggcatatgatgctaatcagtggttcccatacccctggcttcctaattttaatgtttgctcacagcatagtagattgacatcaaatagtggccgatgatgatgaaaataaaggtcaaataagttgagccaataacagccgcttttttccttctgtctgcgtatacaaagcactgtcatgcacacaatctattctgaccctcacaacaacccataagggtgtaaatagtatttccattttacaaatgaggatcacacaaactactacattgcagagcagatactccaactcatgtcttctggttgaagcctattgctttttcttttctaaacactttccctcagcaagttggaattagacttcacaagtctccttcagagaacacaaatcttttcttattccattcctgtttggttgcctacgtccaatctccccctccccagagatgccaaaaaaaaaatcctttaaggtatttgggagccaaactcaacttgttaaaatctcaaattatggagacaatcagcagacacaacctaaccccaattattttggcaggaaggttggtttagaggcagatccagcaatctgctttgggccactctgggtggggtaggtgaaataagattggtcactgttaactaattttaatattggattggccattggttatcactgattaccattctcccctggattttcacccaggactcaaaacttggttctgctaaccctgttcctttatgaggaaccttttaaagattcctttataaggtgggagttttttttctatgaacctataggggaga

SEQ ID NO: 384978 - DNA, 3661 bp, Homo sapiens
tgtatagaattttccagttgtttatatttattaaacattcatatgtagtacatagtatttttaaatgggatttttgcaacccctttctctctcttttcttattctctttccccatttttctttctccctgactcttctattacaattatggagaaaagtaactgccaggtggcttagaaatgtgtgtcagcagcaaagtggctcctcttccaggaaggaaacagctcttgggcctgcaatatcactttgtgtgttaatttactcagcagaactttccaggcacctgcacaagggatgcggcctttaggagagcaagttggcatccctctgtgtggaacacagcctaaaactgcgattttctcttgtaggcattttcagctttttactttgtgatgaagtttttaaacttgacatcagagaaagtctctcaggaaaaggtgactgagatgatgaaaaagttctgtgctcagccttgggaggagataaaaacatcttacgctggagtaaaggagaagtacctgagtgaatactgcttttctggtacctacattctctccctccttctgcaaggctatcatttcacagctgattcctgggagcacatccatttcattggcaagatccagggcagcgacgccggctggactttgggctacatgctgaacctgaccaacatgatcccagctgagcaaccattgtccacacctctctcccactccacctatgtcttcctcatggttctattctccctggtccttttcacagtggccatcataggcttgcttatctttcacaagccttcatatttctggaaagatatggtatagcaaaagcagctgaaatatgctggctggagtgaggaaaaaaatcgtccagggagcattttcctccatcgcagtgttcaaggccatccttccctgtctgccagggccagtcttgacgagtgtgaagcttccttggcttttactgaagcctttcttttggaggtattcaatatcctttgcctcaaggacttcggcagatactgtctctttcatgagtttttcccagctacacctttctcctttgtactttgtgcttgtataggttttaaagacctgacacctttcataatctttgctttataaaagaacaatattgactttgtctagaagaactgagagtcttgagtcctgtgataggaggctgagctggctgaaagaagaatctcaggaactggttcagttgtactctttaagaacccctttctctctcctgtttgccatccattaagaaagccatatgatgcctttggagaaggcagacacacattccattcccagcctgctctgtgggtaggagaattttctacagtaggcaaatatgtgctaaagccaaagagttttataaggaaatatatgtgctcatgcagtcaatacagttctcaatcccacccaaagcaggtatgtcaataaatcacatattcctaggtgatacccaaatgctacagagtggaacactcagacctgagatttgcaaaaagcagatgtaaatatatgcattcaaacatcagggcttactatgaggtaggtggtatatacatgtcacaaataaaaatacagttacaactcagggtcacaaaaaatgcatcttccaatgcatatttttattatggtaaaatatacataaatataattcaccattttaacatttaattcatattaaatacgtacaaatcagtgacatttagtacattcacagtgttgtgccaccatcaccactatttagttccagaacatttgcatcatcaatacattgtctagagacaagactatcctgggtaggcagaaaccatagatcttttgtgtttacagctatggaaaccaactgtaccataaagatagttcactgagttttaaagccaagccacatcttatttttccaaggtttaatttagtgagagggcagcattagtgtggagtggcatgcttttgccctatcgtggaatttacacatcagaatgtgcaggatccaagtctgaaagtgttgccacccgtcacacaacatgggctttgtttgcttattccatgaagcagcagctatagaccttaccatggaaacatgaagagaccctgcacccctttccttaaggattgctgcaagagttacctgttgagcaggattgactggtgatgtttcattctgaccttgtcccaagctctccatctctagatctggggactgactgttgagctgatggggaaagaaaagctctcacacaaaccggaagccaaatgtcccctatctcttgaatgatcaagtcacttttgacaacatccaggtgaatataaaaacttaataaagctgtggaaaggaactcttaatcttcttttctgctacttaggttaaattcactagatcttgattaggaatcaaaattcgaattgggacatgttcaaattctttcttgtggtagttgcctatactgtcatcgctgctgttggttgagcatttgtggtgtaccacgctgtgtgctcaagggtattacattcatcttctcatttaatcctcacaacaatctgaagaaggtaggtattacaattcccacttcatagaaacagaaactgaggttcagagaggttaagtcatttgcccaaatggctgagccaaagcctaccatgtacctaacctttattttctttcccgaacataccaggctgtctcctcataacttccaagcatgcacttaaaactccacatgaatacaaggttcatgggacttggtattcatagaaagggaggcagaaagctggtctgttcctgataggcttgtaatttaatatcattctgttcatgtgctttggatggaagcacatctggcatatgatgctaatcagtggttcccatacccctggcttcctaattttaatgtttgctcacagcatagtagattgacatcaaatagtggccgatgatgatgaaaataaaggtcaaataagttgagccaataacagccgcttttttccttctgtctgcgtatacaaagcactgtcatgcacacaatctattctgaccctcacaacaacccataagggtgtaaatagtatttccattttacaaatgaggatcacacaaactactacattgcagagcagatactccaactcatgtcttctggttgaagcctattgctttttcttttctaaacactttccctcagcaagttggaattagacttcacaagtctccttcagagaacacaaatcttttcttattccattcctgtttggttgcctacgtccaatctccccctccccagagatgccaaaaaaaaaatcctttaaggtatttgggagccaaactcaacttgttaaaatctcaaattatggagacaatcagcagacacaacctaaccccaattattttggcaggaaggttggtttagaggcagatccagcaatctgctttgggccactctgggtggggtaggtgaaataagattggtcactgttaactaattttaatattggattggccattggttatcactgattaccattctcccctggattttcacccaggactcaaaacttggttctgctaaccctgttcctttatgaggaaccttttaaagattcctttataaggtgggagttttttttctatgaacctataggggaga

SEQ ID NO: 384979 - DNA, 1846 bp, Homo sapiens
  misc_feature (1388)..(1388): n is a, c, g, or t
agggaaaaagggagaaagagagagagattggaatatacatggcttcaaggatgcaaaaaattacaacctggaaaaggcttcgagtaactttaggaaaatgagctgctggactcctcagtcaatctgtcctttctagtcaatgaaaaagacagggtttgaggttccttccgaaacggggccggctaatttagcccctcccacgagcccaagggtctgttatatctctgtttccttgaggacctctctcacggagacggaccacagcaagcagaggctgggggggggaaagacgaggaaagaggaggaaaacaaaagctgctacttatggaagatacaaaggagtctaacgtgaagacattttgctccaagaatatcctagccatccttggcttctcctctatcatagctgtgatagctttgcttgctgtggggttgacccagaacaaagcattgccagaaaacgttaagtatgggattgtgctggatgcgggttcttctcacacaagtttatacatctataagtggccagcagaaaaggagaatgacacaggcgtggtgcatcaagtagaagaatgcagggttaaaggtcctggaatctcaaaatttgttcagaaagtaaatgaaataggcatttacctgactgattgcatggaaagagctagggaagtgattccaaggtcccagcaccaagagacacccgtttacctgggagccacggcaggcatgcggttgctcaggatggaaagtgaagagttggcagacagggttctggatgtggtggagaggagcctcagcaactacccctttgacttccagggtgccaggatcattactggccaagaggaaggtgcctatggctggattactatcaactatctgctgggcaaattcagtcagaaaacaaggtggttcagcatagtcccatatgaaaccaataatcaggaaacctttggagctttggaccttgggggagcctctacacaagtcacttttgtaccccaaaaccagactatcgagtccccagataatgctctgcaatttcgcctctatggcaaggactacaatgtctacacacatagcttcttgtgctatgggaaggatcaggcactctggcagaaactggccaaggacattcagatgccttctgcattttgaagacaagaaaagttaaacacactttgggaggctgaggtgggtggatcacttgaggtcaggagttggagaccagcctggccaacatggtgaaaccccatctctactaaaaatacaaaaaagaaaaaaaattagctgggcatggtggcacatacctgtaatcccagctacttgggaggctgagaaaggagaatcacttgaactgggaggtggaggttgcagtgagccgagattgngccactacactccagcctgggccacagagcgagactccatctcaaaaagaaaaaaaagaaaagaaaaagaaaaagaaaacaaaagttaaacatactcaacatcatgtgagtaccaggcacaccctgacaagcaaacacaaagccaggatgtcatatccagctgttccctgtctccactgaaaggataacaagttctctgctctcctccaaagcattctctctggttttcaaaaccactaccaataagatggtcctgggagtagggggcgctgagagacatccactgagcctcaaagctccactaaccttcttatccacagcagcctcctttcttccctagtaggttgtgggttagaaattacttttttttgggccaggcgtggtggctcacacctgtaatcccagcactttgggaggccgaggcgggtggatcacttgaggtccggagttcgagacca

SEQ ID NO: 384980 - DNA, 644 bp, Homo sapiens
ttcggctgttggtcgcagggctaccggcctacagtcccagcaagcgccgggctgcggggtggtgagcagtcccggagggaggcgcaagccgtgtggacctctctgcttccaaacctatgctggccactgattctgtgccatccctggctaaggggagtgagtccagagagggacttaaggggcaagtcggggctgggcagtgagaagagtgtgacgctgcgaagtgcacctcatctttgcctaaatcgggcgggtctcagcctcaccccacctctcgctgctcagctcggtttccctccagagcatcacgcctcctccagcacaggagccgcctgctttcctaggctgctgtggaactggcctgaggtcccagacgctgtccattgtgctgccgccctccgcgctctccagccagagcgccagttcaccggcttttgggagaactccgccgcctcacctgcccgcggacaaggtcacagctttgcagggggttgacatgggctgtggcttcctggaaatgtcaccctcaccagagccttttacatggatgtgaattttgagacatgaaggagggtaattattggtttacccaggagatgctaagagcagaggagaaaaccctaatttccaggcatgtgacttga

SEQ ID NO: 384981 - DNA, 401 bp, Homo sapiens
tcagggacagctcagtcaggtgagggtggggatgacccatgggcttctggagctgggctggtggtcctggaagggccggcccatgccccttggagagggtctttgtgctgagggatgcccacagaggcctgggtaccaggaacactgctccaggcaaggggcctttcttccagatttggctggaaggaagacttggtcagcttttccaccttgcagggctgcaccccatggacctgggttcctggagtctttgacggctttgtgtggtcgacttgttttgatactgaggacacccctgctggctgttaatttcagggcaagggatatgaggccattattttaagtgaaataactcaagaatggaaaataaaatactattatttttcacttataaaaaagag

SEQ ID NO: 384982 - DNA, 657 bp, Homo sapiens
ttcggctgttggtcgcagggctaccggcctacagtcccagcaagcgccgggctgcggggtggtgagcagtcccggagggaggcgcaagccgtgtggacctctctgcttccaaacctatgctggccactgattctgtgccatccctggctaaggggagtgagtccagagagggacttaaggggcaagtcggggctgggcagtgagaagagtgtgacgctgcgaagtgcacctcatctttgcctaaatcgggcgggtctcagcctcaccccacctctcgctgctcagctcggtttccctccagagcatcacgcctcctccagcacaggagccgcctgctttcctaggctgctgtggaactggcctgaggtcccagacgctgtccattgtgctgccgccctccgcgctctccagccagagcgccagttcaccggcttttgggagaactccgccgcctcacctgcccgcggacaagggctgcaccccatggacctgggttcctggagtctttgacggctttgtgtggtcgacttgttttgatactgaggacacccctgctggctgttaatttcagggcaagggatatgaggccattattttaagtgaaataactcaagaatggaaaataaaatactattatttttcacttataaaaaagag

SEQ ID NO: 384983 - DNA, 758 bp, Homo sapiens
ttcggctgttggtcgcagggctaccggcctacagtcccagcaagcgccgggctgcggggtggtgagcagtcccggagggaggcgcaagccgtgtggacctctctgcttccaaacctatgctggccactgattctgtgccatccctggctaaggggagtgagtccagagagggacttaaggggcaagtcggggctgggcagtgagaagagtgtgacgctgcgaagtgcacctcatctttgcctaaatcgggcgggtctcagcctcaccccacctctcgctgctcagctcggtttccctccagagcatcacgcctcctccagcacaggagccgcctgctttcctaggctgctgtggaactggcctgaggtcccagacgctgtccattgtgctgccgccctccgcgctctccagccagagcgccagttcaccggcttttgggagaactccgccgcctcacctgcccgcggacaaggtcacagctttgcagggggttgacatgggctgtggcttcctggaaatgtcaccctcaccagagccttttacatggatgtgaattttgagacatgaaggaggggctgcaccccatggacctgggttcctggagtctttgacggctttgtgtggtcgacttgttttgatactgaggacacccctgctggctgttaatttcagggcaagggatatgaggccattattttaagtgaaataactcaagaatggaaaataaaatactattatttttcacttataaaaaagag

SEQ ID NO: 384984 - DNA, 366 bp, Homo sapiens
aaaatttaattcaactgacccatcccaccgggaaatgccactaggaaggtgtagcctgcagttttacctaataagcacaactggaggggaatagaaacacagaattgtgagggaatcgcaaggcatgctgctcagagcatgcctagccctgcactgaaagctatgagatactggttctgaggcatggctgtgcttgctggtgggagcgggcatcctcccttggcctccctgggacacctcctgtgctccctgcactgcactccacgtgcctggggtgtctacacaactcgctgcagcttcactaaagaacaggtggcactccagcttctccgggtcctgctgagcacagggccccgccacccttga

SEQ ID NO: 384985 - DNA, 739 bp, Homo sapiens
gatgggtttcctgaatacagcacactgatgggtcttgacgctttatccaatttgccagtctgtgtcttttaattgatttaatggtgagagagaaaaaaaaattgcatctagttctctttgctatctcccatgaatcattgcatttaacatgttatttctgctcaactttagttcattttcaatgtgcatttttagtgatgtcagagtatgtgtcatttaattaaatccccgcccttgctttagattttctgtgcatggggtgtgaggcacatatgcagtctgtgccatgttgtatttgttttgtaccatgttgtttggcctattttgcttccatgctgtcctccattgttaaggtgatttggagttgttttacttttgaattttatcctttctgttcttggtgtgacaactttctaaatatttccttattaaagtagtgatatatagatgatttcctttttaaagcatatttactatgtcctttaatgttttaaacagttttatggaggtatttattgaagtatttttatcaaacatgactatttaaaatccctatcaactttgtgtagtgattctttcttgttctatgacacttagtaatatatcttagaatttgcatcttaatttttttctaactaaatctcagtcctaatcccatatcattttttatttcttttgatatgtgtgtgtatttattccctttgatgttcatagtatgtttcattgaggttcaaggttg

SEQ ID NO: 384986 - DNA, 450 bp, Homo sapiens
ctgaggttttttttccctgtaaccatttgtatctcattttattataccacgtctatttggagtgctcaaatcacccttgcagaagtacacaccgttgggttgactcatttgttcatcagaaaaatagctgtagtgtatcaagtacatactaagtgccaagtgttcaacatcagtttccttatctgtgaaatggggatcctgagaactacttcattgggtgcatataaatcagttaataagttactcctgtctatgtaacaggcctcagttttgagctacaggctagactttgttgacctgaccatagagctgctgttccatccttcatctctgttgaaagctcctttcttctgcatcctctctgttgcttgttgttcttttttttttttttttttttttgagacggagtctcgctctgtcacccaggctggatggagtgcagtggcacga

SEQ ID NO: 384987 - DNA, 243 bp, Homo sapiens
ccctggggcccaatactgactccccggagcctggccctccttctgtggggcctccatccctgccccatcctgatcctggggccctccagccccaacatgggcacctaaggctgaaccagtcagaccccggggtcttcaccctaacccgagagttcccgggccctaactctgcccccgatcctgcccctccctcctcacactccaggcccctcggttccacgattaaaagtgcctggttccaga

SEQ ID NO: 384988 - DNA, 916 bp, Homo sapiens
  misc_feature (916)..(916): n is a, c, g, or t
tccccttagagacagggtctcgctttgttgctcaggctgaagtgcaggaaagttagtaaagtagtgaaggataagaagctttacttcttcatgatcatatctgagtgactgcagaatgaagcatttgtcagtgtgacagggaagacataaatacagaaccttgaggccaatgaatgtaactgcctatataacttgaacagtttgaatagtgatttagtgtacttcttgattcattcctcccttctatgtcaaatttaataaagtactttaacaggaagaagacatcaataattttttatatataatcgctttttgctacacattctttttttttcttttaacagattattgcttgggacttctgctctagacccaaatagttcaagaggttgaaaagttttaggatggtctgaatgaatcatcaaatcacattccctgtgatcttttctcagccaacacagccagaatcaactgcctacctccatgtcccatcctattcttggtgtctctacaatatagttacgataaaacctattaattataaagaaacacaaagaaggttaggtttgcatgcacacatgtgaataggtgtatgggtaaaataaattcttttttttttccccttagagacagggtctcgctttgttgctcaggctggagtgcaggaaagttagtaaagtagtaaattcttaaaacctatggttccttctatcagctccttaaattcttgtatttttgaaggataagaagctttacttcttcatgatcatatctgagtgactgcagaatgaagcatttgtcagtgtgacagggaagacataaatacagaaccttgaggccaatgaatgtaactgcctatataactttgacagttttgatagtgatttagtgtacttcttgattcattcctcccttn

SEQ ID NO: 384989 - DNA, 703 bp, Homo sapiens
tccccttagagacagggtctcgctttgttgctcaggctgaagtgcaggaaagttagtaaagtagtgaaggataagaagctttacttcttcatgatcatatctgagtgactgcagaatgaagcatttgtcagtgtgacagggaagacataaatacagaaccttgaggccaatgaatgtaactgcctatataacttgaacagtttgaatagtgatttagtgtacttcttgattcattcctcccttctatgtcaaatttaataaagtactttaacaggaagaagacatcaataattttttatatataatcgctttttgctacacattctttttttttcttttaacagattattgcttgggacttctgctctagacccaaatagttcaagaggttgaaaagttttaggatggtctgaatgaatcatcaaatcacattccctgtgatcttttctcagccaacacagccagaatcaactgcctacctccatgtcccatcctattcttggtgtctctacaatatagttacgataaaacctattaattataaagaaacacaaagaaggttaggtttgcatgcacacatgtgaataggtgtatgggtaaaataaattcttttttttttccccttagagacagggtctcgctttgttgctcaggctggagtgcagtggtgtgatcacggctcactgcactctgcaactgctgg

SEQ ID NO: 384990 - DNA, 811 bp, Homo sapiens
ttaagcctacagagaaacatgtgacatttcacttaagaaaatctagatttccaaattttcttgaaaaatttgaaaatcttgtaagcattggctaaagtttactatcctctcttagtcccacatcatttcaatattatactttttcctgtttttttccccaaaagtcttagctatgattctcacttcattcttccatttgactttcctaattattttgtttctctagaaatgtgatatatactgccagtttattaaaagcttctatgttgctttttagtaaaaacggatcggttttcataatttcagttctatagatacttgatagtagttgctgttgtgaatgttccccttgctctttatatttcttaagtggtcattgttggtgtgttcttgtaggaaatttccattggcttgaactaacattttatcatgttaaagaactgtctttttatttttattttactaagaattacaatcaagtatagatttacaattttatcaaatgcttttggacatcttacaattttcttctttgaaatattgatgatttgacatcatggtatgttgcttttaattaatacatgaggaagtttcccatcttttcctgtgttctagagtacttcttacagcattcaaataatctgttcttttaaaaattattacaaaatatattatctattcttcaaatgttgggaaaccttatatatctgttagcttttaaaaataatcaattacttactccccccagtgctccctgcactccagcaaagctgttttgcagtgattgatccagttaggtctcttatttaaa

SEQ ID NO: 384991 - DNA, 277 bp, Homo sapiens
gacaggtgtaatctaagcttaaataaaccccccggaggctgcacaatttcttggcatctctcccctgccctctccatccgcatattcattttggagtttggagaagtatctagaatcttctcccaccccaaaatgcccagcagagcccccccccccccccccgccgcccccgcaccccttggagctgcggcttgctgaatcgttgagatgtctgacactgtcggggttccctacctagtgcttcaaccagatcacctcacttttgagtttccttcct

SEQ ID NO: 384992 - DNA, 339 bp, Homo sapiens
ctcccgtgtgccctcctcctcttatgccggcttgaaaatatttcctgtctctctatttctcaatccctggttgatgtcccaggattactcagcctctccggctttagtcactctcgctacccgctcccagggtccagggtggaggcagagggaggctgggagagaagctctactgccagctgggcctgggctggcctgggcatccctgaggttttaactgtctcctaaccacagaggatctcagggcctccagcagcgagccccaatgagtcaaactcttgtttcctcctctcccacccccgacccagtcagggcaggtgaggggtagaggtgatggca

SEQ ID NO: 384993 - DNA, 339 bp, Homo sapiens
gtttctcccttttctattctctgtgttggcggaaaatttaggttattttttaaatatttagaagaagccagtccaactgataaagccatccaggtctgaagttttgttgtagattttaaattatgagtcagtttccttaataaatgtcattctattcagatttttctacttctttatgttagcattgataaattgtatttttcaaggaatttatccattttgtcttatgatgtatgtataatctgctgttaaatgaatctgatgaattcttagttacagatattttagttttcaactgtagaatttttattaaaagtgtattctaattctcagatgaaa

SEQ ID NO: 384994 - DNA, 360 bp, Homo sapiens
gctttgtattcccctgttgatttctaacttgctctcattctctgcccttgctgtgctgattttaattaggtacccaggccgggtgcagtggctaacacctgtaatcccaacactttgggaggccgaggcaggtggatcacttgaactgtcaggagttcaagaccaacctggccaacatagtgaaaccctgtctctactaaaaatacaaaaattagctggatgtggtggcacacgcctgtaatcccagctactcgggaggctgaggcaggagaattgcttgagcctgggaggtagaggttgcaatgagccaagatcccatcactacactccagcctgggtgacagagcgagactccgtctc

SEQ ID NO: 384995 - DNA, 1515 bp, Homo sapiens
tggataaggcaactcagccaggacacagtgggattgaacctactgctggttggttcttgcagagaaccctcaccctgaacaggagctgggtcaagtcagagaatggaatcagtttcaaggaggagtgatggattcccaatgctcctggttggggatctgagcctctcagaggtgaaagggactttaatgctcatattcaacattctcatttggtagatgaggaaacaggggcccaaggtcacatagcaagtaagaaacattagggtttctgattctgagatggcttacagttaagtgacttactctacaaactcatttcactcagctgggctgttttcatctttctgtaaaggtaggtaccaagatctaaacccatggctccctgtttcaagggcttccaacaaaaggccagcaaagggttggccccagcactggctctcctgctgctgacatctccaaaggcatctctgctctctcctacctgacagcagccccattcccaaactccctgtcccagtctctagaagatcacttcacacagccaaaggagactcatattttccagtgtagaaacacggacccaggctgaagtgttggggttttctcaaagtgcttttattgtttaatgcaaagtcagcctttgcctacttcctgggtgtcttgtagccggctcagggcctcccccatcccatggtggttctgggccaaggacacatccatgcatgtgggtttccaactctgcagctcccctccatttacccggtacctccaaacttgacgagcagacctggagcccatctgtgtgtaaaaacccctcagggactaggggactaactttgacatattgcacatgcactagttttcttcttccccattggtaaggatgacagggtccctcttctttggccagggaaaccatgacattcactttctttgctgttgtacatccaatttctttccttaatcatatctgatgctgggatgtgggtaaccccaaactgaaggcagctgctaaatctcaaatgctaaaaaaatactgcaattttgacatcagtgagtcagatcaatacatcctctggggctgattttgcttcacagttaggatgagccatctcttaagctgcaggctcaaatgggattaactgaactctatacctgggatgggccatggactgagctgtccatgcagaaggaccaggctgtccatgccttccctgcccttttactcaccactgcacagcagccccagtgggcctactgcacatgtctaggagaaatcactctaagaaaaccaacaggaacaggctttaggcaacaagagacgtctcactgcatctcctcccacgtcagaacttgagtactgggtctttgcagctcagagcattcctcccttccttctcctgcccgcaaagccctgcctctctcctgagtacatatgacactccatgctgcaagatttcaaggcagatgcaggtatcttatgggtgctttttgactcaaagcagctttttggtt

SEQ ID NO: 384996 - DNA, 1391 bp, Homo sapiens
tggataaggcaactcagccaggacacagtgggattgaacctactgctggttggttcttgcagagaaccctcaccctgaacaggagctgggtcaagtcagagaatggaatcagtttcaaggaggagtgatggattcccaatgctcctggttggggatctgagcctctcagaggtgaaagggactttaatgctcatattcaacattctcatttggtagatgaggaaacaggggcccaaggtcacatagcaagtaagaaacattagggtttctgattctgagatggcttacagttaagtgacttactctacaaactcatttcactcagctgggctgttttcatctttctgtaaaggtaggtaccaagatctaaacccatggctccctgtttcaagggcttccaacaaaaggccagcaaagggttggccccagcactggctctcctgctgctgacatctccaaaggcatctctgctctctcctacctgacagcagccccattcccaaactccctgtcccagtctctagaagatcacttcacacagccaaaggagactcatattttccagtgtagaaacacggacccaggctgaagtgttggggttttctcaaagtgcttttattgtttaatgcaaagtcagcctttgcctacttcctgggtgtcttgtagccggctcagggcctcccccatcccatggtggttctgggccaaggacacatccatgcatgtgggtttccaactctgcagctcccctccatttacccggtacctccaaacttgacgagcagacctggagcccatctgtgtgtaaaaacccctcagggactaggggactaactttgacatattgcacatgcactagttttcttcttccccattggtaaggatgacagggtccctcttctttggccagggaaaccatgacattcactttctttgctgttgtacatccaatttctttccttaatcatatctgatgctgggatgtgggtaaccccaaactgaaggcagctgctaaatctcaaatgctaaaaaaatactgcaattttgacatcagtgagtcagatcaatacatcctctggggctgattttgcttcacagttaggatgagccatctcttaagctgcaggctcaaatgggattaactgaactctatacctgggatgggccatggactgagctgtccatgcagaaggaccaggctgtccatgccttccctgcccttttactcaccactgcacagcagccccagtgggcctactgcacatgtctaggagaaatcactctaagaaaaccaacaggaacaggctttaggcaactacagaagagcctcgaaaaaggtcctaatacagagagggaatgcagaagaatgggagggagttatatgccgctga

SEQ ID NO: 384997 - DNA, 423 bp, Homo sapiens
ttgaggtggagtttcactctgtcacccaggctggagtacagtggcgtgttcttggctcactgcaacctccgcctcctgggttgaagtgagtctcctgcctcagcctcctgagtaggtgggactacaggtgtgtgccaccatgcctggctaatttttgtatttttaatagagacggggtttcaccatgttagccaggctggtctcgaattcctgacctcaggcaatctgccggcctcagcctcccaaagtgctgagattacaggcatgagccactgtgcctggccgacaatattcttaagtataaagaacatataatagttggaaaaatctatgagcagaaatattttaggggatattttgttatatattcagtatttctataaatgttttcaaaatatacaaaattttgaatgaaaaaaaaaa

SEQ ID NO: 384998 - DNA, 445 bp, Homo sapiens
ggcttgagcacctgggcaccctttccctcacctcacctggggagaagaggtcgtcctgaaggtgatgaacaggagggtactggccagcgaggggtcagcgtggcaaggtgtgataactgctggcactatctgtgcatatggcctcttcatccttggctcttacggccctacctttccagcctgctatctgcccacagaagagggtgggacccaagagtggcgttaaagagtctattccaactccatcaactgcaactgcaggcttgtctctgctttcggttattacctgcgtgacagcaattgtcctcacggccttttcggggactgctgcaggtgaacctgcacgtggagaatgcgcagaatgtgggccttgggtcctgggcagggtctaaggataggcatgcattagtccttggcgccgtcaacgccggatcccaggcaggag

SEQ ID NO: 384999 - DNA, 227 bp, Homo sapiens
attttgtgacttatctccacttcatgttacattgcttactaacaaattcggttttgtttttttgagagagggtctcctgtcacctagctggagtgcagtggcatgatcatggctcactgcagcctcaacctcttgtgctcatgcgatcctccctcctgccccagcttttcatgttattaggactataggcacatgccaccatgcctaatattaaaaactttttagag

SEQ ID NO: 385000 - DNA, 262 bp, Homo sapiens
tggaagtgttacttgctttgaagtttactttgtcagattagtatagccacttcagctttctttttcttggtttttgcatgaaatatgtttttctatcctttactttttacacacacacacacacacacacacatatttaagcagatttttcatacatagtatatacatatatttttatccaatctgacaatctgtgctgatttggtatatttagaccatttacatttaaagtgattacccatatggttgaatataggtgaac

SEQ ID NO: 385001 - DNA, 754 bp, Homo sapiens
aaagattttaagtttatgatccctgcagccatcaattatctttaggcacccaactattaataaaatgacagtgtgatgtcattgtccacaaagaataagtcatctttcaaatgccttttctaattgttaagtgctaatgccttgattactgtcagagtaatttaaattttctataagattatcaaaggttttgtgactgttaactccccacaaaactaaaatctagccaatcttaggcccagattacagatagggaatgcatttggaacagtcacttgctgtactgtggttgttgggggaaggcaggaggagatttgcctgataaaataagtgggaattggaggggagaaatgtctaaaggcagcgatggggatcctgtggaggaggaatggagccaggaataatagaaaggggaactcctggggaagggagctctgcatgctggctgctctgtggcaggcctgactggcaagcccttgggtgaagggagaaaatttgtaccctgaagaggtgaaagagcatagcatttgaaattggaaaacatgacattttgaccttagtccaaactgttaacccttctgggccttaggttttacatctgtaaattcaaaatgctagtccttgcctatctgaggggatgggattattgtaaggctcagatgtgttcatggacactgaaaagagttgtggaattgttacctggtatctggttatgtgagccaggggtctccacctggactcatttaaaaaaaaa

SEQ ID NO: 385002 - DNA, 370 bp, Homo sapiens
tcctgtctcaaaacaacaacaacaaaaaccctcattgtgatgtagagtaagtaagaagctcatccgctgacctcttcactttgaggattctccctgtagagtaagcagcctgacagctgctgaacaggttactagagagcattctcttagcaccaccacaaaaacacttggaatgcaaagcagcatttaagcaacattcatacgcagaagttaatctgaaacacacatgggtagcctttctccaaactctgcattatgcaataacagcattccctccaaactagtcagtcagtcccaggactcaaccagttttatgcttttactgtttttaaaaatgagtaactatgctactgagaggatgctctcaatc

SEQ ID NO: 385003 - DNA, 913 bp, Homo sapiens
  misc_feature (742)..(742): n is a, c, g, or t
  misc_feature (746)..(746): n is a, c, g, or t
  misc_feature (764)..(764): n is a, c, g, or t
cggacgcgtgggtcgacccacgcgtccctgacagattctcctatcggggtcacagggacgctaagattgctacctggactttcgttgaccatgctgtcccgggtggtactttccgccgccgccacagcggccccctctctgaagaatgcagccttcctaggtccaggggtattgcaggcaacaaggacctttcatacagggcagccacaccttgtccctgtaccacctcttcctgaatacggaggaaaagttcgttatggactgatccctgaggaattcttccagtttctttatcctaaaactggtgtaacaggaccctatgtactcggaactgggcttatcttgtacgctttatccaaagaaatatatgtgattagcgcagagaccttcactgccctatcagtactaggtgtaatggtctatggaattaaaaaatatggtccctttgttgcagactttgctgataaactcaatgagcaaaaacttgcccaactagaagaggcgaagcaggcttccatccaacacatccagaatgcaattgatacggagaagtcacaacaggcactggttcagaagcgccattacctttttgatgtgcaaaggaataacattgctatggctttggaagttacttaccgggaacgactgtatagagtatataaggaagtaaagaatcgcctggactatcatatatctgtgcagaacatgatgcgtcgaaaggaacaagaaccccttgttaatnggtngcaagagcgtggtgaagntttcccagcggaaggacatgcagtggcttggccagtggggaaaggtagccgcggttttattttcccgggaagaaaggtgcatgaatttggaattggggaattaccaaaagttagaaaatgaattgcgggaaagaagatttttcacacgc

SEQ ID NO: 385004 - DNA, 683 bp, Homo sapiens
tatactaaaatggaacgatacagagaagattagcatggcccctgcgcaaggatgacacgcaaattcgtgaagcgttccatatttgtgaataacattgctatggctttggaagttacttaccgggaacgactgtatagagtatataaggaagtaaagaatcgcctggactatcatatatctgtgcagaacatgatgcgtcgaaaggaacaagaacacatgataaattgggtggagaagcacgtggtgcaaagcatctccacacagcaggaaaaggagacaattgccaagtgcattgcggacctaaagctgctggcaaagaaggctcaagcacagccagttatgtaaatgtatctatcccaattgagacagctagaaacagttgactgactaaatggaaactagtctatttgacaaagtctttctgtgttggtgtctactgaagttatagtttacccttcctaaaaatgaaaagtttgtttcatatagtgagagaacgaaatctctatcggccagtcagatgtttctcatccttcttgctctgcctttgagttgttccgtgatcacttctgaataagcagtttgcctttataaaaacttgctgcctgactaaagattaacaggttatagtttaaatttgtaattaattctaccatcttgcaataaagtgacaattgaatgaaaca

SEQ ID NO: 385005 - DNA, 488 bp, Homo sapiens
gtctagaggatcccgacatttccacgagtcaccactttatgaatctgtatgccatatgactcgtggaaatgtccacgtggacatttccacgagtgcattgcggacctaaagctgctggcaaagaaggctcaagcacagccagttatgtaaatgtatctatcccaattgagacagctagaaacagttgactgactaaatggaaactagtctatttgacaaagtctttctgtgttggtgtctactgaagttatagtttacccttcctaaaaatgaaaagtttgtttcatatagtgagagaacgaaatctctatcggccagtcagatgtttctcatccttcttgctctgcctttgagttgttccgtgatcacttctgaataagcagtttgcctttataaaaacttgctgcctgactaaagattaacaggttatagtttaaatttgtaattaattctaccatcttgcaataaagtgacaattgaatgaaaca

SEQ ID NO: 385006 - DNA, 1645 bp, Homo sapiens
ggccctgggccggggtaagggagctcccaggcccgggatctcggctcaccggaccggtaccgcgcagcctccaactgccgttccatgcaggcgggcgcatttgggggaagattccactcccgggccgccgggggcactagggggggtggggtttccttccgcatctccacggttccaactccaacctagactcaaactggacgccggccggagactccgctccggcagcaaaccccacgtggtgcacctctgagcctccgcccctctcccgagggaaccgcaactctacttctcgcgagaattgcttctatggctccatcctgctttccggctgtcgccctcatgcgataggctctcagcgttacttgactcttctcgcgataattttttttaaaaatctcccaaggaaagttgaaggaagagtacaaaattttcatctcgcgagacttgtgagcggccatcttggttctgccctgacagattctcctatcggggtcacagggacgctaagattgctacctggactttcgttgaccatgctgtcccgggtggtactttccgccgccgccacagcggccccctctctgaagaatgcagccttcctaggtccaggggtattgcaggcaacaaggacctttcatacagggcagccacaccttgtccctgtaccacctcttcctgaatacggaggaaaagttcgttatggactgatccctgaggaattcttccagtttctttatcctaaaactggtgtaacaggaccctatgtactcggaactgggcttatcttgtacgctttatccaaagaaatatatgtgattagcgcagagaccttcactgccctatcagtactaggtgtaatggtctatggaattaaaaaatatggtccctttgttgcagactttgctgataaactcaatgagcaaaaacttgcccaactagaagaggcgaagcaggcttccatccaacacatccagaatgcaattgatacggagaagtcacaacaggcactggttcagaagcgccattacctttttgatgtgcaaaggaataacattgctatggctttggaagttacttaccgggaacgactgtatagagtatataaggaagtaaagaatcgcctggactatcatatatctgtgcagaacatgatgcgtcgaaaggaacaagaacacatgataaattgggtggagaagcacgtggtgcaaagcatctccacacagcaggaaaaggagacaattgccaagtgcattgcggacctaaagctgctggcaaagaaggctcaagcacagccagttatgtaaatgtatctatcccaattgagacagctagaaacagttgactgactaaatggaaactagtctatttgacaaagtctttctgtgttggtgtctactgaagttatagtttacccttcctaaaaatgaaaagtttgtttcatatagtgagagaacgaaatctctatcggccagtcagatgtttctcatccttcttgctctgcctttgagttgttccgtgatcacttctgaataagcagtttgcctttataaaaacttgctgcctgactaaagattaacaggttatagtttaaatttgtaattaattctaccatcttgcaataaagtgacaattgaatgaaaca

SEQ ID NO: 385007 - DNA, 1724 bp, Homo sapiens
ggccctgggccggggtaagggagctcccaggcccgggatctcggctcaccggaccggtaccgcgcagcctccaactgccgttccatgcaggcgggcgcatttgggggaagattccactcccgggccgccgggggcactagggggggtggggtttccttccgcatctccacggttccaactccaacctagactcaaactggacgccggccggagactccgctccggcagcaaaccccacgtggtgcacctctgagcctccgcccctctcccgagggaaccgcaactctacttctcgcgagaattgcttctatggctccatcctgctttccggctgtcgccctcatgcgataggctctcagcgttacttgactcttctcgcgataattttttttaaaaatctcccaaggaaagttgaaggaagagtacaaaattttcatctcgcgagacttgtgagcggccatcttggttctgccctgacagattctcctatcggggtcacagggacgctaagattgctacctggactttcgttgaccatgctgtcccgggtggtactttccgccgccgccacagcggccccctctctgaagaatgcagccttcctaggtccaggggtattgcaggcaacaaggacctttcatacagggcagccacaccttgtccctgtaccacctcttcctgaatacggaggaaaagttcgttatggactgatccctgaggaattcttccagtttctttatcctaaaactggtgtaacaggaccctatgtactcggaactgggcttatcttgtacgctttatccaaagaaatatatgtgattagcgcagagaccttcactgccctatcagtactaggtgtaatggtctatggaattaaaaaatatggtccctttgttgcagactttgctgataaactcaatgagcaaaaacttgcccaactagaagaggcgaagcaggcttccatccaacacatccagaatgcaattgatacggagaagtcacaacaggcactggttcagaagcgccattacctttttgatgtgcaaaggaataacattgctatggctttggaagttacttaccgggaacgactgtatagagtatataaggaagtaaagaatcgcctggactatcatatatctgtgcagaacatgatgcgtcgaaaggaacaagaacacatgataaattgggtggagaagcacgtggtgcaaagcatctccacacagcaggaaaaggagacaattgccaagtgcattgcggacctaaagctgctggcaaagaaggctcaagcacagccagttatgtaaatgtatctatcccaattgagacagctagaaacagttgactgactaaatggaaactagtctatttgacaaagtctttctgtgttggtgtctactgaagttatagtttacccttcctaaaaatgaaaagtttgtttcatatagtgagagaacgaaatctctatcggccagtcagatgtttctcatccttcttgctctgcctttgagttgttccgtgatcacttctgaataagcagtttgcctttataaaaacttgctgcctgactaaagattaacaggttatagtttaaatttgtaattaattctaccatcttgcaataaagtgacaattgaatgaaacagggtttttcaagttgtataattctctgaaatactcagcttttgtcatatgggtaaaaattaaagatgtcattgaactac

SEQ ID NO: 385008 - DNA, 2031 bp, Homo sapiens
  misc_feature (1657)..(1657): n is a, c, g, or t
  misc_feature (1659)..(1659): n is a, c, g, or t
  misc_feature (1675)..(1675): n is a, c, g, or t
ggccctgggccggggtaagggagctcccaggcccgggatctcggctcaccggaccggtaccgcgcagcctccaactgccgttccatgcaggcgggcgcatttgggggaagattccactcccgggccgccgggggcactagggggggtggggtttccttccgcatctccacggttccaactccaacctagactcaaactggacgccggccggagactccgctccggcagcaaaccccacgtggtgcacctctgagcctccgcccctctcccgagggaaccgcaactctacttctcgcgagaattgcttctatggctccatcctgctttccggctgtcgccctcatgcgataggctctcagcgttacttgactcttctcgcgataattttttttaaaaatctcccaaggaaagttgaaggaagagtacaaaattttcatctcgcgagacttgtgagcggccatcttggttctgccctgacagattctcctatcggggtcacagggacgctaagattgctacctggactttcgttgaccatgctgtcccgggtggtactttccgccgccgccacagcggccccctctctgaagaatgcagccttcctaggtccaggggtattgcaggcaacaaggacctttcatacagggcagccacaccttgtccctgtaccacctcttcctgaatacggaggaaaagttcgttatggactgatccctgaggaattcttccagtttctttatcctaaaactggtgtaacaggaccctatgtactcggaactgggcttatcttgtacgctttatccaaagaaatatatgtgattagcgcagagaccttcactgccctatcagtactaggtgtaatggtctatggaattaaaaaatatggtccctttgttgcagactttgctgataaactcaatgagcaaaaacttgcccaactagaagaggcgaagcaggcttccatccaacacatccagaatgcaattgatacggagaagtcacaacaggcactggttcagaagcgccattacctttttgatgtgcaaaggaataacattgctatggctttggaagttacttaccgggaacgactgtatagagtatataaggaagtaaagaatcgcctggactatcatatatctgtgcagaacatgatgcgtcgaaaggaacaagaacacatgataaattgggtggagaagcacgtggtgcaaagcatctccacacagcaggaaaaggagacaattgccaagtgcattgcggacctaaagctgctggcaaagaaggctcaagcacagccagttatgtaaatgtatctatcccaattgagacagctagaaacagttgactgactaaatggaaactagtctatttgacaaagtctttctgtgttggtgtctactgaagttatagtttacccttcctaaaaatgaaaagtttgtttcatatagtgagagaacgaaatctctatcggccagtcagatgtttctcatccttcttgctctgcctttgagttgttccgtgatcacttctgaataagcagtttgcctttataaaaacttgctgcctgactaaagattaacaggttatagtttaaatttgtaattaattctaccatcttgcaataaagtgacaattgaatgaaacaaaaaaaaaaaananaaaaaaaaaaaaaaanaaaaaaaaaaaaaaaaaaaaaaaaaaaaaaaaaaaaaaaaaaacaacacgaggggggaggccacagaaacaacacccgcaaggaggggagcacaaacagaagcgacgcacacaccattttgaacaaaaagagcacaccaacaagcaagagagtaatacagacgaaaggagagagaacaggctgtatttaacaacaaacgattgtgctgtaggcggaaaaaaaaatgagagaacagtaagaaaaatttctggaggaacggcaaacactaatattatggagggaggggacaacaacagtggcgaacaaaaatacttaagaaataatatagaaacctgtgaggaaaataatagcatttc

SEQ ID NO: 385009 - DNA, 1632 bp, Homo sapiens
ggccctgggccggggtaagggagctcccaggcccgggatctcggctcaccggaccggtaccgcgcagcctccaactgccgttccatgcaggcgggcgcatttgggggaagattccactcccgggccgccgggggcactagggggggtggggtttccttccgcatctccacggttccaactccaacctagactcaaactggacgccggccggagactccgctccggcagcaaaccccacgtggtgcacctctgagcctccgcccctctcccgagggaaccgcaactctacttctcgcgagaattgcttctatggctccatcctgctttccggctgtcgccctcatgcgataggctctcagcgttacttgactcttctcgcgataattttttttaaaaatctcccaaggaaagttgaaggaagagtacaaaattttcatctcgcgagacttgtgagcggccatcttggttctgccctgacagattctcctatcggggtcacagggacgctaagattgctacctggactttcgttgaccatgctgtcccgggtggtactttccgccgccgccacagcggccccctctctgaagaatgcagccttcctaggtccaggggtattgcaggcaacaaggacctttcatacagggcagccacaccttgtccctgtaccacctcttcctgaatacggaggaaaagttcgttatggactgatccctgaggaattcttccagtttctttatcctaaaactggtgtaacaggaccctatgtactcggaactgggcttatcttgtacgctttatccaaagaaatatatgtgattagcgcagagaccttcactgccctatcagtactaggtgtaatggtctatggaattaaaaaatatggtccctttgttgcagactttgctgataaactcaatgagcaaaaacttgcccaactagaagaggcgaagcaggcttccatccaacacatccagaatgcaattgatacggagaagtcacaacaggcactggttcagaagcgccattacctttttgatgtgcaaaggaataacattgctatggctttggaagttacttaccgggaacgactgtatagagtatataaggaagtaaagaatcgcctggactatcatatatctgtgcagaacatgatgcgtcgaaaggaacaagaacacatgataaattgggtggagaagcacgtggtgcaaagcatctccacacagcaggaaaaggagacaattgccaagtgcattgcggacctaaagctgctggcaaagaaggctcaagcacagccagttatgtaaatgtatctatcccaattgagacagctagaaacagttgactgactaaatggaaactagtctatttgacaaagtctttctgtgttggtgtctactgaagttatagtttacccttcctaaaaatgaaaagtttgtttcatatagtgagagaacgaaatctctatcggccagtcagatgtttctcatccttcttgctctgcctttgagttgttccgtgatcacttctgaataagcagctcgcccctgagttagcagctcgcccctgagttagcagctcgcccctgagttagcagctcgcccctgagttagcagctcgcccctgagttgt

SEQ ID NO: 385010 - DNA, 1359 bp, Homo sapiens
  misc_feature (1188)..(1188): n is a, c, g, or t
  misc_feature (1192)..(1192): n is a, c, g, or t
  misc_feature (1210)..(1210): n is a, c, g, or t
ggccctgggccggggtaagggagctcccaggcccgggatctcggctcaccggaccggtaccgcgcagcctccaactgccgttccatgcaggcgggcgcatttgggggaagattccactcccgggccgccgggggcactagggggggtggggtttccttccgcatctccacggttccaactccaacctagactcaaactggacgccggccggagactccgctccggcagcaaaccccacgtggtgcacctctgagcctccgcccctctcccgagggaaccgcaactctacttctcgcgagaattgcttctatggctccatcctgctttccggctgtcgccctcatgcgataggctctcagcgttacttgactcttctcgcgataattttttttaaaaatctcccaaggaaagttgaaggaagagtacaaaattttcatctcgcgagacttgtgagcggccatcttggttctgccctgacagattctcctatcggggtcacagggacgctaagattgctacctggactttcgttgaccatgctgtcccgggtggtactttccgccgccgccacagcggccccctctctgaagaatgcagccttcctaggtccaggggtattgcaggcaacaaggacctttcatacagggcagccacaccttgtccctgtaccacctcttcctgaatacggaggaaaagttcgttatggactgatccctgaggaattcttccagtttctttatcctaaaactggtgtaacaggaccctatgtactcggaactgggcttatcttgtacgctttatccaaagaaatatatgtgattagcgcagagaccttcactgccctatcagtactaggtgtaatggtctatggaattaaaaaatatggtccctttgttgcagactttgctgataaactcaatgagcaaaaacttgcccaactagaagaggcgaagcaggcttccatccaacacatccagaatgcaattgatacggagaagtcacaacaggcactggttcagaagcgccattacctttttgatgtgcaaaggaataacattgctatggctttggaagttacttaccgggaacgactgtatagagtatataaggaagtaaagaatcgcctggactatcatatatctgtgcagaacatgatgcgtcgaaaggaacaagaaccccttgttaatnggtngcaagagcgtggtgaagntttcccagcggaaggacatgcagtggcttggccagtggggaaaggtagccgcggttttattttcccgggaagaaaggtgcatgaatttggaattggggaattaccaaaagttagaaaatgaattgcgggaaagaagatttttcacacgc

SEQ ID NO: 385011 - DNA, 1227 bp, Homo sapiens
tgagaggcgagtggtcagtgcagttcggaagggagcgtggggtcttgagggacgggaaagaggggtacataggcttagtgatagagcctggcgggggtaaggaaagggcaaaccagatttcatttgactttgctgaccttcgccttgtctatctgcagccccctctctgaagaatgcagccttcctaggtccaggggtattgcaggcaacaaggacctttcatacagggcagccacaccttgtccctgtaccacctcttcctgaatacggaggaaaagttcgttatggactgatccctgaggaattcttccagtttctttatcctaaaactggtgtaacaggaccctatgtactcggaactgggcttatcttgtacgctttatccaaagaaatatatgtgattagcgcagagaccttcactgccctatcagtactaggtgtaatggtctatggaattaaaaaatatggtccctttgttgcagactttgctgataaactcaatgagcaaaaacttgcccaactagaagaggcgaagcaggcttccatccaacacatccagaatgcaattgatacggagaagtcacaacaggcactggttcagaagcgccattacctttttgatgtgcaaaggaataacattgctatggctttggaagttacttaccgggaacgactgtatagagtatataaggaagtaaagaatcgcctggactatcatatatctgtgcagaacatgatgcgtcgaaaggaacaagaacacatgataaattgggtggagaagcacgtggtgcaaagcatctccacacagcaggaaaaggagacaattgccaagtgcattgcggacctaaagctgctggcaaagaaggctcaagcacagccagttatgtaaatgtatctatcccaattgagacagctagaaacagttgactgactaaatggaaactagtctatttgacaaagtctttctgtgttggtgtctactgaagttatagtttacccttcctaaaaatgaaaagtttgtttcatatagtgagagaacgaaatctctatcggccagtcagatgtttctcatccttcttgctctgcctttgagttgttccgtgatcacttctgaataagcagtttgcctttataaaaacttgctgcctgactaaagattaacaggttatagtttaaatttgtaattaattctaccatcttgcaataaagtgacaattgaatgaaaca

SEQ ID NO: 385012 - DNA, 1167 bp, Homo sapiens
  misc_feature (27)..(27): n is a, c, g, or t
  misc_feature (68)..(68): n is a, c, g, or t
tttaaaaaagcagctgtaccgtcggantcccggatggacgctaaatgcacctgaatttcgtgacatgntgtcccggtgtactttccgcccctccacagcgccccctctctgaaaatgcagccttcctaggtccagggtattgcaggcaacaaggacctttcatacagggcagccacaccttgtccctgtaccacctcttcctgaatacggaggaaaagttcgttatggactgatccctgaggaattcttccagtttctttatcctaaaactggtgtaacaggaccctatgtactcggaactgggcttatcttgtacgctttatccaaagaaatatatgtgattagcgcagagaccttcactgccctatcagtactaggtgtaatggtctatggaattaaaaaatatggtccctttgttgcagactttgctgataaactcaatgagcaaaaacttgcccaactagaagaggcgaagcaggcttccatccaacacatccagaatgcaattgatacggagaagtcacaacaggcactggttcagaagcgccattacctttttgatgtgcaaaggaataacattgctatggctttggaagttacttaccgggaacgactgtatagagtatataaggaagtaaagaatcgcctggactatcatatatctgtgcagaacatgatgcgtcgaaaggaacaagaacacatgataaattgggtggagaagcacgtggtgcaaagcatctccacacagcaggaaaaggagacaattgccaagtgcattgcggacctaaagctgctggcaaagaaggctcaagcacagccagttatgtaaatgtatctatcccaattgagacagctagaaacagttgactgactaaatggaaactagtctatttgacaaagtctttctgtgttggtgtctactgaagttatagtttacccttcctaaaaatgaaaagtttgtttcatatagtgagagaacgaaatctctatcggccagtcagatgtttctcatccttcttgctctgcctttgagttgttccgtgatcacttctgaataagcagtttgcctttataaaaacttgctgcctgactaaagattaacaggttatagtttaaatttgtaattaattctaccatcttgcaataaagtgacaattgaatgaaaca

SEQ ID NO: 385013 - DNA, 1514 bp, Homo sapiens
  misc_feature (27)..(28): n is a, c, g, or t
  misc_feature (40)..(40): n is a, c, g, or t
  misc_feature (46)..(47): n is a, c, g, or t
  misc_feature (73)..(73): n is a, c, g, or t
  misc_feature (78)..(78): n is a, c, g, or t
  misc_feature (110)..(110): n is a, c, g, or t
  misc_feature (117)..(117): n is a, c, g, or t
  misc_feature (121)..(121): n is a, c, g, or t
  misc_feature (128)..(128): n is a, c, g, or t
  misc_feature (187)..(187): n is a, c, g, or t
  misc_feature (193)..(193): n is a, c, g, or t
  misc_feature (195)..(195): n is a, c, g, or t
  misc_feature (246)..(246): n is a, c, g, or t
  misc_feature (252)..(252): n is a, c, g, or t
  misc_feature (356)..(356): n is a, c, g, or t
  misc_feature (382)..(382): n is a, c, g, or t
tgacacccacatagcactgctactagnnacatcactcatnaggggnncgaatctgcgaagtgcttcttaccgncgtgntgtgctgtgcccgaccattacactctccgctnattagtncatnacactanactaccagcaacgcttactagtgactacatgcgccccaacactctgcgtcctgatgccntctganantctctcgtctgcatgagcctgtgaatctttgacgctgtcgtgctcgcctgnagcacnagtgcgtcctcgtatacgggcgtggtacacgagcggcaactgccttcagacgcattctcgcatcacccgtgcggaccttctctagcttcgaatcgctattagcnatcgtccgcggttcgcttgcgtatcntctatctctcgctctgccaggcccacctgctaggcccgcctcgtcgtcttggatatgacatcgcagaccgtctctctaaggacgcacgtgggtatattggcgacgcgcagactacagggacctttcatacagggcagccacaccttgtccctgtaccacctcttcctgaatacggaggaaaagttcgttatggactgatccctgaggaattcttccagtttctttatcctaaaactggtgtaacaggaccctatgtactcggaactgggcttatcttgtacgctttatccaaagaaatatatgtgattagcgcagagaccttcactgccctatcagtactaggtgtaatggtctatggaattaaaaaatatggtccctttgttgcagactttgctgataaactcaatgagcaaaaacttgcccaactagaagaggcgaagcaggcttccatccaacacatccagaatgcaattgatacggagaagtcacaacaggcactggttcagaagcgccattacctttttgatgtgcaaaggaataacattgctatggctttggaagttacttaccgggaacgactgtatagagtatataaggaagtaaagaatcgcctggactatcatatatctgtgcagaacatgatgcgtcgaaaggaacaagaacacatgataaattgggtggagaagcacgtggtgcaaagcatctccacacagcaggaaaaggagacaattgccaagtgcattgcggacctaaagctgctggcaaagaaggctcaagcacagccagttatgtaaatgtatctatcccaattgagacagctagaaacagttgactgactaaatggaaactagtctatttgacaaagtctttctgtgttggtgtctactgaagttatagtttacccttcctaaaaatgaaaagtttgtttcatatagtgagagaacgaaatctctatcggccagtcagatgtttctcatccttcttgctctgcctttgagttgttccgtgatcacttctgaataagcagtttgcctttataaaaacttgctgcctgactaaagattaacaggttatagtttaaatttgtaattaattctaccatcttgcaataaagtgacaattgaatgaaaca

SEQ ID NO: 385014 - DNA, 1499 bp, Homo sapiens
ggccctgggccggggtaagggagctcccaggcccgggatctcggctcaccggaccggtaccgcgcagcctccaactgccgttccatgcaggcgggcgcatttgggggaagattccactcccgggccgccgggggcactagggggggtggggtttccttccgcatctccacggttccaactccaacctagactcaaactggacgccggccggagactccgctccggcagcaaaccccacgtggtgcacctctgagcctccgcccctctcccgagggaaccgcaactctacttctcgcgagaattgcttctatggctccatcctgctttccggctgtcgccctcatgcgataggctctcagcgttacttgactcttctcgcgataattttttttaaaaatctcccaaggaaagttgaaggaagagtacaaaattttcatctcgcgagacttgtgagcggccatcttggttctgccctgacagattctcctatcggggtcacagggacgctaagattgctacctggactttcgttgaccatgctgtcccgggtggtactttccgccgccgccacagcggccccctctctgaagaatgcagccttcctaggtccagggaccctatgtactcggaactgggcttatcttgtacgctttatccaaagaaatatatgtgattagcgcagagaccttcactgccctatcagtactaggtgtaatggtctatggaattaaaaaatatggtccctttgttgcagactttgctgataaactcaatgagcaaaaacttgcccaactagaagaggcgaagcaggcttccatccaacacatccagaatgcaattgatacggagaagtcacaacaggcactggttcagaagcgccattacctttttgatgtgcaaaggaataacattgctatggctttggaagttacttaccgggaacgactgtatagagtatataaggaagtaaagaatcgcctggactatcatatatctgtgcagaacatgatgcgtcgaaaggaacaagaacacatgataaattgggtggagaagcacgtggtgcaaagcatctccacacagcaggaaaaggagacaattgccaagtgcattgcggacctaaagctgctggcaaagaaggctcaagcacagccagttatgtaaatgtatctatcccaattgagacagctagaaacagttgactgactaaatggaaactagtctatttgacaaagtctttctgtgttggtgtctactgaagttatagtttacccttcctaaaaatgaaaagtttgtttcatatagtgagagaacgaaatctctatcggccagtcagatgtttctcatccttcttgctctgcctttgagttgttccgtgatcacttctgaataagcagtttgcctttataaaaacttgctgcctgactaaagattaacaggttatagtttaaatttgtaattaattctaccatcttgcaataaagtgacaattgaatgaaaca

SEQ ID NO: 385015 - DNA, 1687 bp, Homo sapiens
ggccctgggccggggtaagggagctcccaggcccgggatctcggctcaccggaccggtaccgcgcagcctccaactgccgttccatgcaggcgggcgcatttgggggaagattccactcccgggccgccgggggcactagggggggtggggtttccttccgcatctccacggttccaactccaacctagactcaaactggacgccggccggagactccgctccggcagcaaaccccacgtggtgcacctctgagcctccgcccctctcccgagggaaccgcaactctacttctcgcgagaattgcttctatggctccatcctgctttccggctgtcgccctcatgcgataggctctcagcgttacttgactcttctcgcgataattttttttaaaaatctcccaaggaaagttgaaggaagagtacaaaattttcatctcgcgagacttgtgagcggccatcttggttctgccctgacagattctcctatcggggtcacagggacgctaagattgctacctggactttcgttgaccatgctgtcccgggtggtactttccgccgccgccacagcggccccctctctgaagaatgcagccttcctaggtccaggggtattgcaggcaacaaggacctttcatacagggcagccacaccttgtccctgtaccacctcttcctgaatacggaggaaaagttcgttatggactgatccctgaggaattcttccagtttctttatcctaaaactggtgtaacaggaccctatgtactcggaactgggcttatcttgtacgctttatccaaagaaatatatgtgattagcgcagagaccttcactgccctatcagtactaggtgtaatggtctatggaattaaaaaatatggtccctttgttgcagactttgctgataaactcaatgagcaaaaacttgcccaactagaagaggcgaagcaggcttccatccaacacatccagaatgcaattgatacggagaagtcacaacaggcactggttcagaagcgccattacctttttgatgtgcaaaggaataacattgctatggctttggaagttacttaccgggaacgactgtatagagtatataaggaagtaaagaatcgcctggactatcatatatctgtgcagaccctgattgggtccacggagcagacccttctacactgggtggggaacaccttgggcaaaccttccacacgcggagaaggggaccctggctccgggttgtggaccacaagtctgacacaggtccaccgcctgtaagtttctcccgagagaactccggcataaacctacaaatgcggtgatagcatacttgacaacgcatcgaaaaatcgcgattttgtgtggtcaatagtacgtgactatctacatctctctcaatccccacaacactatgcaagcgcgaacgaaaagaggacgaggcaaccgcacgtcacagctagcgatccgatcaggtcctgagatcgacagcggcacaaggcagcaaggagtagcgtcaccctcggagtcacgcacgggagcagagtaacccacggccgaggacggcgccggacaagatagagacacgaccatcgggacgcgagcacggcacagcggcgtagagacgcaagcaggccgcggaccgacagcaacccacgacccagaccaagacgcgcccagacccg

SEQ ID NO: 385016 - DNA, 1690 bp, Homo sapiens
ggccctgggccggggtaagggagctcccaggcccgggatctcggctcaccggaccggtaccgcgcagcctccaactgccgttccatgcaggcgggcgcatttgggggaagattccactcccgggccgccgggggcactagggggggtggggtttccttccgcatctccacggttccaactccaacctagactcaaactggacgccggccggagactccgctccggcagcaaaccccacgtggtgcacctctgagcctccgcccctctcccgagggaaccgcaactctacttctcgcgagaattgcttctatggctccatcctgctttccggctgtcgccctcatgcgataggctctcagcgttacttgactcttctcgcgataattttttttaaaaatctcccaaggaaagttgaaggaagagtacaaaattttcatctcgcgagacttgtgagcggccatcttggttctgccctgacagattctcctatcggggtcacagggacgctaagattgctacctggactttcgttgaccatgctgtcccgggtggtactttccgccgccgccacagcggccccctctctgaagaatgcagccttcctaggtccaggggtattgcaggcaacaaggacctttcatacagggcagccacaccttgtccctgtaccacctcttcctgaatacggaggaaaagttcgttatggactgatccctgaggaattcttctcagttttaggataaagaaactggaagaattcctcaggatcagtccagtttctttatcctaaaactggtgtaacaggaccctatgtactcggaactgggcttatcttgtacgctttatccaaagaaatatatgtgattagcgcagagaccttcactgccctatcagtactaggtgtaatggtctatggaattaaaaaatatggtccctttgttgcagactttgctgataaactcaatgagcaaaaacttgcccaactagaagaggcgaagcaggcttccatccaacacatccagaatgcaattgatacggagaagtcacaacaggcactggttcagaagcgccattacctttttgatgtgcaaaggaataacattgctatggctttggaagttacttaccgggaacgactgtatagagtatataaggaagtaaagaatcgcctggactatcatatatctgtgcagaacatgatgcgtcgaaaggaacaagaacacatgataaattgggtggagaagcacgtggtgcaaagcatctccacacagcaggaaaaggagacaattgccaagtgcattgcggacctaaagctgctggcaaagaaggctcaagcacagccagttatgtaaatgtatctatcccaattgagacagctagaaacagttgactgactaaatggaaactagtctatttgacaaagtctttctgtgttggtgtctactgaagttatagtttacccttcctaaaaatgaaaagtttgtttcatatagtgagagaacgaaatctctatcggccagtcagatgtttctcatccttcttgctctgcctttgagttgttccgtgatcacttctgaataagcagtttgcctttataaaaacttgctgcctgactaaagattaacaggttatagtttaaatttgtaattaattctaccatcttgcaataaagtgacaattgaatgaaaca

SEQ ID NO: 385017 - DNA, 1591 bp, Homo sapiens
ggccctgggccggggtaagggagctcccaggcccgggatctcggctcaccggaccggtaccgcgcagcctccaactgccgttccatgcaggcgggcgcatttgggggaagattccactcccgggccgccgggggcactagggggggtggggtttccttccgcatctccacggttccaactccaacctagactcaaactggacgccggccggagactccgctccggcagcaaaccccacgtggtgcacctctgagcctccgcccctctcccgagggaaccgcaactctacttctcgcgagaattgcttctatggctccatcctgctttccggctgtcgccctcatgcgataggctctcagcgttacttgactcttctcgcgataattttttttaaaaatctcccaaggaaagttgaaggaagagtacaaaattttcatctcgcgagacttgtgagcggccatcttggttctgccctgacagattctcctatcggggtcacagggacgctaagattgctacctggactttcgttgaccatgctgtcccgggtggtactttccgccgccgccacagcggccccctctctgaagaatgcagccttcctaggtccaggggtattgcaggcaacaaggacctttcatacagggcagccacaccttgtccctgtaccacctcttcctgaatacggaggaaaagttcgttatggactgatccctgaggaattcttccagtttctttatcctaaaactggtgtaacaggaccctatgtactcggaactgggcttatcttgtacgctttatccaaagaaatatatgtgattagcgcagagaccttcactgccctatcagtactaggtgtaatggtctatggaattaaaaaatatggtccctttgttgcagactttgctgataaactcaatgagaatgcaattgatacggagaagtcacaacaggcactggttcagaagcgccattacctttttgatgtgcaaaggaataacattgctatggctttggaagttacttaccgggaacgactgtatagagtatataaggaagtaaagaatcgcctggactatcatatatctgtgcagaacatgatgcgtcgaaaggaacaagaacacatgataaattgggtggagaagcacgtggtgcaaagcatctccacacagcaggaaaaggagacaattgccaagtgcattgcggacctaaagctgctggcaaagaaggctcaagcacagccagttatgtaaatgtatctatcccaattgagacagctagaaacagttgactgactaaatggaaactagtctatttgacaaagtctttctgtgttggtgtctactgaagttatagtttacccttcctaaaaatgaaaagtttgtttcatatagtgagagaacgaaatctctatcggccagtcagatgtttctcatccttcttgctctgcctttgagttgttccgtgatcacttctgaataagcagtttgcctttataaaaacttgctgcctgactaaagattaacaggttatagtttaaatttgtaattaattctaccatcttgcaataaagtgacaattgaatgaaaca

SEQ ID NO: 385018 - DNA, 708 bp, Homo sapiens
  misc_feature (38)..(38): n is a, c, g, or t
  misc_feature (41)..(41): n is a, c, g, or t
ggtaactcatggcaaactgcccactgagagcgagcggntcntccacactccgatgcattgatacggagagtcacacaggcactggttcagaagcgccttactgatgtgcaagaataacattgctatggctttggaagttacttaccgggaacgactgtatagagtatataaggaagtaaagaatcgcctggactatcatatatctgtgcagaacatgatgcgtcgaaaggaacaagaacacatgataaattgggtggagaagcacgtggtgcaaagcatctccacacagcaggaaaaggagacaattgccaagtgcattgcggacctaaagctgctggcaaagaaggctcaagcacagccagttatgtaaatgtatctatcccaattgagacagctagaaacagttgactgactaaatggaaactagtctatttgacaaagtctttctgtgttggtgtctactgaagttatagtttacccttcctaaaaatgaaaagtttgtttcatatagtgagagaacgaaatctctatcggccagtcagatgtttctcatccttcttgctctgcctttgagttgttccgtgatcacttctgaataagcagtttgcctttataaaaacttgctgcctgactaaagattaacaggttatagtttaaatttgtaattaattctaccatcttgcaataaagtgacaattgaatgaaaca

SEQ ID NO: 385019 - DNA, 474 bp, Homo sapiens
atagaagcagcccaatcggccatcagtagatgaatggataagcatctccacacagcaggaaaaggagacaattgccaagtgcattgcggacctaaagctgctggcaaagaaggctcaagcacagccagttatgtaaatgtatctatcccaattgagacagctagaaacagttgactgactaaatggaaactagtctatttgacaaagtctttctgtgttggtgtctactgaagttatagtttacccttcctaaaaatgaaaagtttgtttcatatagtgagagaacgaaatctctatcggccagtcagatgtttctcatccttcttgctctgcctttgagttgttccgtgatcacttctgaataagcagtttgcctttataaaaacttgctgcctgactaaagattaacaggttatagtttaaatttgtaattaattctaccatcttgcaataaagtgacaattgaatgaaaca

SEQ ID NO: 385020 - DNA, 997 bp, Homo sapiens
ggccctgggccggggtaagggagctcccaggcccgggatctcggctcaccggaccggtaccgcgcagcctccaactgccgttccatgcaggcgggcgcatttgggggaagattccactcccgggccgccgggggcactagggggggtggggtttccttccgcatctccacggttccaactccaacctagactcaaactggacgccggccggagactccgctccggcagcaaaccccacgtggtgcacctctgagcctccgcccctctcccgagggaaccgcaactctacttctcgcgagaattgcttctatggctccatcctgctttccggctgtcgccctcatgcgataggctctcagcgttacttgactcttctcgcgataattttttttaaaaatctcccaaggaaagttgaaggaagagtacaaaattttcatctcgcgagacttgtgagcggccatcttggttctgccctgacagattctcctatcggggtcacagggacgctaagattgctacctggactttcgttgaccatgctgtcccgggtggtactttccgccgccgccacagcggccccctctctgaagaatgcagccttcctaggtccaggggtattgcaggcaacaaggacctttcatacagggcagccacaccttgtccctgtaccacctcttcctgaatacggaggaaaagttcgttatggactgatccctgaggaattcttccagtttctttatcctaaaactggtgtaacaggaccctatgtactcggaactgggcttatcttgtacgctttatccaaagaaatatatgtgattagcgcagagaccttcactgccctatcttgctctgcctttgagttgttccgtgatcacttctgaataagcagtttgcctttataaaaacttgctgcctgactaaagattaacaggttatagtttaaatttgtaattaattctaccatcttgcaataaagtgacaattgaatgaaaca

SEQ ID NO: 385021 - DNA, 347 bp, Homo sapiens
tgcaaggctgatagaagggattccagtattgggtagaaggttaaatgtctgtgattaattctttgctgttgtcacagctgattactggaccctaaccttcccattcccagtccattctctttccattatgagagttagaaaactgcctcaattatcaaccctatttattgtttctgctcattattcatacactgtattctccttaaagaaacaggctttacatttgtacaattactacctgtagggtattgcaggcaacaaggacctttcatacagggcagccacaccttgtccctgtaccacctcttcctgaatacggaggaaaagttcgttatggactgatccct

SEQ ID NO: 385022 - DNA, 1211 bp, Homo sapiens
cggacgcgtgggtcgacccacgcgtggacgctaagattgctacctggactttcgttgaccatgctgtcccgggtggtactttccgccgccgccacagcggccccctctctgaagaatgcagccttcctaggtccaggggtattgcaggcaacaaggacctttcatacagggcagccacaccttgtccctgtaccacctcttcctgaatacggaggaaaagttcgttatggactgatccctgaggaattcttccagtttctttatcctaaaactggtgtaacaggaccctatgtactcggaactgggcttatcttgtacgctttatccaaagaaatatatgtgattagcgcagagaccttcactgccctatcagtactaggtgtaatggtctatggaattaaaaaatatggtccctttgttgcagactttgctgataaactcaatgagcaaaaacttgcccaactagaagaggcgaagcaggcttccatccaacacatccagaatgcaattgatacggagaagtcacaacaggcactggttcagaagcgccattacctttttgatgtgcaaaggaataacattgctatggctttggaagttacttaccgggaacgactgtatagagtatataaggaagtaaagaatcgcctggactatcatatatctgtgcagaccctgattgggtccacggagcagacccttctacactgggtggggaacaccttgggcaaaccttccacacgcggagaaggggaccctggctccgggttgtggaccacaagtctgacacaggtccaccgcctgtaagtttctcccgagagaactccggcataaacctacaaatgcggtgatagcatacttgacaacgcatcgaaaaatcgcgattttgtgtggtcaatagtacgtgactatctacatctctctcaatccccacaacactatgcaagcgcgaacgaaaagaggacgaggcaaccgcacgtcacagctagcgatccgatcaggtcctgagatcgacagcggcacaaggcagcaaggagtagcgtcaccctcggagtcacgcacgggagcagagtaacccacggccgaggacggcgccggacaagatagagacacgaccatcgggacgcgagcacggcacagcggcgtagagacgcaagcaggccgcggaccgacagcaacccacgacccagaccaagacgcgcccagacccg

SEQ ID NO: 385023 - DNA, 1544 bp, Homo sapiens
accgcacagaacagcgttccggccgggtctggatctgagctcaggaacgcggggcagggctggggacagctcggtgacgcgacccaggactcaaactggacgccggccggagactccgctccggcagcaaaccccacgtggtgcacctctgagcctccgcccctctcccgagggaaccgcaactctacttctcgcgagaattgcttctatggctccatcctgctttccggctgtcgccctcatgcgataggctctcagcgttacttgactcttctcgcgataattttttttaaaaatctcccaaggaaagttgaaggaagagtacaaaattttcatctcgcgagacttgtgagcggccatcttggttctgccctgacagattctcctatcggggtcacagggacgctaagattgctacctggactttcgttgaccatgctgtcccgggtggtactttccgccgccgccacagcggccccctctctgaagaatgcagccttcctaggtccaggggtattgcaggcaacaaggacctttcatacagggcagccacaccttgtccctgtaccacctcttcctgaatacggaggaaaagttcgttatggactgatccctgaggaattcttccagtttctttatcctaaaactggtgtaacaggaccctatgtactcggaactgggcttatcttgtacgctttatccaaagaaatatatgtgattagcgcagagaccttcactgccctatcagtactaggtgtaatggtctatggaattaaaaaatatggtccctttgttgcagactttgctgataaactcaatgagcaaaaacttgcccaactagaagaggcgaagcaggcttccatccaacacatccagaatgcaattgatacggagaagtcacaacaggcactggttcagaagcgccattacctttttgatgtgcaaaggaataacattgctatggctttggaagttacttaccgggaacgactgtatagagtatataaggaagtaaagaatcgcctggactatcatatatctgtgcagaacatgatgcgtcgaaaggaacaagaacacatgataaattgggtggagaagcacgtggtgcaaagcatctccacacagcaggaaaaggagacaattgccaagtgcattgcggacctaaagctgctggcaaagaaggctcaagcacagccagttatgtaaatgtatctatcccaattgagacagctagaaacagttgactgactaaatggaaactagtctatttgacaaagtctttctgtgttggtgtctactgaagttatagtttacccttcctaaaaatgaaaagtttgtttcatatagtgagagaacgaaatctctatcggccagtcagatgtttctcatccttcttgctctgcctttgagttgttccgtgatcacttctgaataagcagtttgcctttataaaaacttgctgcctgactaaagattaacaggttatagtttaaatttgtaattaattctaccatcttgcaataaagtgacaattgaatgaaaca

SEQ ID NO: 385024 - DNA, 2216 bp, Homo sapiens
ggccctgggccggggtaagggagctcccaggcccgggatctcggctcaccggaccggtaccgcgcagcctccaactgccgttccatgcaggcgggcgcatttgggggaagattccactcccgggccgccgggggcactagggggggtggggtttccttccgcatctccacggttccaactccaacctagactcaaactggacgccggccggagactccgctccggcagcaaaccccacgtggtgcacctctgagcctccgcccctctcccgagggaaccgcaactctacttctcgcgagaattgcttctatggctccatcctgctttccggctgtcgccctcatgcgataggctctcagcgttacttgactcttctcgcgataattttttttaaaaatctcccaaggaaagttgaaggaagagtacaaaattttcatctcgcgagacttgtgagcggccatcttggttctgccctgacagattctcctatcggggtcacagggacgctaagattgctacctggactttcgttgaccatgctgtcccgggtggtactttccgccgccgccacagcggccccctctctgaagaatgcagccttcctaggtccaggggtattgcaggcaacaaggacctttcatacagggcagccacaccttgtccctgtaccacctcttcctgaatacggaggaaaagttcgttatggactgatccctgaggaattcttccagtttctttatcctaaaactggtgtaacaggaccctatgtactcggaactgggcttatcttgtacgctttatccaaagaaatatatgtgattagcgcagagaccttcactgccctatcagtactaggtgtaatggtctatggaattaaaaaatatggtccctttgttgcagactttgctgataaactcaatgagcaaaaacttgcccaactagaagaggcgaagcaggcttccatccaacacatccagaatgcaattgatacggagaagtcacaacaggcactggttcagaagcgccattacctttttgatgtgcaaaggaataacattgctatggctttggaagttacttaccgggaacgactgtatagagtatataaggaagtaaagaatcgcctggactatcatatatctgtgcagaacatgatgcgtcgaaaggaacaagaacacatgataaattgggtggagaagcacgtggtgcaaagcatctccacacagcaggaaaaggagacaattgccaagtgcattgcggacctaaagctgctggcaaagaaggctcaagcacagccagttatgtaaatgtatctatcccaattgagacagctagaaacagttgactgactaaatggaaactagtctatttgacaaagtctttctgtgttggtgtctactgaagttatagtttacccttcctaaaaatgaaaagtttgtttcatatagtgagagaacgaaatctctatcggccagtcagatgtttctcatccttcttgctctgcctttgagttgttccgtgatcacttctgaataagcagtttgcctttataaaaacttgctgcctgactaaagattaacaggttatagtttaaatttgtaattaattctaccatcttgcaataaagtgacaattgaatgaaacagggtttttcaagttgtataattctctgaaatactcagcttttgtcatatgggtaaaaattaaagatgtcattgaactactgtcttgtttatgagaccattcagtggtgaactgtttctggctgataggttatgagatatgtaaagctttctagtactcttaaaataactaaatggagtattatatatcaattcatatcattgactttattattttagtagtatgcctatagaaaatattatggactcagagtgtcataaaatcactcttaagaatccatgcagcaggccaggcacagtggctcacacctgtaatgcctgcactttggaaggccgagacaggcggatcacttgaggtcaggagtttgaaaccagccaggccaacacagtgaaaccctgtctctactaaaaatacaaaaggttagccgggcatggtggcaggcgcctgtaatcccagctactcaggaggctgaggcaggagaattgcttgaacgcaggaggcaaaggttgcagtgagctgagatcacgccactgcactccagcctgggcaacagacctcgactccatctagaa

SEQ ID NO: 385025 - DNA, 1683 bp, Homo sapiens
ggccctgggccggggtaagggagctcccaggcccgggatctcggctcaccggaccggtaccgcgcagcctccaactgccgttccatgcaggcgggcgcatttgggggaagattccactcccgggccgccgggggcactagggggggtggggtttccttccgcatctccacggttccaactccaacctagactcaaactggacgccggccggagactccgctccggcagcaaaccccacgtggtgcacctctgagcctccgcccctctcccgagggaaccgcaactctacttctcgcgagaattgcttctatggctccatcctgctttccggctgtcgccctcatgcgataggctctcagcgttacttgactcttctcgcgataattttttttaaaaatctcccaaggaaagttgaaggaagagtacaaaattttcatctcgcgagacttgtgagcggccatcttggttctgccctgacagattctcctatcggggtcacagggacgctaagattgctacctggactttcgttgaccatgctgtcccgggtggtactttccgccgccgccacagcggccccctctctgaagaatgcagccttcctaggtccaggggtattgcaggcaacaaggacctttcatacagggcagccacaccttgtccctgtaccacctcttcctgaatacggaggaaaagttcgttatggactgatccctgaggaattcttccagtttctttatcctaaaactggtgtaacaggaccctatgtactcggaactgggcttatcttgtacgctttatccaaagaaatatatgtgattagcgcagagaccttcactgccctatcagtactaggtgtaatggtctatggaattaaaaaatatggtccctttgttgcagactttgctgataaactcaatgagcaaaaacttgcccaactagaagaggcgaagcaggcttccatccaacacatccagaatgcaattgatacggagaagtcacaacaggcactggttcagaagcgccattacctttttgatgtgcaaaggaataacattgctatggctttggaagttacttaccgggaacgactgtatagagtatataaggaagtaaagaatcgcctggactatcatatatctgtgcagaacatgatgcgtcgaaaggaacaagaacacatgataaattgggtggagaagcacgtggtgcaaagcatctccacacagcaggaaaaggagacaattgccaagtgcattgcggacctaaagctgctggcaaagaaggctcaagcacagccagttatgtaaatgtatctatcccaattgagacagctagaaacagttgactgactaaatggaaactagtctatttgacaaagtctttctgtgttggtgtctactgaagttatagtttacccttcctaaaaatgaaaagtttgtttcatatagtgagagaacgaaatctctatcggccagtcagatgtttctcatccttcttgctctgcctttgagttgttccgtgatcacttctgaataagcagtttgcctttataaaaacttgctgcctgactaaagattaacaggttatagtttaaatttgtaattaattctaccatcttgcaataaagtgacaattgaatgaaacaaaaaaagggggggcgcaaaaatacccccggggccagtt

SEQ ID NO: 385026 - DNA, 1382 bp, Homo sapiens
  misc_feature (1230)..(1230): n is a, c, g, or t
  misc_feature (1232)..(1232): n is a, c, g, or t
  misc_feature (1243)..(1243): n is a, c, g, or t
  misc_feature (1281)..(1281): n is a, c, g, or t
  misc_feature (1295)..(1296): n is a, c, g, or t
  misc_feature (1302)..(1302): n is a, c, g, or t
  misc_feature (1305)..(1305): n is a, c, g, or t
ggccctgggccggggtaagggagctcccaggcccgggatctcggctcaccggaccggtaccgcgcagcctccaactgccgttccatgcaggcgggcgcatttgggggaagattccactcccgggccgccgggggcactagggggggtggggtttccttccgcatctccacggttccaactccaacctagactcaaactggacgccggccggagactccgctccggcagcaaaccccacgtggtgcacctctgagcctccgcccctctcccgagggaaccgcaactctacttctcgcgagaattgcttctatggctccatcctgctttccggctgtcgccctcatgcgataggctctcagcgttacttgactcttctcgcgataattttttttaaaaatctcccaaggaaagttgaaggaagagtacaaaattttcatctcgcgagacttgtgagcggccatcttggttctgccctgacagattctcctatcggggtcacagggacgctaagattgctacctggactttcgttgaccatgctgtcccgggtggtactttccgccgccgccacagcggccccctctctgaagaatgcagccttcctaggtccaggggtattgcaggcaacaaggacctttcatacagggcagccacaccttgtccctgtaccacctcttcctgaatacggaggaaaagttcgttatggactgatccctgaggaattcttccagtttctttatcctaaaactggtgtaacaggaccctatgtactcggaactgggcttatcttgtacgctttatccaaagaaatatatgtgattagcgcagagaccttcactgccctatcagtactaggtgtaatggtctatggaattaaaaaatatggtccctttgttgcagactttgctgataaactcaatgagcaaaaacttgcccaactagaagaggcgaagcaggcttccatccaacacatccagaatgcaattgatacggagaagtcacaacaggcactggttcagaagcgccattacctttttgatgtgcaaaggaataacattgctatggctttggaagttacttaccgggaacgactgtatagagtatataaggaagtaaagaatcgcctggactatcatatatctgtgcagaacatgatgcgtcgaaaggaacaagaacacatgataaattgggtggagaagcacgtggtgcaaagcatctccacacagcagnangggacatgccntgctgggcccaagtgtggaaaggccgccccgttttatntttccctggactanngctgcnagnacatttgaacttggggggcgcgaaacccccaaagggtttgaacccgagagacctcggagaaaacacacaatcccaac

SEQ ID NO: 385027 - DNA, 1198 bp, Homo sapiens
ggccgtgagcgatgcttcaatcgtggttctcccagatctcaagatggctaacaggagggacgataactagagctgcagcgagttggataatctggccgtggggcgatcattagcgaggacccctgcttctgcacagaatgcaggaaccttacacatagagtccaggggtattgcaggcaacaaggacctttcatacagggcagccacaccttgtccctgtaccacctcttcctgaatacggaggaaaagttcgttatggactgatccctgaggaattcttccagtttctttatcctaaaactggtgtaacaggaccctatgtactcggaactgggcttatcttgtacgctttatccaaagaaatatatgtgattagcgcagagaccttcactgccctatcagtactaggtgtaatggtctatggaattaaaaaatatggtccctttgttgcagactttgctgataaactcaatgagcaaaaacttgcccaactagaagaggcgaagcaggcttccatccaacacatccagaatgcaattgatacggagaagtcacaacaggcactggttcagaagcgccattacctttttgatgtgcaaaggaataacattgctatggctttggaagttacttaccgggaacgactgtatagagtatataaggaagtaaagaatcgcctggactatcatatatctgtgcagaacatgatgcgtcgaaaggaacaagaacacatgataaattgggtggagaagcacgtggtgcaaagcatctccacacagcaggaaaaggagacaattgccaagtgcattgcggacctaaagctgctggcaaagaaggctcaagcacagccagttatgtaaatgtatctatcccaattgagacagctagaaacagttgactgactaaatggaaactagtctatttgacaaagtctttctgtgttggtgtctactgaagttatagtttacccttcctaaaaatgaaaagtttgtttcatatagtgagagaacgaaatctctatcggccagtcagatgtttctcatccttcttgctctgcctttgagttgttccgtgatcacttctgaataagcagtttgcctttataaaaacttgctgcctgactaaagattaacaggttatagtttaaatttgtaattaattctaccatcttgcaataaagtgacaattgaatgaaaca

SEQ ID NO: 385028 - DNA, 1462 bp, Homo sapiens
ggccctgggccggggtaagggagctcccaggcccgggatctcggctcaccggaccggtaccgcgcagcctccaactgccgttccatgcaggcgggcgcatttgggggaagattccactcccgggccgccgggggcactagggggggtggggtttccttccgcatctccacggttccaactccaacctagactcaaactggacgccggccggagactccgctccggcagcaaaccccacgtggtgcacctctgagcctccgcccctctcccgagggaaccgcaactctacttctcgcgagaattgcttctatggctccatcctgctttccggctgtcgccctcatgcgataggctctcagcgttacttgactcttctcgcgataattttttttaaaaatctcccaaggaaagttgaaggaagagtacaaaattttcatctcgcgagacttgtgagcggccatcttggttctgccctgacagattctcctatcggggtcacagggacgctaagattgctacctggactttcgttgaccatgctgtcccgggtggtactttccgccgccgccacagcgggaccctatgtactcggaactgggcttatcttgtacgctttatccaaagaaatatatgtgattagcgcagagaccttcactgccctatcagtactaggtgtaatggtctatggaattaaaaaatatggtccctttgttgcagactttgctgataaactcaatgagcaaaaacttgcccaactagaagaggcgaagcaggcttccatccaacacatccagaatgcaattgatacggagaagtcacaacaggcactggttcagaagcgccattacctttttgatgtgcaaaggaataacattgctatggctttggaagttacttaccgggaacgactgtatagagtatataaggaagtaaagaatcgcctggactatcatatatctgtgcagaacatgatgcgtcgaaaggaacaagaacacatgataaattgggtggagaagcacgtggtgcaaagcatctccacacagcaggaaaaggagacaattgccaagtgcattgcggacctaaagctgctggcaaagaaggctcaagcacagccagttatgtaaatgtatctatcccaattgagacagctagaaacagttgactgactaaatggaaactagtctatttgacaaagtctttctgtgttggtgtctactgaagttatagtttacccttcctaaaaatgaaaagtttgtttcatatagtgagagaacgaaatctctatcggccagtcagatgtttctcatccttcttgctctgcctttgagttgttccgtgatcacttctgaataagcagtttgcctttataaaaacttgctgcctgactaaagattaacaggttatagtttaaatttgtaattaattctaccatcttgcaataaagtgacaattgaatgaaaca

SEQ ID NO: 385029 - DNA, 1273 bp, Homo sapiens
ggccctgggccggggtaagggagctcccaggcccgggatctcggctcaccggaccggtaccgcgcagcctccaactgccgttccatgcaggcgggcgcatttgggggaagattccactcccgggccgccgggggcactagggggggtggggtttccttccgcatctccacggttccaactccaacctagactcaaactggacgccggccggagactccgctccggcagcaaaccccacgtggtgcacctctgagcctccgcccctctcccgagggaaccgcaactctacttctcgcgagaattgcttctatggctccatcctgctttccggctgtcgccctcatgcgataggctctcagcgttacttgactcttctcgcgataattttttttaaaaatctcccaaggaaagttgaaggaagagtacaaaattttcatctcgcgagacttgtgagcggccatcttggttctgccctgacagattctcctatcggggtcacagggacgctaagattgctacctggactttcgttgaccatgctgtcccgggtggtactttccgccgccgccacagcggccccctctctgaagaatgcagccttcctaggtccaggggtattgcaggcaacaaggacctttcatacagggcagccacaccttgtccctgtaccacctcttcctgaatacggaggaaaagttcgttatggactgatccctgaggaattcttccagtttctttatcctaaaactggtgtaacaggaccctatgtactcggaactgggcttatcttgtacgctttatccaaagaaatatatgtgattagcgcagagaccttcactgccctatcagtactaggtgtaatggtctatggaattaaaaaatatggtccctttgttgcagactttgctgataaactcaatgagcaaaaactcactcatgatagaagaaacgcaaatttaaaataccaatgatatcacttttcacccatcaggttggcaaagatcatgtaatttaatgtgctgacaaaattaaggggaaagtgaaactgccgtaccagtatctaccacaagtaaaccacacatattctttaacctagtaattctaattctacttgtaagtaagaatttatcatagctacacaaaagtttcacacaaggatgaaatgaatgtgttagaagttacttattacagcattgtttgaccagaaaagactcggggggccaggagtggtggctcatgcctgtaatcccagcacactgggaggccgaggtgg

SEQ ID NO: 385030 - DNA, 628 bp, Homo sapiens
gtgttactgggctgaaagaccacacccaaaacagtgtctggtatctaatctgtgtaaataagtgttactgggctggaccaaacaattttgaggtagtcacaattcagttgttaggattacaggcatgagtttttccaatagattttagttataagacaactaagcttttattaaaattttattattcttctaaacaccatcttgcagcaactgaatgagataggtactgatattatccttgttctatggacaaaaaagctaaggtttaaagatattaagtagtttgtctaagtttacattatcagtgagcaattgagccagattttgaatatggccagtcttacactagcatctagagtcttaaccactatgttgtttaacagcattacctaatgcattatttcctttacagaaaggcaaacttttacatggataggacacacaattgtacatttcagatagctcatatatgctaaaagcttactgaacaagtatttctgtattgttatctttgactttctatatcattgttcttactgtgaatcccacgttactgagcacaaagttgacagtaatacatattaatagctcacctctttttaattaaaattcatcttttcttcatcgt

SEQ ID NO: 385031 - DNA, 285 bp, Homo sapiens
taaaacataatccctgttcttaagttgttttctcttaatccaaaggattgaaataaagtcaagtgatcaaggtactgggttggggaggcatgaaataaggtgtgaaaggacgtatggcagacatttgggtcttattctttatagcactttttttagtaatcactggcaaattgttctcctacccagattgccttcccctgtctttgtcagctcttagtattgtcaacctatcttgtcttgggtttaataaaatattcatctaataaatatgtgtgttaaactctt

SEQ ID NO: 385032 - DNA, 449 bp, Homo sapiens
gactatattttctaattgttctaagataaacgtattgtttttaaatataacaaattattttttaaaaatattttacaactagaaaacaataaaaagttatatattcttaaaagattttctaaaatggtaatttaaattactcctcctcaaaaaatttaagttacattagcaaaacttgacaaatgataaaaaaaaaaattaatgtcattagagcagtgttcattaattgcttactaacattcagtcagtcagtacctctggataggagaattgctagaacccaggcgatggaggttgcagtgagccgagatcacgccactgcactccagcctgggcgacacagtgagactctgtctcaaaataaataaataaataaacaaacaaaaataaaagaagtataccaataaagtacttttacacaaaactaaacaaaacaagcagaccaaaaa

SEQ ID NO: 385033 - DNA, 553 bp, Homo sapiens
tatgcgtgagttgcacgcctgagtgcctctatgggttttgtggctcgtggcttttatgaagggaccagaatgttaggaactctggagttgggaattgctgcaggagaaccgtgttccgcatttcgttcttctagagcagaggttggtaaagcacggcccatgggtcaaatctggtccaccatctgcctctgtcagactttcccgggcataggcagttggtttacatactggctgtggctgctttcacaccaccacagcagcgagtggttgcgacagacgtcgtaaaacccgtaaagcccgagatatctgccactgggctctttacagaaaatgtttgccgacccctgttcggagcaagctttgtctaaaggactttatttcatttagtgacagtgagataatttattgctgcaaagaacttatagccaaatatgttctattttgtctggtgaaacagaatggcaagagctttttagatactttgaggtttgggaacagcaccgttgagggtgagaagttggttttgatggacttattccatgatgatgctgga

SEQ ID NO: 385034 - DNA, 683 bp, Homo sapiens
cacataatgtgccagtcatcactggtagcaaagatttacagaatgtcaatatcattccgtgcatcctctttgggcctgtcactagccagcttcctcgcatcttcaccaggatcggagaagactatgatgagcgtgtgctgccatccatcactactgagatcctcaagtcagtggtggctcgctttgatgctggagaactaatcacccagagagaactggtctccaggcaggtgagcgacgaccttatggagcgagcagccacctttgggctcatcctggatgatgtgtctttgacacatctgaccttcaggaaggagttcacagaagcagctggaagccaaacaggtggctcagcaggatgcagagagggccagaactcactggccactgcaggggacggcctgatggagctgtgcaagctggaagctgcagaggacatcacgtaccagctctctcgctcttggaacatcaccaatctgccggcagggcagtccgtgctcctccagctgccccagtgagggcccaccctgcctgcacctccatgggccaactaggccacagccccagtgattcttaacactgccttccttctgcctccactccagaaatcactgtgaaatttcatgattggcttaaagtgaaggaaatacagataaaatcacttcagatctccaaaaaaaaaa

SEQ ID NO: 385035 - DNA, 653 bp, Homo sapiens
ggtcgacgtgagccaagatcgtgccactgcactccagcctggcaacagagccagactccatctcaaaaaaaaaaaaaaaatctcgttgaaaattacattattttctttttaacgtagagctgtcacacatttttttaaaaaaagagaccaaagcattagcatattgtaaatgtattttaatgccaggagatatacccatttccagaatggaaatgaatgttattttacatatttcttaattgtactgttttattgttctaaacaaatacgatttcaatattgctttgataacaagctgtagtcagttgtaattctaactgatggcaggcaaatgagtcagagaatctcttaatgttgtagcttaaattttctgaggaactaagccaaatgactagaaatataaagttttgtctccaaggaaatgtcaagtattaatatcacagtaagtgagaaaggaagtgcatggagatggaacaattgatgaaaaccaagtccccagttataaggagacaacagagcacttaagcaaagtatttggaacatgattatcactagggcattttaactgatccctgtgctgaaaggaagtagccttgtttggcaacccttctatatttgtacttgtgttttgttcttctcatgtcaatctacca

SEQ ID NO: 385036 - DNA, 337 bp, Homo sapiens
ctaatttagaactaggaagattatatttcaatgttaataaaatttagaagcatcgtgggccgttatcttttttatgaagtatcattgaactttgttatataaccaagtattcagtcatgtataatgaaatttagtcagtaatatgatcatagtatctgccttctcaaaatttgctcattcttttggaaagaatgagggatggagaatgatggaaagatttgtgtaatttaatgatggtggtgtggtgggggagtagacagatgcacatataaaggaataacactagcacactgaacatttactgtgcagtcactgttctaagaagtttcatgtattt

SEQ ID NO: 385037 - DNA, 369 bp, Homo sapiens
agactgacttaacaaataacgccagactatacattcattggagttttgaccctcttaaaattggcatgcaaaataatttcctgatggtagccacccacgtaagcttatggtttgatgaccatagcagcaccttctgttttggagatttttcttacttcctgaaaaatacagtatcccacggttctgaggcaggactatatgctcagaaatgacacaatgattatttgaatatattcagtggtagaaagtatctttttagtgttgaatgtttcagtaacagcaaaaaatcatttggaacttagcatgcgtgtaaagtaatgagacaaattgtcttttctggtattgggggcattttcaaaagagacttaa

SEQ ID NO: 385038 - DNA, 2607 bp, Homo sapiens
ccatgttggtcaggttggcctcgaactcctgatctcaggtgatccacctgcctcggcttctcaaagtgctgggattccaggcatgagccaccatgcctggccgcatgtgtcattttcttgggtgttatactgatcgtatatttgcaggtttgcttttgtgacagacttcttctgggggaaaaaaagtatccttctatctttttacttttgtccagttccaggtatccctgtttttttcttcactcttccttccttgttcatgggagtttttcttgaggacttcaagcccagcttcggagaatcctggttgtgtcatctcatctcctttctgctctcttctctacctagcctttccaccctcacacctcccggggtctgaaaatggaaagataagggtgtttccctgaaagttgctcttctgtgtggggatgacaggttctaaagactcttttctggtccctgccctcattgccatgattaatcagttaagtggcccgaggttttataacagcacagtcttaaaatgcttctcccaagtttaatttctctccatttgaccttttaaggatgtgaattggctttaagcagtagactccctttagtacggcgctgtgagcctctcagtgaatctgctacatccattccacccacgggtctggaaacttgtctgtttacctttccctaaaaacctaagatatatttttaagaagtgccttgtaacttttcatatagcctttcccctactttgggtagactgtttcttacaggaatttggtagatctttccaaagagaattctgtatctgtatttttaaagcataaatcctgtcaactttggaggagaactgatttggcttgagttttctcagacatgggaacttttgacctaagtttgtattttacattgttgaaagggaactccgggatcccagaaaacatatggactgcaattgggtaaagcttctgttccagaaatgcctcttctggacatttcatacaaatggaaacatgcagcatgtagtaatttatgacagcttctttcacttagcatgaggttttcaaagttcattgatgtggtagcatttgtcagtactctgtgcctttttatggctgaataatattttatcatatggatttaccacattttatcattttatttatccatcatcagttgattgacatttgagttgcttctactttttgagtattatcaataattctgttatgaacattcttgtacaattttttggtagacatttatcttcatatttcttggatatatacctaggagcagaattgctgcgtcagatggtaatgctgtttaaccttttcaggaactgtcagactgttctgaagtgggtacattattttacattccaaccagcagtgtatgagaattccagtttctccacatcctcatcaacagttgttattgtctgtcttttttattatattcatctgtaatgtgaagtgtttatctcattgtggttttgatttacatttccctgatggttgatgattttcaacatcttttcatatacttattagtcattatgtatcttctttggagaatgtctgttcagatcctttacctactttataattggtttatctttttaatattgaactgtaatagtttttaaaaaatatatcctaaatacaagtctcttatcagataatatgatttgcagatattttctgtcattctatgtactgtcttttcacattcttgatgatagacttttcagcccaaatgtttttaacttgatggaatacaatttattttttcttttgttgcttgtgctttcagtcatatttgtgaaaactttgcttatcccacattacaaagatttactatttctaagtgatttataattttaccacctacctttaggtctctgatccattttgagttaatttttatgtgcgaggagggagtctaacttgattcttttacatgtggatatttagttgtcccaggaccatttgttgaattaagtgcccagaacaagtacatctatatatagagaaagtagattagtggttgtcagagactgtaagaagtggggaattggagagtgactgcccataggtacaggcatgctttttggcattatgaaaatattctggaattaggtagtggtgatggttgcagaacttttggaatatggtaaaagacactgaaatatatgcttaaaaatggtgatttttgtgatatatgaattatactatagaactaataataacagtaataaagcaaggtgtctttccacatctccatgccttgtattttcattaaaaaaaaaaaaaaaaaagcatttcagggccaggctcagtggtttactcttgtaatcccagcacttttggaggcctaggtgggaggatcacttgaggccagaagttcaaaaccagcctgagcaacatagcaagaccttgtctccatgaaaaataaaaaattagccagaaatggtgatgtgtgcctagagttccaactacttggaaagctgaggcaagaggatcgcttgagcctaggagttcaaggttgcagtgatctataatcaccactgcactccagcctgggtgacagaacaagaccctgtctcaaaaa

SEQ ID NO: 385039 - DNA, 964 bp, Homo sapiens
ggacccggtgaccagggccatctcggactacacgcagacgctgtccaagcggcccgacatccccaccttcgagagcttgacgttcaaaaacaggacagcgggcctcatcgacacgtcgtggagcgccatccagatcggcatctacgccaagcacctggagcactggctgcgccacttccccatccgccagatgctcttcgtgagcggcgagcggctcatcagcgacccggccggggagctgggccgcgtgcaagacttcctgggcctcaagaggatcatcacggacaagcacttctacttcaacaagaccaagggcttcccctgcctgaagaaggcggagggcagcagccggccccattgcctgggcaagaccaagggcaggacccatcctgagatcgaccgcgaggtggtgcgcaggctgcgcgagttctaccggcctttcaacctcaagttctaccagatgaccgggcacgactttggctgggattgagcagacccgggctatgtaccttacccacgtggcttatctattgacagagattatatgtatgtaaaatgtacagaaatctattttataataatttatttttaattcataagcaattaattcactaagctgcctagccacactctttagagagttagcttcataatctgttaacattccaaagtgtttaactctagtatttcgttctcttcttcacaattgatggtgcttctattttttcttctcccctacctgttatatttaaaacaaagaaaagcacaacttgagatttttgttgttacgggtattcagccttcagtcaccgtctgagttctccagttgctgcctccttgtcttgtcttgggtctcccattccagcttccctgtctcttcctgcctgtgtacctcgtaggaacgctgagctgcctcaacagggctgtattctgaagggcaggcctcatgcagcagcctccttgc

SEQ ID NO: 385040 - DNA, 411 bp, Homo sapiens
accaatggggcctcctctctgcagcaaccccttccactcccatattacatgttcattcatctacatcattcatcatttttcttgactacaattctatttttcttgtctaacccatcacacaatttaaaatcgctttcctatattaattccccaactacctataaataaagaagctttagtccccaaacagctaaatggtaaagtctcctgccttctcctctctgcttccagaaagcctaaagtcagaccgtcaaccctcacatagggaatttgagggtcaaactctaaaaatcctgaatctccagagaaaaagaaccaaacattgacatttttgaggagccatccccttccacacataacagattcagaagaaaaatctggcttgcaacttggtcactccatagtgagacc

SEQ ID NO: 385041 - DNA, 3800 bp, Homo sapiens
  misc_feature (3756)..(3756): n is a, c, g, or t
  misc_feature (3789)..(3791): n is a, c, g, or t
gaggaaaggctgtctccacccacctctcgcactctcccttctcctttataaaggccggaacagctgaaagggtggcaacttctcctcctgcggccgggagcggcctgcctgcctccctgcgcacccgcagcctcccccgctgcctccctagggctcccctccggccgccagcgcccatttttcattccctagatagagatactttgcgcgcacacacatacatacgcgcgcaaaaaggaaaaaaaaaaaaaaaagcccaccctccagcctcgctgcaaagagaaaaccggagcagccgcagctcgcagctcgcagctcgcagcccgcagcccgcagaggacgcccagagcggcgagcaggcgggcagacggaccgacggactcgcgccgcgtccacctgtcggccgggcccagccgagcgcgcagcgggcacgccgcgcgcgcggagcagccgtgcccgccgcccgggcccgccgccagggcgcacacgctcccgcccccctacccggcccgggcgggagtttgcacctctccctgcccgggtgctcgagctgccgttgcaaagccaactttggaaaaagttttttgggggagacttgggccttgaggtgcccagctccgcgctttccgattttgggggcctttccagaaaatgttgcaaaaaagctaagccggcgggcagaggaaaacgcctgtagccggcgagtgaagacgaaccatcgactgccgtgttccttttcctcttggaggttggagtcccctgggcgcccccacacggctagacgcctcggctggttcgcgacgcagccccccggccgtggatgctgcactcgggctcgggatccgcccaggtagcggcctcggacccaggtcctgcgcccaggtcctcccctgccccccagcgacggagccggggccgggggcggcggcgccgggggccatgcgggtgagccgcggctgcagaggcctgagcgcctgatcgccgcggacccgagccgagcccacccccctccccagccccccaccctggccgcgggggcggcgcgctcgatctacgcgtccggggccccgcggggccgggcccggagtcggcatgaatcgctgctgggcgctcttcctgtctctctgctgctacctgcgtctggtcagcgccgagggggaccccattcccgaggagctttatgagatgctgagtgaccactcgatccgctcctttgatgatctccaacgcctgctgcacggagaccccggagaggaagatggggccgagttggacctgaacatgacccgctcccactctggaggcgagctggagagcttggctcgtggaagaaggagcctgggttccctgaccattgctgagccggccatgatcgccgagtgcaagacgcgcaccgaggtgttcgagatctcccggcgcctcatagaccgcaccaacgccaacttcctggtgtggccgccctgtgtggaggtgcagcgctgctccggctgctgcaacaaccgcaacgtgcagtgccgccccacccaggtgcagctgcgacctgtccaggtgagaaagatcgagattgtgcggaagaagccaatctttaagaaggccacggtgacgctggaagaccacctggcatgcaagtgtgagacagtggcagctgcacggcctgtgacccgaagcccggggggttcccaggagcagcgagccaaaacgccccaaactcgggtgaccattcggacggtgcgagtccgccggccccccaagggcaagcaccggaaattcaagcacacgcatgacaagacggcactgaaggagacccttggagcctaggggcatcggcaggagagtgtgtgggcagggttatttaatatggtatttgctgtattgcccccatggggtccttggagtgataatattgtttccctcgtccgtctgtctcgatgcctgattcggacggccaatggtgcttcccccacccctccacgtgtccgtccacccttccatcagcgggtctcctcccagcggcctccggctcttgcccagcagctcaagaagaaaaagaaggactgaactccatcgccatcttcttcccttaactccaagaacttgggataagagtgtgagagagactgatggggtcgctctttgggggaaacgggctccttcccctgcacctggcctgggccacacctgagcgctgtggactgtcctgaggagccctgaggacctctcagcatagcctgcctgatccctgaacccctggccagctctgaggggaggcacctccaggcaggccaggctgcctcggactccatggctaagaccacagacgggcacacagactggagaaaacccctcccacggtgcccaaacaccagtcacctcgtctccctggtgcctctgtgcacagtggcttcttttcgttttcgttttgaagacgtggactcctcttggtgggtgtggccagcacaccaagtggctgggtgccctctcaggtgggttagagatggagtttgctgttgaggtggctgtagatggtgacctgggtatcccctgcctcctgccaccccttcctccccacactccactctgattcacctcttcctctggttcctttcatctctctacctccaccctgcattttcctcttgtcctggcccttcagtctgctccaccaaggggctcttgaaccccttattaaggccccagatgatcccagtcactcctctctagggcagaagactagaggccagggcagcaagggacctgctcatcatattccaacccagccacgactgccatgtaaggttgtgcagggtgtgtactgcacaaggacattgtatgcagggagcactgttcacatcatagataaagctgatttgtatatttattatgacaatttctggcagatgtaggtaaagaggaaaaggatccttttcctaattcacacaaagactccttgtggactggctgtgcccctgatgcagcctgtggcttggagtggccaaataggagggagactgtggtaggggcagggaggcaacactgctgtccacatgacctccatttcccaaagtcctctgctccagcaactgcccttccaggtgggtgtgggacacctgggagaaggtctccaagggagggtgcagccctcttgcccgcacccctccctgcttgcacacttccccatctttgatccttctgagctccacctctggtggctcctcctaggaaaccagctcgtgggctgggaatgggggagagaagggaaaagatccccaagaccccctggggtgggatctgagctcccacctcccttcccacctactgcactttcccccttcccgccttccaaaacctgcttccttcagtttgtaaagtcggtgattatatttttgggggctttccttttattttttaaatgtaaaatttatttatattccgtatttaaagttgtaaaaaaaaataaccacaaaacaaaaccaaatgaatccgccggaggtctgtctgttggcatcgtgcgtgacaattaacctttctgccttggcaggatgtgccgacagcttgcggcgtgttcctctcactctgggagcctcaggcgtgatctcacacactggcgtgcacatacacacacacacacatacatgctcacacatgcgtgcacatacacgcaggcctgcaacttgggggaggcctctgtctggcgggaagaagagacacacaggctactctgttggtcttggtcctggcacagctcctgacacgtgnacttgtgcgtgtctctggcagtgacgagagatnnntttctgcag

SEQ ID NO: 385042 - DNA, 407 bp, Homo sapiens
  misc_feature (363)..(363): n is a, c, g, or t
  misc_feature (396)..(398): n is a, c, g, or t
ctagtgctgttaggcccgcggcccgtaaaaaaaaaaaaaaaaaaaaaaaaaaaaaaaaaaataaccacaaaacaaaaccaaatgaatccgccggaggtctgtctgttggcatcgtgcgtgacaattaacctttctgccttggcaggatgtgccgacagcttgcggcgtgttcctctcactctgggagcctcaggcgtgatctcacacactggcgtgcacatacacacacacacacatacatgctcacacatgcgtgcacatacacgcaggcctgcaacttgggggaggcctctgtctggcgggaagaagagacacacaggctactctgttggtcttggtcctggcacagctcctgacacgtgnacttgtgcgtgtctctggcagtgacgagagatnnntttctgcag

SEQ ID NO: 385043 - DNA, 3647 bp, Homo sapiens
gaggaaaggctgtctccacccacctctcgcactctcccttctcctttataaaggccggaacagctgaaagggtggcaacttctcctcctgcggccgggagcggcctgcctgcctccctgcgcacccgcagcctcccccgctgcctccctagggctcccctccggccgccagcgcccatttttcattccctagatagagatactttgcgcgcacacacatacatacgcgcgcaaaaaggaaaaaaaaaaaaaaaagcccaccctccagcctcgctgcaaagagaaaaccggagcagccgcagctcgcagctcgcagctcgcagcccgcagcccgcagaggacgcccagagcggcgagcaggcgggcagacggaccgacggactcgcgccgcgtccacctgtcggccgggcccagccgagcgcgcagcgggcacgccgcgcgcgcggagcagccgtgcccgccgcccgggcccgccgccagggcgcacacgctcccgcccccctacccggcccgggcgggagtttgcacctctccctgcccgggtgctcgagctgccgttgcaaagccaactttggaaaaagttttttgggggagacttgggccttgaggtgcccagctccgcgctttccgattttgggggcctttccagaaaatgttgcaaaaaagctaagccggcgggcagaggaaaacgcctgtagccggcgagtgaagacgaaccatcgactgccgtgttccttttcctcttggaggttggagtcccctgggcgcccccacacggctagacgcctcggctggttcgcgacgcagccccccggccgtggatgctgcactcgggctcgggatccgcccaggtagcggcctcggacccaggtcctgcgcccaggtcctcccctgccccccagcgacggagccggggccgggggcggcggcgccgggggccatgcgggtgagccgcggctgcagaggcctgagcgcctgatcgccgcggacccgagccgagcccacccccctccccagccccccaccctggccgcgggggcggcgcgctcgatctacgcgtccggggccccgcggggccgggcccggagtcggcatgaatcgctgctgggcgctcttcctgtctctctgctgctacctgcgtctggtcagcgccgagggggaccccattcccgaggagctttatgagatgctgagtgaccactcgatccgctcctttgatgatctccaacgcctgctgcacggagaccccggagaggaagatggggccgagttggacctgaacatgacccgctcccactctggaggcgagctggagagcttggctcgtggaagaaggagcctgggttccctgaccattgctgagccggccatgatcgccgagtgcaagacgcgcaccgaggtgttcgagatctcccggcgcctcatagaccgcaccaacgccaacttcctggtgtggccgccctgtgtggaggtgcagcgctgctccggctgctgcaacaaccgcaacgtgcagtgccgccccacccaggtgcagctgcgacctgtccaggtgagaaagatcgagattgtgcggaagaagccaatctttaagaaggccacggtgacgctggaagaccacctggcatgcaagtgtgagacagtggcagctgcacggcctgtgacccgaagcccggggggttcccaggagcagcgagccaaaacgccccaaactcgggtgaccattcggacggtgcgagtccgccggccccccaagggcaagcaccggaaattcaagcacacgcatgacaagacggcactgaaggagacccttggagcctaggggcatcggcaggagagtgtgtgggcagggttatttaatatggtatttgctgtattgcccccatggggtccttggagtgataatattgtttccctcgtccgtctgtctcgatgcctgattcggacggccaatggtgcttcccccacccctccacgtgtccgtccacccttccatcagcgggtctcctcccagcggcctccggctcttgcccagcagctcaagaagaaaaagaaggactgaactccatcgccatcttcttcccttaactccaagaacttgggataagagtgtgagagagactgatggggtcgctctttgggggaaacgggctccttcccctgcacctggcctgggccacacctgagcgctgtggactgtcctgaggagccctgaggacctctcagcatagcctgcctgatccctgaacccctggccagctctgaggggaggcacctccaggcaggccaggctgcctcggactccatggctaagaccacagacgggcacacagactggagaaaacccctcccacggtgcccaaacaccagtcacctcgtctccctggtgcctctgtgcacagtggcttcttttcgttttcgttttgaagacgtggactcctcttggtgggtgtggccagcacaccaagtggctgggtgccctctcaggtgggttagagatggagtttgctgttgaggtggctgtagatggtgacctgggtatcccctgcctcctgccaccccttcctccccacactccactctgattcacctcttcctctggttcctttcatctctctacctccaccctgcattttcctcttgtcctggcccttcagtctgctccaccaaggggctcttgaaccccttattaaggccccagatgatcccagtcactcctctctagggcagaagactagaggccagggcagcaagggacctgctcatcatattccaacccagccacgactgccatgtaaggttgtgcagggtgtgtactgcacaaggacattgtatgcagggagcactgttcacatcatagataaagctgatttgtatatttattatgacaatttctggcagatgtaggtaaagaggaaaaggatccttttcctaattcacacaaagactccttgtggactggctgtgcccctgatgcagcctgtggcttggagtggccaaataggagggagactgtggtaggggcagggaggcaacactgctgtccacatgacctccatttcccaaagtcctctgctccagcaactgcccttccaggtgggtgtgggacacctgggagaaggtctccaagggagggtgcagccctcttgcccgcacccctccctgcttgcacacttccccatctttgatccttctgagctccacctctggtggctcctcctaggaaaccagctcgtgggctgggaatgggggagagaagggaaaagatccccaagaccccctggggtgggatctgagctcccacctcccttcccacctactgcactttcccccttcccgccttccaaaacctgcttccttcagtttgtaaagtcggtgattatatttttgggggctttccttttattttttaaatgtaaaatttatttatattccgtatttaaagttgtaaaaaaaaataaccacaaaacaaaaccaaaaaaaaaaaaaaacttctcctcctgcagccgggagcggccggcctgcctccctgcgcacccgcagcctcccccgctgcctccctagggctcccctccggccgccagcgcccatttttcattccctagatagagatactttgcgcgcacacacatacatacgcgcgcaaaaagg

SEQ ID NO: 385044 - DNA, 2600 bp, Homo sapiens
ccccagctgtcttatggctatgatgagaaatcaaccggaggaatttccgtgcctggccccatgggtccctctggtcctcgtggtctccctggcccccctggtgcacctggggaccccattcccgaggagctttatgagatgctgagtgaccactcgatccgctcctttgatgatctccaacgcctgctgcacggagaccccggagaggaagatggggccgagttggacctgaacatgacccgctcccactctggaggcgagctggagagcttggctcgtggaagaaggagcctgggttccctgaccattgctgagccggccatgatcgccgagtgcaagacgcgcaccgaggtgttcgagatctcccggcgcctcatagaccgcaccaacgccaacttcctggtgtggccgccctgtgtggaggtgcagcgctgctccggctgctgcaacaaccgcaacgtgcagtgccgccccacccaggtgcagctgcgacctgtccaggtgagaaagatcgagattgtgcggaagaagccaatctttaagaaggccacggtgacgctggaagaccacctggcatgcaagtgtgagacagtggcagctgcacggcctgtgacccgaagcccggggggttcccaggagcagcgagccaaaacgccccaaactcgggtgaccattcggacggtgcgagtccgccggccccccaagggcaagcaccggaaattcaagcacacgcatgacaagacggcactgaaggagacccttggagcctaggggcatcggcaggagagtgtgtgggcagggttatttaatatggtatttgctgtattgcccccatggggtccttggagtgataatattgtttccctcgtccgtctgtctcgatgcctgattcggacggccaatggtgcttcccccacccctccacgtgtccgtccacccttccatcagcgggtctcctcccagcggcctccggctcttgcccagcagctcaagaagaaaaagaaggactgaactccatcgccatcttcttcccttaactccaagaacttgggataagagtgtgagagagactgatggggtcgctctttgggggaaacgggctccttcccctgcacctggcctgggccacacctgagcgctgtggactgtcctgaggagccctgaggacctctcagcatagcctgcctgatccctgaacccctggccagctctgaggggaggcacctccaggcaggccaggctgcctcggactccatggctaagaccacagacgggcacacagactggagaaaacccctcccacggtgcccaaacaccagtcacctcgtctccctggtgcctctgtgcacagtggcttcttttcgttttcgttttgaagacgtggactcctcttggtgggtgtggccagcacaccaagtggctgggtgccctctcaggtgggttagagatggagtttgctgttgaggtggctgtagatggtgacctgggtatcccctgcctcctgccaccccttcctccccacactccactctgattcacctcttcctctggttcctttcatctctctacctccaccctgcattttcctcttgtcctggcccttcagtctgctccaccaaggggctcttgaaccccttattaaggccccagatgatcccagtcactcctctctagggcagaagactagaggccagggcagcaagggacctgctcatcatattccaacccagccacgactgccatgtaaggttgtgcagggtgtgtactgcacaaggacattgtatgcagggagcactgttcacatcatagataaagctgatttgtatatttattatgacaatttctggcagatgtaggtaaagaggaaaaggatccttttcctaattcacacaaagactccttgtggactggctgtgcccctgatgcagcctgtggcttggagtggccaaataggagggagactgtggtaggggcagggaggcaacactgctgtccacatgacctccatttcccaaagtcctctgctccagcaactgcccttccaggtgggtgtgggacacctgggagaaggtctccaagggagggtgcagccctcttgcccgcacccctccctgcttgcacacttccccatctttgatccttctgagctccacctctggtggctcctcctaggaaaccagctcgtgggctgggaatgggggagagaagggaaaagatccccaagaccccctggggtgggatctgagctcccacctcccttcccacctactgcactttcccccttcccgccttccaaaacctgcttccttcagtttgtaaagtcggtgattatatttttgggggctttccttttattttttaaatgtaaaatttatttatattccgtatttaaagttgtaaaaaaaaataaccacaaaacaaaaccaaaaaaaaaaaaaaacttctcctcctgcagccgggagcggccggcctgcctccctgcgcacccgcagcctcccccgctgcctccctagggctcccctccggccgccagcgcccatttttcattccctagatagagatactttgcgcgcacacacatacatacgcgcgcaaaaagg

SEQ ID NO: 385045 - DNA, 509 bp, Homo sapiens
tgtgccagcagagggaagcggacatttactaagcatttacaacatgccccacactctgaattttctcacttgaaactacagtggttcttgggtgtagatctcatggtcccattttcagatggggaaacacaggcttagagtggctcagccatctgcccaagtcccatggctaatgacagccaggacttgaaacctgaaccctggggttgaagggcgtgagaaagagcagtcccggaggcacccgctgagctcccctgccaagtggggggactctggacaggcctacgctcctgacccaggtttcgtctcctcccaggttccctgaccattgctgagccggccatgatcgccgagtgcaagacgcgcaccgaggtgttcgagatctcccggcgcctcatagaccgcaccaacgccaacttcctggtgtggccgccctgtgtggaggtgcagcgctgctccggctgctgcaacaaccgcaacgtgcagtgccgccccacccaggtgcagct

SEQ ID NO: 385046 - DNA, 1377 bp, Homo sapiens
gaggaaaggctgtctccacccacctctcgcactctcccttctcctttataaaggccggaacagctgaaagggtggcaacttctcctcctgcggccgggagcggcctgcctgcctccctgcgcacccgcagcctcccccgctgcctccctagggctcccctccggccgccagcgcccatttttcattccctagatagagatactttgcgcgcacacacatacatacgcgcgcaaaaaggaaaaaaaaaaaaaaaagcccaccctccagcctcgctgcaaagagaaaaccggagcagccgcagctcgcagctcgcagctcgcagcccgcagcccgcagaggacgcccagagcggcgagcaggcgggcagacggaccgacggactcgcgccgcgtccacctgtcggccgggcccagccgagcgcgcagcgggcacgccgcgcgcgcggagcagccgtgcccgccgcccgggcccgccgccagggcgcacacgctcccgcccccctacccggcccgggcgggagtttgcacctctccctgcccgggtgctcgagctgccgttgcaaagccaactttggaaaaagttttttgggggagacttgggccttgaggtgcccagctccgcgctttccgattttgggggcctttccagaaaatgttgcaaaaaagctaagccggcgggcagaggaaaacgcctgtagccggcgagtgaagacgaaccatcgactgccgtgttccttttcctcttggaggttggagtcccctgggcgcccccacacggctagacgcctcggctggttcgcgacgcagccccccggccgtggatgctgcactcgggctcgggatccgcccaggtagcggcctcggacccaggtcctgcgcccaggtcctcccctgccccccagcgacggagccggggccgggggcggcggcgccgggggccatgcgggtgagccgcggctgcagaggcctgagcgcctgatcgccgcggacccgagccgagcccacccccctccccagccccccaccctggccgcgggggcggcgcgctcgatctacgcgtccggggccccgcggggccgggcccggagtcggcatgaatcgctgctgggcgctcttcctgtctctctgctgctacctgcgtctggtcagcgccgagggggaccccattcccgaggagctttatgagatgctgagtgaccactcgatccgctcctttgatgatctccaacgcctgctgcacggagaccccggagaggaagatcgggccgagatgtacctgaacatgatcccgcaccaacctctggactcgagttgcagagcacgacttgactacagagaggtcacctgggtagccactgatcaacagatgacacgccga

SEQ ID NO: 385047 - DNA, 2578 bp, Homo sapiens
  misc_feature (16)..(16): n is a, c, g, or t
  misc_feature (18)..(18): n is a, c, g, or t
gtgtgtgtgtgtgtgngngcgcatctgagagagagagagagagagactgactgagcaggaatggtgagatgtttatcatgggcctcggggaccccattcccgaggagctttatgagatgctgagtgaccactcgatccgctcctttgatgatctccaacgcctgctgcacggagaccccggagaggaagatggggccgagttggacctgaacatgacccgctcccactctggaggcgagctggagagcttggctcgtggaagaaggagcctgggttccctgaccattgctgagccggccatgatcgccgagtgcaagacgcgcaccgaggtgttcgagatctcccggcgcctcatagaccgcaccaacgccaacttcctggtgtggccgccctgtgtggaggtgcagcgctgctccggctgctgcaacaaccgcaacgtgcagtgccgccccacccaggtgcagctgcgacctgtccaggtgagaaagatcgagattgtgcggaagaagccaatctttaagaaggccacggtgacgctggaagaccacctggcatgcaagtgtgagacagtggcagctgcacggcctgtgacccgaagcccggggggttcccaggagcagcgagccaaaacgccccaaactcgggtgaccattcggacggtgcgagtccgccggccccccaagggcaagcaccggaaattcaagcacacgcatgacaagacggcactgaaggagacccttggagcctaggggcatcggcaggagagtgtgtgggcagggttatttaatatggtatttgctgtattgcccccatggggtccttggagtgataatattgtttccctcgtccgtctgtctcgatgcctgattcggacggccaatggtgcttcccccacccctccacgtgtccgtccacccttccatcagcgggtctcctcccagcggcctccggctcttgcccagcagctcaagaagaaaaagaaggactgaactccatcgccatcttcttcccttaactccaagaacttgggataagagtgtgagagagactgatggggtcgctctttgggggaaacgggctccttcccctgcacctggcctgggccacacctgagcgctgtggactgtcctgaggagccctgaggacctctcagcatagcctgcctgatccctgaacccctggccagctctgaggggaggcacctccaggcaggccaggctgcctcggactccatggctaagaccacagacgggcacacagactggagaaaacccctcccacggtgcccaaacaccagtcacctcgtctccctggtgcctctgtgcacagtggcttcttttcgttttcgttttgaagacgtggactcctcttggtgggtgtggccagcacaccaagtggctgggtgccctctcaggtgggttagagatggagtttgctgttgaggtggctgtagatggtgacctgggtatcccctgcctcctgccaccccttcctccccacactccactctgattcacctcttcctctggttcctttcatctctctacctccaccctgcattttcctcttgtcctggcccttcagtctgctccaccaaggggctcttgaaccccttattaaggccccagatgatcccagtcactcctctctagggcagaagactagaggccagggcagcaagggacctgctcatcatattccaacccagccacgactgccatgtaaggttgtgcagggtgtgtactgcacaaggacattgtatgcagggagcactgttcacatcatagataaagctgatttgtatatttattatgacaatttctggcagatgtaggtaaagaggaaaaggatccttttcctaattcacacaaagactccttgtggactggctgtgcccctgatgcagcctgtggcttggagtggccaaataggagggagactgtggtaggggcagggaggcaacactgctgtccacatgacctccatttcccaaagtcctctgctccagcaactgcccttccaggtgggtgtgggacacctgggagaaggtctccaagggagggtgcagccctcttgcccgcacccctccctgcttgcacacttccccatctttgatccttctgagctccacctctggtggctcctcctaggaaaccagctcgtgggctgggaatgggggagagaagggaaaagatccccaagaccccctggggtgggatctgagctcccacctcccttcccacctactgcactttcccccttcccgccttccaaaacctgcttccttcagtttgtaaagtcggtgattatatttttgggggctttccttttattttttaaatgtaaaatttatttatattccgtatttaaagttgtaaaaaaaaataaccacaaaacaaaaccaaaaaaaaaaaaaaacttctcctcctgcagccgggagcggccggcctgcctccctgcgcacccgcagcctcccccgctgcctccctagggctcccctccggccgccagcgcccatttttcattccctagatagagatactttgcgcgcacacacatacatacgcgcgcaaaaagg

SEQ ID NO: 385048 - DNA, 2632 bp, Homo sapiens
acaagggtgagacaggcgaacagggcgacagaggcataaagggtcaccgtggcttctctggcctccagggtccccctggccctcctggctctcctggtgaacaaggtccctctggagcctctggtcctgctggtccccgaggggaccccattcccgaggagctttatgagatgctgagtgaccactcgatccgctcctttgatgatctccaacgcctgctgcacggagaccccggagaggaagatggggccgagttggacctgaacatgacccgctcccactctggaggcgagctggagagcttggctcgtggaagaaggagcctgggttccctgaccattgctgagccggccatgatcgccgagtgcaagacgcgcaccgaggtgttcgagatctcccggcgcctcatagaccgcaccaacgccaacttcctggtgtggccgccctgtgtggaggtgcagcgctgctccggctgctgcaacaaccgcaacgtgcagtgccgccccacccaggtgcagctgcgacctgtccaggtgagaaagatcgagattgtgcggaagaagccaatctttaagaaggccacggtgacgctggaagaccacctggcatgcaagtgtgagacagtggcagctgcacggcctgtgacccgaagcccggggggttcccaggagcagcgagccaaaacgccccaaactcgggtgaccattcggacggtgcgagtccgccggccccccaagggcaagcaccggaaattcaagcacacgcatgacaagacggcactgaaggagacccttggagcctaggggcatcggcaggagagtgtgtgggcagggttatttaatatggtatttgctgtattgcccccatggggtccttggagtgataatattgtttccctcgtccgtctgtctcgatgcctgattcggacggccaatggtgcttcccccacccctccacgtgtccgtccacccttccatcagcgggtctcctcccagcggcctccggctcttgcccagcagctcaagaagaaaaagaaggactgaactccatcgccatcttcttcccttaactccaagaacttgggataagagtgtgagagagactgatggggtcgctctttgggggaaacgggctccttcccctgcacctggcctgggccacacctgagcgctgtggactgtcctgaggagccctgaggacctctcagcatagcctgcctgatccctgaacccctggccagctctgaggggaggcacctccaggcaggccaggctgcctcggactccatggctaagaccacagacgggcacacagactggagaaaacccctcccacggtgcccaaacaccagtcacctcgtctccctggtgcctctgtgcacagtggcttcttttcgttttcgttttgaagacgtggactcctcttggtgggtgtggccagcacaccaagtggctgggtgccctctcaggtgggttagagatggagtttgctgttgaggtggctgtagatggtgacctgggtatcccctgcctcctgccaccccttcctccccacactccactctgattcacctcttcctctggttcctttcatctctctacctccaccctgcattttcctcttgtcctggcccttcagtctgctccaccaaggggctcttgaaccccttattaaggccccagatgatcccagtcactcctctctagggcagaagactagaggccagggcagcaagggacctgctcatcatattccaacccagccacgactgccatgtaaggttgtgcagggtgtgtactgcacaaggacattgtatgcagggagcactgttcacatcatagataaagctgatttgtatatttattatgacaatttctggcagatgtaggtaaagaggaaaaggatccttttcctaattcacacaaagactccttgtggactggctgtgcccctgatgcagcctgtggcttggagtggccaaataggagggagactgtggtaggggcagggaggcaacactgctgtccacatgacctccatttcccaaagtcctctgctccagcaactgcccttccaggtgggtgtgggacacctgggagaaggtctccaagggagggtgcagccctcttgcccgcacccctccctgcttgcacacttccccatctttgatccttctgagctccacctctggtggctcctcctaggaaaccagctcgtgggctgggaatgggggagagaagggaaaagatccccaagaccccctggggtgggatctgagctcccacctcccttcccacctactgcactttcccccttcccgccttccaaaacctgcttccttcagtttgtaaagtcggtgattatatttttgggggctttccttttattttttaaatgtaaaatttatttatattccgtatttaaagttgtaaaaaaaaataaccacaaaacaaaaccaaaaaaaaaaaaaaacttctcctcctgcagccgggagcggccggcctgcctccctgcgcacccgcagcctcccccgctgcctccctagggctcccctccggccgccagcgcccatttttcattccctagatagagatactttgcgcgcacacacatacatacgcgcgcaaaaagg

SEQ ID NO: 385049 - DNA, 2619 bp, Homo sapiens
agggcctaagggtgacagaggtgatgctggtcccaaaggtgctgatggctctcctggcaaagatggcgtccgtggtctgaccggccccattggtcctcctggccctgctggtgcccctggtgacaagggggaccccattcccgaggagctttatgagatgctgagtgaccactcgatccgctcctttgatgatctccaacgcctgctgcacggagaccccggagaggaagatggggccgagttggacctgaacatgacccgctcccactctggaggcgagctggagagcttggctcgtggaagaaggagcctgggttccctgaccattgctgagccggccatgatcgccgagtgcaagacgcgcaccgaggtgttcgagatctcccggcgcctcatagaccgcaccaacgccaacttcctggtgtggccgccctgtgtggaggtgcagcgctgctccggctgctgcaacaaccgcaacgtgcagtgccgccccacccaggtgcagctgcgacctgtccaggtgagaaagatcgagattgtgcggaagaagccaatctttaagaaggccacggtgacgctggaagaccacctggcatgcaagtgtgagacagtggcagctgcacggcctgtgacccgaagcccggggggttcccaggagcagcgagccaaaacgccccaaactcgggtgaccattcggacggtgcgagtccgccggccccccaagggcaagcaccggaaattcaagcacacgcatgacaagacggcactgaaggagacccttggagcctaggggcatcggcaggagagtgtgtgggcagggttatttaatatggtatttgctgtattgcccccatggggtccttggagtgataatattgtttccctcgtccgtctgtctcgatgcctgattcggacggccaatggtgcttcccccacccctccacgtgtccgtccacccttccatcagcgggtctcctcccagcggcctccggctcttgcccagcagctcaagaagaaaaagaaggactgaactccatcgccatcttcttcccttaactccaagaacttgggataagagtgtgagagagactgatggggtcgctctttgggggaaacgggctccttcccctgcacctggcctgggccacacctgagcgctgtggactgtcctgaggagccctgaggacctctcagcatagcctgcctgatccctgaacccctggccagctctgaggggaggcacctccaggcaggccaggctgcctcggactccatggctaagaccacagacgggcacacagactggagaaaacccctcccacggtgcccaaacaccagtcacctcgtctccctggtgcctctgtgcacagtggcttcttttcgttttcgttttgaagacgtggactcctcttggtgggtgtggccagcacaccaagtggctgggtgccctctcaggtgggttagagatggagtttgctgttgaggtggctgtagatggtgacctgggtatcccctgcctcctgccaccccttcctccccacactccactctgattcacctcttcctctggttcctttcatctctctacctccaccctgcattttcctcttgtcctggcccttcagtctgctccaccaaggggctcttgaaccccttattaaggccccagatgatcccagtcactcctctctagggcagaagactagaggccagggcagcaagggacctgctcatcatattccaacccagccacgactgccatgtaaggttgtgcagggtgtgtactgcacaaggacattgtatgcagggagcactgttcacatcatagataaagctgatttgtatatttattatgacaatttctggcagatgtaggtaaagaggaaaaggatccttttcctaattcacacaaagactccttgtggactggctgtgcccctgatgcagcctgtggcttggagtggccaaataggagggagactgtggtaggggcagggaggcaacactgctgtccacatgacctccatttcccaaagtcctctgctccagcaactgcccttccaggtgggtgtgggacacctgggagaaggtctccaagggagggtgcagccctcttgcccgcacccctccctgcttgcacacttccccatctttgatccttctgagctccacctctggtggctcctcctaggaaaccagctcgtgggctgggaatgggggagagaagggaaaagatccccaagaccccctggggtgggatctgagctcccacctcccttcccacctactgcactttcccccttcccgccttccaaaacctgcttccttcagtttgtaaagtcggtgattatatttttgggggctttccttttattttttaaatgtaaaatttatttatattccgtatttaaagttgtaaaaaaaaataaccacaaaacaaaaccaaaaaaaaaaaaaaacttctcctcctgcagccgggagcggccggcctgcctccctgcgcacccgcagcctcccccgctgcctccctagggctcccctccggccgccagcgcccatttttcattccctagatagagatactttgcgcgcacacacatacatacgcgcgcaaaaagg

SEQ ID NO: 385050 - DNA, 476 bp, Homo sapiens
  misc_feature (10)..(10): n is a, c, g, or t
  misc_feature (23)..(23): n is a, c, g, or t
  misc_feature (42)..(42): n is a, c, g, or t
  misc_feature (47)..(47): n is a, c, g, or t
  misc_feature (49)..(49): n is a, c, g, or t
gatttaaatnggcctcccctaangggaaatttggcccctcgnggccnanaattcggctcgagaacacagcactacatattggaaattttttatttttctaaataccaatgcagttttgctacggttacaattttgaaatattaactgagcctcaaaatcaccctttctgtcaagcatatcttggcctctcccatgtctcagtgttgcctgcatttctcccaggacttgggggtggggtgaaaagcgtacaaaagatacttaaaagggctcctggggtacacaagcccagcaggtcctgagtgaagccgtgggccctccaaatgctcgttttatagcaacctctctctaccctagttctccaaattcacttctgccttcctcaggtttgatatctggcaggtttgactatccagaggaaattaaatatttttatataaaattaaattataataaatattgccaaatgctttccttta

SEQ ID NO: 385051 - DNA, 1910 bp, Homo sapiens
cgccacccgcttcctcgccgcagggggcccgcccgctggcccgtttccggtccggtgggtacaagatgacggagccgggcgcctctcccgaggacccttgggtcaaggtggagtatgcctacagcgacaacagcctggaccccgggctttttgtagaaagcacccgcaaggggagtgtagtgtccagagctaatagcatcggttccaccagtgcctcttctgtccccaacacagatgatgaggacagtgattaccaccaggaggcctacaaggagtcctacaaagaccggcggcggcgcgcacacactcaggctgagcagaagaggagggacgccatcaagagaggctatgatgaccttcagaccatcgtccccacttgccagcagcaggacttctccattggctcccaaaagctcagcaaagccatcgttctacaaaagaccattgactacattcagtttttgcacaaggagaagaaaaagcaggaggaggaggtgtccacgttacgcaaggatgtcaccgccctaaagatcatgaaagtgaactatgagcagattgtgaaggcacaccaggacaacccccatgaaggggaggaccaggtctctgaccaggtcaagttcaacgtgtttcaaggcatcatggattccctgttccagtccttcaatgcctccatctcagtggccagcttccaggagctgtcagcgtgtgtcttcagctggatcgaggagcactgtaagcctcagaccctgcgggagattgtgattggcgtcctgcaccaattgaaaaaccagctttactgaccggttcttggaaacctggagaacagccaacaagaggcccttgaatctctacgtggccactgaactgctgggcccgggagactggactacaacacctcacactggtcagctggtttctacttggtgtttggtttttcccagccccattttatcttcagcggagccgcggtgtttgttttgtgaaagcttctgattaatttattatattgacgataaaactcaaacctacccagccttccccccactccatggaagtccttgggatgggcgtctgctctggacaccccaaagagctcctgccctctcagccctttattcaagcctcagatttctgctcatgatctacatagatttggaaactgttttcctctgttttggtctcttgggcaacatttttggcccaagtttgggcaacatttggcccaagtttgggcattttggcagtagctgtatgggagaaaaagagtaagaggaaatattcccacagccatgaagggtgaaagggcaccttgtgcctagactagggctgcctggtcagtcccaggtgaggccaagggctttctggccatctcagggaggggccaccaggttcctcccctcaccccatattccatcaccttcctcctctgctctgggtggtaagggaagccctcccggttcccacaggctatgatgctgcatggcagaggcaggtataacacagcactacatattggaaattttttatttttctaaataccaatgcagttttgctacggttacaattttgaaatattaactgagcctcaaaatcaccctttctgtcaagcatatcttggcctctcccatgtctcagtgttgcctgcatttctcccaggacttgggggtggggtgaaaagcgtacaaaagatacttaaaagggctcctggggtacacaagcccagcaggtcctgagtgaagccgtgggccctccaaatgctcgttttatagcaacctctctctaccctagttctccaaattcacttctgccttcctcaggtttgatatctggcaggtttgactatccagaggaaattaaatatttttatataaaattaaattataataaatattgccaaatgctttccttta

SEQ ID NO: 385052 - DNA, 2827 bp, Homo sapiens
cgccacccgcttcctcgccgcagggggcccgcccgctggcccgtttccggtccggtgggtacaagatgacggagccgggcgcctctcccgaggacccttgggtcaaggcaagccccgtgggcgcgcacgccggcgaggggagggcgggtcgggctcgtgcacgtaggggggccggaagacgaggggcttccctcctgtccccaaagtcccccacgctctccgtgccccggggctgcagagaagacagctctcaccccgcgtgtgccaaggtggagtatgcctacagcgacaacagcctggaccccgggctttttgtagaaagcacccgcaaggggagtgtagtgtccagagctaatagcatcggttccaccagtgcctcttctgtccccaacacagatgatgaggacagtgattaccaccaggaggcctacaaggagtcctacaaagaccggcggcggcgcgcacacactcaggctgagcagaagaggagggacgccatcaagagaggctatgatgaccttcagaccatcgtccccacttgccagcagcaggacttctccattggctcccaaaagctcagcaaagccatcgttctacaaaagaccattgactacattcagtttttgcacaaggagaagaaaaagcaggaggaggaggtgtccacgttacgcaaggatgtcaccgccctaaagatcatgaaagtgaactatgagcagattgtgaaggcacaccaggacaacccccatgaaggggaggaccaggtctctgaccaggtcaagttcaacgtgtttcaaggcatcatggattccctgttccagtccttcaatgcctccatctcagtggccagcttccaggagctgtcagcgtgtgtcttcagctggatcgaggagcactgtaagcctcagaccctgcgggagattgtgattggcgtcctgcaccaattgaaaaaccagctttactgaccggttcttggaaacctggagaacagccaacaagaggcccttgaatctctacgtggccactgaactgctgggcccgggagactggactacaacacctcacactggtcagctggtttctacttggtgtttggtttttcccagccccattttatcttcagcggagccgcggtgtttgttttgtgaaagcttctgattaatttattatattgacgataaaactcaaacctacccagccttccccccactccatggaagtccttgggatgggcgtctgctctggacaccccaaagagctcctgccctctcagccctttattcaagcctcagatttctgctcatgatctacatagatttggaaactgttttcctctgttttggtctcttgggcaacatttttggcccaagtttgggcaacatttggcccaagtttgggcattttggcagtagctgtatgggagaaaaagagtaagaggaaatattcccacagccatgaagggtgaaagggcaccttgtgcctagactagggctgcctggtcagtcccaggtgaggccaagggctttctggccatctcagggaggggccaccaggttcctcccctcaccccatattccatcaccttcctcctctgctctgggtggtaagggaagccctcccggttcccacaggctatgatgctgcatggcagaggcaggtataacacagcactacatattggaaattttttatttttctaaataccaatgcagttttgctacggttacaattttgaaatattaactgagcctcaaaatcaccctttctgtcaagcatatcttggcctctcccatgtctcagtgttgcctgcatttctcccaggacttgggggtggggtgaaaagcgtacaaaagatacttaaaagggctcctggggtacacaagcccagcaggtcctgagtgaagccgtgggccctccaaatgctcgttttatagcaacctctctctaccctagttctccaaattcacttctgccttcctcaggtttgatatctggcaggtttgactatccagaggaaattaaatatttttatataaaattaaattataataaatattgccaaatgctttcctttagcattgttccaagtctaaatgttaacctcaagctactgcaatttagacaatgaaatgggctgggtctacccccagccaccagccctcatcctctctacccagtgctctggtttatgcttgtctcctgactgctctgcttaaaggtgaaagtagcaggaacaacaacaaaagccaaccaaaaacaaggtagccagtgcaagacatctcactcttctgacatcctgcagtccccaccagtcctgaccgtgggcccctcaggggtctgggagtgtgacgttgtaatcttcatccgtctctatcccaacttcctcctgtgagacagggagacaagtgaatgagatgtcaccaggataagaccacagggaagcaaagaaggaagagagctccacttacaaagaactgcttcttgctcttggggtatccttcaagtattgcatcagacagctctgtagcctgacaagaaataaaaccacccgttttcagatgggcaacctggcactgcctgtcagtttatgatattgtgtagcggctgatctggtgcctgccattttcaaaggcacctccagggcctgtctcggagctcccacacacttaccatcctcttcctcttcctccactccttacagtacttctgcctctctctgtacacctagaaggaaaaagcaagttcctctaactcctcagaaccacagcagccctctggggctcagccctgatgttcactctggacctgcacagcggtcctacagccttcc

SEQ ID NO: 385053 - DNA, 393 bp, Homo sapiens
ctcagttaatatttcaaaattgtaaccgtagcaaaactgcattggaattttgaaatattaactgagcctcaaaatcaccctttctgtcaagcatatcttggcctctcccatgtctcagtgttgcctgcatttctcccaggacttgggggtggggtgaaaagcgtacaaaagatacttaaaagggctcctggggtacacaagcccagcaggtcctgagtgaagccgtgggccctccaaatgctcgttttatagcaacctctctctaccctagttctccaaattcacttctgccttcctcaggtttgatatctggcaggtttgactatccagaggaaattaaatatttttatataaaattaaattataataaatattgccaaatgctttccttta

SEQ ID NO: 385054 - DNA, 657 bp, Homo sapiens
cgccacccgcttcctcgccgcagggggcccgcccgctggcccgtttccggtccggtgggtacaagatgacggagccgggcgcctctcccgaggacccttgggtcaaggtggagtatgcctacagcgacaacagcctggaccccggtgagtagctgccccatcttaagctctagagggacactcccgcccaggctctctagattcttgtggcgttgccaaccacgcctgagcacagtccactctccctgagcagagttcctggcttgagacagcaggagctgaaggacaagggcagaaaacaactgagggtgacacctagttccctctgctctggaacagggaagtggtggaactgatcactcacaccctcatcacgtccacatgcccgtttgtgagccaggggggtatcatgcaggcctatggagcagtgtagacactagggagcagagcactgcagcgtggtctggcaggaagtggggggcccagtatggttggctttgggttgaagggaagaggtcagcatttaagaaagccatcgtgtggccgggcgcggtggctcacccctgtaatcccagcactttgggaggccgaggcaggcggatcacgaggtcaggagaccgagaccatcctggctaacacggtgaaaccccgtctcca

SEQ ID NO: 385055 - DNA, 421 bp, Homo sapiens
cgccacccgcttcctcgccgcagggggcccgcccgctggcccgtttccggtccggtgggtacaagatgacggagccgggcgcctctcccgaggacccttgggtcaaggtggagtatgcctacagcgacaacagcctggaccccgggctttttgtagaaagcacccgcaaggggagtgtagtgtccagagctaatagcatcggttccaccagtgcctcttctgtccccaacacagatgatgaggacagtgattaccaccaggaggcctacaaggagtcctacaaagaccggcggcggcgcgcacacactcaggctgagcagaagaggagggacgccatcaagggaagctatatgactcagacatcgtccactgcagcagcagctctcattggtcaaagctagcaagcatgtctcaaggcatg

SEQ ID NO: 385056 - DNA, 1859 bp, Homo sapiens
cgccacccgcttcctcgccgcagggggcccgcccgctggcccgtttccggtccggtgggtacaagatgacggagccgggcgcctctcccgaggacccttgggtcaaggtggagtatgcctacagcgacaacagcctggaccccgggctttttgtagaaagcacccgcaaggggagtgtagtgtccagagctaatagcatcggttccaccagtgcctcttctgtccccaacacagatgatgaggacagtgattaccaccaggaggcctacaaggagtcctacaaagaccggcggcggcgcgcacacactcaggctgagcagaagaggagggacgccatcaagagaggctatgatgaccttcagaccatcgtccccacttgccagcagcaggacttctccattggctcccaaaagctcagcaaagccatcgttctacaaaagaccattgactacattcagtttttgcacaaggagaagaaaaagcaggaggaggaggtgtccacgttacgcaaggatgtcaccgccctaaagatcatgaaagtgaactatgagcagattgtgaaggcacaccaggacaacccccatgaaggggaggaccaggtctctgaccaggtcaagttcaacgtgtttcaaggcatcatggattccctgttccagtccttcaatgcctccatctcagtggccagcttccaggagctgtcagcgtgtgtcttcagctggatcgaggagcactgtaagcctcagaccctgcgggagattgtgattggcgtcctgcaccaattgaaaaaccagctttactgaccggttcttggaaacctggagaacagccaacaagaggcccttgaatctctacgtggccactgaactgctgggcccgggagactggactacaacacctcacactggtcagctggtttctacttggtgtttggtttttcccagccccattttatcttcagcggagccgcggtgtttgttttgtgaaagcttctgattaatttattatattgacgataaaactcaaacctacccagccttccccccactccatggaagtccttgggatgggcgtctgctctggacaccccaaagagctcctgccctctcagccctttattcaagcctcagatttctgctcatgatctacatagatttggaaactgttttcctctgttttggtctcttgggcaacatttttggcccaagtttgggcaacatttggcccaagtttgggcattttggcagtagctgtatgggagaaaagcctagactagggctgcctggtcagtcccaggtgaggccaagggctttctggccatctcagggaggggccaccaggttcctcccctcaccccatattccatcaccttcctcctctgctctgggtggtaagggaagccctcccggttcccacaggctatgatgctgcatggcagaggcaggtataacacagcactacatattggaaattttttatttttctaaataccaatgcagttttgctacggttacaattttgaaatattaactgagcctcaaaatcaccctttctgtcaagcatatcttggcctctcccatgtctcagtgttgcctgcatttctcccaggacttgggggtggggtgaaaagcgtacaaaagatacttaaaagggctcctggggtacacaagcccagcaggtcctgagtgaagccgtgggccctccaaatgctcgttttatagcaacctctctctaccctagttctccaaattcacttctgccttcctcaggtttgatatctggcaggtttgactatccagaggaaattaaatatttttatataaaattaaattataataaatattgccaaatgctttccttta

SEQ ID NO: 385057 - DNA, 2367 bp, Homo sapiens
cgccacccgcttcctcgccgcagggggcccgcccgctggcccgtttccggtccggtgggtacaagatgacggagccgggcgcctctcccgaggacccttgggtcaaggtggagtatgcctacagcgacaacagcctggaccccgggctttttgtagaaagcacccgcaaggggagtgtagtgtccagagctaatagcatcggttccaccagtgcctcttctgtccccaacacagatgatgaggacagtgattaccaccaggaggcctacaaggagtcctacaaagaccggcggcggcgcgcacacactcaggctgagcagaagaggagggacgccatcaagagaggctatgatgaccttcagaccatcgtccccacttgccagcagcaggacttctccattggctcccaaaagctcagcaaagccatcgttctacaaaagaccattgactacattcagtttttgcacaaggagaagaaaaagcaggaggaggaggtgtccacgttacgcaaggatgtcaccgccctaaagatcatgaaagtgaactatgagcagattgtgaaggcacaccaggacaacccccatgaaggggaggaccaggtctctgaccaggtcaagttcaacgtgtttcaaggcatcatggattccctgttccagtccttcaatgcctccatctcagtggccagcttccaggagctgtcagcgtgtgtcttcagctggatcgaggagcactgtaagcctcagaccctgcgggagattgtgattggcgtcctgcaccaattgaaaaaccagctttactgaccggttcttggaaacctggagaacagccaacaagaggcccttgaatctctacgtggccactgaactgctgggcccgggagactggactacaacacctcacactggtcagctggtttctacttggtgtttggtttttcccagccccattttatcttcagcggagccgcggtgtttgttttgtgaaagcttctgattaatttattatattgacgataaaactcaaacctacccagccttccccccactccatggaagtccttgggatgggcgtctgctctggacaccccaaagagctcctgccctctcagccctttattcaagcctcagatttctgctcatgatctacatagatttggaaactgttttcctctgttttggtctcttgggcaacatttttggcccaagtttgggcaacatttggcccaagtttgggcattttggcagtagctgtatgggagaaaaagagtaagaggaaatattcccacagccatgaagggtgaaagggcaccttgtgcctagactagggctgcctggtcagtcccaggtgaggccaagggctttctggccatctcagggaggggccaccaggttcctcccctcaccccatattccatcaccttcctcctctgctctgggtggtaagggaagccctcccggttcccacaggctatgatgctgcatggcagaggcaggtataacacagcactacatattggaaattttttatttttctaaataccaatgcagttttgctacggttacaattttgaaatattaactgagcctcaaaatcaccctttctgtcaagcatatcttggcctctcccatgtctcagtgttgcctgcatttctcccaggacttgggggtggggtgaaaagcgtacaaaagatacttaaaagggctcctggggtacacaagcccagcaggtcctgagtgaagccgtgggccctccaaatgctcgttttatagcaacctctctctaccctagttctccaaattcacttctgccttcctcaggtttgatatctggcaggtttgactatccagaggaaattaaataaaactagtttatctatagtagaagagttagagagttagtacatgaaagactagttgcgcaaagtgcgtttcacttctagcgagttgcttcccaaggtcgtaacattgtttaacgcatctaagctagcatgcaagtttaggacacacctgacaaattgtggcttgtggttcgtagccctccgagccaaccgatggccgctcagtccctcgtctaaccccatgatgcttctgggttttattgccattggtcctcccttgacgcttgggcatcccttgccgtttagacacgcggtggaaagacggttaggccatgtgacaacgataaccaaatccatagaccaggccccatatccctaaaggcaagagcccaaagagataaggccccagggtgaccaaaggaaccaaattcgttccaccgttccttttccgtggaaccaggtcgccattgtctagggtacccgcgcaagcccaagggtccccttggaacccggtatgggggccccccccg

SEQ ID NO: 385058 - DNA, 2348 bp, Homo sapiens
cgccacccgcttcctcgccgcagggggcccgcccgctggcccgtttccggtccggtgggtacaagatgacggagccgggcgcctctcccgaggacccttgggtcaaggcaagccccgtgggcgcgcacgccggcgaggggagggcgggtcgggctcgtgcacgtaggggggccggaagacgaggggcttccctcctgtccccaaagtcccccacgctctccgtgccccggggctgcagagaagacagctctcaccccgcgtgtgccaaggtggagtatgcctacagcgacaacagcctggaccccgggctttttgtagaaagcacccgcaaggggagtgtagtgtccagagctaatagcatcggttccaccagtgcctcttctgtccccaacacaggtaggcagtaacatcccccccgacctcagggggctcagatatgtcataattgtaatacctttcctagacagggaagccccagccatccacacaggggtgctggagccaaagtatcagacacaaggtctcaccatctttcacctcatctggaacattaggtggttctgtccatctgccttctctggacaccaggttcttcccagctggggaaaggtgggctagctggaccccactgggccccaagatgacctttccctgcccccatctctgagcgtaatgatgaggacagtgattaccaccaggaggcctacaaggagtcctacaaagaccggcggcggcgcgcacacactcaggctgagcagaagaggagggacgccatcaagagaggctatgatgaccttcagaccatcgtccccacttgccagcagcaggacttctccattggctcccaaaagctcagcaaagccatcgttctacaaaagaccattgactacattcagtttttgcacaaggagaagaaaaagcaggaggaggaggtgtccacgttacgcaaggatgtcaccgccctaaagatcatgaaagtgaactatgagcagattgtgaaggcacaccaggacaacccccatgaaggggaggaccaggtctctgaccaggtcaagttcaacgtgtttcaaggcatcatggattccctgttccagtccttcaatgcctccatctcagtggccagcttccaggagctgtcagcgtgtgtcttcagctggatcgaggagcactgtaagcctcagaccctgcgggagattgtgattggcgtcctgcaccaattgaaaaaccagctttactgaccggttcttggaaacctggagaacagccaacaagaggcccttgaatctctacgtggccactgaactgctgggcccgggagactggactacaacacctcacactggtcagctggtttctacttggtgtttggtttttcccagccccattttatcttcagcggagccgcggtgtttgttttgtgaaagcttctgattaatttattatattgacgataaaactcaaacctacccagccttccccccactccatggaagtccttgggatgggcgtctgctctggacaccccaaagagctcctgccctctcagccctttattcaagcctcagatttctgctcatgatctacatagatttggaaactgttttcctctgttttggtctcttgggcaacatttttggcccaagtttgggcaacatttggcccaagtttgggcattttggcagtagctgtatgggagaaaaagagtaagaggaaatattcccacagccatgaagggtgaaagggcaccttgtgcctagactagggctgcctggtcagtcccaggtgaggccaagggctttctggccatctcagggaggggccaccaggttcctcccctcaccccatattccatcaccttcctcctctgctctgggtggtaagggaagccctcccggttcccacaggctatgatgctgcatggcagaggcaggtataacacagcactacatattggaaattttttatttttctaaataccaatgcagttttgctacggttacaattttgaaatattaactgagcctcaaaatcaccctttctgtcaagcatatcttggcctctcccatgtctcagtgttgcctgcatttctcccaggacttgggggtggggtgaaaagcgtacaaaagatacttaaaagggctcctggggtacacaagcccagcaggtcctgagtgaagccgtgggccctccaaatgctcgttttatagcaacctctctctaccctagttctccaaattcacttctgccttcctcaggtttgatatctggcaggtttgactatccagaggaaattaaatatttttatataaaattaaattataataaatattgccaaatgctttccttta

SEQ ID NO: 385059 - DNA, 2114 bp, Homo sapiens
cgccacccgcttcctcgccgcagggggcccgcccgctggcccgtttccggtccggtgggtacaagatgacggagccgggcgcctctcccgaggacccttgggtcaaggtggagtatgcctacagcgacaacagcctggaccccgggctttttgtagaaagcacccgcaaggggagtgtagtgtccagagctaatagcatcggttccaccagtgcctcttctgtccccaacacagatgatgaggacagtgattaccaccaggaggcctacaaggagtcctacaaagaccggcggcggcgcgcacacactcaggctgagcagaagaggagggacgccatcaagagaggctatgatgaccttcagaccatcgtccccacttgccagcagcaggacttctccattggctcccaaaagctcagcaaagccatcgttctacaaaagagtatggctagggaaagcactggaggggatggagccaagcggggctgtgaagaggccagtgcctcctacccacccatggctcggccttggtgtggtgattgccatgggatagttggggtctggggtaaggggaacaaagtcagccttatcttcttggtcgagaatacttctgtacctgtcctttttttcttgcaccccaccctagccattgactacattcagtttttgcacaaggagaagaaaaagcaggaggaggaggtgtccacgttacgcaaggatgtcaccgccctaaagatcatgaaagtgaactatgagcagattgtgaaggcacaccaggacaacccccatgaaggggaggaccaggtctctgaccaggtcaagttcaacgtgtttcaaggcatcatggattccctgttccagtccttcaatgcctccatctcagtggccagcttccaggagctgtcagcgtgtgtcttcagctggatcgaggagcactgtaagcctcagaccctgcgggagattgtgattggcgtcctgcaccaattgaaaaaccagctttactgaccggttcttggaaacctggagaacagccaacaagaggcccttgaatctctacgtggccactgaactgctgggcccgggagactggactacaacacctcacactggtcagctggtttctacttggtgtttggtttttcccagccccattttatcttcagcggagccgcggtgtttgttttgtgaaagcttctgattaatttattatattgacgataaaactcaaacctacccagccttccccccactccatggaagtccttgggatgggcgtctgctctggacaccccaaagagctcctgccctctcagccctttattcaagcctcagatttctgctcatgatctacatagatttggaaactgttttcctctgttttggtctcttgggcaacatttttggcccaagtttgggcaacatttggcccaagtttgggcattttggcagtagctgtatgggagaaaaagagtaagaggaaatattcccacagccatgaagggtgaaagggcaccttgtgcctagactagggctgcctggtcagtcccaggtgaggccaagggctttctggccatctcagggaggggccaccaggttcctcccctcaccccatattccatcaccttcctcctctgctctgggtggtaagggaagccctcccggttcccacaggctatgatgctgcatggcagaggcaggtataacacagcactacatattggaaattttttatttttctaaataccaatgcagttttgctacggttacaattttgaaatattaactgagcctcaaaatcaccctttctgtcaagcatatcttggcctctcccatgtctcagtgttgcctgcatttctcccaggacttgggggtggggtgaaaagcgtacaaaagatacttaaaagggctcctggggtacacaagcccagcaggtcctgagtgaagccgtgggccctccaaatgctcgttttatagcaacctctctctaccctagttctccaaattcacttctgccttcctcaggtttgatatctggcaggtttgactatccagaggaaattaaatatttttatataaaattaaattataataaatattgccaaatgctttccttta

SEQ ID NO: 385060 - DNA, 2285 bp, Homo sapiens
cgccacccgcttcctcgccgcagggggcccgcccgctggcccgtttccggtccggtgggtacaagatgacggagccgggcgcctctcccgaggacccttgggtcaaggtggagtatgcctacagcgacaacagcctggaccccgggctttttgtagaaagcacccgcaaggggagtgtagtgtccagagctaatagcatcggttccaccagtgcctcttctgtccccaacacagatgatgaggacagtgattaccaccaggaggcctacaaggagtcctacaaagaccggcggcggcgcgcacacactcaggctgagcagaagaggagggacgccatcaagagaggctatgatgaccttcagaccatcgtccccacttgccagcagcaggacttctccattggctcccaaaagctcagcaaagccatcgttctacaaaagaccattgactacattcagtttttgcacaaggagaagaaaaagcaggaggaggaggtgtccacgttacgcaaggatgtcaccgccctaaagatcatgaaagtgtaagaggggtgctgaatggggggaaccagaacttctgaggcaacttcattgcacaccctcccttgttcaaaggccacatcagttactgctgtacagataatactcttagttcctgagctagccagtaggactgtgtatccccaactgtccttacacatggcagacactcaggaaatgcctgttggattaatgtaaggaaggttggagagagagggccacctttcctgacctggaagcagtatctccctgatactgaaccccacccagaagctctctggggctgccattcctgggagtacacaggatagtcccgtcattcttcttgggtgggcggagctgctgcagcacctcagccctggcctgcatgcttttaggaactatgagcagattgtgaaggcacaccaggacaacccccatgaaggggaggaccaggtctctgaccaggtcaagttcaacgtgtttcaaggcatcatggattccctgttccagtccttcaatgcctccatctcagtggccagcttccaggagctgtcagcgtgtgtcttcagctggatcgaggagcactgtaagcctcagaccctgcgggagattgtgattggcgtcctgcaccaattgaaaaaccagctttactgaccggttcttggaaacctggagaacagccaacaagaggcccttgaatctctacgtggccactgaactgctgggcccgggagactggactacaacacctcacactggtcagctggtttctacttggtgtttggtttttcccagccccattttatcttcagcggagccgcggtgtttgttttgtgaaagcttctgattaatttattatattgacgataaaactcaaacctacccagccttccccccactccatggaagtccttgggatgggcgtctgctctggacaccccaaagagctcctgccctctcagccctttattcaagcctcagatttctgctcatgatctacatagatttggaaactgttttcctctgttttggtctcttgggcaacatttttggcccaagtttgggcaacatttggcccaagtttgggcattttggcagtagctgtatgggagaaaaagagtaagaggaaatattcccacagccatgaagggtgaaagggcaccttgtgcctagactagggctgcctggtcagtcccaggtgaggccaagggctttctggccatctcagggaggggccaccaggttcctcccctcaccccatattccatcaccttcctcctctgctctgggtggtaagggaagccctcccggttcccacaggctatgatgctgcatggcagaggcaggtataacacagcactacatattggaaattttttatttttctaaataccaatgcagttttgctacggttacaattttgaaatattaactgagcctcaaaatcaccctttctgtcaagcatatcttggcctctcccatgtctcagtgttgcctgcatttctcccaggacttgggggtggggtgaaaagcgtacaaaagatacttaaaagggctcctggggtacacaagcccagcaggtcctgagtgaagccgtgggccctccaaatgctcgttttatagcaacctctctctaccctagttctccaaattcacttctgccttcctcaggtttgatatctggcaggtttgactatccagaggaaattaaatatttttatataaaattaaattataataaatattgccaaatgctttccttta

SEQ ID NO: 385061 - DNA, 2581 bp, Homo sapiens
cgccacccgcttcctcgccgcagggggcccgcccgctggcccgtttccggtccggtgggtacaagatgacggagccgggcgcctctcccgaggacccttgggtcaaggcaagccccgtgggcgcgcacgccggcgaggggagggcgggtcgggctcgtgcacgtaggggggccggaagacgaggggcttccctcctgtccccaaagtcccccacgctctccgtgccccggggctgcagagaagacagctctcaccccgcgtgtgccaaggtggagtatgcctacagcgacaacagcctggaccccgggctttttgtagaaagcacccgcaaggggagtgtagtgtccagagctaatagcatcggttccaccagtgcctcttctgtccccaacacaggtaggcagtaacatcccccccgacctcagggggctcagatatgtcataattgtaatacctttcctagacagggaagccccagccatccacacaggggtgctggagccaaagtatcagacacaaggtctcaccatatgatgaggacagtgattaccaccaggaggcctacaaggagtcctacaaagaccggcggcggcgcgcacacactcaggctgagcagaagaggagggacgccatcaagagaggctatgatgaccttcagaccatcgtccccacttgccagcagcaggacttctccattggctcccaaaagctcagcaaagccatcgttctacaaaagaccattgactacattcagtttttgcacaaggagaagaaaaagcaggaggaggaggtgtccacgttacgcaaggatgtcaccgccctaaagatcatgaaagtgtaagaggggtgctgaatggggggaaccagaacttctgaggcaacttcattgcacaccctcccttgttcaaaggccacatcagttactgctgtacagataatactcttagttcctgagctagccagtaggactgtgtatccccaactgtccttacacatggcagacactcaggaaatgcctgttggattaatgtaaggaaggttggagagagagggccacctttcctgacctggaagcagtatctccctgatactgaaccccacccagaagctctctggggctgccattcctgggagtacacaggatagtcccgtcattcttcttgggtgggcggagctgctgcagcacctcagccctggcctgcatgcttttaggaactatgagcagattgtgaaggcacaccaggacaacccccatgaaggggaggaccaggtctctgaccaggtcaagttcaacgtgtttcaaggcatcatggattccctgttccagtccttcaatgcctccatctcagtggccagcttccaggagctgtcagcgtgtgtcttcagctggatcgaggagcactgtaagcctcagaccctgcgggagattgtgattggcgtcctgcaccaattgaaaaaccagctttactgaccggttcttggaaacctggagaacagccaacaagaggcccttgaatctctacgtggccactgaactgctgggcccgggagactggactacaacacctcacactggtcagctggtttctacttggtgtttggtttttcccagccccattttatcttcagcggagccgcggtgtttgttttgtgaaagcttctgattaatttattatattgacgataaaactcaaacctacccagccttccccccactccatggaagtccttgggatgggcgtctgctctggacaccccaaagagctcctgccctctcagccctttattcaagcctcagatttctgctcatgatctacatagatttggaaactgttttcctctgttttggtctcttgggcaacatttttggcccaagtttgggcaacatttggcccaagtttgggcattttggcagtagctgtatgggagaaaaagagtaagaggaaatattcccacagccatgaagggtgaaagggcaccttgtgcctagactagggctgcctggtcagtcccaggtgaggccaagggctttctggccatctcagggaggggccaccaggttcctcccctcaccccatattccatcaccttcctcctctgctctgggtggtaagggaagccctcccggttcccacaggctatgatgctgcatggcagaggcaggtataacacagcactacatattggaaattttttatttttctaaataccaatgcagttttgctacggttacaattttgaaatattaactgagcctcaaaatcaccctttctgtcaagcatatcttggcctctcccatgtctcagtgttgcctgcatttctcccaggacttgggggtggggtgaaaagcgtacaaaagatacttaaaagggctcctggggtacacaagcccagcaggtcctgagtgaagccgtgggccctccaaatgctcgttttatagcaacctctctctaccctagttctccaaattcacttctgccttcctcaggtttgatatctggcaggtttgactatccagaggaaattaaatatttttatataaaattaaattataataaatattgccaaatgctttccttta

SEQ ID NO: 385062 - DNA, 1611 bp, Homo sapiens
  misc_feature (1218)..(1218): n is a, c, g, or t
cgccacccgcttcctcgccgcagggggcccgcccgctggcccgtttccggtccggtgggtacaagatgacggagccgggcgcctctcccgaggacccttgggtcaaggtggagtatgcctacagcgacaacagcctggaccccgggctttttgtagaaagcacccgcaaggggagtgtagtgtccagagctaatagcatcggttccaccagtgcctcttctgtccccaacacagatgatgaggacagtgattaccaccaggaggcctacaaggagtcctacaaagaccggcggcggcgcgcacacactcaggctgagcagaagaggagggacgccatcaagagaggctatgatgaccttcagaccatcgtccccacttgccagcagcaggacttctccattggctcccaaaagctcagcaaagccatcgttctacaaaagaccattgactacattcagtttttgcacaaggagaagaaaaagcaggaggaggaggtgtccacgttacgcaaggatgtcaccgccctaaagatcatgaaagtgaactatgagcagattgtgaaggcacaccaggacaacccccatgaaggggaggaccaggtctctgaccaggtcaagttcaacgtgtttcaaggcatcatggattccctgttccagtccttcaatgcctccatctcagtggccagcttccaggagctgtcagcgtgtgtcttcagctggatcgaggagcactgtaagcctcagaccctgcgggagattgtgattggcgtcctgcaccaattgaaaaaccagctttactgaccggttcttggaaacctggagaacagccaacaagaggcccttgaatctctacgtggccactgaactgctgggcccgggagactggactacaacacctcacactggtcagctggtttctacttggtgtttggtttttcccagccccattttatcttcagcggagccgcggtgtttgttttgtgaaagcttctgattaatttattatattgacgataaaactcaaacctacccagccttcccccaaaaaaaaaaaaaaaaaaaaaaaaaaaaaaaaaaaaaaaaaaaaaaaaaaaaaaaaaaaacaaaaacagaaaaattaacaaaaaggaggagggggggggccgagcagaataataattcctccccgggggggcgcacaccataattactaatcataacgaccgccagatttgttcangaacgaaggggccccctcaatgtaggaagaggtttattaattataacaagacaaggcgcaggggcggcgccgctaattaaacacatgctcgtctgcggagtagaaaaaaaccgcttgctcacgtgagggagacctttttgtgggagaagagacccccacaaatcatgcggggggggagggaaagaattgttgggggaaaccaaccaccctagcagagaggaaataatatagccgccgcagggaggtgtcattaaaaaaccatcaaggggtgagatcaatagggtgtaggtcacaacaccacgaccttatatatctgtctggatgcgtaataaaaaaaatgtcttgctcgaagagcaattaatatgtttagcgaaaaaatatttacaacgcggg

SEQ ID NO: 385063 - DNA, 1231 bp, Homo sapiens
  misc_feature (10)..(10): n is a, c, g, or t
  misc_feature (23)..(23): n is a, c, g, or t
  misc_feature (42)..(42): n is a, c, g, or t
  misc_feature (47)..(47): n is a, c, g, or t
  misc_feature (49)..(49): n is a, c, g, or t
gatttaaatnggcctcccctaangggaaatttggcccctcgnggccnanaattcggctcgagaacacagcactacatattggaaattttttatttttctaaataccaatgcagttttgctacggttacaattttgaaatattaactgagcctcaaaatcaccctttctgtcaagcatatcttggcctctcccatgtctcagtgttgcctgcatttctcccaggacttgggggtggggtgaaaagcgtacaaaagatacttaaaagggctcctggggtacacaagcccagcaggtcctgagtgaagccgtgggccctccaaatgctcgttttatagcaacctctctctaccctagttctccaaattcacttctgccttcctcaggtttgatatctggcaggtttgactatccagaggaaattaaatatttttatataaaattaaattataataaatattgccaaatgctttcctttagcattgttccaagtctaaatgttaacctcaagctactgcaatttagacaatgaaatgggctgggtctacccccagccaccagccctcatcctctctacccagtgctctggtttatgcttgtctcctgactgctctgcttaaaggtgaaagtagcaggaacaacaacaaaagccaaccaaaaacaaggtagccagtgcaagacatctcactcttctgacatcctgcagtccccaccagtcctgaccgtgggcccctcaggggtctgggagtgtgacgttgtaatcttcatccgtctctatcccaacttcctcctgtgagacagggagacaagtgaatgagatgtcaccaggataagaccacagggaagcaaagaaggaagagagctccacttacaaagaactgcttcttgctcttggggtatccttcaagtattgcatcagacagctctgtagcctgacaagaaataaaaccacccgttttcagatgggcaacctggcactgcctgtcagtttatgatattgtgtagcggctgatctggtgcctgccattttcaaaggcacctccagggcctgtctcggagctcccacacacttaccatcctcttcctcttcctccactccttacagtacttctgcctctctctgtacacctagaaggaaaaagcaagttcctctaactcctcagaaccacagcagccctctggggctcagccctgatgttcactctggacctgcacagcggtcctacagccttcc

SEQ ID NO: 385064 - DNA, 487 bp, Homo sapiens
ctgcctgtcagtttatgatattgtgtagcggctgatctggtgcctgccattttcaaaggcacctccagggcctgtctcggagctcccacacacttaccatcctcttcctcttcctccactccttacagtacttctgcctctctctgtacacctagaaggaaaaagcaagttcctctaactcctcagaaccacagcagccctctggggctcagccctgatgttcactctggacctgcacagcggtcctacagccttccagctcacctgctctttctcttctggagtcacatgattggtagctgctttaatgttcttcaatctctctctgtagccagcgcattccttctttaactcctggatttctttctgcatctctggtgtggtcagggcactagataattccttgagctctgaaaccacatccgcctggggtcacttgctacccctgaggaaggagttctgtctttcccagtgggtgctccctgag

SEQ ID NO: 385065 - DNA, 2665 bp, Homo sapiens
cgccacccgcttcctcgccgcagggggcccgcccgctggcccgtttccggtccggtgggtacaagatgacggagccgggcgcctctcccgaggacccttgggtcaaggtggagtatgcctacagcgacaacagcctggaccccgggctttttgtagaaagcacccgcaaggggagtgtagtgtccagagctaatagcatcggttccaccagtgcctcttctgtccccaacacagatgatgaggacagtgattaccaccaggaggcctacaaggagtcctacaaagaccggcggcggcgcgcacacactcaggctgagcagaagaggagggacgccatcaagagaggctatgatgaccttcagaccatcgtccccacttgccagcagcaggacttctccattggctcccaaaagctcagcaaagccatcgttctacaaaagaccattgactacattcagtttttgcacaaggagaagaaaaagcaggaggaggaggtgtccacgttacgcaaggatgtcaccgccctaaagatcatgaaagtgaactatgagcagattgtgaaggcacaccaggacaacccccatgaaggggaggaccaggtctctgaccaggtcaagttcaacgtgtttcaaggcatcatggattccctgttccagtccttcaatgcctccatctcagtggccagcttccaggagctgtcagcgtgtgtcttcagctggatcgaggagcactgtaagcctcagaccctgcgggagattgtgattggcgtcctgcaccaattgaaaaaccagctttactgaccggttcttggaaacctggagaacagccaacaagaggcccttgaatctctacgtggccactgaactgctgggcccgggagactggactacaacacctcacactggtcagctggtttctacttggtgtttggtttttcccagccccattttatcttcagcggagccgcggtgtttgttttgtgaaagcttctgattaatttattatattgacgataaaactcaaacctacccagccttccccccactccatggaagtccttgggatgggcgtctgctctggacaccccaaagagctcctgccctctcagccctttattcaagcctcagatttctgctcatgatctacatagatttggaaactgttttcctctgttttggtctcttgggcaacatttttggcccaagtttgggcaacatttggcccaagtttgggcattttggcagtagctgtatgggagaaaaagagtaagaggaaatattcccacagccatgaagggtgaaagggcaccttgtgcctagactagggctgcctggtcagtcccaggtgaggccaagggctttctggccatctcagggaggggccaccaggttcctcccctcaccccatattccatcaccttcctcctctgctctgggtggtaagggaagccctcccggttcccacaggctatgatgctgcatggcagaggcaggtataacacagcactacatattggaaattttttatttttctaaataccaatgcagttttgctacggttacaattttgaaatattaactgagcctcaaaatcaccctttctgtcaagcatatcttggcctctcccatgtctcagtgttgcctgcatttctcccaggacttgggggtggggtgaaaagcgtacaaaagatacttaaaagggctcctggggtacacaagcccagcaggtcctgagtgaagccgtgggccctccaaatgctcgttttatagcaacctctctctaccctagttctccaaattcacttctgccttcctcaggtttgatatctggcaggtttgactatccagaggaaattaaatatttttatataaaattaaattataataaatattgccaaatgctttcctttagcattgttccaagtctaaatgttaacctcaagctactgcaatttagacaatgaaatgggctgggtctacccccagccaccagccctcatcctctctacccagtgctctggtttatgcttgtctcctgactgctctgcttaaaggtgaaagtagcaggaacaacaacaaaagccaaccaaaaacaaggtagccagtgcaagacatctcactcttctgacatcctgcagtccccaccagtcctgaccgtgggcccctcaggggtctgggagtgtgacgttgtaatcttcatccgtctctatcccaacttcctcctgtgagacagggagacaagtgaatgagatgtcaccaggataagaccacagggaagcaaagaaggaagagagctccacttacaaagaactgcttcttgctcttggggtatccttcaagtattgcatcagacagctctgtagcctgacaagaaataaaaccacccgttttcagatgggcaacctggcactgcctgtcagtttatgatattgtgtagcggctgatctggtgcctgccattttcaaaggcacctccagggcctgtctcggagctcccacacacttaccatcctcttcctcttcctccactccttacagtacttctgcctctctctgtacacctagaaggaaaaagcaagttcctctaactcctcagaaccacagcagccctctggggctcagccctgatgttcactctggacctgcacagcggtcctacagccttcc

SEQ ID NO: 385066 - DNA, 2575 bp, Homo sapiens
cgccacccgcttcctcgccgcagggggcccgcccgctggcccgtttccggtccggtgggtacaagatgacggagccgggcgcctctcccgaggacccttgggtcaaggtggagtatgcctacagcgacaacagcctggaccccgatgatgaggacagtgattaccaccaggaggcctacaaggagtcctacaaagaccggcggcggcgcgcacacactcaggctgagcagaagaggagggacgccatcaagagaggctatgatgaccttcagaccatcgtccccacttgccagcagcaggacttctccattggctcccaaaagctcagcaaagccatcgttctacaaaagaccattgactacattcagtttttgcacaaggagaagaaaaagcaggaggaggaggtgtccacgttacgcaaggatgtcaccgccctaaagatcatgaaagtgaactatgagcagattgtgaaggcacaccaggacaacccccatgaaggggaggaccaggtctctgaccaggtcaagttcaacgtgtttcaaggcatcatggattccctgttccagtccttcaatgcctccatctcagtggccagcttccaggagctgtcagcgtgtgtcttcagctggatcgaggagcactgtaagcctcagaccctgcgggagattgtgattggcgtcctgcaccaattgaaaaaccagctttactgaccggttcttggaaacctggagaacagccaacaagaggcccttgaatctctacgtggccactgaactgctgggcccgggagactggactacaacacctcacactggtcagctggtttctacttggtgtttggtttttcccagccccattttatcttcagcggagccgcggtgtttgttttgtgaaagcttctgattaatttattatattgacgataaaactcaaacctacccagccttccccccactccatggaagtccttgggatgggcgtctgctctggacaccccaaagagctcctgccctctcagccctttattcaagcctcagatttctgctcatgatctacatagatttggaaactgttttcctctgttttggtctcttgggcaacatttttggcccaagtttgggcaacatttggcccaagtttgggcattttggcagtagctgtatgggagaaaaagagtaagaggaaatattcccacagccatgaagggtgaaagggcaccttgtgcctagactagggctgcctggtcagtcccaggtgaggccaagggctttctggccatctcagggaggggccaccaggttcctcccctcaccccatattccatcaccttcctcctctgctctgggtggtaagggaagccctcccggttcccacaggctatgatgctgcatggcagaggcaggtataacacagcactacatattggaaattttttatttttctaaataccaatgcagttttgctacggttacaattttgaaatattaactgagcctcaaaatcaccctttctgtcaagcatatcttggcctctcccatgtctcagtgttgcctgcatttctcccaggacttgggggtggggtgaaaagcgtacaaaagatacttaaaagggctcctggggtacacaagcccagcaggtcctgagtgaagccgtgggccctccaaatgctcgttttatagcaacctctctctaccctagttctccaaattcacttctgccttcctcaggtttgatatctggcaggtttgactatccagaggaaattaaatatttttatataaaattaaattataataaatattgccaaatgctttcctttagcattgttccaagtctaaatgttaacctcaagctactgcaatttagacaatgaaatgggctgggtctacccccagccaccagccctcatcctctctacccagtgctctggtttatgcttgtctcctgactgctctgcttaaaggtgaaagtagcaggaacaacaacaaaagccaaccaaaaacaaggtagccagtgcaagacatctcactcttctgacatcctgcagtccccaccagtcctgaccgtgggcccctcaggggtctgggagtgtgacgttgtaatcttcatccgtctctatcccaacttcctcctgtgagacagggagacaagtgaatgagatgtcaccaggataagaccacagggaagcaaagaaggaagagagctccacttacaaagaactgcttcttgctcttggggtatccttcaagtattgcatcagacagctctgtagcctgacaagaaataaaaccacccgttttcagatgggcaacctggcactgcctgtcagtttatgatattgtgtagcggctgatctggtgcctgccattttcaaaggcacctccagggcctgtctcggagctcccacacacttaccatcctcttcctcttcctccactccttacagtacttctgcctctctctgtacacctagaaggaaaaagcaagttcctctaactcctcagaaccacagcagccctctggggctcagccctgatgttcactctggacctgcacagcggtcctacagccttcc

SEQ ID NO: 385067 - DNA, 2479 bp, Homo sapiens
  misc_feature (2086)..(2086): n is a, c, g, or t
cgccacccgcttcctcgccgcagggggcccgcccgctggcccgtttccggtccggtgggtacaagatgacggagccgggcgcctctcccgaggacccttgggtcaaggtggagtatgcctacagcgacaacagcctggaccccgggctttttgtagaaagcacccgcaaggggagtgtagtgtccagagctaatagcatcggttccaccagtgcctcttctgtccccaacacagatgatgaggacagtgattaccaccaggaggcctacaaggagtcctacaaagaccggcggcggcgcgcacacactcaggctgagcagaagaggagggacgccatcaagagaggctatgatgaccttcagaccatcgtccccacttgccagcagcaggacttctccattggctcccaaaagctcagcaaagccatcgttctacaaaagaccattgactacattcagtttttgcacaaggagaagaaaaagcaggaggaggaggtgtccacgttacgcaaggatgtcaccgccctaaagatcatgaaagtgaactatgagcagattgtgaaggcacaccaggacaacccccatgaaggggaggaccaggtctctgaccaggtcaagttcaacgtgtttcaaggcatcatggattccctgttccagtccttcaatgcctccatctcagtggccagcttccaggagctgtcagcgtgtgtcttcagctggatcgaggagcactgtaagcctcagaccctgcgggagattgtgattggcgtcctgcaccaattgaaaaaccagctttactgaccggttcttggaaacctggagaacagccaacaagaggcccttgaatctctacgtggccactgaactgctgggcccgggagactggactacaacacctcacactggtcagctggtttctacttggtgtttggtttttcccagccccattttatcttcagcggagccgcggtgtttgttttgtgaaagcttctgattaatttattatattgacgataaaactcaaacctacccagccttccccccactccatggaagtccttgggatgggcgtctgctctggacaccccaaagagctcctgccctctcagccctttattcaagcctcagatttctgctcatgatctacatagatttggaaactgttttcctctgttttggtctcttgggcaacatttttggcccaagtttgggcaacatttggcccaagtttgggcattttggcagtagctgtatgggagaaaaagagtaagaggaaatattcccacagccatgaagggtgaaagggcaccttgtgcctagactagggctgcctggtcagtcccaggtgaggccaagggctttctggccatctcagggaggggccaccaggttcctcccctcaccccatattccatcaccttcctcctctgctctgggtggtaagggaagccctcccggttcccacaggctatgatgctgcatggcagaggcaggtataacacagcactacatattggaaattttttatttttctaaataccaatgcagttttgctacggttacaattttgaaatattaactgagcctcaaaatcaccctttctgtcaagcatatcttggcctctcccatgtctcagtgttgcctgcatttctcccaggacttgggggtggggtgaaaagcgtacaaaagatacttaaaagggctcctggggtacacaagcccagcaggtcctgagtgaagccgtgggccctccaaatgctcgttttatagcaacctctctctaccctagttctccaaattcacttctgccttcctcaggtttgatatctggcaggtttgactatccagaggaaattaaatatttttatataaaattaaattataataaatattgccaaatgctttcctttaaaaaaaaaaaaaaaaaaaaaaaaaaaaaaaaaaaaaaaaaaaaaaaaaaaaaaaaaaaaacaaaaacagaaaaattaacaaaaaggaggagggggggggccgagcagaataataattcctccccgggggggcgcacaccataattactaatcataacgaccgccagatttgttcangaacgaaggggccccctcaatgtaggaagaggtttattaattataacaagacaaggcgcaggggcggcgccgctaattaaacacatgctcgtctgcggagtagaaaaaaaccgcttgctcacgtgagggagacctttttgtgggagaagagacccccacaaatcatgcggggggggagggaaagaattgttgggggaaaccaaccaccctagcagagaggaaataatatagccgccgcagggaggtgtcattaaaaaaccatcaaggggtgagatcaatagggtgtaggtcacaacaccacgaccttatatatctgtctggatgcgtaataaaaaaaatgtcttgctcgaagagcaattaatatgtttagcgaaaaaatatttacaacgcggg

SEQ ID NO: 385068 - DNA, 1982 bp, Homo sapiens
cgccacccgcttcctcgccgcagggggcccgcccgctggcccgtttccggtccggtgggtacaagatgacggagccgggcgcctctcccgaggacccttgggtcaaggcaagccccgtgggcgcgcacgccggcgaggggagggcgggtcgggctcgtgcacgtaggggggccggaagacgaggggcttccctcctgtccccaaagtcccccacgctctccgtgccccggggctgcagagaagacagctctcaccccgcgtgtgccaaggtggagtatgcctacagcgacaacagcctggaccccgatgatgaggacagtgattaccaccaggaggcctacaaggagtcctacaaagaccggcggcggcgcgcacacactcaggctgagcagaagaggagggacgccatcaagagaggctatgatgaccttcagaccatcgtccccacttgccagcagcaggacttctccattggctcccaaaagctcagcaaagccatcgttctacaaaagaccattgactacattcagtttttgcacaaggagaagaaaaagcaggaggaggaggtgtccacgttacgcaaggatgtcaccgccctaaagatcatgaaagtgaactatgagcagattgtgaaggcacaccaggacaacccccatgaaggggaggaccaggtctctgaccaggtcaagttcaacgtgtttcaaggcatcatggattccctgttccagtccttcaatgcctccatctcagtggccagcttccaggagctgtcagcgtgtgtcttcagctggatcgaggagcactgtaagcctcagaccctgcgggagattgtgattggcgtcctgcaccaattgaaaaaccagctttactgaccggttcttggaaacctggagaacagccaacaagaggcccttgaatctctacgtggccactgaactgctgggcccgggagactggactacaacacctcacactggtcagctggtttctacttggtgtttggtttttcccagccccattttatcttcagcggagccgcggtgtttgttttgtgaaagcttctgattaatttattatattgacgataaaactcaaacctacccagccttccccccactccatggaagtccttgggatgggcgtctgctctggacaccccaaagagctcctgccctctcagccctttattcaagcctcagatttctgctcatgatctacatagatttggaaactgttttcctctgttttggtctcttgggcaacatttttggcccaagtttgggcaacatttggcccaagtttgggcattttggcagtagctgtatgggagaaaaagagtaagaggaaatattcccacagccatgaagggtgaaagggcaccttgtgcctagactagggctgcctggtcagtcccaggtgaggccaagggctttctggccatctcagggaggggccaccaggttcctcccctcaccccatattccatcaccttcctcctctgctctgggtggtaagggaagccctcccggttcccacaggctatgatgctgcatggcagaggcaggtataacacagcactacatattggaaattttttatttttctaaataccaatgcagttttgctacggttacaattttgaaatattaactgagcctcaaaatcaccctttctgtcaagcatatcttggcctctcccatgtctcagtgttgcctgcatttctcccaggacttgggggtggggtgaaaagcgtacaaaagatacttaaaagggctcctggggtacacaagcccagcaggtcctgagtgaagccgtgggccctccaaatgctcgttttatagcaacctctctctaccctagttctccaaattcacttctgccttcctcaggtttgatatctggcaggtttgactatccagaggaaattaaatatttttatataaaattaaattataataaatattgccaaatgctttccttta

SEQ ID NO: 385069 - DNA, 1861 bp, Homo sapiens
ccttcccgtgctctgtgccgcaggtggagtatgcctacagcgacaacagcctggaccccgggctttttgtagaaagcacccgcaaggggagtgtagtgtccagagctaatagcatcggttccaccagtgcctcttctgtccccaacacagatgatgaggacagtgattaccaccaggaggcctacaaggagtcctacaaagaccggcggcggcgcgcacacactcaggctgagcagaagaggagggacgccatcaagggttaaagaacccatttcccctgctgtttccacagagaggctatgatgaccttcagaccatcgtccccacttgccagcagcaggacttctccattggctcccaaaagctcagcaaagccatcgttctacaaaagaccattgactacattcagtttttgcacaaggagaagaaaaagcaggaggaggaggtgtccacgttacgcaaggatgtcaccgccctaaagatcatgaaagtgaactatgagcagattgtgaaggcacaccaggacaacccccatgaaggggaggaccaggtctctgaccaggtcaagttcaacgtgtttcaaggcatcatggattccctgttccagtccttcaatgcctccatctcagtggccagcttccaggagctgtcagcgtgtgtcttcagctggatcgaggagcactgtaagcctcagaccctgcgggagattgtgattggcgtcctgcaccaattgaaaaaccagctttactgaccggttcttggaaacctggagaacagccaacaagaggcccttgaatctctacgtggccactgaactgctgggcccgggagactggactacaacacctcacactggtcagctggtttctacttggtgtttggtttttcccagccccattttatcttcagcggagccgcggtgtttgttttgtgaaagcttctgattaatttattatattgacgataaaactcaaacctacccagccttccccccactccatggaagtccttgggatgggcgtctgctctggacaccccaaagagctcctgccctctcagccctttattcaagcctcagatttctgctcatgatctacatagatttggaaactgttttcctctgttttggtctcttgggcaacatttttggcccaagtttgggcaacatttggcccaagtttgggcattttggcagtagctgtatgggagaaaaagagtaagaggaaatattcccacagccatgaagggtgaaagggcaccttgtgcctagactagggctgcctggtcagtcccaggtgaggccaagggctttctggccatctcagggaggggccaccaggttcctcccctcaccccatattccatcaccttcctcctctgctctgggtggtaagggaagccctcccggttcccacaggctatgatgctgcatggcagaggcaggtataacacagcactacatattggaaattttttatttttctaaataccaatgcagttttgctacggttacaattttgaaatattaactgagcctcaaaatcaccctttctgtcaagcatatcttggcctctcccatgtctcagtgttgcctgcatttctcccaggacttgggggtggggtgaaaagcgtacaaaagatacttaaaagggctcctggggtacacaagcccagcaggtcctgagtgaagccgtgggccctccaaatgctcgttttatagcaacctctctctaccctagttctccaaattcacttctgccttcctcaggtttgatatctggcaggtttgactatccagaggaaattaaatatttttatataaaattaaattataataaatattgccaaatgctttccttta

SEQ ID NO: 385070 - DNA, 2390 bp, Homo sapiens
cgccacccgcttcctcgccgcagggggcccgcccgctggcccgtttccggtccggtgggtacaagatgacggagccgggcgcctctcccgaggacccttgggtcaaggtggagtatgcctacagcgacaacagcctggaccccgggctttttgtagaaagcacccgcaaggggagtgtagtgtccagagctaatagcatcggttccaccagtgcctcttctgtccccaacacaggtaggcagtaacatcccccccgacctcagggggctcagatatgtcataattgtaatacctttcctagacagggaagccccagccatccacacaggggtgctggagccaaagtatcagacacaaggtctcaccatctttcacctcatctggaacattaggtggttctgtccatctgccttctctggacaccaggttcttcccagctggggaaaggtgggctagctggaccccactgggccccaagatgacctttccctgcccccatctctgagcgtaatgatgaggacagtgattaccaccaggaggcctacaaggagtcctacaaagaccggcggcggcgcgcacacactcaggctgagcagaagaggagggacgccatcaagagaggctatgatgaccttcagaccatcgtccccacttgccagcagcaggacttctccattggctcccaaaagctcagcaaagccatcgttctacaaaagagtatggctagggaaagcactggaggggatggagccaagcggggctgtgaagaggccagtgcctcctacccacccatggctcggccttggtgtggtgattgccatgggatagttggggtctggggtaaggggaacaaagtcagccttatcttcttggtcgagaatacttctgtacctgtcctttttttcttgcaccccaccctagccattgactacattcagtttttgcacaaggagaagaaaaagcaggaggaggaggtgtccacgttacgcaaggatgtcaccgccctaaagatcatgaaagtgaactatgagcagattgtgaaggcacaccaggacaacccccatgaaggggaggaccaggtctctgaccaggtcaagttcaacgtgtttcaaggcatcatggattccctgttccagtccttcaatgcctccatctcagtggccagcttccaggagctgtcagcgtgtgtcttcagctggatcgaggagcactgtaagcctcagaccctgcgggagattgtgattggcgtcctgcaccaattgaaaaaccagctttactgaccggttcttggaaacctggagaacagccaacaagaggcccttgaatctctacgtggccactgaactgctgggcccgggagactggactacaacacctcacactggtcagctggtttctacttggtgtttggtttttcccagccccattttatcttcagcggagccgcggtgtttgttttgtgaaagcttctgattaatttattatattgacgataaaactcaaacctacccagccttccccccactccatggaagtccttgggatgggcgtctgctctggacaccccaaagagctcctgccctctcagccctttattcaagcctcagatttctgctcatgatctacatagatttggaaactgttttcctctgttttggtctcttgggcaacatttttggcccaagtttgggcaacatttggcccaagtttgggcattttggcagtagctgtatgggagaaaaagagtaagaggaaatattcccacagccatgaagggtgaaagggcaccttgtgcctagactagggctgcctggtcagtcccaggtgaggccaagggctttctggccatctcagggaggggccaccaggttcctcccctcaccccatattccatcaccttcctcctctgctctgggtggtaagggaagccctcccggttcccacaggctatgatgctgcatggcagaggcaggtataacacagcactacatattggaaattttttatttttctaaataccaatgcagttttgctacggttacaattttgaaatattaactgagcctcaaaatcaccctttctgtcaagcatatcttggcctctcccatgtctcagtgttgcctgcatttctcccaggacttgggggtggggtgaaaagcgtacaaaagatacttaaaagggctcctggggtacacaagcccagcaggtcctgagtgaagccgtgggccctccaaatgctcgttttatagcaacctctctctaccctagttctccaaattcacttctgccttcctcaggtttgatatctggcaggtttgactatccagaggaaattaaatatttttatataaaattaaattataataaatattgccaaatgctttccttta

SEQ ID NO: 385071 - DNA, 1361 bp, Homo sapiens
atccgcttaagataaaatggggctgggaaaaaccaaacaccaagtagaaaccaactgaccaggtcaagttcaacgtgtttcaaggcatcatggattccctgttccagtccttcaatgcctccatctcagtggccagcttccaggagctgtcagcgtgtgtcttcagctggatcgaggagcactgtaagcctcagaccctgcgggagattgtgattggcgtcctgcaccaattgaaaaaccagctttactgaccggttcttggaaacctggagaacagccaacaagaggcccttgaatctctacgtggccactgaactgctgggcccgggagactggactacaacacctcacactggtcagctggtttctacttggtgtttggtttttcccagccccattttatcttcagcggagccgcggtgtttgttttgtgaaagcttctgattaatttattatattgacgataaaactcaaacctacccagccttccccccactccatggaagtccttgggatgggcgtctgctctggacaccccaaagagctcctgccctctcagccctttattcaagcctcagatttctgctcatgatctacatagatttggaaactgttttcctctgttttggtctcttgggcaacatttttggcccaagtttgggcaacatttggcccaagtttgggcattttggcagtagctgtatgggagaaaaagagtaagaggaaatattcccacagccatgaagggtgaaagggcaccttgtgcctagactagggctgcctggtcagtcccaggtgaggccaagggctttctggccatctcagggaggggccaccaggttcctcccctcaccccatattccatcaccttcctcctctgctctgggtggtaagggaagccctcccggttcccacaggctatgatgctgcatggcagaggcaggtataacacagcactacatattggaaattttttatttttctaaataccaatgcagttttgctacggttacaattttgaaatattaactgagcctcaaaatcaccctttctgtcaagcatatcttggcctctcccatgtctcagtgttgcctgcatttctcccaggacttgggggtggggtgaaaagcgtacaaaagatacttaaaagggctcctggggtacacaagcccagcaggtcctgagtgaagccgtgggccctccaaatgctcgttttatagcaacctctctctaccctagttctccaaattcacttctgccttcctcaggtttgatatctggcaggtttgactatccagaggaaattaaatatttttatataaaattaaattataataaatattgccaaatgctttccttta

SEQ ID NO: 385072 - DNA, 1032 bp, Homo sapiens
cgccacccgcttcctcgccgcagggggcccgcccgctggcccgtttccggtccggtgggtacaagatgacggagccgggcgcctctcccgaggacccttgggtcaaggtggagtatgcctacagcgacaacagcctggaccccgggctttttgtagaaagcacccgcaaggggagtgtagtgtccagagctaatagcatcggttccaccagtgcctcttctgtccccaacacagatgatgaggacagtgattaccaccaggaggcctacaaggagtcctacaaagaccggcggcggcgcgcacacactcaggctgagcagaagaggagggacgccatcaagagaggctatgatgaccttcagaccatcgtccccacttgccagcagcaggactcctgccctctcagccctttattcaagcctcagatttctgctcatgatctacatagatttggaaactgttttcctctgttttggtctcttgggcaacatttttggcccaagtttgggcaacatttggcccaagtttgggcattttggcagtagctgtatgggagaaaagtaagggaagccctcccggttcccacaggctatgatgctgcatggcagaggcaggtataacacagcactacatattggaaattttttatttttctaaataccaatgcagttttgctacggttacaattttgaaatattaactgagcctcaaaatcaccctttctgtcaagcatatcttggcctctcccatgtctcagtgttgcctgcatttctcccaggacttgggggtggggtgaaaagcgtacaaaagatacttaaaagggctcctggggtacacaagcccagcaggtcctgagtgaagccgtgggccctccaaatgctcgttttatagcaacctctctctaccctagttctccaaattcacttctgccttcctcaggtttgatatctggcaggtttgactatccagaggaaattaaatatttttatataaaattaaattataataaatattgccaaatgctttccttta

SEQ ID NO: 385073 - DNA, 156 bp, Homo sapiens
atatttcaggcaaccagccataattcttacgatatactgccctccagtggactcctgtcagacataacctctgaaaattattttaaataacctttacctaagctatcttttaggtgtgatatttaatctttgacaaaaactttaaaaatcctcttg

SEQ ID NO: 385074 - DNA, 570 bp, Homo sapiens
ggaactcatattggtagagtgaccaggtaggagcttggtttaattactccacatcactaatctaccaattttcattgttttaatgtgacacttattacaaatgactttttcttttctcagtcttaggtaataatgtgtgggaatttctgactgagacaaacatctgatatttgtttgcatactgtaggtgtaaactgctggaaaaaaactggtattatttttaaaaagggttgcacagccaaatgttaaagctgaagaagtgacgttattttagaagtctttttttttttttttccttctctgcaatcagatttctcagcctggtacattatgaacagcttagtgctgttgagtaatttatatcaggatgattaggaaagcttttctctgcagattttaatttttcttaaattaaaccactggctcaaacagaattttccttgaacccaagttttcacattagagatttgcataacttttaataattcttatccattttccttttctatcccctcttacctataattctcagtctttattctttcaaaaaaggaatgaatctcatcttta

SEQ ID NO: 385075 - DNA, 620 bp, Homo sapiens
gcagcggccgcgtcgacgggcagacgcaggggtcggcgccgggtgagagcgtgcggccggattcaccacaacatggcaaatctttttataaggaaaatggtgaaccctctgctctatctcagtcgtcacacggtgaagcctcgagccctctccacatttctatttggatccattcgaggtgcagcccccgtggctgtggaacccggggcagcagtgcgctcacttctctcacccggcctcctgccccatctgctgcctgcgctggggttcaaaaacaagactgtccttaagaagcgctgcaaggactgttacctggtgaagaggcggggtcggtggtacgtctactgtaaaacccatccgaggcacaagcagagacagatgtagaccctttccctccagagtcacgcacatactcgtcatcgcatcacttgggagaatggttgtatcttatggaaggaattatcacatcaaggagtcaggggaaagtgactggaagcaaacgccctaaaagttacccatcacgtttcagtgtaaatgagtaactatagaagacattgcgttatcttatttccaaaacgttccaactaaaaaacattttcctattaaaatagaccttccga

SEQ ID NO: 385076 - DNA, 1237 bp, Homo sapiens
tcttgagagtgggggctgcgagagggtggggccggccaccttgggaccctcgggcgtgtctccccgagtgggctgcggtcagaggagcgtgggccggggcctggcggtctcagagggccagggttggggggtgcgggtccgaccgtgggcgcccgacctggcgacaggagggggtgtccagcgaccccggggcgggagaactggcggctcccgaacgcgacctcacagcccgcgcgcagggccggctccggtgccgcagtgtcctccgggccctgcaggcccagctcttcccagccggggccgctgaaccctaagggccggggcgcgtggggaagcaggggcgggcgaccggggtgccagagttccgtgctcttccggagcgggggcctgtcccgaaactggcccgagggagggcccctgggtctgggaagagttggagggaggagctcatcagttgaaccgtccttgacctggtgtctgtttggaaagggatgcggcctaagtttaagctccctcccagccaagtgagcggctcctcaacatcgcagggctttgcacactcacctacacttgcagcaggcgggaaagggaaggaagccaccgtccactgccccttattctcctggcacacttggctgattaaggcagtgttcaagctcaggtcgaggctgcagctgattcaccacaacatggcaaatctttttataaggaaaatggtgaaccctctgctctatctcagtcgtcacacggtgaagcctcgagccctctccacatttctatttggatccattcgaggtgcagcccccgtggctgtggaacccggggcagcagtgcgctcacttctctcacccggcctcctgccccatctgctgcctgcgctggggttcaaaaacaagactgtccttaagaagcgctgcaaggactgttacctggtgaagaggcggggtcggtggtacgtctactgtaaaacccatccgaggcacaagcagagacagatgtagaccctttccctccagagtcacgcacatactcgtcatcgcatcacttgggagaatggttgtatcttatggaaggaattatcacatcaaggagtcaggggaaagtgactggaagcaaacgccctaaaagttacccatcacgtttcagtgtaaatgagtaactatagaagacattgcgttatcttatttccaaaacgttccaactaaaaaacattttcctattaaaatagaccttccga

SEQ ID NO: 385077 - DNA, 1208 bp, Homo sapiens
gcagcggccgcgtcgacgggcagacgcaggggtcggcgccgggtgagagcgtgcggccggattcaccacaacatggcaaatctttttataaggaaaatggtgaaccctctgctctatctcagtcgtcacacggtgaagcctcgagccctctccacatttctatttggatccattcgaggtgcagcccccgtggctgtggaacccggggcagcagtgcgctcacttctctcacccggcctcctgccccatctgctgcctgcgctggggttcaaaaacaagactgtccttaagaagcgctgcaaggactgttacctggtgaagaggcggggtcggtggtacgtctactgtaaaacccatccgaggcacaagcagagacagatgtagaccctttccctccagagtcacgcacatactcgtcatcgcatcacttgggagaatggttgtatcttatggaaggaattatcacatcaaggagtcaggggaaagtgactggaagcaaacgccctaaaagttacccatcacgtttcagtgtaaatgagtaactatagaagacattgcgttatcttatttccaaaacgttccaactaaaaaacattttcctattaaaatagaccttccgaccgaatagcttagttcattcattctctctgaactcaggctgcaggtagggattggatggtgctgggtgaggctgggcaggacttctctatgtctccgtgaggctgcttagagcctcttggaagaagtggtgttttggtcacccgtcgctgtacaagccaaggcttggtggcttaaatcagccattttacattgttcacgattttgtgaggcatttgggatgggctcagctgagcagtttgtctgatctgtgtggcattaactgcaggacccacttccaagatggcaccggctctcctgtctggggtctcagtgctcctcaggctgtacgtagcacctcctcaggcagggcccacagcgtggcttgcactgccccacagtgagcttcccgagagtgtcccgagagacccaagcagatgctacgaggcttcctatgacccagcctcagaaattccagcgtgtcatttctaccgcactctttcagtccctagggtgagcccagattcagggggaggcaaggagctccccttgctagaggatgaccacacctacaactggtaaggacttggagggatggagtgggctggtcc

SEQ ID NO: 385078 - DNA, 1155 bp, Homo sapiens
gcagcggccgcgtcgacgggcagacgcaggggtcggcgccgggtgagagcgtgcggccggattcaccacaacatggcaaatctttttataaggaaaatggtgaaccctctgctctatctcagtcgtcacacggtgaagcctcgagccctctccacatttctatttggatccattcgaggtgcagcccccgtggctgtggaacccggggcagcagtgcgctcacttctctcacccggcctcctgccccatctgctgcctgcgctggggttcaaaaacaagactgtccttaagaagcgctgcaaggactgttacctggtgaagaggcggggtcggtggtacgtctactagtcacgcacatactcgtcatcgcatcacttgggagaatggttgtatcttatggaaggaattatcacatcaaggagtcaggggaaagtgactggaagcaaacgccctaaaagttacccatcacgtttcagtgtaaatgagtaactatagaagacattgcgttatcttatttccaaaacgttccaactaaaaaacattttcctattaaaatagaccttccgaccgaatagcttagttcattcattctctctgaactcaggctgcaggtagggattggatggtgctgggtgaggctgggcaggacttctctatgtctccgtgaggctgcttagagcctcttggaagaagtggtgttttggtcacccgtcgctgtacaagccaaggcttggtggcttaaatcagccattttacattgttcacgattttgtgaggcatttgggatgggctcagctgagcagtttgtctgatctgtgtggcattaactgcaggacccacttccaagatggcaccggctctcctgtctggggtctcagtgctcctcaggctgtacgtagcacctcctcaggcagggcccacagcgtggcttgcactgccccacagtgagcttcccgagagtgtcccgagagacccaagcagatgctacgaggcttcctatgacccagcctcagaaattccagcgtgtcatttctaccgcactctttcagtccctagggtgagcccagattcagggggaggcaaggagctccccttgctagaggatgaccacacctacaactggtaaggacttggagggatggagtgggctggtcc

SEQ ID NO: 385079 - DNA, 652 bp, Homo sapiens
gcagcggccgcgtcgacgggcagacgcaggggtcggcgccgggtgagagcgtgcggccggattcaccacaacatggcaaatctttttataaggaaaatggtgaaccctctgctctatctcagtcgtcacacggtgaagcctcgagccctctccacatttctatttggatccattcgaggtgcagcccccgtggctgtggaacccggggcagcagtgcgctcacttctctcacccggcctcctgccccatctgctgcctgcgctggggttcaaaaacaagactgtccttaagaagcgctgcaaggactgttacctggtgaagaggcggggtcggtggtacgtctactgtaaaacccatccgaggcacaagcagagacagatgtagaccctttccctccagagtcacgcacatactcgtcatcgcatcacttgggagaatggttgtatcttatggaaggaattatcacatcaaggagtcaggggaaagtgactggaagcaaacgccctaaaagttacccatcacgtttcagtgtaaatgagtaactatagaagacattgcgttatcttatttccaaaacgttccaactaaaaaacattttcctattaaaatagaccttccgataaaaaaaaaatcaggcctcgttggtctaaat

SEQ ID NO: 385080 - DNA, 610 bp, Homo sapiens
tgatccagaggttagcccaacaacagtcgtacacgcagggtcggcgccggattcaccacaacatggcaaatctttttataaggaaaatggtgaaccctctgctctatctcagtcgtcacacggtgaagcctcgagccctctccacatttctatttggatccattcgaggtgcagcccccgtggctgtggaacccggggcagcagtgcgctcacttctctcacccggcctcctgccccatctgctgcctgcgctggggttcaaaaacaagactgtccttaagaagcgctgcaaggactgttacctggtgaagaggcggggtcggtggtacgtctactgtaaaacccatccgaggcacaagcagagacagatgtagaccctttccctccagagtcacgcacatactcgtcatcgcatcacttgggagaatggttgtatcttatggaaggaattatcacatcaaggagtcaggggaaagtgactggaagcaaacgccctaaaagttacccatcacgtttcagtgtaaatgagtaactatagaagacattgcgttatcttatttccaaaacgttccaactaaaaaacattttcctattaaaatagaccttccga

SEQ ID NO: 385081 - DNA, 1332 bp, Homo sapiens
atgagaaggaggggaagtcttgagattttgtccaaagcatctctggctgttacaaacaagaggcctgagcttggctgggccacttgctagcctttccaggggcagagacaggaacaacagtcttctcctaggtcccatctgtctgtgatttcatggcttagaggggtcactgagaaggctactaggtagggatatcttggcccttatatgttgcttcttcccttccgaggagaaagaaggcgatgccaccaaggattccctggatgacctctttcctaatgaggaggaagaggaccccagcaatggcttgtcccgtggtcaaggtgctacagcagctcagcagggtggatatgagatcccagcaaggttgcggacgttgcacaacctggtgatccagtacgcagcccaaggtcgctatgaggtggccgtgccactctgtaagcaggcactagaggacctggagcgcacatcaggccgtggccaccctgatgtcgccaccatgctcaacatccttgctttggtgtatcgtgaccagaataagtataaggaagctgcccacctgctgaatgatgcccttagcatccgggagagcaccttgggacctgaccatcctgctgtcagtattccttgccctccccaccccacgccccgcaccccccaccattgctgttttggcctctcttagctcatccatctgctgccctcagtccactcactaagggtgctgaggaaggaggcataagaagtcctttcttccaggcactgtccagtgatcctaatgattctcaattctctgagactcagtgactcctttttataacaaatattttgcttgaatttaattaatagataagtcataggtaaatccacatatgatttctacaaaacttaatatgctactctaataaatataaaagaaaaacaagaaaagtaatttgtaaggacaatatatacaatgtaatataataaggtaaaaatacaaaacaacagtagttgtattgagtacaactttgttaaaagaaatagcaaagtggcctgggcacagtggctcacgagtgtaatcccagcactaatcccagcactttgggaggctgaggagggtggatcacgaggtcaggagatcgagaccatcctggctaacatggtgaaaccccatctctactaaaaaaaatacaaaaaatgccgggcgtggtggcgggcgcctgtagtcctagctactcgggaggctaaggcaggagaatggcgtgaacccgggaggcggagcttgcagtgagctgagatcgtgccattgcactccagccagggtgacagagcgagactccgtctcaaaaa

SEQ ID NO: 385082 - DNA, 1662 bp, Homo sapiens
gcacgagccggcaagagcggcagccacaccggcagattgcagaccgggcaaggtcccccaggccaggatgtcaggcctggtgttggggcagcgggatgagcctgcaggccaccggctcagccaagaggagatcctggggagcacacggctggtcagccaagggctagaggccctacgcagtgaacaccaggccgtgctgcaaagcctgtcccagaccattgagtgtctgcagcagggaggccatgaggaagggctggtgcatgagaaggcccggcagcttcgccgttctatggaaaacattgagctcgggctgagtgaggcccaggtgatgctggctctagccagccacctgagcacagtggagtcggagaaacagaagctgcgggctcaggtgcggcggctatgccaggagaaccagtggctgcgggatgagctggctggcacccagcagcggctacagcgcagtgaacaggctgtggctcagctggaggaggaaaagaagcacctggagttcctggggcagctgcggcagtatgatgaggatggacatacctcggaggagaaagaaggcgatgccaccaaggattccctggatgacctctttcctaatgaggaggaagaggaccccagcaatggcttgtcccgtggtcaaggtgctacagcagctcagcagggtggatatgagatcccagcaaggttgcggacgttgcacaacctggtgatccagtacgcagcccaaggtcgctatgaggtggccgtgccactctgtaagcaggcactagaggacctggagcgcacatcaggccgtggccaccctgatgtcgccaccatgctcaacatccttgctttggtgtatcgtgaccagaataagtataaggaagctgcccacctgctgaatgatgcccttagcatccgggagagcaccttgggacctgaccatcctgctgtcagtattccttgccctccccaccccacgccccgcaccccccaccattgctgttttggcctctcttagctcatccatctgctgccctcagtccactcactaagggtgctgaggaaggaggcataagaagtcctttcttccaggcactgtccagtgatcctaatgattctcaattctctgagactcagtgactcctttttataacaaatattttgcttgaatttaattaatagataagtcataggtaaatccacatatgatttctacaaaacttaatatgctactctaataaatataaaagaaaaacaagaaaagtaatttgtaaggacaatatatacaatgtaatataataaggtaaaaatacaaaacaacagtagttgtattgagtacaactttgttaaaagaaatagcaaagtggcctgggcacagtggctcacgagtgtaatcccagcactaatcccagcactttgggaggctgaggagggtggatcacgaggtcaggagatcgagaccatcctggctaacatggtgaaaccccatctctactaaaaaaaatacaaaaaatgccgggcgtggtggcgggcgcctgtagtcctagctactcgggaggctaaggcaggagaatggcgtgaacccgggaggcggagcttgcagtgagctgagatcgtgccattgcactccagccagggtgacagagcgagactccgtctcaaaaa

SEQ ID NO: 385083 - DNA, 456 bp, Homo sapiens
cttttctgagaaaacactagtgatattttaatggcaaatgacttcttgtatcaacacacaagtatatgccagtattcatgtggttcttccaggtagcttctccaccagattgtggccttctggaaaaccctagcagaggctaaacaaagtcccaggtccagagatagactggtccagagacagatgtgatcctaggtccagagatacactgtgaccatgggatggatggactctaggagccagtctttgggaggccgaggtccctgagctgatggggtagtgttgtctgtttcaggtctcccggggcctcagtgccagcaccatggacctctcttcaagcagctgacattcaacccggcccccaggtaaccagaggggagacaaggcactatccatcccctctcagcatatcttggaggcctgagcagcagctggggcccatcttctaaagcttga

SEQ ID NO: 385084 - DNA, 436 bp, Homo sapiens
gcctcccagaccttttcccttcctcccgtagactttccctcagctttagctctgttccctctcctattttcttattttttttcctcttgtcttgcttggaagacaaatgttttgttttctgaactcattctctcttccttctctggtctctttctcaccacagccccacagtgaacactactctgagaaacctgggagctctgtataggcgccagggaaagctggaggctgctgagaccctggaggaatgtgccctgcggtcccggagacaggtcagaagcccagaggggaaggaggtcctagagggaagggccctggggatgagagagtgccgaggtttcttgggagtctcctaagaataagcggaaaggctgatgaagccaggagggagaggaaagtgaggcagtgttgtgattgtggttgtttttaagcatgt

SEQ ID NO: 385085 - DNA, 2543 bp, Homo sapiens
acatgccctggtgcagaacagagaagcgaaacctagaaataatcaaggcttgttccagaccttcagagttctcgcagcctgcctgtcttgtgtgtgtgtagattcagatatagacaagatatcatctgtaggtagagatgtaaatatagacatagctcagctattactcgggaggccgtggcatgagaatcgcttgaacccaggaggcagaggttacagtgagccaggattgcagaccgggcaaggtcccccaggccaggatgtcaggcctggtgttggggcagcgggatgagcctgcaggccaccggctcagccaagaggagatcctggggagcacacggctggtcagccaagggctagaggccctacgcagtgaacaccaggccgtgctgcaaagcctgtcccagaccattgagtgtctgcagcagggaggccatgaggaagggctggtgcatgagaaggcccggcagcttcgccgttctatggaaaacattgagctcgggctgagtgaggcccaggtgatgctggctctagccagccacctgagcacagtggagtcggagaaacagaagctgcgggctcaggtgcggcggctatgccaggagaaccagtggctgcgggatgagctggctggcacccagcagcggctacagcgcagtgaacaggctgtggctcagctggaggaggaaaagaagcacctggagttcctggggcagctgcggcagtatgatgaggatggacatacctcggaggagaaagaaggcgatgccaccaaggattccctggatgacctctttcctaatgaggaggaagaggaccccagcaatggcttgtcccgtggtcaaggtgctacagcagctcagcagggtggatatgagatcccagcaaggttgcggacgttgcacaacctggtgatccagtacgcagcccaaggtcgctatgaggtggccgtgccactctgtaagcaggcactagaggacctggagcgcacatcaggccgtggccaccctgatgtcgccaccatgctcaacatccttgctttggtgtatcgtgaccagaataagtataaggaagctgcccacctgctgaatgatgcccttagcatccgggagagcaccttgggacctgaccatcctgctgtggctgccacactcaacaatttggctgtgctctatggcaaaaggggcaagtacaaggaggcagagcctctgtgccagcgggcactggagattcgagaaaaggtcctgggcacgaatcatccagatgtggcaaaacagctgaacaacctggccctcttgtgccaaaaccagggcaagtatgaggccgtggaacgctactaccagcgagcactggccatctacgaggggcagctggggccggacaaccctaatgtagcccggaccaagaacaacctggcttcctgttacctgaaacagggcaaatatgctgaggctgagacactatacaaagagatcctgacccgtgcccatgtacaggagtttgggtctgtggatgatgaccacaagcccatctggatgcatgcagaggagcgggaggaaatgagcaaaagccggcaccatgagggtgggacaccctatgctgagtatggaggctggtacaaggcctgcaaagtgagcagccccacagtgaacactactctgagaaacctgggagctctgtataggcgccagggaaagctggaggctgctgagaccctggaggaatgtgccctgcggtcccggagacagggcactgaccctatcagccagacgaaggtggcagagctgcttggggagagtgatggtagaaggacctcccaggagggccctggagacagtgtgaaattcgagggaggtgaagatgcttctgtggctgtggagtggtccggggatggcagtgggaccctgcagaggagtggctctcttggcaagatccgggatgtgctccgcagaagcagtgaactcttggtgaggaagctccaggggactgagcctcggccctccagcagcaacatgaagcgagcagcctccttgaactatctgaaccaacctagtgcagcacccctccaggtctcccggggcctcagtgccagcaccatggacctctcttcaagcagctgacattcaacccggcccccaggtctgctgggtccccccacccccacagccctcacagcattccccattgctcctggctcttccccacccctaggtgggacagtgaaggggagcagtttaaccagaagattgctgctgcccttagggtctcagctccctcctcaggaatccctcttaggaaggaccctcaggacaccctctctgcaccctgtggtcctctagagtagctagctctgaggccccaaggtgggtacaaagcaggtatggccctcagagatgcagcctgctgctggcttttcagtcagagggttgggggctggccagccaagctgccttgccctggccgctcttactccctccctctgctgtctcacttcaggtccatgtatttcacttttcttaaataaaagaatcaggtaacctttc

SEQ ID NO: 385086 - DNA, 2416 bp, Homo sapiens
gagccactgtgcctggccctgattttactttgagcgagatggaaactattggaatgtttttagaagaggagtgatgtggtctaacttggcatcatcaggttgttgggttacaaatagacaataggggaacaagggcagaaacgaggccagtgaggaagttattgtaataatttgggtaggaattgatagtggcttggtccagggtgacagcagtggaggtagtgggaaattggattcagggtatgttttgaaggtagcaccactgctacacccccaccttctggctcctctgtgcccctgccagtcttgccacgtcccagtaggctccccttccacctgttcctgaatactcccacccagaatctggagctcaggggatgtgcccacctaggtgatgctggctctagccagccacctgagcacagtggagtcggagaaacagaagctgcgggctcaggtgcggcggctatgccaggagaaccagtggctgcgggatgagctggctggcacccagcagcggctacagcgcagtgaacaggctgtggctcagctggaggaggaaaagaagcacctggagttcctggggcagctgcggcagtatgatgaggatggacatacctcggaggagaaagaaggcgatgccaccaaggattccctggatgacctctttcctaatgaggaggaagaggaccccagcaatggcttgtcccgtggtcaaggtgctacagcagctcagcagggtggatatgagatcccagcaaggttgcggacgttgcacaacctggtgatccagtacgcagcccaaggtcgctatgaggtggccgtgccactctgtaagcaggcactagaggacctggagcgcacatcaggccgtggccaccctgatgtcgccaccatgctcaacatccttgctttggtgtatcgtgaccagaataagtataaggaagctgcccacctgctgaatgatgcccttagcatccgggagagcaccttgggacctgaccatcctgctgtggctgccacactcaacaatttggctgtgctctatggcaaaaggggcaagtacaaggaggcagagcctctgtgccagcgggcactggagattcgagaaaaggtcctgggcacgaatcatccagatgtggcaaaacagctgaacaacctggccctcttgtgccaaaaccagggcaagtatgaggccgtggaacgctactaccagcgagcactggccatctacgaggggcagctggggccggacaaccctaatgtagcccggaccaagaacaacctggcttcctgttacctgaaacagggcaaatatgctgaggctgagacactatacaaagagatcctgacccgtgcccatgtacaggagtttgggtctgtggatgatgaccacaagcccatctggatgcatgcagaggagcgggaggaaatgagcaaaagccggcaccatgagggtgggacaccctatgctgagtatggaggctggtacaaggcctgcaaagtgagcagccccacagtgaacactactctgagaaacctgggagctctgtataggcgccagggaaagctggaggctgctgagaccctggaggaatgtgccctgcggtcccggagacagggcactgaccctatcagccagacgaaggtggcagagctgcttggggagagtgatggtagaaggacctcccaggagggccctggagacagtgtgaaattcgagggaggtgaagatgcttctgtggctgtggagtggtccggggatggcagtgggaccctgcagaggagtggctctcttggcaagatccgggatgtgctccgcagaagcagtgaactcttggtgaggaagctccaggggactgagcctcggccctccagcagcaacatgaagcgagcagcctccttgaactatctgaaccaacctagtgcagcacccctccaggtctcccggggcctcagtgccagcaccatggacctctcttcaagcagctgacattcaacccggcccccaggtctgctgggtccccccacccccacagccctcacagcattccccattgctcctggctcttccccacccctaggtgggacagtgaaggggagcagtttaaccagaagattgctgctgcccttagggtctcagctccctcctcaggaatccctcttaggaaggaccctcaggacaccctctctgcaccctgtggtcctctagagtagctagctctgaggccccaaggtgggtacaaagcaggtatggccctcagagatgcagcctgctgctggcttttcagtcagagggttgggggctggccagccaagctgccttgccctggccgctcttactccctccctctgctgtctcacttcaggtccatgtatttcacttttcttaaataaaagaatcaggtaacctttc

SEQ ID NO: 385087 - DNA, 2020 bp, Homo sapiens
atgagaaggaggggaagtcttgagattttgtccaaagcatctctggctgttacaaacaagaggcctgagcttggctgggccacttgctagcctttccaggggcagagacaggaacaacagtcttctcctaggtcccatctgtctgtgatttcatggcttagaggggtcactgagaaggctactaggtagggatatcttggcccttatatgttgcttcttcccttccgaggagaaagaaggcgatgccaccaaggattccctggatgacctctttcctaatgaggaggaagaggaccccagcaatggcttgtcccgtggtcaaggtgctacagcagctcagcagggtggatatgagatcccagcaaggttgcggacgttgcacaacctggtgatccagtacgcagcccaaggtcgctatgaggtggccgtgccactctgtaagcaggcactagaggacctggagcgcacatcaggccgtggccaccctgatgtcgccaccatgctcaacatccttgctttggtgtatcgtgaccagaataagtataaggaagctgcccacctgctgaatgatgcccttagcatccgggagagcaccttgggacctgaccatcctgctgtggctgccacactcaacaatttggctgtgctctatggcaaaaggggcaagtacaaggaggcagagcctctgtgccagcgggcactggagattcgagaaaaggtcctgggcacgaatcatccagatgtggcaaaacagctgaacaacctggccctcttgtgccaaaaccagggcaagtatgaggccgtggaacgctactaccagcgagcactggccatctacgaggggcagctggggccggacaaccctaatgtagcccggaccaagaacaacctggcttcctgttacctgaaacagggcaaatatgctgaggctgagacactatacaaagagatcctgacccgtgcccatgtacaggagtttgggtctgtggatgatgaccacaagcccatctggatgcatgcagaggagcgggaggaaatgagcaaaagccggcaccatgagggtgggacaccctatgctgagtatggaggctggtacaaggcctgcaaagtgagcagccccacagtgaacactactctgagaaacctgggagctctgtataggcgccagggaaagctggaggctgctgagaccctggaggaatgtgccctgcggtcccggagacagggcactgaccctatcagccagacgaaggtggcagagctgcttggggagagtgatggtagaaggacctcccaggagggccctggagacagtgtgaaattcgagggaggtgaagatgcttctgtggctgtggagtggtccggggatggcagtgggaccctgcagaggagtggctctcttggcaagatccgggatgtgctccgcagaagcagtgaactcttggtgaggaagctccaggggactgagcctcggccctccagcagcaacatgaagcgagcagcctccttgaactatctgaaccaacctagtgcagcacccctccaggtctcccggggcctcagtgccagcaccatggacctctcttcaagcagctgacattcaacccggcccccaggtctgctgggtccccccacccccacagccctcacagcattccccattgctcctggctcttccccacccctaggtgggacagtgaaggggagcagtttaaccagaagattgctgctgcccttagggtctcagctccctcctcaggaatccctcttaggaaggaccctcaggacaccctctctgcaccctgtggtcctctagagtagctagctctgaggccccaaggtgggtacaaagcaggtatggccctcagagatgcagcctgctgctggcttttcagtcagagggttgggggctggccagccaagctgccttgccctggccgctcttactccctccctctgctgtctcacttcaggtccatgtatttcacttttcttaaataaaagaatcaggtaacctttc

SEQ ID NO: 385088 - DNA, 2012 bp, Homo sapiens
gcacgagccggcaagagcggcagccacaccggcagattgcagaccgggcaaggtcccccaggccaggatgtcaggcctggtgttggggcagcgggatgagcctgcaggccaccggctcagccaagaggagatcctggggagcacacggctggtcagccaagggctagaggccctacgcagtgaacaccaggccgtgctgcaaagcctgtcccagaccattgagtgtctgcagcagggaggccatgaggaagggctggtgcatgagaaggcccggcagcttcgccgttctatggaaaacattgagctcgggctgagtgaggcccaggtgatgctggctctagccagccacctgagcacagtggagtcggagaaacagaagctgcgggctcaggtgcggcggctatgccaggagaaccagtggctgcgggatgagctggctggcacccagcagcggctacagcgcagtgaacaggctgtggctcagctggaggaggaaaagaagcacctggagttcctggggcagctgcggcagtatgatgaggatggacatacctcggaggagaaagaaggcgatgccaccaaggattccctggatgacctctttcctaatgaggaggaagaggaccccagcaatggcttgtcccgtggtcaaggtgctacagcagctcagcagggtggatatgagatcccagcaaggttgcggacgttgcacaacctggtgatccagtacgcagcccaaggtcgctatgaggtggccgtgccactctgtaagcaggcactagaggacctggagcgcacatcaggccgtggccaccctgatgtcgccaccatgctcaacatccttgctttggtgtatcgtgaccagaataagtataaggaagctgcccacctgctgaatgatgcccttagcatccgggagagcaccttgggacctgaccatcctgctgtggctgccacactcaacaatttggctgtgctctatggcaaaaggggcaagtacaaggaggcagagcctctgtgccagcgggcactggagattcgagaaaaggtcctgggcacgaatcatccagatgtggcaaaacagctgaacaacctggccctcttgtgccaaaaccagggcaagtatgaggccgtggaacgctactaccagcgagcactggccatctacgaggggcagctggggccggacaaccctaatgtagcccggaccaagaacaacctggcttcctgttacctgaaacagggcaaatatgctgaggctgagacactatacaaagagatcctgacccgtgcccatgtacaggagtttgggtctgtggatgatgaccacaagcccatctggatgcatgcagaggagcgggaggaaatgagcaaaagccggcaccatgagggtgggacaccctatgctgagtatggaggctggtacaaggcctgcaaagtgagcagccccacagtgaacactactctgagaaacctgggagctctgtataggcgccagggaaagctggaggctgctgagaccctggaggaatgtgccctgcggtcccggagacagggcactgaccctatcagccagacgaagcagctgacattcaacccggcccccaggtctgctgggtccccccacccccacagccctcacagcattccccattgctcctggctcttccccacccctaggtgggacagtgaaggggagcagtttaaccagaagattgctgctgcccttagggtctcagctccctcctcaggaatccctcttaggaaggaccctcaggacaccctctctgcaccctgtggtcctctagagtagctagctctgaggccccaaggtgggtacaaagcaggtatggccctcagagatgcagcctgctgctggcttttcagtcagagggttgggggctggccagccaagctgccttgccctggccgctcttactccctccctctgctgtctcacttcaggtccatgtatttcacttttcttaaataaaagaatcaggtaacctttc

SEQ ID NO: 385089 - DNA, 2428 bp, Homo sapiens
gcacgagccggcaagagcggcagccacaccggcagattgcagaccgggcaaggtcccccaggccaggatgtcaggcctggtgttggggcagcgggatgagcctgcaggccaccggctcagccaagaggagatcctggggagcacacggctggtcagccaagggctagaggccctacgcagtgaacaccaggccgtgctgcaaagcctgtcccagaccattgagtgtctgcagcagggaggccatgaggaagggctggtgcatgagaaggcccggcagcttcgccgttctatggaaaacattgagctcgggctgagtgaggcccaggtgatgctggctctagccagccacctgagcacagtggagtcggagaaacagaagctgcgggctcaggtgcggcggctatgccaggagaaccagtggctgcgggatgagctggctggcacccagcagcggctacagcgcagtgaacaggctgtggctcagctggaggaggaaaagaagcacctggagttcctggggcagctgcggcagtatgatgaggatggacatacctcggaggagaaagaaggcgatgccaccaaggattccctggatgacctctttcctaatgaggaggaagaggaccccagcaatggcttgtcccgtggtcaaggtgctacagcagctcagcagggtggatatgagatcccagcaaggttgcggacgttgcacaacctggtgatccagtacgcagcccaaggtcgctatgaggtggccgtgccactctgtaagcaggcactagaggacctggagcgcacatcaggccgtggccaccctgatgtcgccaccatgctcaacatccttgctttggtgtatcgtgaccagaataagtataaggaagctgcccacctgctgaatgatgcccttagcatccgggagagcaccttgggacctgaccatcctgctgtggctgccacactcaacaatttggctgtgctctatggcaaaaggggcaagtacaaggaggcagagcctctgtgccagcgggcactggagattcgagaaaaggtcctgggcacgaatcatccagatgtggcaaaacagctgaacaacctggccctcttgtgccaaaaccagggcaagtatgaggccgtggaacgctactaccagcgagcactggccatctacgaggggcagctggggccggacaaccctaatgtagcccggaccaagaacaacctggcttcctgttacctgaaacagggcaaatatgctgaggctgagacactatacaaagagatcctgacccgtgcccatgtacaggagtttgggtctgtggatgatgaccacaagcccatctggatgcatgcagaggagcgggaggaaatgagcaaaagccggcaccatgagggtgggacaccctatgctgagtatggaggctggtacaaggcctgcaaagtgagcagccccacagtgaacactactctgagaaacctgggagctctgtataggcgccagggaaagctggaggctgctgagaccctggaggaatgtgccctgcggtcccggagacagggcactgaccctatcagccagacgaaggtggcagagctgcttggggagagtgatggtagaaggacctcccaggagggccctggagacagtgtgaaattcgagggaggtgaagatgcttctgtggctgtggagtggtccggggatggcagtgggaccctgcagaggagtggctctcttggcaagatccgggatgtgctccgcagaagcagtgaactcttggtgaggaagctccaggggactgagcctcggccctccagcagcaacatgaagcgagcagcctccttgaactatctgaaccaacctagtgcagcacccctccaggtctcccggggcctcagtgccagcaccatggacctctcttcaagcagctgacattcaacccggcccccaggtctgctgggtccccccacccccacagccctcacagcattccccattgctcctggctcttccccacccctaggtgggacagtgaaggggagcagtttaaccagaagattgctgctgcccttagggtctcagctccctcctcaggaatccctcttaggaaggaccctcaggacaccctctctgcaccctgtggtcctctagagtagctagctctgaggccccaaggtgggtacaaagcaggtatggccctcagagatgcagcctgctgctggcttttcagtcagagggttgggggctggccagccaagctgccttgccctggccgctcttactccctccctctgctgtctcacttcaggtccatgtatttcacttttcttaaataaaagaatcaggtaacctttctgtgacttgagtcctgattgaagagggtatgaagcagggcttgtgttggggcccttcacagaaggtgaggggcagtga

SEQ ID NO: 385090 - DNA, 1906 bp, Homo sapiens
gcacgagccggcaagagcggcagccacaccggcagattgcagaccgggcaaggtcccccaggccaggatgtcaggcctggtgttggggcagcgggatgagcctgcaggccaccggctcagccaagaggagatcctggggagcacacggctggtcagccaagggctagaggccctacgcagtgaacaccaggccgtgctgcaaagcctgtcccagaccattgagtgtctgcagcagggaggccatgaggaagggctggtgcatgagaaggcccggcagcttcgccgttctatggaaaacattgagctcgggctgagtgaggcccaggtgatgctggctctagccagccacctgagcacagtggagtcggagaaacagaagctgcgggctcaggtgcggcggctatgccaggagaaccagtggctgcgggatgagctggctggcacccagcagcggctacagcgcagtgaacaggctgtggctcagctggaggaggaaaagaagcacctggagttcctggggcagctgcggcagtatgatgaggatggacatacctcggaggagaaagaaggcgatgccaccaaggattccctggatgacctctttcctaatgaggaggaagaggaccccagcaatggcttgtcccgtggtcaaggtgctacagcagctcagcagggtggatatgagatcccagcaaggttgcggacgttgcacaacctggtgatccagtacgcagcccaaggtcgctatgaggtggccgtgccactctgtaagcaggcactagaggacctggagcgcacatcaggccgtggccaccctgatgtcgccaccatgctcaacatccttgctttggtgtatcgtgaccagaataagtataaggaagctgcccacctgctgaatgatgcccttagcatccgggagagcaccttgggacctgaccatcctgctgtggctgccacactcaacaatttggctgtgctctatggcaaaaggggcaagtacaaggaggcagagcctctgtgccagcgggcactggagattcgagaaaaggtcctgggcacgaatcatccagatgtggcaaaacagctgaacaacctggccctcttgtgccaaaaccagggcaagtatgaggccgtggaacgctactaccagcgagcactggccatctacgaggggcagctggggccggacaaccctaatgtagcccggaccaagaacaacctggcttcctgttacctgaaacagggcaaatatgctgaggctgagacactatacaaagagatcctgacccgtgcccatgtacaggagtttgggtctgtggatgatgaccacaagcccatctggatgcatgcagaggagcgggaggaaatgagcaaaagccggcaccatgagggtgggacaccctatgctgagtatggaggctggtacaaggcctgcaaagtgagcagccccacagtgaacactactctgagaaacctgggagctctgtataggcgccagggaaagctgctgggtccccccacccccacagccctcacagcattccccattgctcctggctcttccccacccctaggtgggacagtgaaggggagcagtttaaccagaagattgctgctgcccttagggtctcagctccctcctcaggaatccctcttaggaaggaccctcaggacaccctctctgcaccctgtggtcctctagagtagctagctctgaggccccaaggtgggtacaaagcaggtatggccctcagagatgcagcctgctgctggcttttcagtcagagggttgggggctggccagccaagctgccttgccctggccgctcttactccctccctctgctgtctcacttcaggtccatgtatttcacttttcttaaataaaagaatcaggtaacctttc

SEQ ID NO: 385091 - DNA, 2024 bp, Homo sapiens
gcacgagccggcaagagcggcagccacaccggcagattgcagaccgggcaaggtcccccaggccaggatgtcaggcctggtgttggggcagcgggatgagcctgcaggccaccggctcagccaagaggagatcctggggagcacacggctggtcagccaagggctagaggccctacgcagtgaacaccaggccgtgctgcaaagcctgtcccagaccattgagtgtctgcagcagggaggccatgaggaagggctggtgcatgagaaggcccggcagcttcgccgttctatggaaaacattgagctcgggctgagtgaggcccaggtgatgctggctctagccagccacctgagcacagtggagtcggagaaacagaagctgcgggctcaggtgcggcggctatgccaggagaaccagtggctgcgggatgagctggctggcacccagcagcggctacagcgcagtgaacaggctgtggctcagctggaggaggaaaagaagcacctggagttcctggggcagctgcggcagtatgatgaggatggacatacctcggaggagaaagaaggcgatgccaccaaggattccctggatgacctctttcctaatgaggaggaagaggaccccagcaatggcttgtcccgtggtcaaggtgctacagcagctcagcagggtggatatgagatcccagcaaggttgcggacgttgcacaacctggtgatccagtacgcagcccaaggtcgctatgaggtggccgtgccactctgtaagcaggcactagaggacctggagcgcacatcaggccgtggccaccctgatgtcgccaccatgctcaacatccttgctttggtgtatcgtgaccagaataagtataaggaagctgcccacctgctgaatgatgcccttagcatccgggagagcaccttgggacctgaccatcctgctgtggctgccacactcaacaatttggctgtgctctatggcaaaaggggcaagtacaaggaggcagagcctctgtgccagcgggcactggagattcgagaaaaggtcctgggcacgaatcatccagatgtggcaaaacagctgaacaacctggccctcttgtgccaaaaccagggcaagtatgaggccgtggaacgctactaccagcgagcactggccatctacgaggggcagctggggccggacaaccctaatgtagcccggaccaagaacaacctggcttcctgttacctgaaacagggcaaatatgctgaggctgagacactatacaaagagatcctgacccgtgcccatgtacaggagtttgggtctgtggatgatgaccacaagcccatctggatgcatgcagaggagcgggaggaaatgagcaaaagccggcaccatgagggtgggacaccctatgctgagtatggaggctggtacaaggcctgcaaagtgagcagccccacagtgaacactactctgagaaacctgggagctctgtataggcgccagggaaagctggaggctgctgagaccctggaggaatgtgccctgcggtcccggagacagggcactgaccctatcagccagacgaaggtggcagagctgcttggggagagtgatggtagaaggacctcccaggagggccctggagacagtgtgaaattcgagggaggtgaagatgcttctgtggctgtggagtggtccggggatggcagtgggaccctgcagaggagtggctctcttggcaagatccgggatgtgctccgcagaagcagaatccctcttaggaaggaccctcaggacaccctctctgcaccctgtggtcctctagagtagctagctctgaggccccaaggtgggtacaaagcaggtatggccctcagagatgcagcctgctgctggcttttcagtcagagggttgggggctggccagccaagctgccttgccctggccgctcttactccctccctctgctgtctcacttcaggtccatgtatttcacttttcttaaataaaagaatcaggtaacctttc

SEQ ID NO: 385092 - DNA, 850 bp, Homo sapiens
cagtccgttcgactgagctgatagggtcagtgccagcaccatggacctctcttcaggcactgaccctatcagccagacgaaggtggcagagctgcttggggagagtgatggtagaaggacctcccaggagggccctggagacagtgtgaaattcgagggaggtgaagatgcttctgtggctgtggagtggtccggggatggcagtgggaccctgcagaggagtggctctcttggcaagatccgggatgtgctccgcagaagcagtgaactcttggtgaggaagctccaggggactgagcctcggccctccagcagcaacatgaagcgagcagcctccttgaactatctgaaccaacctagtgcagcacccctccaggtctcccggggcctcagtgccagcaccatggacctctcttcaagcagctgacattcaacccggcccccaggtctgctgggtccccccacccccacagccctcacagcattccccattgctcctggctcttccccacccctaggtgggacagtgaaggggagcagtttaaccagaagattgctgctgcccttagggtctcagctccctcctcaggaatccctcttaggaaggaccctcaggacaccctctctgcaccctgtggtcctctagagtagctagctctgaggccccaaggtgggtacaaagcaggtatggccctcagagatgcagcctgctgctggcttttcagtcagagggttgggggctggccagccaagctgccttgccctggccgctcttactccctccctctgctgtctcacttcaggtccatgtatttcacttttcttaaataaaagaatcaggtaacctttc

SEQ ID NO: 385093 - DNA, 769 bp, Homo sapiens
cttttctgagaaaacactagtgatattttaatggcaaatgacttcttgtatcaacacacaagtatatgccagtattcatgtggttcttccaggtagcttctccaccagattgtggccttctggaaaaccctagcagaggctaaacaaagtcccaggtccagagatagactggtccagagacagatgtgatcctaggtccagagatacactgtgaccatgggatggatggactctaggagccagtctttgggaggccgaggtccctgagctgatggggtagtgttgtctgtttcaggtctcccggggcctcagtgccagcaccatggacctctcttcaagcagctgacattcaacccggcccccaggtctgctgggtccccccacccccacagccctcacagcattccccattgctcctggctcttccccacccctaggtgggacagtgaaggggagcagtttaaccagaagattgctgctgcccttagggtctcagctccctcctcaggaatccctcttaggaaggaccctcaggacaccctctctgcaccctgtggtcctctagagtagctagctctgaggccccaaggtgggtacaaagcaggtatggccctcagagatgcagcctgctgctggcttttcagtcagagggttgggggctggccagccaagctgccttgccctggccgctcttactccctccctctgctgtctcacttcaggtccatgtatttcacttttcttaaataaaagaatcaggtaacctttc

SEQ ID NO: 385094 - DNA, 756 bp, Homo sapiens
caggcaagtaaagtaagcccttgcctccaactcctcttggctcctgatctctggagaagtatctcggagagaaacagggaggaagtcaacgggccagccatggagagagagtttgggtagaatgggtgccccagtgtggcagtgctcaagaggcccacagccttaaggccactcaggaggaagagaggaggcctcaattcttccgttttccattgtagcagcaacatgaagcgagcagcctccttgaactatctgaaccaacctagtgcagcacccctccaggtctcccggggcctcagtgccagcaccatggacctctcttcaagcagctgacattcaacccggcccccaggtctgctgggtccccccacccccacagccctcacagcattccccattgctcctggctcttccccacccctaggtgggacagtgaaggggagcagtttaaccagaagattgctgctgcccttagggtctcagctccctcctcaggaatccctcttaggaaggaccctcaggacaccctctctgcaccctgtggtcctctagagtagctagctctgaggccccaaggtgggtacaaagcaggtatggccctcagagatgcagcctgctgctggcttttcagtcagagggttgggggctggccagccaagctgccttgccctggccgctcttactccctccctctgctgtctcacttcaggtccatgtatttcacttttcttaaataaaagaatcaggtaacctttc

SEQ ID NO: 385095 - DNA, 322 bp, Homo sapiens
acaatttggctgtgctctatggcaaaaggggcaagtacaaggaggcagagcctctgtgccagcgggcactggagattcgagaaaaggtacccatgccctctctcccttcttctcttgtcgctgtgacccttctctacatggctcctctggtctaaccctcctccttcactttttttttctcacccccatctctgctttgttctctcttccttcattccctttcctctgctttccacatgtgtgtgcctacatgcaaacacacgtgtgcttgtgcacacacatgttatcatagccatttatccactcctttgttccctttcag

SEQ ID NO: 385096 - DNA, 367 bp, Homo sapiens
gctcaaggctaccggggtctctgtcttactccttgcattagcccaactctcacttcccatcccagcaccagccccagatgcatggtgtcctccccagcccagcctgcaccctagccccatgccaccttgcatctcagcatctctgtattcttatatttggctctccctgcccttctttctggcctctctctgtcctgcagagccggcaccatgagggtgggacaccctatgctgagtatggaggctggtacaaggcctgcaaagtgagcaggtgagctgacagtgaaaagccagcttggcctccgatgccctccatccagtccctgctcccagcctcccagaccttttcccttcctcccgtagactt

SEQ ID NO: 385097 - DNA, 2350 bp, Homo sapiens
gcacgagccggcaagagcggcagccacaccggcagattgcagaccgggcaaggtcccccaggccaggatgtcaggcctggtgttggggcagcgggatgagcctgcaggccaccggctcagccaagaggagatcctggggagcacacggctggtcagccaagggctagaggccctacgcagtgaacaccaggccgtgctgcaaagcctgtcccagaccattgagtgtctgcagcagggaggccatgaggaagggctggtgcatgagaaggcccggcagcttcgccgttctatggaaaacattgagctcgggctgagtgaggcccaggtgatgctggctctagccagccacctgagcacagtggagtcggagaaacagaagctgcgggctcaggtgcggcggctatgccaggagaaccagtggctgcgggatgagctggctggcacccagcagcggctacagcgcagtgaacaggctgtggctcagctggaggaggaaaagaagcacctggagttcctggggcagctgcggcagtatgatgaggatggacatacctcggaggagaaagaaggcgatgccaccaaggattccctggatgacctctttcctaatgaggaggaagaggaccccagcaatggcttgtcccgtggtcaaggtgctacagcagctcagcagggtggatatgagatcccagcaaggttgcggacgttgcacaacctggtgatccagtacgcagcccaaggtcgctatgaggtggccgtgccactctgtaagcaggcactagaggacctggagcgcacatcaggccgtggccaccctgatgtcgccaccatgctcaacatccttgctttggtgtatcgtgaccagaataagtataaggaagctgcccacctgctgaatgatgcccttagcatccgggagagcaccttgggacctgaccatcctgctgtggctgccacactcaacaatttggctgtgctctatggcaaaaggggcaagtacaaggaggcagagcctctgtgccagcgggcactggagattcgagaaaaggtcctgggcacgaatcatccagatgtggcaaaacagctgaacaacctggccctcttgtgccaaaaccagggcaagtatgaggccgtggaacgctactaccagcgagcactggccatctacgaggggcagctggggccggacaaccctaatgtagcccggaccaagaacaacctggcttcctgttacctgaaacagggcaaatatgctgaggctgagacactatacaaagagatcctgacccgtgcccatgtacaggagtttgggtctgtggatgatgaccacaagcccatctggatgcatgcagaggagcgggaggaaatgagcaaaagccggcaccatgagggtgggacaccctatgctgagtatggaggctggtacaaggcctgcaaagtgagcagccccacagtgaacactactctgagaaacctgggagctctgtataggcgccagggaaagctggaggctgctgagaccctggaggaatgtgccctgcggtcccggagacagggcactgaccctatcagccagacgaaggtggcagagctgcttggggagagtgatggtagaaggacctcccaggagggccctggagacagtgtgaaattcgagggaggtgaagatgcttctgtggctgtggagtggtccggggatggcagtgggaccctgcagaggagtggctctcttggcaagatccgggatgtgctccgcagaagcagtgaactcttggtgaggaagctccaggggactgagcctcggccctccagcagcaacatgaagcgagcagcctccttgaactatctgaaccaacctagtgcagcacccctccaggtctcccggggcctcagtgccagcaccatggacctctcttcaagcagctgacattcaacccggcccccaggtctgctgggtccccccacccccacagccctcacagcattccccattgctcctggctcttccccacccctaggtgggacagtgaaggggagcagtttaaccagaagattgctgctgcccttagggtctcagctccctcctcaggaatccctcttaggaaggaccctcaggacaccctctctgcaccctgtggtcctctagagtagctagctctgaggccccaaggtgggtacaaagcaggtatggccctcagagatgcagcctgctgctggcttttcagtcagagggttgggggctggccagccaagctgccttgccctggccgctcttactccctccctctgctgtctcacttcaggtccatgtatttcacttttcttaaataaaagaatcaggtaacctttc

SEQ ID NO: 385098 - DNA, 2477 bp, Homo sapiens
acatgccctggtgcagaacagagaagcgaaacctagaaataatcaaggcttgttccagaccttcagagttctcgcagcctgcctgtcttgtgtgtgtgtagattcagatatagacaagatatcatctgtaggtagagatgtaaatatagacatagctcagctattactcgggaggccgtggcatgagaatcgcttgaacccaggaggcagaggttacagtgagccaggattgcagaccgggcaaggtcccccaggccaggatgtcaggcctggtgttggggcagcgggatgagcctgcaggccaccggctcagccaagaggagatcctggggagcacacggctggtcagccaagggctagaggccctacgcagtgaacaccaggccgtgctgcaaagcctgtcccagaccattgagtgtctgcagcagggaggccatgaggaagggctggtgcatgagaaggcccggcagcttcgccgttctatggaaaacattgagctcgggctgagtgaggcccaggtgcggcggctatgccaggagaaccagtggctgcgggatgagctggctggcacccagcagcggctacagcgcagtgaacaggctgtggctcagctggaggaggaaaagaagcacctggagttcctggggcagctgcggcagtatgatgaggatggacatacctcggaggagaaagaaggcgatgccaccaaggattccctggatgacctctttcctaatgaggaggaagaggaccccagcaatggcttgtcccgtggtcaaggtgctacagcagctcagcagggtggatatgagatcccagcaaggttgcggacgttgcacaacctggtgatccagtacgcagcccaaggtcgctatgaggtggccgtgccactctgtaagcaggcactagaggacctggagcgcacatcaggccgtggccaccctgatgtcgccaccatgctcaacatccttgctttggtgtatcgtgaccagaataagtataaggaagctgcccacctgctgaatgatgcccttagcatccgggagagcaccttgggacctgaccatcctgctgtggctgccacactcaacaatttggctgtgctctatggcaaaaggggcaagtacaaggaggcagagcctctgtgccagcgggcactggagattcgagaaaaggtcctgggcacgaatcatccagatgtggcaaaacagctgaacaacctggccctcttgtgccaaaaccagggcaagtatgaggccgtggaacgctactaccagcgagcactggccatctacgaggggcagctggggccggacaaccctaatgtagcccggaccaagaacaacctggcttcctgttacctgaaacagggcaaatatgctgaggctgagacactatacaaagagatcctgacccgtgcccatgtacaggagtttgggtctgtggatgatgaccacaagcccatctggatgcatgcagaggagcgggaggaaatgagcaaaagccggcaccatgagggtgggacaccctatgctgagtatggaggctggtacaaggcctgcaaagtgagcagccccacagtgaacactactctgagaaacctgggagctctgtataggcgccagggaaagctggaggctgctgagaccctggaggaatgtgccctgcggtcccggagacagggcactgaccctatcagccagacgaaggtggcagagctgcttggggagagtgatggtagaaggacctcccaggagggccctggagacagtgtgaaattcgagggaggtgaagatgcttctgtggctgtggagtggtccggggatggcagtgggaccctgcagaggagtggctctcttggcaagatccgggatgtgctccgcagaagcagtgaactcttggtgaggaagctccaggggactgagcctcggccctccagcagcaacatgaagcgagcagcctccttgaactatctgaaccaacctagtgcagcacccctccaggtctcccggggcctcagtgccagcaccatggacctctcttcaagcagctgacattcaacccggcccccaggtctgctgggtccccccacccccacagccctcacagcattccccattgctcctggctcttccccacccctaggtgggacagtgaaggggagcagtttaaccagaagattgctgctgcccttagggtctcagctccctcctcaggaatccctcttaggaaggaccctcaggacaccctctctgcaccctgtggtcctctagagtagctagctctgaggccccaaggtgggtacaaagcaggtatggccctcagagatgcagcctgctgctggcttttcagtcagagggttgggggctggccagccaagctgccttgccctggccgctcttactccctccctctgctgtctcacttcaggtccatgtatttcacttttcttaaataaaagaatcaggtaacctttc

SEQ ID NO: 385099 - DNA, 2289 bp, Homo sapiens
gcacgagccggcaagagcggcagccacaccggcagattgcagaccgggcaaggtcccccaggccaggatgtcaggcctggtgttggggcagcgggatgagcctgcaggccaccggctcagccaagaggagatcctggggagcacacggctggtcagccaagggctagaggccctacgcagtgaacaccaggccgtgctgcaaagcctgtcccagaccattgagtgtctgcagcagggaggccatgaggaagggctggtgcatgagaaggcccggcagcttcgccgttctatggaaaacattgagctcgggctgagtgaggcccaggtgatgctggctctagccagccacctgagcacagtggagtcggagaaacagaagctgcgggctcaggtgcggcggctatgccaggagaaccagtggctgcgggatgagctggctggcacccagcagcggctacagcgcagtgaacaggctgtggctcagctggaggaggagaggagaaagaaggcgatgccaccaaggattccctggatgacctctttcctaatgaggaggaagaggaccccagcaatggcttgtcccgtggtcaaggtgctacagcagctcagcagggtggatatgagatcccagcaaggttgcggacgttgcacaacctggtgatccagtacgcagcccaaggtcgctatgaggtggccgtgccactctgtaagcaggcactagaggacctggagcgcacatcaggccgtggccaccctgatgtcgccaccatgctcaacatccttgctttggtgtatcgtgaccagaataagtataaggaagctgcccacctgctgaatgatgcccttagcatccgggagagcaccttgggacctgaccatcctgctgtggctgccacactcaacaatttggctgtgctctatggcaaaaggggcaagtacaaggaggcagagcctctgtgccagcgggcactggagattcgagaaaaggtcctgggcacgaatcatccagatgtggcaaaacagctgaacaacctggccctcttgtgccaaaaccagggcaagtatgaggccgtggaacgctactaccagcgagcactggccatctacgaggggcagctggggccggacaaccctaatgtagcccggaccaagaacaacctggcttcctgttacctgaaacagggcaaatatgctgaggctgagacactatacaaagagatcctgacccgtgcccatgtacaggagtttgggtctgtggatgatgaccacaagcccatctggatgcatgcagaggagcgggaggaaatgagcaaaagccggcaccatgagggtgggacaccctatgctgagtatggaggctggtacaaggcctgcaaagtgagcagccccacagtgaacactactctgagaaacctgggagctctgtataggcgccagggaaagctggaggctgctgagaccctggaggaatgtgccctgcggtcccggagacagggcactgaccctatcagccagacgaaggtggcagagctgcttggggagagtgatggtagaaggacctcccaggagggccctggagacagtgtgaaattcgagggaggtgaagatgcttctgtggctgtggagtggtccggggatggcagtgggaccctgcagaggagtggctctcttggcaagatccgggatgtgctccgcagaagcagtgaactcttggtgaggaagctccaggggactgagcctcggccctccagcagcaacatgaagcgagcagcctccttgaactatctgaaccaacctagtgcagcacccctccaggtctcccggggcctcagtgccagcaccatggacctctcttcaagcagctgacattcaacccggcccccaggtctgctgggtccccccacccccacagccctcacagcattccccattgctcctggctcttccccacccctaggtgggacagtgaaggggagcagtttaaccagaagattgctgctgcccttagggtctcagctccctcctcaggaatccctcttaggaaggaccctcaggacaccctctctgcaccctgtggtcctctagagtagctagctctgaggccccaaggtgggtacaaagcaggtatggccctcagagatgcagcctgctgctggcttttcagtcagagggttgggggctggccagccaagctgccttgccctggccgctcttactccctccctctgctgtctcacttcaggtccatgtatttcacttttcttaaataaaagaatcaggtaacctttc

SEQ ID NO: 385100 - DNA, 2048 bp, Homo sapiens
acatgccctggtgcagaacagagaagcgaaacctagaaataatcaaggcttgttccagaccttcagagttctcgcagcctgcctgtcttgtgtgtgtgtagattcagatatagacaagatatcatctgtaggtagagatgtaaatatagacatagctcagctattactcgggaggccgtggcatgagaatcgcttgaacccaggaggcagaggttacagtgagccaggattgcagaccgggcaaggtcccccaggccaggatgtcaggcctggtgttggggcagcgggatgagcctgcaggccaccggctcagccaagaggagatcctggggagcacacggctggtcagccaagggctagaggccctacgcagtgaacaccaggccgtgctgcaaagcctgtcccagaccattgagtgtctgcagcagggagcccaaggtcgctatgaggtggccgtgccactctgtaagcaggcactagaggacctggagcgcacatcaggccgtggccaccctgatgtcgccaccatgctcaacatccttgctttggtgtatcgtgaccagaataagtataaggaagctgcccacctgctgaatgatgcccttagcatccgggagagcaccttgggacctgaccatcctgctgtggctgccacactcaacaatttggctgtgctctatggcaaaaggggcaagtacaaggaggcagagcctctgtgccagcgggcactggagattcgagaaaaggtcctgggcacgaatcatccagatgtggcaaaacagctgaacaacctggccctcttgtgccaaaaccagggcaagtatgaggccgtggaacgctactaccagcgagcactggccatctacgaggggcagctggggccggacaaccctaatgtagcccggaccaagaacaacctggcttcctgttacctgaaacagggcaaatatgctgaggctgagacactatacaaagagatcctgacccgtgcccatgtacaggagtttgggtctgtggatgatgaccacaagcccatctggatgcatgcagaggagcgggaggaaatgagcaaaagccggcaccatgagggtgggacaccctatgctgagtatggaggctggtacaaggcctgcaaagtgagcagccccacagtgaacactactctgagaaacctgggagctctgtataggcgccagggaaagctggaggctgctgagaccctggaggaatgtgccctgcggtcccggagacagggcactgaccctatcagccagacgaaggtggcagagctgcttggggagagtgatggtagaaggacctcccaggagggccctggagacagtgtgaaattcgagggaggtgaagatgcttctgtggctgtggagtggtccggggatggcagtgggaccctgcagaggagtggctctcttggcaagatccgggatgtgctccgcagaagcagtgaactcttggtgaggaagctccaggggactgagcctcggccctccagcagcaacatgaagcgagcagcctccttgaactatctgaaccaacctagtgcagcacccctccaggtctcccggggcctcagtgccagcaccatggacctctcttcaagcagctgacattcaacccggcccccaggtctgctgggtccccccacccccacagccctcacagcattccccattgctcctggctcttccccacccctaggtgggacagtgaaggggagcagtttaaccagaagattgctgctgcccttagggtctcagctccctcctcaggaatccctcttaggaaggaccctcaggacaccctctctgcaccctgtggtcctctagagtagctagctctgaggccccaaggtgggtacaaagcaggtatggccctcagagatgcagcctgctgctggcttttcagtcagagggttgggggctggccagccaagctgccttgccctggccgctcttactccctccctctgctgtctcacttcaggtccatgtatttcacttttcttaaataaaagaatcaggtaacctttc

SEQ ID NO: 385101 - DNA, 2297 bp, Homo sapiens
gcacgagccggcaagagcggcagccacaccggcagattgcagaccgggcaaggtcccccaggccaggatgtcaggcctggtgttggggcagcgggatgagcctgcaggccaccggctcagccaagaggagatcctggggagcacacggctggtcagccaagggctagaggccctacgcagtgaacaccaggccgtgctgcaaagcctgtcccagaccattgagtgtctgcagcagggaggccatgaggaagggctggtgcatgagaaggcccggcagcttcgccgttctatggaaaacattgagctcgggctgagtgaggcccaggtgatgctggctctagccagccacctgagcacagtggagtcggagaaacagaagctgcgggctcaggtgcggcggctatgccaggagaaccagtggctgcgggatgagctggctggcacccagcagcggctacagcgcagtgaacaggctgtggctcagctggaggaggaaaagaagcacctggagttcctggggcagctgcggcagtatgatgaggatggacatacctcggaggagaaagaaggcgatgccaccaaggattccctggatgacctctttcctaatgaggaggaagaggaccccagcaatggcttgtcccgtggtcaaggtgctacagcagctcagcagggtggatatgagatcccagcaaggttgcggacgttgcacaacctggtgatccagtacgcagcccaaggtcgctatgaggtggccgtgccactctgtaagcaggcactagaggacctggagcgcacatcaggccgtggccaccctgatgtcgccaccatgctcaacatccttgctttggtgtatcgtgaccagaataagtataaggaagctgcccacctgctgaatgatgcccttagcatccgggagagcaccttgggacctgaccatcctgctgtggctgccacactcaacaatttggctgtgctctatggcaaaaggggcaagtacaaggaggcagagcctctgtgccagcgggcactggagattcgagaaaaggtcctgggcacgaatcatccagatgtggcaaaacagctgaacaacctggccctcttgtgccaaaaccagggcaagtatgaggccgtggaacgctactaccagcgagcactggccatctacgaggggcagctggggccggacaaccctaatgtagcccggaccaagaacaacctggcttcctgttacctgaaacagggcaaatatgctgaggctgagacactatacaaagagatcctgacccgtgcccatgtacaggagtttgggtctgtggatgatgaccacaagcccatctggatgcatgcagaggagcgggaggaaatgagcaaaagccggcaccatgagggtgggacaccctatgctgagtatggaggctggtacaaggcctgcaaagtgagcagccccacagtgaacactactctgagaaacctgggagctctgtataggcgccagggaaagctggaggctgctgagaccctggaggaatgtgccctgcggtcccggagacagggcactgaccctatcagccagacgaaggtggcagagctgcttggggagagtgatggtagaaggacctcccaggagggccctggagacagtgtgaaattcgagggaggtgaagatgcttctgtggctgtggagtggtccggggatggcagtgggaccctgcagaggagtggctctcttggcaagatccgggatgtgctccgcagaagcagtgaactcttggtgaggaagctccaggggactgagcctcggccctccagcagcaacatgaagcgagcagcctccttgaactatctgaaccaacctagtgcagcacccctccaggtctcccggggcctcagtgccagcaccatggacctctcttcaagcagctgacattcaacccggcccccaggtctgctgggtccccccacccccacagccctcacagcattccccattgctcctggctcttccccacccctaggtgggacagtgaaggggagcagtttaaccagaagattgctgctgcccttagggtctcagctccctcctcaggaatccctcttaggaaggaccctcaggacaccctctctgcaccctgtggtcctctagagtagctagctctgaggccccaaggtgggtacaaagcaggtatggccctcagagatgcagcctgctgctggcttttcagtcagagggttgggggctggccagccaagctgccttgccctggcccttaaataaaagaatcaggtaacctttc

SEQ ID NO: 385102 - DNA, 2295 bp, Homo sapiens
gcacgagccggcaagagcggcagccacaccggcagattgcagaccgggcaaggtcccccaggccaggatgtcaggcctggtgttggggcagcgggatgagcctgcaggccaccggctcagccaagaggagatcctggggagcacacggctggtcagccaagggctagaggccctacgcagtgaacaccaggccgtgctgcaaagcctgtcccagaccattgagtgtctgcagcagggaggccatgaggaagggctggtgcatgagaaggcccggcagcttcgccgttctatggaaaacattgagctcgggctgagtgaggcccaggtgatgctggctctagccagccacctgagcacagtggagtcggagaaacagaagctgcgggctcaggtgcggcggctatgccaggagaaccagtggctgcgggatgagctggctggcacccagcagcggctacagcgcagtgaacaggctgtggctcagctggaggaggaaaagaagcacctggagttcctggggcagctgcggcagtatgatgaggatggacatacctcggaggagaaagaaggcgatgccaccaaggattccctggatgacctctttcctaatgaggaggaagaggaccccagcaatggcttgtcccgtggtcaaggtgctacagcagctcagcagggtggatatgagatcccagcaaggttgcggacgttgcacaacctggtgatccagtacgcagcccaaggtcgctatgaggtggccgtgccactctgtaagcaggcactagaggacctggagcgcacatcaggccgtggccaccctgatgtcgccaccatgctcaacatccttgctttggtgtatcgtgaccagaataagtataaggaagctgcccacctgctgaatgatgcccttagcatccgggagagcaccttgggacctgaccatcctgctgtggctgccacactcaacaatttggctgtgctctatggcaaaaggggcaagtacaaggaggcagagcctctgtgccagcgggcactggagattcgagaaaaggtcctgggcacgaatcatccagatgtggcaaaacagctgaacaacctggccctcttgtgccaaaaccagggcaagtatgaggccgtggaacgctactaccagcgagcactggccatctacgaggggcagctggggccggacaaccctaatgtagcccggaccaagaacaacctggcttcctgttacctgaaacagggcaaatatgctgaggctgagacactatacaaagagatcctgacccgtgcccatgtacaggagtttgggtctgtggatgatgaccacaagcccatctggatgcatgcagaggagcgggaggaaatgagcaaaagccggcaccatgagggtgggacaccctatgctgagtatggaggctggtacaaggcctgcaaagtgagcagccccacagtgaacactactctgagaaacctgggagctctgtataggcgccagggaaagctggaggctgctgagaccctggaggaatgtgccctgcggtcccggagacagggcactgaccctatcagccagacgaaggtggcagagctgcttggggagagtgatggtagaaggacctcccaggagggccctggagacagtgtgaaattcgagggaggtgaagatgcttctgtggctgtggagtggtccggggatggcagtgggaccctgcagaggagtggctctcttggcaagatccgggatgtgctccgcagaagcagtgaactcttggtgaggaagctccaggggactgagcctcggccctccagcagcaacatgaagcgagcagcctccttgaactatctgaaccaacctagtgcagcacccctccaggtctcccggggcctcagtgccagcaccatggacctctcttcaagcagctgacattcaacccggcccccaggtctgctgggtccccccacccccacagccctcacagcattccccattgctcctggctcttccccacccctaggtgggacagtgaaggggagcagtttaaccagaagattgctgctgcccttagggtctcagctccctcctcaggaatccctcttaggaaggaccctcaggacaccctctctgcaccctgtggtcctctagagtagctagctctgaggccccaagtcagagggttgggggctggccagccaagctgccttgccctggccgctcttactccctccctctgctgtctcacttcaggtccatgtatttcacttttcttaaataaaagaatcaggtaacctttc

SEQ ID NO: 385103 - DNA, 1663 bp, Homo sapiens
gcacgagccggcaagagcggcagccacaccggcagattgcagaccgggcaaggtcccccaggccaggatgtcaggcctggtgttggggcagcgggatgagcctgcaggccaccggctcagccaagaggagatcctggggagcacacggctggtcagccaagggctagaggccctacgcagtgaacaccaggccgtgctgcaaagcctgtcccagaccattgagtgtctgcagcagggaggccatgaggaagggctggtgcatgagaaggcccggcagcttcgccgttctatggaaaacattgagctcgggctgagtgaggcccaggtgatgctggctctagccagccacctgagcacagtggagtcggagaaacagaagctgcgggctcaggtgcggcggctatgccaggagaaccagtggctgcgggatgagctggctggcacccagcagcggctacagcgcagtgaacaggctgtggctcagctggaggaggaaaagaagcacctggagttcctggggcagctgcggcagtatgatgaggatggacatacctcggaggagaaagaaggcgatgccaccaaggattccctggatgacctctttcctaatgaggaggaagaggaccccagcaatggcttgtcccgtggtcaaggtgctacagcagctcagcagggtggatatgagatcccagcaaggttgcggacgttgcacaacctggtgatccagtacgcagcccaaggtcgctatgaggtggccgtgccactctgtaagcaggcactagaggacctggagcgcacatcaggccgtggccaccctgatgtcgccaccatgctcaacatccttgctttggtgtatcgtgaccagaataagtataaggaagctgcccacctgctgaatgatgcccttagcatccgggagagcaccttgggacctgaccatcctgctgtggctgccacactcaacaatttggctgtgctctatggcaaaaggggcaagtacaaggaggcagagcctctgtgccagcgggcactggagattcgagaaaaggtcctgggcacgaatcatccagatgtggcaaaacagctgaacaacctggccctcttgtgccaaaaccagggcaagtatgaggccgtggaacgctactaccagcgagcactggccatctacgaggggcagctggggccggacaaccctaatgtagcccggaccaagaacaacctggcttcctgttacctgaaacagggcaaatatgctgaggctgagacactatacaaagagatcctgacccgtgcccatgtacaggagtttgggtctgtggatgatgaccacaagcccatctggatgcatgcagaggagcgggaggaaatgagcaaaagccggcaccatgagggtgggacaccctatgctgagtatggaggctggtacaaggcctgcaaagtgagcaggtgagctgacagtgaaaactagctctgaggccccaaggtgggtacaaagcaggtatggccctcagagatgcagcctgctgctggcttttcagtcagagggttgggggctggccagccaagctgccttgccctggccgctcttactccctccctctgctgtctcacttcaggtccatgtatttcacttttcttaaataaaagaatcaggtaacctttc

SEQ ID NO: 385104 - DNA, 1101 bp, Homo sapiens
gcacgagccggcaagagcggcagccacaccggcagattgcagaccgggcaaggtcccccaggccaggatgtcaggcctggtgttggggcagcgggatgagcctgcaggccaccggctcagccaagaggagatcctggggagcacacggctggtcagccaagggctagaggccctacgcagtgaacaccaggccgtgctgcaaagcctgtcccagaccattgagtgtctgcagcagggaggccatgaggaagggctggtgcatgagaaggcccggcagcttcgccgttctatggaaaacattgagctcgggctgagtgaggcccaggtgatgctggctctagccagccacctgagcacagtggagtcggagaaacagaagctgcgggctcaggtgcggcggctatgccaggagaaccagtggctgcgggatgagctggctggcacccagcagcggctacagcgcagtgaacaggctgtggctcagctggaggaggaaaagaagcacctggagttcctggggcagctgcggcagtatgatgaggatggacatacctcggaggagaaagaaggcgatgccaccaaggattccctggatgacctctttcctaatgaggaggaagaggaccccagcaatggcttgtcccgtggtcaaggtgctacagcagctcagcagggtggatatgagatcccagcaaggttgcggacgttgcacaacctggtgatccagtacgcagcccaaggtcgctatgaggtggccgtgccactctgtaagcaggcactagaggacctggagcgcacatcaggccgtggccaccctgatgtcgccaccatgctcaacatccttgctttggtgtatcggtgaggacttccctcctccagtgcccagatcttcccccacattcccaccttggtcctcctttggctttcatttttcctctttacagggtacctctcctccctgttgggcctcccagatacaccccaacagggtgcttctttatgtgccagaactctcacttttcccatacctaagcatttgctcatcccttgggatccttgttcctctaatctctcttctggggagtgctctctccctctctt

SEQ ID NO: 385105 - DNA, 719 bp, Homo sapiens
  misc_feature (626)..(626): n is a, c, g, or t
agggagacacaggacctgctgggccacagaaaggaggctctgggtagacgcactagattactggataaatcacttcaatttcccaatgaattttatattgtttatttttatacctggagttttttccttaaaaagtagcactttgaagcctactattgaagcattgcctaatgtgctacctttaaatgaagatgttaataagcaggaagaaaagaatgaagatcatactcccaattatgctcctgctaatgagaaaaatggcaattattataaagatataaaacaatatgtgttcacaacacaaaatccaaatggcactgagtctgaaatatctgtgagagccacaactgacctgaattttgctctaaaaaacgataaaactgtcaatgcaactacatatgaaaaatccaccattgaagaagaaacaactactagcgaaccctctcataaaaatattcaaagtatttaaattactacactgtattcatacctggagaatatcattatgtgacttaaaaatttaagtttcactactctgagcattacataaagccatagcatgcttaaagaatttatactgctaccttttaaagtcactaaaatcttttaaatggtgaatgtctaanagtcagtcttcaggtatacctgacaaaggatgagaaatgagcttttgtagaaatagaactttattttaataaaaatgtgttacatttgtgtct

SEQ ID NO: 385106 - DNA, 739 bp, Homo sapiens
gcagttaattgaaatggccatcaacttgaagaaagggtcttccagtcacagttgttaccaaacactcccttagtgacattcctctagagggacccattacagactgagatatatactaaattagacctgaaaacccttgatttgtagtccaaaatctttatatccaaatgtctgtttccaatttacaaacacacttaatactcagcctccctttcttgcgtcgttacactgaacagcagccaagctgctctggacaaagaggatcatttcaccgcctgtgcagggaaccatctggagccaattatcttctccaagagatcttctttacctctgaagaaagcccggggccgcatgttcctttgcctctctttcacaaattatagtcatgttaatcccacctcagacaccccatgatcacaaaaactttattcttcaataccttcttctttctcctttatttctggaaaatgttaatgtctttctcttccgtttcttctctctccttttctttgttccataatatccatttaatagatattaaaaaatatctattctcagatgtttcgtcagtatttttacatgctgataattctttttcccttttcctagataaaactgtcaatgcaactacatatgaaaaatccaccattgaagaagaaacaactactagcgaaccctctcataaaaatattcaaagtatttaaattactacactgtattcatacctggagaatatcat

SEQ ID NO: 385107 - DNA, 1036 bp, Homo sapiens
agggagacacaggacctgctgggccacagaaaggaggctctgggtagacgcactagattactggataaatcacttcaatttcccaatgaattttatattgtttatttttatacctggagttttttccttaaaaagtagcactttgaagcctactattgaagcattgcctaatgtgctacctttaaatgaagatgttaataagcaggaagaaaagaatgaagatcatactcccaattatgctcctgctaatgagaaaaatggcaattattataaagatataaaacaatatgtgttcacaacacaaaatccaaatggcactgagtctgaaatatctgtgagagccacaactgacctgaattttgctctaaaaaacgataaaactgtcaatgcaactacatatgaaaaatccaccattgaagaagaaacaactactagcgaaccctctcataaaaatattcaaagatcaaccccaaacgtgcctgcattttggacaatgttagctaaagctataaatggaacagcagtggtcatggatgataaagatcaattatttcacccaattccagagtctgatgtgaatgctacacagggagaaaatcagccagatctagaggatctgaagatcaaaataatgctgggaatctcgttgatgaccctcctcctctttgtggtcctcttggcattctgtagtgctacactgtacaaactgaggcatctgagttataaaagttgtgagagtcagtactctgtcaacccagagctggccacgatgtcttactttcatccatcagaaggtgtttcagatacatccttttccaagagtgcagagagcagcacatttttgggtaccacttcttcagatatgagaagatcaggcacaagaacatcagaatctaagataatgacggatatcatttccataggctcagataatgagatgcatgaaaacgatgagtcggttacccggtgaagaaatcaaggaacccggtgaagaaatcttattgatgaataaataactttaattattttgtcatca

SEQ ID NO: 385108 - DNA, 987 bp, Homo sapiens
gtgtgatacttttttttagcattgcctaatgtgctacctttaaatgaagatgttaataagcaggaagaaaagaatgaagatcatactcccaattatgctcctgctaatgagaaaaatggcaattattataaagatataaaacaattgcatgttttaagaaaaaaactcagaggaagaaaaaggtaaaggaaaaaaagtgacttagctagttgctgaagactttcgcttttgtttttagatgtgttcacaacacaaaatccaaatggcactgagtctgaaatatctgtgagagccacaactgacctgaattttgctctaaaaaacgataaaactgtcaatgcaactacatatgaaaaatccaccattgaagaagaaacaactactagcgaaccctctcataaaaatattcaaagatcaaccccaaacgtgcctgcattttggacaatgttagctaaagctataaatggaacagcagtggtcatggatgataaagatcaattatttcacccaattccagagtctgatgtgaatgctacacagggagaaaatcagccagatctagaggatctgaagatcaaaataatgctgggaatctcgttgatgaccctcctcctctttgtggtcctcttggcattctgtagtgctacactgtacaaactgaggcatctgagttataaaagttgtgagagtcagtactctgtcaacccagagctggccacgatgtcttactttcatccatcagaaggtgtttcagatacatccttttccaagagtgcagagagcagcacatttttgggtaccacttcttcagatatgagaagatcaggcacaagaacatcagaatctaagataatgacggatatcatttccataggctcagataatgagatgcatgaaaacgatgagtcggttacccggtgaagaaatcaaggaacccggtgaagaaatcttattgatgaataaataactttaattattttgtcatca

SEQ ID NO: 385109 - DNA, 479 bp, Homo sapiens
gctttccaggccatctctgtgcaactccaaaggggcttttcagttgatgtctttttttttttcctctgattgacctatgctctctcgggtcagtgttgagccataatggattaggcagagacatttcttgtgcaaatgagatgctcctctcacttcaaccctgagcccctccagggctggctacataatttacaagactcaatgcaaagtgaaaatgtggagctgcttgttcaaaagcaggaaaaaaagtgttaacggtactaaaattaattttttaactttctttggcagtttctctctagatctgccatggtgttaaaaaaattatttactgttgctcctccacaagtatgtggatactcacagggagagtgcagactcccagaggtgcgcagggtccctgtcccgctacttggtgtgtgcaggacccaccagctgccagggtccccctgtcaccagcaccctggtagtcagggaca

SEQ ID NO: 385110 - DNA, 413 bp, Homo sapiens
acaataataaaatgatataaggaaatttatctgtatcaaaaaatttcattgaggctattaattttacaaaaaccatagagaatgcttcatgaaactacattatatagtactttttagtattttacttacattttaaatcatcaacaaattaaaggaagttcttaataattatttattaccaataacatgattctactcaagcaatccttttgagattaagtattttaaataaaactttaaaaacaaatggtaccgactgatatcagctttcaatgaaataatacttctgtatttgtagtaatgtgaagtataactttctcctcacagtggatcttttataacatcagtattagtgttttctctgatataaacactgtgatactcacagctttcctgtatccatacattacatg

SEQ ID NO: 385111 - DNA, 495 bp, Homo sapiens
agaagtggatgaccttaggatatattttaaagttatagccaaggggttgctggtggattagatgtagagagtgagagaaaaaaggaatcaagagtgactcttggtttttgatttgagcaattggatgaacaataatgccatttatggaaatgggaaaaactggggagaaaagttctggagggggtgaaaatcaagaatagagaattcttttgaagaatacagaatagagattaagttggagaggcccatttagtcatccaagtggagatactaagaaggaagtaaactgtgagtctggagcttatggaggagggcactttagggctggggaaactaatctgggagtcatcagcttacaggtaaccatgccagtggatgaaattatgtggggagtgaatgtagagttgtgaaaattctcacagtttacatcaagtacgtatggaagctgcttaacactttcaatttagaaacctttgtgatacatctgggaaggta

SEQ ID NO: 385112 - DNA, 333 bp, Homo sapiens
tcaaaaaaaaaaataaaaaataaaaaataattttaaaaaaggcagcagatgccttagccaaccagattcaaagggagagctaggaagttcacttgtgggaaattagactcttttccaggacttctcctataaagtcattcatggggacttgcataatgttgtccagaagaaaattctattggggacaacattaattcaccaaagattctcttttgtattatttatttgttaaaataaaatttttttagagataggtttctctctgtcacccaggctagagtgcagtggcttgatcacggctcactgcagccttgacctccttggctgaagcga

SEQ ID NO: 385113 - DNA, 1026 bp, Homo sapiens
  misc_feature (729)..(729): n is a, c, g, or t
ttcaaggttacccatctcaagtagcctagcaatattggcaacatcccaatggccctgtccttttctttactgatggccgtgctggtgctcagctacaaatccatctgttctctgggctgtgatctgcctcagacccacagcctgggtaataggagggccttgatactcctggcacaaatgggaagaatctctcctttctcctgcctgaaggacagacatgactttggattcccccaggaggagtttgatggcaaccagttccagaaggctcaagccatctctgtcctccatgagatgatccagcagaccttcaatctcttcagcacaaaggactcatctgctacttgggaacagagcctcctagaaaaattttccactgaacttaaccagcagctgaatgacctggaagcctgcgtgatacaggaggttggggtggaagagactcccctgatgaatgtggactccatcctggctgtgaagaaatacttccaaagaatcactctttatctgacagagaagaaatacagcccttgtgcctgggaggttgtcagagcagaaatcatgagatccttctctttatcaaaaatttttcaagaaagattaaggaggaaggaatgaaacctgtttcaacatggaaatgatctgtattgactaatacaccagtccacacttctatgacttctgccatttcaaagactcatttctcctataaccaccgcatgagttgantcaaaattttcagatcttttcaggagtgtaaggaaacatcatgtttacctgtgcaggcactagtcctttacagatgaccatgctgatagatctaattatctatctattgaaatatttatttatttattagatttaaattatttttgtccatgtaatattatgtgtacttttacattgtgttatatcaaaatatgttaatctaatatttagtcaatatattattttctttttattaatttttactattaaaacttcttatattatttggttattctttaataaagaaattccaagccc

SEQ ID NO: 385114 - DNA, 963 bp, Homo sapiens
  misc_feature (388)..(388): n is a, c, g, or t
  misc_feature (404)..(404): n is a, c, g, or t
  misc_feature (414)..(415): n is a, c, g, or t
  misc_feature (417)..(417): n is a, c, g, or t
  misc_feature (423)..(423): n is a, c, g, or t
  misc_feature (429)..(429): n is a, c, g, or t
  misc_feature (433)..(433): n is a, c, g, or t
  misc_feature (439)..(439): n is a, c, g, or t
  misc_feature (441)..(441): n is a, c, g, or t
  misc_feature (445)..(445): n is a, c, g, or t
  misc_feature (459)..(459): n is a, c, g, or t
  misc_feature (476)..(476): n is a, c, g, or t
  misc_feature (490)..(490): n is a, c, g, or t
  misc_feature (494)..(494): n is a, c, g, or t
  misc_feature (504)..(504): n is a, c, g, or t
  misc_feature (510)..(510): n is a, c, g, or t
  misc_feature (517)..(517): n is a, c, g, or t
  misc_feature (522)..(522): n is a, c, g, or t
  misc_feature (526)..(526): n is a, c, g, or t
  misc_feature (535)..(535): n is a, c, g, or t
  misc_feature (543)..(543): n is a, c, g, or t
  misc_feature (593)..(593): n is a, c, g, or t
  misc_feature (596)..(596): n is a, c, g, or t
  misc_feature (617)..(617): n is a, c, g, or t
  misc_feature (685)..(685): n is a, c, g, or t
  misc_feature (960)..(960): n is a, c, g, or t
tccgccatttgggaaagtggtttctacgtcactggacaccggttctgagcattagtttgagaactcgttcccgaatgtgctttcctccctctcccctgcccacctcaagtttaataaataaggttgtacttttcttactataaaataaatgtctgtaactgctgtgcactgctgtaaacttgttagagaaaaaaataacctgcatgtgggctcctcagttattgagtttttgtgatcctatctcagtctgggggggaacattctcaagaggtgaaatacagaaagcctttttttcttgatcttttcccgagattcaaatctccgattcccatttgggggcaagtttttttcttcaccttcaatatgagaattcagcgaacttgaaagnaaaatcatctgtgagntccttcaggnncncacccntagtcntganccttcngngggnatatgcactggcgngtttaaagtaagggctntgatatttgatggncccnaagtacggcngctgcnaaaagtngtggnaggnaattgtctncgtgtctnggaaaaattagttaggaatttggatgggtaaaaggtacccttgccttacnccntcttattttcttagccccctntgagtgttttaactggtttcatgtcctagtaggaagtgcattctccatcctcatcctctgcccccccnggaagtcagtgattgtctttttgggcttcccctccaaaggaccttctgcagtggaagtgccacatccagttcttttcttttgttgctgctgtgtttagataattgaagagatctttgtgccacacaggatttttttttttttaagaaaaacctatagatgaaaaattactaatgaaactgtgtgtacgtgtctgtgcgtgcaacataaaaatacagtagcacctaaggagcttgaatcttggttcctgtaaaatttcaaattgatgtggtattantaa

SEQ ID NO: 385115 - DNA, 748 bp, Homo sapiens
agtctcagattggtaaacacccgaactggtcaactctcaagagaccatctggttcaggttcctgactgggccagcgagtgaggatggccaggcctctggagcaggcggtagctgccatcgtgtgcaccttccaggaatacgcagggcgctgtggggacaaatacaagctctgccaggcggagctcaaggagctgctgcagaaggagctggccacctggaccccgactgagtttcgggaatgtgactacaacaaattcatgagtgttctggacaccaacaaggactgcgaggtggactttgtggagtatgtgcgctcacttgcctgcctctgtctctactgccacgagtacttcaaggactgcccctcagagcccccctgctcccagtagcctctgctccagggggtgcgctggctgtcgggggctgggcatgtctcccacaccccctcctaccctctctcctgtacccctttcaatctggacttgcccaggtcttctgcgatcagttaacccattttacctaggaggcccagagatgtgagggctccttcctcaggatgcccagcgaatgaggggtagagccactctggggcccagcctgcctgccgcacccctgtggcctcccttgtggatgggaggaggcgggatctgctctgaggccctcgaggctcagcagagcgtgcaccaatgagaccacgatgggaaagggcctatttaactcctaataaaaaactggcatcaaaaaaaat

SEQ ID NO: 385116 - DNA, 967 bp, Homo sapiens
agatgatgcagcaagaaggccttctccaggtgttaccccctccagcttagacttcctggcctccagaatggcccagagatatgaacaaggcttctcatgtgcagttcctccaggacggctcctcaaaagtggttcctcttgacctgaagtcctgtgaagaacatagtcgatgttcacagtgtcttgctctgttgcccaggctggagtgcagtggcacgatctcagctcactgcaaccttcgtctcctgggttcaagcgattctcctgcctcagcctcccgagtagctgggattacagtgaggatggccaggcctctggagcaggcggtagctgccatcgtgtgcaccttccaggaatacgcagggcgctgtggggacaaatacaagctctgccaggcggagctcaaggagctgctgcagaaggagctggccacctggaccccgactgagtttcgggaatgtgactacaacaaattcatgagtgttctggacaccaacaaggactgcgaggtggactttgtggagtatgtgcgctcacttgcctgcctctgtctctactgccacgagtacttcaaggactgcccctcagagcccccctgctcccagtagcctctgctccagggggtgcgctggctgtcgggggctgggcatgtctcccacaccccctcctaccctctctcctgtacccctttcaatctggacttgcccaggtcttctgcgatcagttaacccattttacctaggaggcccagagatgtgagggctccttcctcaggatgcccagcgaatgaggggtagagccactctggggcccagcctgcctgccgcacccctgtggcctcccttgtggatgggaggaggcgggatctgctctgaggccctcgaggctcagcagagcgtgcaccaatgagaccacgatgggaaagggcctatttaactcctaataaaaaactggcatcaaaaaaaat

SEQ ID NO: 385117 - DNA, 671 bp, Homo sapiens
aggcggaggtaatgcccttgaactgagggcttctccttctcagaaatcagaaggaagatgagctcatttatcaataaacacctacaaaatgggtcaggaagttgagataggtcaactgtatcacctcagcttttcatctcagtgcccaaggaaatcaaacttctcacttccttccccaactcctcccactcctactggactccctgccaccaacaggaccccagttccctgcagctactcacaagctcgatgaaggcttgtgtattgagtgggttgggggagatactggacaatgcaaggtggcacacagatacccagaactctacctgattcgggctttttaaatataatggtagcatctgtagggcaactaaattcataatgagaacttttccctcaaaataaacggccacatagcaaaatatttattatttacaataatgatcttcagactggagcacgcatgcccctgggagcacacagcttctctcaaaggcatatgctggccattgtctagttttaagagactcagggtttttgggctggccccggtggctcgcacccgtaatcccagcactttgggaggccaaggcaggtggatcacttgaggcccggagtttgagacccccctggtcaacatggccaaaccccatttttacttaaaaaaaaaa

SEQ ID NO: 385118 - DNA, 898 bp, Homo sapiens
aacttctaaattctaagcccacaccagacatcggtgagaccctaagaggtttccaattaaaattaagccagatgataaatggagtaatctgaagtgagtgatcactaaggttttttttggttctaatattttatgacaattgtgaaatttgagacttggccatttctggggaattacattaagtcagcacaaaaaactttaaaagggtaaaaccacatctttcagtgataaaaacagttaccaaaatcacttctgtcccactctgtctccaaactctgggtgacttcactcttacagtttatggttgtaaagtttcatttatttttgtttatctgctgtatatggtctttagcagggccttttctgaccatggaatcgtggcaactctgagagcaacttggtttcctgcgaattagctggaagggtgtaacccaagccgtcaatccaacccgcaaatagcagagtgaaatgttaggctttggtgcttcagagatgctgagtgcaagatgcatttattccagttttgttggcaaaatagcattcaaaaaacaaatgcttgtatgtgcaatccatcagaagttcagtcaaatatttgcctgactatgcactggaaacttaaagaagcagaaggtatggcggtgaactacacagacaaggaccctgctcacgtggagctttcatgaacttggtgtgggttgcagagtggaaataaaatcaataaatgaaagtgacaaatggaaattatcagttggtaatttccacaatggacacaatacaatataagctaacgtgttgggactgaagggctgtaacagtccagagaggctaggtatgctatggtaacaatctgaaagtctcagcaaattaaaacagcaaagatttctttcttgctccactc

SEQ ID NO: 385119 - DNA, 943 bp, Homo sapiens
taatacagagttgggactagaacccgggtccccataataccttcctttattggccactaggtggtgataattcgttgttaagagagaatactgttataatttaggcttaacttagatctaggatgtatagaacctgacaaatgatatgaatagatttatcagaattttgataatataagcatattatcagaattttgaagcagagagaatcaagtctttctggaactacactggagtaatttacgtggatgatctaaatatccatcatgacaggaatggttgagggaatgatggcctattaatagaattgagtattatgtaaccattaagtactacatgcacacacacataaaaagcactcagtaggccgaggcgggtggatcatgaggtcaggagatcgagaccatcctggctaacaaggtgaaaccccgtctctactaaaaatacaaaaaattagccgggcgcggtggcgggcgcctgtagtcccagctactcgggaggctgaggcaggagaatggcgtgaacccgggaagcggagcttgcagtgagccgagattgcgccactgcagtccgcagtccggcctgggcgacagagcgagactccgtctcaaaaaaaaaaaaaaaacaaaaaaaacaaaagcactcagtaagtatgtgttcaattaaaaataattataaaattttgtaattctgtagaaagactttcaaattagtattacatgaaaaaaataagatacattgaacatgtagagttagtttggtccatttgtacacatgacaattagagaatctcgtagccaagtatgaaaagaatctggtaaaccgccaatgaattaaacctatttgttgggtgggtgtacataggtgttgttaactcatgttcaagattcttgatcgacatccaaggtatttagcgctaactattacatcagcctggttaaag

SEQ ID NO: 385120 - DNA, 750 bp, Homo sapiens
ggcttaacttagatctaggatgtatagaacctgacaaatgatatgaatagatttatcagaattttgataatataagcatattatcagaattttgaagcagagagaatcaagtctttctggaactacactggagtaatttacgtggatgatctaaatatccatcatgacaggaatggttgagggaatgatggcctattaatagaattgagtattatgtaaccattaagtactacatgcacacacacataaaaagcactcagtaggccgaggcgggtggatcatgaggtcaggagatcgagaccatcctggctaacaaggtgaaaccccgtctctactaaaaatacaaaaaattagccgggcgcggtggcgggcgcctgtagtcccagctactcgggaggctgaggcaggagaatggcgtgaacccgggaagcggagcttgcagtgagccgagattgcgccactgcagtccgcagtccggcctgggcgacagagcgagactccgtctcaaaaaaaaaaaaaaaacaaaaaaaacaaaagcactcagtaagtatgtgttcaattaaaaataattataaaattttgtaattctgtagaaagactttcaaattagtattacatgaaaaaaataagatacattgaacatgtagagttagtttaactgtaaaaatgaaatttaagagaacatgtcaaaattctgtacagtacaaaatattgtaaaattttgtacaagaaacttttgtacaagaaaca

SEQ ID NO: 385121 - DNA, 732 bp, Homo sapiens
tgaaagcactaaagtggtctgtatgacatagttatccagcttattgcctgaaaaaagaagagggaaccagtgttcctagtatgaagtgaaattcttcagaaggagaatgacctaggaatttagttcagtgtctctggatgaatcattacagctttcaagcaccctgccatttgtgaagcaacagcaatactggcagaatacttcaaaggaatactgtagaaattaatgagtttatttatattatgcttaaagttcctttgaagaaattaatacatcataattcaaggagcaagaatgtttcatattatctccttgaaatcttcaacattgggaaaaaaaattgcatatgaccaatttcactgctcaaaaaccaaggtagcgaggttggccaatccatttaaggtcagataagttaaatcaaaccaaaaatggaagccaaaaggaaaatttatgtttgaattcccaaatttgcacttctagaccagaactgacagatttctgtattattaagcatctatgggatgtttatatttataaaatatttggctacaagtgtgaaagactttgcatattgatcttgcaaagttaagaataatctgattctgaataaataaccatacttggggttttaattcagggttcaaattttttggaacttttccattatgtatagtaataaatattcagatacatggatattaaaagatttcaaaaagtgtgataatgtcaatt

SEQ ID NO: 385122 - DNA, 570 bp, Homo sapiens
ggggatgaaaactaaagtcataacttcaccagaaatggcatatatgtggcattggtgccacaactttccccatcctggcccatggcagacagcaccatcagtcagcagtttttctcactgagtccagacagccacactcaagcctggaggatttgggttgggcatttaagattctcagaggcaggggatggaggtggagggaccagactctttcttaggtaactagttaggcattataccaatgaatcatggccaagacgtggagagcagttgaagacatttgaatgttaaaagataagaaattagcatgtgaagtgttaaatatttagttctctcagttttatttatacagaagaaacagaccagaaatcaggaaactttggtgtggtttcagctctgggagtggttctgggaagtccccacatatcttgcagactttagtttcaattgaaacaaatttgaactaaataataaatatgactgtaattctacagttttacaattgtaaatatagactatatgaaagactacacattttcaaattgtgtgtgtataagaatataactgagg

SEQ ID NO: 385123 - DNA, 382 bp, Homo sapiens
ttacatattcagtcctcagttccaagctttgtacgagccttctcttccgctgatttcaaagttagaaagttcaaactagtctcctctccctcctactaagtttccacttgcatattttgatgtcagtccgaatcctgtgttaatcaggccaaaattcattaacgaaggccaactgtgatctccaggaagctagctgctctccatctaacataatctgtgtttcatacagctaagtggtttctcaaacactctaacaccaagctctgaggggggaccctgtgaacaaaatagaacggctcctgtctcatggtgcctgttgcaatatgtgtgctcccgttttggggaattctgcactgcaaagtaataacgagcagtcacattg

SEQ ID NO: 385124 - DNA, 301 bp, Homo sapiens
tctgctggttgtaaagacggtagagtaaaaatgatgttatgataagaagagcaatgaaatctgctgtgcatgcaaccttcctttttgccttccttccaaagaaatctctgatgtttcttctagcattctatcaaaatgaagtcaaaatctatatgacagtaagttctctaagcagataaatcaatataatgtgcatagtaacatacaagtgacatcatttctggaaaaagaaagtttaagatatatgggacatgttgaagtctcaacatgtatgacagtattcatgttaaataattgcaga

SEQ ID NO: 385125 - DNA, 1695 bp, Homo sapiens
tgcgttgtcttggaggctgagatgtgggaacagacagatcctttgttctgaggctcactcatctcccgagccccgagccgtctcccagcctcagacggctctgcgggctgcatctgtgcagcctggcagcggcggcgctgcgctgtgacattttcacagcccttcttgcagaggcatgtgtgctagggatgccgaaatgccgagagcgccggcaggactagcttccgggccgcgctttgtgtgctgggctgcagtgtggcgcgggcgaggaagctggtagggcggttgtcgcaagctccagctgcagcctccgcctacgtgagaagactagaaagcgggcgcaggaccaggcctgcgttgtttgcagagaggccgtggctacaaaatggaagtgcttttgcgacctgggctccattttaggaattcttgcccgattttaaccacttgaacgcggaagtggctttcctattctcttccaagccagcctttaattttaaacgctgtaattaacagttcacaggggtcaaattcctttattccggaacattccactttgagagggatctgtcctctttggtcccctgcgttttcaaatatttgaggaaaggtgtcgcctctttttctgtggaaagaggaagctcatgagcgcgaaacagcaggggacggagggcgagaagggctttctcaggttgcgggtcggagggcagaagcacagttcccagtacagagacccggacaggtggctgtttctcacgctcactttggattgctccctacggcttcctccgcagccatgtctgacaaacctggtatggctgagatcgagaaattcgataagtcgaaactgaagaagacagaaacgcaagagaagaatccattgtcttccaaagaaactatcgaacaggagaggcaagcaggcgaatcttaaacaggcatgtgccaccaatatctactgtacattctacaagcattgctttcttattttacttcttttacttgtttaacttggttagatgcaaacacgttggatgagtttgaaaggactatgctgcccttttgacatcaaagacctgctgacaatggaggccacgcctgcttctcccatcgcctgtctggctggcagggaaggaaaatagcttgaatgttggtgaaagacttagcggagtgggagggcagtgaaatctagagtaaaaccaagttgggccaagtgtcctgcagaatctaaaatgaagtttaatcagcgtgccatttttgttgttgtttgaaagattttaatttttggaatgcacagtttttatttaaaaaagacatttttaaaccactgcttgtgagattgcttgttgattggaaagagtgttttattcaccatttaaacgtttgcaaagtggcgtgccccttggcctcacaggcaaagaataacttaaaagctgacgatttgaataaattatgttacagtatgaaatatgttttacctggatatgtaaaataccttctttattctagctaattgggagatgattttttttggctaattgagattacctttagattatgttttcaaaactggcttatactgtaatctacaactaataagcactaatttagagttcagctatattgttgcatgtagtgagaagggacttaattacaaacttaagacgtaagtgtgcaataaagtaagctaagaagaaaata

SEQ ID NO: 385126 - DNA, 203 bp, Homo sapiens
aattgcttatactccttgcatttctggaacaatgctacaagaagcattttcaggcattgtcaatgtatttgctgaaaaatgattctgaagttaaagtacgttatacttcttagtgttccaagtgaaaaccaatactagaaaaactactttcctgaaggaattggcacactctctactttaaaaaactttttttaagttccggg

SEQ ID NO: 385127 - DNA, 445 bp, Homo sapiens
ttgatctgtcatccaggctggggtgcagtggtgcaatcccagctcgctacaacctccacctcccaggctcaagccatcttcccacctcagcctcccaagtagctgggaccacaggtgtttgccaccatgcctggcaaatttttatattttttgtagagacagggttttgctgtgttgcccaggctggtctcctaatgcctgtcttcaagtgacccacccaccttggcctcccaaagtgctgggattacaggtgtgagccaccacatctggcctgaaaagactcctcttaatcttaagcatagattggacagaaccagagtaaaggaaggtgatagatgaattggaagattattgtagcagtctaggcaagaaatgtactagctgagagtatggttggaatggagaaaatggaaagagctggacgtacttgagaagtaatttggga

SEQ ID NO: 385128 - DNA, 1418 bp, Homo sapiens
atgcgacctgttcgagagaactcatcaggtgcgagaagcccgcgggttcctgctgatttggcgcggagcattttgataagcctacccttcccgccggactcgctggcccacaggcccccaagctccgctccgacggagtcccagggccttttcaccgtggccgctccagccccgggagcgccttctcctcccgccacgctggcgcaccttcttcccgccccggcaatgtacagccttctggagactgaactcaagaaccccgtagggacacccacacaagcggcgggcaccggcggccccgcagccccgggaggcgcaaaatggccctggagaaccccaagatgcacaattctgagatcagcaagcgcttgggcgccgactggaaactgctgaccgacgccgagaagcgaccattcatcgacgaggccaagcgacttcgcgccgtgcacatgaaggagtatccggactacaagtaccgaccgcgccgcaagaccaagacgctgctcaagaaagataagtactccctgcccagcggcctcctgcctcccggtgccgcggccgccgccgccgctgccgcggccgcagccgctgccgccagcagtccggtgggcgtgggccagcgcctggacacgtacacgcacgtgaacggctgggccaacggcgcgtactcgctggtgcaggagcagctgggctacgcgcagcccccgagcatgagcagcccgccgccgccgcccgcgctgccgccgatgcaccgctacgacatggccggcctgcagtacagcccaatgatgccgcccggcgctcagagctacatgaacgtcgctgccgcggccgccgccgcctcgggctacgggggcatggcgccctcagccacagcagccgcggccgccgcctacgggcagcagcccgccaccgccgcggccgcagctgcggccgcagccgccatgagcctgggccccatgggctcggtagtgaagtctgagcccagctcgccgccgcccgccatcgcatcgcactctcagcgcgcgtgcctcggcgacctgcgcgacatgatcagcatgtacctgccacccggcggggacgcggccgacgccgcctctccgctgcccggcggtcgcctgcacggcgtgcaccagcactaccagggcgccgggactgcagtcaacggaacggtgccgctgacccacatctgagcaccggcctgcgctcgtccacccttgttccccacccccacccccactcccgccccgcacccccaagttgggacgccttgtttagctttgcttgcctgggactgttgccttgtaccgatgatggggagggctgaaagttttgctgtagctgtcgggttttgtacaaaagcaaaaataagtcaggagcagcgaaaatgggacttctagagagctctcttgccccac

SEQ ID NO: 385129 - DNA, 1566 bp, Homo sapiens
atgcgacctgttcgagagaactcatcaggtgcgagaagcccgcgggttcctgctgatttggcgcggagcattttgataagcctacccttcccgccggactcgctggcccacaggcccccaagctccgctccgacggagtcccagggccttttcaccgtggccgctccagccccgggagcgccttctcctcccgccacgctggcgcaccttcttcccgccccggcaatgtacagccttctggagactgaactcaagaaccccgtagggacacccacacaagcggcgggcaccggcggccccgcagccccgggaggcgcaggcaagagtagtgcgaacgcagccggcggcgcgaactcgggcggcggcagcagcggtggtgcgagcggaggtggcgggggtacagaccaggaccgtgtgaaacggcccatgaacgccttcatggtatggtcccgcgggcagcggcgcaaaatggccctggagaaccccaagatgcacaattctgagatcagcaagcgcttgggcgccgactggaaactgctgaccgacgccgagaagcgaccattcatcgacgaggccaagcgacttcgcgccgtgcacatgaaggagtatccggactacaagtaccgaccgcgccgcaagaccaagacgctgctcaagaaagataagtactccctgcccagcggcctcctgcctcccggtgccgcggccgccgccgccgctgccgcggccgcagccgctgccgccagcagtccggtgggcgtgggccagcgcctggacacgtacacgcacgtgaacggctgggccaacggcgcgtactcgctggtgcaggagcagctgggctacgcgcagcccccgagcatgagcagcccgccgccgccgcccgcgctgccgccgatgcaccgctacgacatggccggcctgcagtacagcccaatgatgccgcccggcgctcagagctacatgaacgtcgctgccgcggccgccgccgcctcgggctacgggggcatggcgccctcagccacagcagccgcggccgccgcctacgggcagcagcccgccaccgccgcggccgcagctgcggccgcagccgccatgagcctgggccccatgggctcggtagtgaagtctgagcccagctcgccgccgcccgccatcgcatcgcactctcagcgcgcgtgcctcggcgacctgcgcgacatgatcagcatgtacctgccacccggcggggacgcggccgacgccgcctctccgctgcccggcggtcgcctgcacggcgtgcaccagcactaccagggcgccgggactgcagtcaacggaacggtgccgctgacccacatctgagcaccggcctgcgctcgtccacccttgttccccacccccacccccactcccgccccgcacccccaagttgggacgccttgtttagctttgcttgcctgggactgttgccttgtaccgatgatggggagggctgaaagttttgctgtagctgtcgggttttgtacaaaagcaaaaataagtcaggagcagcgaaaatgggacttctagagagctctcttgccccac

SEQ ID NO: 385130 - DNA, 353 bp, Homo sapiens
aataaaaaattcatgtactctgaatcctttagtttcctcagaaggccatgaagccccagacaagccagaagcaattattcccattttaaggacattcgagcctgcatacaattgtaatacaaaccaagcaaagctctttcagaaggcacaactctacttcatgatccatgaaaaactggttttaatatttgcatgcatcttcttcctatgaaggtctgtttgaactggatatttctatagcatgcacaaatgatagattgttatgatcaattaatattcaaaatttcccccagagagagagagagaatgagaggtagaatcactcacaggtacagaaagaactaccattataa

SEQ ID NO: 385131 - DNA, 742 bp, Homo sapiens
cacatatgttaaacaaaaacactaatgctttctatgaacaccccattctctggtgctttatcagacttgccaactcattaattagagctattgaaaagaattccgtctatagacctcatgggcagagattacaatgcttggtttccccattgatttttcatcaatcggactaacagtagcaaatcattgagagtcagagttggggtaaagattccagggaaagcgaacatttgtaaattgtgttcctttgggaaaaataataataacgataattaaaatagtaaccaacttttgaacacttactatgcaccaggtgccatgtttcatttatgttatctcatttaatattcacaacaagccttgcagtagttacaataatcggttcacttctaaaaatgagaatccaaggttcccagaggcaacgtgaacttttgggtctaatctttgtttaaagtcacactgctagtaagtggggaacctggaattcaaacttaggtctgtgtgctccagagtccatttgtaatcaatataactactagcctccagtaatgtcaaatgtatgagaaaaataaagattactcataacattttcaggatattccccaccaccacacacacacctttaaaactagcaatgctgacccacattcattaggatggtaagcattattagggacatacaggtttcacacttaccatttaaaaagctaaatgaagtgcccaaaatataaaatggccatcc

SEQ ID NO: 385132 - DNA, 1562 bp, Homo sapiens
cccccccccccaccctagcgctacggtcgaggctgcgctggttactcgcccgcaggcgcggagcgcgcagcgggggctgcagattctttccaccatggccagacgcccccggaacagcagggcctggcacttcgtcctgagtgcagcccgccgagacgcagatgcccgggccgtggctctagcaggctccactaactggggctacgactctgatgggcagcacagcgactcggactccgaccccgagtactccacgctgccgccatccatccccagtgcggtgcccgtgaccggcgagtccttctgtgactgtgctgggcagagcgaggcctccttctgtagcagcctgcactcggcccaccggggcagggactgccgctgcggagaggaagacgagtatttcgactgggtctgggatgacttaaataagtcatcagccaccctgctgagctgtgacaaccgtaaggtcagcttccacatggagtacagctgcggcacagcggccatccggggcaccaaggagctgggggagggccagcacttctgggagatcaagatgacctctcccgtctacggcaccgacatgatggtgggcatcgggacgtcggatgtggacctggacaaataccgccacacgttctgcagcctgctgggcagggatgaggacagctggggcctctcctacacgggcctcctccaccacaagggcgacaagaccagcttctcgtcgcggttcggccagggctccatcattggcgtgcacctggacacctggcacggcacactcacctttttcaagaacaggaagtgtataggtgtggcagccaccaagctgcagaacaagagattctacccgatggtgtgctccacggcggcccggagcagcatgaaggtcacccgctcctgtgccagcgccacttccctccagtacctgtgctgccaccgcctgcgccagctgcggccagactcgggagacacgctggagggtctgccgctgccgccgggcctcaagcaggtgctacacaacaagctgggctgggtcctgagcatgagttgcagccgccgcaaggctccagtgtccgatccccaggcagcgacctccgcccaccccagcagtcgcgagcctcggccctgccagaggaagcgctgccgccggacctgactgacttcccagtggaactgccttcttgggctgggacagcccctttcctctgtcccttctttctctgtcccttccttccagccacactccagggcggagttggatgaggcccgtccggagggagccatctcttgctcccgaggctgggacagtcctttctgtgggggctctagggcccctctgctgctgtgctgggtggggaagcggctgccctgagccccaggtcttgtgggaggctgcgaggacgagagcctggctggagcccgcgttgctgttcccacagggcctcggtttttcctaacttgctctgcatgctgtcagcggctgccccgccgtcatagacttaaaggactgcaataaatgtagagttgatgtctaacacccaaatgacgtgagctga

SEQ ID NO: 385133 - DNA, 787 bp, Homo sapiens
ggacgcgtgggtcgacccacgcgtcgagcagggcctggcacttcgtcctgagtgcagcccgccgagacgcagatgcccgggccgtggctctagcaggctccactaactggggctacgactctgatgggcagcacagcgactcggactccgaccccgagtactccacgctgccgccatccatccccagtgcggtgcccgtgaccggcgagtccttctgtgactgtgctgggcagagcgaggcctccttctgtagcagcctgcactcggcccaccggggcagggactgccgctgcggagaggaagacgagtatttcgactgggtctgggatgacttaaataagtcatcagccaccctgctgagctgtgacaaccgtaaggtcagcttccacatggagtacagctgcggcacagcggccatccggggcaccaaggagctgggggagggccagcacttctgggagatcaagatgacctctcccgtctacggcaccgacatgatggtgggcatcgggacgtcggatgtggacctggacaaataccgccacacgttctgcagcctgctgggcagggatgaggacagctggggcctctcctacacgggcctcctccaccacaagggcgacaagaccagcttctcgtcgcggttcggccagggctccatcattggcgtgcacctggacacctggcacggcacactcacctttttcaagaacaggaagtgtataggtgtggcagccaccaagctgcagacaagagattgaccgactgtctcctctcgccgcagcgg

SEQ ID NO: 385134 - DNA, 1669 bp, Homo sapiens
gggattgtttacgtctcgctccggggcggaaagtgggtcagggccgggccggcggagcgcgcagcgggggctgcagattctttccaccatggccagacgcccccggaacagcagggcctggcacttcgtcctgagtgcagcccgccgagacgcagatgcccgggccgtggctctagcaggctccactaactggggctacgactctgatgggcagcacagcgactcggactccgaccccgagtactccacgctgccgccatccatccccagtgcggtgcccgtgaccggcgagtccttctgtgactgtgctgggcagagcgaggcctccttctgtagcagcctgcactcggcccaccggggcagggactgccgctgcggagaggaagacgagtgtgagcgtggggcccagcccctgctgggactgcactgcgggcgggcctgggggtgggcagggcagagccccatggagctctcagggctgccccagcctgggcctctcttgcagatttcgactgggtctgggatgacttaaataagtcatcagccaccctgctgagctgtgacaaccgtaaggtcagcttccacatggagtacagctgcggcacagcggccatccggggcaccaaggagctgggggagggccagcacttctgggagatcaagatgacctctcccgtctacggcaccgacatgatggtgggcatcgggacgtcggatgtggacctggacaaataccgccacacgttctgcagcctgctgggcagggatgaggacagctggggcctctcctacacgggcctcctccaccacaagggcgacaagaccagcttctcgtcgcggttcggccagggctccatcattggcgtgcacctggacacctggcacggcacactcacctttttcaagaacaggaagtgtataggtgtggcagccaccaagctgcagaacaagagattctacccgatggtgtgctccacggcggcccggagcagcatgaaggtcacccgctcctgtgccagcgccacttccctccagtacctgtgctgccaccgcctgcgccagctgcggccagactcgggagacacgctggagggtctgccgctgccgccgggcctcaagcaggtgctacacaacaagctgggctgggtcctgagcatgagttgcagccgccgcaaggctccagtgtccgatccccaggcagcgacctccgcccaccccagcagtcgcgagcctcggccctgccagaggaagcgctgccgccggacctgactgacttcccagtggaactgccttcttgggctgggacagcccctttcctctgtcccttctttctctgtcccttccttccagccacactccagggcggagttggatgaggcccgtccggagggagccatctcttgctcccgaggctgggacagtcctttctgtgggggctctagggcccctctgctgctgtgctgggtggggaagcggctgccctgagccccaggtcttgtgggaggctgcgaggacgagagcctggctggagcccgcgttgctgttcccacagggcctcggtttttcctaacttgctctgcatgctgtcagcggctgccccgccgtcatagacttaaaggactgcaataaatgtagagttgatgtctaacacccaaatgacgtgagctga

SEQ ID NO: 385135 - DNA, 1530 bp, Homo sapiens
gggattgtttacgtctcgctccggggcggaaagtgggtcagggccgggccggcggagcgcgcagcgggggctgcagattctttccaccatggccagacgcccccggaacagcagggcctggcacttcgtcctgagtgcagcccgccgagacgcagatgcccgggccgtggctctagcaggctccactaactggggctacgactctgatgggcagcacagcgactcggactccgaccccgagtactccacgctgccgccatccatccccagtgcggtgcccgtgaccggcgagtccttctgtgactgtgctgggcagagcgaggcctccttctgtagcagcctgcactcggcccaccggggcagggactgccgctgcggagaggaagacgagtatttcgactgggtctgggatgacttaaataagtcatcagccaccctgctgagctgtgacaaccgtaaggtcagcttccacatggagtacagctgcggcacagcggccatccggggcaccaaggagctgggggagggccagcacttctgggagatcaagatgacctctcccgtctacggcaccgacatgatggtgggcatcgggacgtcggatgtggacctggacaaataccgccacacgttctgcagcctgctgggcagggatgaggacagctggggcctctcctacacgggcctcctccaccacaagggcgacaagaccagcttctcgtcgcggttcggccagggctccatcattggcgtgcacctggacacctggcacggcacactcacctttttcaagaacaggaagtgtataggtgtggcagccaccaagctgcagaacaagagattctacccgatggtgtgctccacggcggcccggagcagcatgaaggtcacccgctcctgtgccagcgccacttccctccagtacctgtgctgccaccgcctgcgccagctgcggccagactcgggagacacgctggagggtctgccgctgccgccgggcctcaagcaggtgctacacaacaagctgggctgggtcctgagcatgagttgcagccgccgcaaggctccagtgtccgatccccaggcagcgacctccgcccaccccagcagtcgcgagcctcggccctgccagaggaagcgctgccgccggacctgactgacttcccagtggaactgccttcttgggctgggacagcccctttcctctgtcccttctttctctgtcccttccttccagccacactccagggcggagttggatgaggcccgtccggagggagccatctcttgctcccgaggctgggacagtcctttctgtgggggctctagggcccctctgctgctgtgctgggtggggaagcggctgccctgagccccaggtcttgtgggaggctgcgaggacgagagcctggctggagcccgcgttgctgttcccacagggcctcggtttttcctaacttgctctgcatgctcatacgcgatcctctctgctaacatgctgccctcacgtagttatctcgatgtcatgtg

SEQ ID NO: 385136 - DNA, 2405 bp, Homo sapiens
gggattgtttacgtctcgctccggggcggaaagtgggtcagggccgggccggcggagcgcgcagcgggggctgcaggtgagtggcggggcacgggccgacgtctcgggctctgggcgggcgcgctgaccttgcgggcgcggcggtagcagcgcggccagggcgccgcctttgttcctctccggagggccgcgcccgagagaggcttccccggtgccgccgactccggaacccgcgcgcccgcgggagggaacagccaggccgggctgccgccggggagggcggctcccgctgcacacgcgctcgcctggggctgggcagggttcggcggtccgggcgccgcgatccgccccggcctccctggaaccccacccggggcccagcgggcgttgccagccgcgagcccggcgcaggggtcggccctggaaggctaggcgggaaccccggagctggcgagggaggtgccaggcaggtggcctgggaagcgcagacctggccctcgcagccttttgcattttataccataacagcggccagcgctgagcaggttttaagatttgtgtttcacgaggagccctggcggtagcgagcggaggggaaggcgagctgcgcggcccaggagacggtggcgggaggaggatgcaggcgggtgcggcggtcgggccgggggtgaggggaaggtgtcggggagcggtcacggtgcttctggcatgaggaactgggaggccggagatgccatttgtcaaaccggacgacagaggaggagcgagtggaggttttagatgcctgcgggacaggcgggcggggcagccagattctttccaccatggccagacgcccccggaacagcagggcctggcacttcgtcctgagtgcagcccgccgagacgcagatgcccgggccgtggctctagcaggctccactaactggggctacgactctgatgggcagcacagcgactcggactccgaccccgagtactccacgctgccgccatccatccccagtgcggtgcccgtgaccggcgagtccttctgtgactgtgctgggcagagcgaggcctccttctgtagcagcctgcactcggcccaccggggcagggactgccgctgcggagaggaagacgagtgtgagcgtggggcccagcccctgctgggactgcactgcgggcgggcctgggggtgggcagggcagagccccatggagctctcagggctgccccagcctgggcctctcttgcagatttcgactgggtctgggatgacttaaataagtcatcagccaccctgctgagctgtgacaaccgtaaggtcagcttccacatggagtacagctgcggcacagcggccatccggggcaccaaggagctgggggagggccagcacttctgggagatcaagatgacctctcccgtctacggcaccgacatgatggtgggcatcgggacgtcggatgtggacctggacaaataccgccacacgttctgcagcctgctgggcagggatgaggacagctggggcctctcctacacgggcctcctccaccacaagggcgacaagaccagcttctcgtcgcggttcggccagggctccatcattggcgtgcacctggacacctggcacggcacactcacctttttcaagaacaggaagtgtataggtgtggcagccaccaagctgcagaacaagagattctacccgatggtgtgctccacggcggcccggagcagcatgaaggtcacccgctcctgtgccagcgccacttccctccagtacctgtgctgccaccgcctgcgccagctgcggccagactcgggagacacgctggagggtctgccgctgccgccgggcctcaagcaggtgctacacaacaagctgggctgggtcctgagcatgagttgcagccgccgcaaggctccagtgtccgatccccaggcagcgacctccgcccaccccagcagtcgcgagcctcggccctgccagaggaagcgctgccgccggacctgactgacttcccagtggaactgccttcttgggctgggacagcccctttcctctgtcccttctttctctgtcccttccttccagccacactccagggcggagttggatgaggcccgtccggagggagccatctcttgctcccgaggctgggacagtcctttctgtgggggctctagggcccctctgctgctgtgctgggtggggaagcggctgccctgagccccaggtcttgtgggaggctgcgaggacgagagcctggctggagcccgcgttgctgttcccacagggcctcggtttttcctaacttgctctgcatgctgtcagcggctgccccgccgtcatagacttaaaggactgcaataaatgtagagttgatgtctaacacccaaatgacgtgagctga

SEQ ID NO: 385137 - DNA, 1754 bp, Homo sapiens
gggattgtttacgtctcgctccggggcggaaagtgggtcagggccgggccggcggagcgcgcagcgggggctgcagattctttccaccatggccagacgcccccggaacagcagggcctggcacttcgtcctgagtgcagcccgccgagacgcagatgcccgggccgtggctctagcaggctccactaactggggctacgactctgatgggcagcacagcgactcggactccgaccccgagtactccacgctgccgccatccatccccagtgcggtgcccgtgaccggcgagtccttctgtgactgtgctgggcagagcgaggcctccttctgtagcagcctgcactcggcccaccggggcagggactgccgctgcggagaggaagacgagtgtgagcgtggggcccagcccctgctgggactgcactgcgggcgggcctgggggtgggcagggcagagccccatggagctctcagggctgccccagcctgggcctctcttgcagatttcgactgggtctgggatgacttaaataagtcatcagccaccctgctgagctgtgacaaccgtaaggtcagcttccacatggagtacagctgcggcacagcggccatccggggcaccaaggagctgggggagggccagcacttctgggagatcaagatgacctctcccgtctacggcaccgacatggtaagttgcttcggcccagggtgcttctggggaacctggctccggcagcccagccccgcgccctctgcctggcccctgttcctagatggtgggcatcgggacgtcggatgtggacctggacaaataccgccacacgttctgcagcctgctgggcagggatgaggacagctggggcctctcctacacgggcctcctccaccacaagggcgacaagaccagcttctcgtcgcggttcggccagggctccatcattggcgtgcacctggacacctggcacggcacactcacctttttcaagaacaggaagtgtataggtgtggcagccaccaagctgcagaacaagagattctacccgatggtgtgctccacggcggcccggagcagcatgaaggtcacccgctcctgtgccagcgccacttccctccagtacctgtgctgccaccgcctgcgccagctgcggccagactcgggagacacgctggagggtctgccgctgccgccgggcctcaagcaggtgctacacaacaagctgggctgggtcctgagcatgagttgcagccgccgcaaggctccagtgtccgatccccaggcagcgacctccgcccaccccagcagtcgcgagcctcggccctgccagaggaagcgctgccgccggacctgactgacttcccagtggaactgccttcttgggctgggacagcccctttcctctgtcccttctttctctgtcccttccttccagccacactccagggcggagttggatgaggcccgtccggagggagccatctcttgctcccgaggctgggacagtcctttctgtgggggctctagggcccctctgctgctgtgctgggtggggaagcggctgccctgagccccaggtcttgtgggaggctgcgaggacgagagcctggctggagcccgcgttgctgttcccacagggcctcggtttttcctaacttgctctgcatgctgtcagcggctgccccgccgtcatagacttaaaggactgcaataaatgtagagttgatgtctaacacccaaatgacgtgagctga

SEQ ID NO: 385138 - DNA, 1629 bp, Homo sapiens
gggattgtttacgtctcgctccggggcggaaagtgggtcagggccgggccggcggagcgcgcagcgggggctgcagattctttccaccatggccagacgcccccggaacagcagggcctggcacttcgtcctgagtgcagcccgccgagacgcagatgcccgggccgtggctctagcaggctccactaactggggctacgactctgatgggcagcacagcgactcggactccgaccccgagtactccacgctgccgccatccatccccagtgcggtgcccgtgaccggcgagtccttctgtgactgtgctgggcagagcgaggcctccttctgtagcagcctgcactcggcccaccggggcagggactgccgctgcggagaggaagacgagtatttcgactgggtctgggatgacttaaataagtcatcagccaccctgctgagctgtgacaaccgtaaggtcagcttccacatggagtacagctgcggcacagcggccatccggggcaccaaggagctgggggagggccagcacttctgggagatcaagatgacctctcccgtctacggcaccgacatgatggtgggcatcgggacgtcggatgtggacctggacaaataccgccacacgttctgcagcctgctgggcagggatgaggacagctggggcctctcctacacgggtgcgtgaggcccagggtggggcggggccgagcctggagctcccgggctcactgcgaccctggctgcccccaggcctcctccaccacaagggcgacaagaccagcttctcgtcgcggttcggccagggctccatcattggcgtgcacctggacacctggcacggcacactcacctttttcaagaacaggaagtgtataggtgtggcagccaccaagctgcagaacaagagattctacccgatggtgtgctccacggcggcccggagcagcatgaaggtcacccgctcctgtgccagcgccacttccctccagtacctgtgctgccaccgcctgcgccagctgcggccagactcgggagacacgctggagggtctgccgctgccgccgggcctcaagcaggtgctacacaacaagctgggctgggtcctgagcatgagttgcagccgccgcaaggctccagtgtccgatccccaggcagcgacctccgcccaccccagcagtcgcgagcctcggccctgccagaggaagcgctgccgccggacctgactgacttcccagtggaactgccttcttgggctgggacagcccctttcctctgtcccttctttctctgtcccttccttccagccacactccagggcggagttggatgaggcccgtccggagggagccatctcttgctcccgaggctgggacagtcctttctgtgggggctctagggcccctctgctgctgtgctgggtggggaagcggctgccctgagccccaggtcttgtgggaggctgcgaggacgagagcctggctggagcccgcgttgctgttcccacagggcctcggtttttcctaacttgctctgcatgctgtcagcggctgccccgccgtcatagacttaaaggactgcaataaatgtagagttgatgtctaacacccaaatgacgtgagctga

SEQ ID NO: 385139 - DNA, 1029 bp, Homo sapiens
gggattgtttacgtctcgctccggggcggaaagtgggtcagggccgggccggcggagcgcgcagcgggggctgcagattctttccaccatggccagacgcccccggaacagcagggcctggcacttcgtcctgagtgcagcccgccgagacgcagatgcccgggccgtggctctagcaggctccactaactggggctacgactctgatgggcagcacagcgactcggactccgaccccgagtactccacgctgccgccatccatccccagtgcggtgcccgtgaccggcgagtccttctgtgactgtgctgggcagagcgaggcctccttctgtagcagcctgcactcggcccaccggggcagggactgccgctgcggagaggaagacgagtatttcgactgggtctgggatgacttaaataagtcatcagccaccctgctgagctgtgacaaccgtaaggtcagcttccacatggagtacagctgcggcacagcggccatccggggcaccaaggagctgggggagggccagcacttctgggagatcaagatgacctctcccgtctacggcaccgacatgatggtgggcatcgggacgtcggatgtggacctggacaaataccgccacacgttctgcagcctgctgggcagggatgaggacagctggggcctctcctacacgggcctcctccaccacaagggcgacaagaccagcttctcgtcgcggttcggccagggctccatcattggcgtgcacctggacacctggcacggcacactcacctttttcaagaacaggaagtgtataggtgtggcagccaccaagctgcagaacaagagattctaccccaggtcttgtgggaggctgcgaggacgagagcctggctggagcccgcgttgctgttcccacagggcctcggtttttcctaacttgctctgcatgctgtcagcggctgccccgccgtcatagacttaaaggactgcaataaatgtagagttgatgtctaacacccaaatgacgtgagctga

SEQ ID NO: 385140 - DNA, 1163 bp, Homo sapiens
gttttttttttctgggtggcgtttcacaggatctacctgggttttattgagctgctcagatcctggggtgaggtacgggctcctgaagcgttctggagccctggctgggcaccggtgcggcccctgcagtccccactttgagtgggtccgtggcccagcctggaagctcagggctgggagtgctgtgagtcttcctttgcccagagcctgtgttttcttctagattctttccaccatggccagacgcccccggaacagcagggcctggcacttcgtcctgagtgcagcccgccgagacgcagatgcccgggccgtggctctagcaggctccactaactggggctacgactctgatgggcaggtaggttccagcgggcgaggcggacgtggctggcctaaggtgtggagatgccctaggcaggcaggcagacattacctgaacacggaatcagtcggagaaaaagatgcttctgaggctagaggaccagtccaaacctgggcctgtctcctggatgcaccgcattcagtaagactctttaatttggcaaaggacacacacagcctcaggggtgacaggacctcagaacacactgcattcttcactgtgctttctcctctgaaacacatggtgcatggagaggttggcagttgcttttggttcattcaacagaaattctccactacggggctgggcactgtggctcacacctataatcctagcactttgggaggctgaagctggaggaccacttgagcccaggagtttgagacctgcctgggcaacatggtgaaacactgtctctacaaaaatttaaaaaatgtgtcaggcgtggtggcacgtgcctgtagtcccaacgactcaggaggctgagctgggaggattgcttgagccagggaggtcaaggctgcagtgagccgtgatcacaccagtgcgttccagcctgggtgacagagctagaccctgactcaaaaaaaacaaaaacaaaaaaattctttggtttacccagcccatttctgtttgtttgttttttaacacacatatatgtgaacaaagagtatgcgtttgtactggcagaagaagcgtctggtaagacaaccagcaagttaacaatggtcacctccagaaatgggctgggtaaaacaaaaaaattctttggtttacc

SEQ ID NO: 385141 - DNA, 127 bp, Homo sapiens
cgacaagaccagcttctcgtcgcggttcggccagggctccatcattggcgtgcacctggacacctggcacggcacactcacctttttcaagaacaggaagtgtataggtgaggccgtcacaggactt

SEQ ID NO: 385142 - DNA, 741 bp, Homo sapiens
ggtgacaggacctcagaacacactgcattcttcactgtgctttctcctctgaaacacatggtgcatggagaggttggcagttgcttttggttcattcaacagaaattctccactacggggctgggcactgtggctcacacctataatcctagcactttgggaggctgaagctggaggaccacttgagcccaggagtttgagacctgcctgggcaacatggtgaaacactgtctctacaaaaatttaaaaaatgtgtcaggcgtggtggcacgtgcctgtagtcccaacgactcaggaggctgagctgggaggattgcttgagccagggaggtcaaggctgcagtgagccgtgatcacaccagtgcgttccagcctgggtgacagagctagaccctgactcaaaaaaaacaaaaacaaaaaaattctttggtttacccagcccatttctggaggtgaccattgttaacttgctggttgtcttaccagacgcttcttctgccagtacaaacgcatactctttgttcacatatgtgtgtgttaaaaaacaaacaaacagaaaaaccctgatccttgaaggtaaaaatttctgcacttgctcagcgaggccaggaacctgaaggtattcagaacagctcaggtgtttgtctgtctgcagcccaggtgatctgacatgcttgtgggctttgcaggcagagctacctgcccccatggcccttgacccccaccttggcagaccctgag

SEQ ID NO: 385143 - DNA, 961 bp, Homo sapiens
gttttttttttctgggtggcgtttcacaggatctacctgggttttattgagctgctcagatcctggggtgaggtacgggctcctgaagcgttctggagccctggctgggcaccggtgcggcccctgcagtccccactttgagtgggtccgtggcccagcctggaagctcagggctgggagtgctgtgagtcttcctttgcccagagcctgtgttttcttctagattctttccaccatggccagacgcccccggaacagcagggcctggcacttcgtcctgagtgcagcccgccgagacgcagatgcccgggccgtggctctagcaggctccactaactggggctacgactctgatgggcagcacagcgactcggactccgaccccgagtactccacgctgccgccatccatccccagtgcggtgcccgtgaccggcgagtccttctgtgactgtgctgggcagagcgaggcctccttctgtagcagcctgcactcggcccaccggggcagggactgccgctgcggagaggaagacgagtatttcgactgggtctgggatgacttaaataagtcatcagccaccctgctgagctgtgacaaccgtaaggtcagcttccacatggagtacagctgcggcacagcggccatccggggcaccaaggagctgggggagggccagcacttctgggagatcaagatgacctctcccgtctacggcaccgacatggtaagttgcttcggcccagggtgcttctggggaacctggctccggcagcccagccccgcgccctctgcctggcccctgttcctagatggtgggcatcgggacgtcggatgtggacctggacaaataccgccacacgttctgcagcctgctgggcagggatgaggacagctggggcctctcctacacgggcctctcaacaaaagggaaagacagttctcgtcggggtcggcaggc

SEQ ID NO: 385144 - DNA, 1556 bp, Homo sapiens
gggattgtttacgtctcgctccggggcggaaagtgggtcagggccgggccggcggagcgcgcagcgggggctgcagattctttccaccatggccagacgcccccggaacagcagggcctggcacttcgtcctgagtgcagcccgccgagacgcagatgcccgggccgtggctctagcaggctccactaactggggctacgactctgatgggcagcacagcgactcggactccgaccccgagtactccacgctgccgccatccatccccagtgcggtgcccgtgaccggcgagtccttctgtgactgtgctgggcagagcgaggcctccttctgtagcagcctgcactcggcccaccggggcagggactgccgctgcggagaggaagacgagtatttcgactgggtctgggatgacttaaataagtcatcagccaccctgctgagctgtgacaaccgtaaggtcagcttccacatggagtacagctgcggcacagcggccatccggggcaccaaggagctgggggagggccagcacttctgggagatcaagatgacctctcccgtctacggcaccgacatgatggtgggcatcgggacgtcggatgtggacctggacaaataccgccacacgttctgcagcctgctgggcagggatgaggacagctggggcctctcctacacgggcctcctccaccacaagggcgacaagaccagcttctcgtcgcggttcggccagggctccatcattggcgtgcacctggacacctggcacggcacactcacctttttcaagaacaggaagtgtataggtgtggcagccaccaagctgcagaacaagagattctacccgatggtgtgctccacggcggcccggagcagcatgaaggtcacccgctcctgtgccagcgccacttccctccagtacctgtgctgccaccgcctgcgccagctgcggccagactcgggagacacgctggagggtctgccgctgccgccgggcctcaagcaggtgctacacaacaagctgggctgggtcctgagcatgagttgcagccgccgcaaggctccagtgtccgatccccaggcagcgacctccgcccaccccagcagtcgcgagcctcggccctgccagaggaagcgctgccgccggacctgactgacttcccagtggaactgccttcttgggctgggacagcccctttcctctgtcccttctttctctgtcccttccttccagccacactccagggcggagttggatgaggcccgtccggagggagccatctcttgctcccgaggctgggacagtcctttctgtgggggctctagggcccctctgctgctgtgctgggtggggaagcggctgccctgagccccaggtcttgtgggaggctgcgaggacgagagcctggctggagcccgcgttgctgttcccacagggcctcggtttttcctaacttgctctgcatgctgtcagcggctgccccgccgtcatagacttaaaggactgcaataaatgtagagttgatgtctaacacccaaatgacgtgagctga

SEQ ID NO: 385145 - DNA, 2292 bp, Homo sapiens
gggattgtttacgtctcgctccggggcggaaagtgggtcagggccgggccggcggagcgcgcagcgggggctgcaggtgagtggcggggcacgggccgacgtctcgggctctgggcgggcgcgctgaccttgcgggcgcggcggtagcagcgcggccagggcgccgcctttgttcctctccggagggccgcgcccgagagaggcttccccggtgccgccgactccggaacccgcgcgcccgcgggagggaacagccaggccgggctgccgccggggagggcggctcccgctgcacacgcgctcgcctggggctgggcagggttcggcggtccgggcgccgcgatccgccccggcctccctggaaccccacccggggcccagcgggcgttgccagccgcgagcccggcgcaggggtcggccctggaaggctaggcgggaaccccggagctggcgagggaggtgccaggcaggtggcctgggaagcgcagacctggccctcgcagccttttgcattttataccataacagcggccagcgctgagcaggttttaagatttgtgtttcacgaggagccctggcggtagcgagcggaggggaaggcgagctgcgcggcccaggagacggtggcgggaggaggatgcaggcgggtgcggcggtcgggccgggggtgaggggaaggtgtcggggagcggtcacggtgcttctggcatgaggaactgggaggccggagatgccatttgtcaaaccggacgacagaggaggagcgagtggaggttttagatgcctgcgggacaggcgggcggggcagccagattctttccaccatggccagacgcccccggaacagcagggcctggcacttcgtcctgagtgcagcccgccgagacgcagatgcccgggccgtggctctagcaggctccactaactggggctacgactctgatgggcagcacagcgactcggactccgaccccgagtactccacgctgccgccatccatccccagtgcggtgcccgtgaccggcgagtccttctgtgactgtgctgggcagagcgaggcctccttctgtagcagcctgcactcggcccaccggggcagggactgccgctgcggagaggaagacgagtatttcgactgggtctgggatgacttaaataagtcatcagccaccctgctgagctgtgacaaccgtaaggtcagcttccacatggagtacagctgcggcacagcggccatccggggcaccaaggagctgggggagggccagcacttctgggagatcaagatgacctctcccgtctacggcaccgacatgatggtgggcatcgggacgtcggatgtggacctggacaaataccgccacacgttctgcagcctgctgggcagggatgaggacagctggggcctctcctacacgggcctcctccaccacaagggcgacaagaccagcttctcgtcgcggttcggccagggctccatcattggcgtgcacctggacacctggcacggcacactcacctttttcaagaacaggaagtgtataggtgtggcagccaccaagctgcagaacaagagattctacccgatggtgtgctccacggcggcccggagcagcatgaaggtcacccgctcctgtgccagcgccacttccctccagtacctgtgctgccaccgcctgcgccagctgcggccagactcgggagacacgctggagggtctgccgctgccgccgggcctcaagcaggtgctacacaacaagctgggctgggtcctgagcatgagttgcagccgccgcaaggctccagtgtccgatccccaggcagcgacctccgcccaccccagcagtcgcgagcctcggccctgccagaggaagcgctgccgccggacctgactgacttcccagtggaactgccttcttgggctgggacagcccctttcctctgtcccttctttctctgtcccttccttccagccacactccagggcggagttggatgaggcccgtccggagggagccatctcttgctcccgaggctgggacagtcctttctgtgggggctctagggcccctctgctgctgtgctgggtggggaagcggctgccctgagccccaggtcttgtgggaggctgcgaggacgagagcctggctggagcccgcgttgctgttcccacagggcctcggtttttcctaacttgctctgcatgctgtcagcggctgccccgccgtcatagacttaaaggactgcaataaatgtagagttgatgtctaacacccaaatgacgtgagctga

SEQ ID NO: 385146 - DNA, 1703 bp, Homo sapiens
gttttttttttctgggtggcgtttcacaggatctacctgggttttattgagctgctcagatcctggggtgaggtacgggctcctgaagcgttctggagccctggctgggcaccggtgcggcccctgcagtccccactttgagtgggtccgtggcccagcctggaagctcagggctgggagtgctgtgagtcttcctttgcccagagcctgtgttttcttctagattctttccaccatggccagacgcccccggaacagcagggcctggcacttcgtcctgagtgcagcccgccgagacgcagatgcccgggccgtggctctagcaggctccactaactggggctacgactctgatgggcagcacagcgactcggactccgaccccgagtactccacgctgccgccatccatccccagtgcggtgcccgtgaccggcgagtccttctgtgactgtgctgggcagagcgaggcctccttctgtagcagcctgcactcggcccaccggggcagggactgccgctgcggagaggaagacgagtatttcgactgggtctgggatgacttaaataagtcatcagccaccctgctgagctgtgacaaccgtaaggtcagcttccacatggagtacagctgcggcacagcggccatccggggcaccaaggagctgggggagggccagcacttctgggagatcaagatgacctctcccgtctacggcaccgacatgatggtgggcatcgggacgtcggatgtggacctggacaaataccgccacacgttctgcagcctgctgggcagggatgaggacagctggggcctctcctacacgggcctcctccaccacaagggcgacaagaccagcttctcgtcgcggttcggccagggctccatcattggcgtgcacctggacacctggcacggcacactcacctttttcaagaacaggaagtgtataggtgtggcagccaccaagctgcagaacaagagattctacccgatggtgtgctccacggcggcccggagcagcatgaaggtcacccgctcctgtgccagcgccacttccctccagtacctgtgctgccaccgcctgcgccagctgcggccagactcgggagacacgctggagggtctgccgctgccgccgggcctcaagcaggtgctacacaacaagctgggctgggtcctgagcatgagttgcagccgccgcaaggctccagtgtccgatccccaggcagcgacctccgcccaccccagcagtcgcgagcctcggccctgccagaggaagcgctgccgccggacctgactgacttcccagtggaactgccttcttgggctgggacagcccctttcctctgtcccttctttctctgtcccttccttccagccacactccagggcggagttggatgaggcccgtccggagggagccatctcttgctcccgaggctgggacagtcctttctgtgggggctctagggcccctctgctgctgtgctgggtggggaagcggctgccctgagccccaggtcttgtgggaggctgcgaggacgagagcctggctggagcccgcgttgctgttcccacagggcctcggtttttcctaacttgctctgcatgctgtcagcggctgccccgccgtcatagacttaaaggactgcaataaatgtagagttgatgtctaacacccaaatgacgtgagctga

SEQ ID NO: 385147 - DNA, 1413 bp, Homo sapiens
gggattgtttacgtctcgctccggggcggaaagtgggtcagggccgggccggcggagcgcgcagcgggggctgcagattctttccaccatggccagacgcccccggaacagcagggcctggcacttcgtcctgagtgcagcccgccgagacgcagatgcccgggccgtggctctagcaggctccactaactggggctacgactctgatgggcagcacagcgactcggactccgaccccgagtactccacgctgccgccatccatccccagtgcggtgcccgtgaccggcgagtccttctgtgactgtgctgggcagagcgaggcctccttctgtagcagcctgcactcggcccaccggggcagggactgccgctgcggagaggaagacgagtatttcgactgggtctgggatgacttaaataagtcatcagccaccctgctgagctgtgacaaccgtaaggtcagcttccacatggagtacagctgcggcacagcggccatccggggcaccaaggagctgggggagggccagcacttctgggagatcaagatgacctctcccgtctacggcaccgacatgatggtgggcatcgggacgtcggatgtggacctggacaaataccgccacacgttctgcagcctgctgggcagggatgaggacagctggggcctctcctacacgggcctcctccaccacaagggcgacaagaccagcttctcgtcgcggttcggccagggctccatcattggcgtgcacctggacacctggcacggcacactcacctttttcaagaacaggaagtgtataggtgtggcagccaccaagctgcagaacaagagattctacccgatggtgtgctccacggcggcccggagcagcatgaaggtcacccgctcctgtgccagcgccacttccctccagtacctgtgctgccaccgcctgcgccagctgcggccagactcgggagacacgctggagggtctgccgctgccgccgggcctcaagcaggtgctacacaacaagctgggctgggtcctgagcatgagttgcacccctttcctctgtcccttctttctctgtcccttccttccagccacactccagggcggagttggatgaggcccgtccggagggagccatctcttgctcccgaggctgggacagtcctttctgtgggggctctagggcccctctgctgctgtgctgggtggggaagcggctgccctgagccccaggtcttgtgggaggctgcgaggacgagagcctggctggagcccgcgttgctgttcccacagggcctcggtttttcctaacttgctctgcatgctgtcagcggctgccccgccgtcatagacttaaaggactgcaataaatgtagagttgatgtctaacacccaaatgacgtgagctga

SEQ ID NO: 385148 - DNA, 1577 bp, Homo sapiens
agcggggtgcagcgggggctgcagattctttccaccatggccagacgcccccggaacagcagggcctggcacttcgtcctgagtgcagcccgccgagacgcagatgcccgggccgtggctctagcaggctccactaactggggctacgactctgatgggcagcacagcgactcggactccgaccccgagtactccacgctgccgccatccatccccagtgcggtgcccgtgaccggcgagtccttctgtgactgtgctgggcagagcgaggcctccttctgtagcagcctgcactcggcccaccggggcagggactgccgctgcggagaggaagacgagtatttcgactgggtctgggatgacttaaataagtcatcagccaccctgctgagctgtgacaaccgtaaggtcagcttccacatggagtacagctgcggcacagcggccatccggggcaccaaggagctgggggagggccagcacttctgggagatcaagatgacctctcccgtctacggcaccgacatgatggtgggcatcgggacgtcggatgtggacctggacaaataccgccacacgttctgcagcctgctgggcagggatgaggacagctggggcctctcctacacgggtgcgtgaggcccagggtggggcggggccgagcctggagctcccgggctcactgcgaccctggctgcccccaggcctcctccaccacaagggcgacaagaccagcttctcgtcgcggttcggccagggctccatcattggcgtgcacctggacacctggcacggcacactcacctttttcaagaacaggaagtgtataggtgtggcagccaccaagctgcagaacaagagattctacccgatggtgtgctccacggcggcccggagcagcatgaaggtcacccgctcctgtgccagcgccacttccctccagtacctgtgctgccaccgcctgcgccagctgcggccagactcgggagacacgctggagggtctgccgctgccgccgggcctcaagcaggtgctacacaacaagctgggctgggtcctgagcatgagttgcagccgccgcaaggctccagtgtccgatccccaggcagcgacctccgcccaccccagcagtcgcgagcctcggccctgccagaggaagcgctgccgccggacctgactgacttcccagtggaactgccttcttgggctgggacagcccctttcctctgtcccttctttctctgtcccttccttccagccacactccagggcggagttggatgaggcccgtccggagggagccatctcttgctcccgaggctgggacagtcctttctgtgggggctctagggcccctctgctgctgtgctgggtggggaagcggctgccctgagccccaggtcttgtgggaggctgcgaggacgagagcctggctggagcccgcgttgctgttcccacagggcctcggtttttcctaacttgctctgcatgctgtcagcggctgccccgccgtcatagacttaaaggactgcaataaatgtagagttgatgtctaacacccaaatgacgtgagctga

SEQ ID NO: 385149 - DNA, 870 bp, Homo sapiens
gggattgtttacgtctcgctccggggcggaaagtgggtcagggccgggccggcggagcgcgcagcgggggctgcagattctttccaccatggccagacgcccccggaacagcagggcctggcacttcgtcctgagtgcagcccgccgagacgcagatgcccgggccgtggctctagcaggctccactaactggggctacgactctgatgggcagcacagcgactcggactccgaccccgagtactccacgctgccgccatccatccccagtgcggtgcccgtgaccggcgagtccttctgtgactgtgctgggcagagcgaggcctccttctgtagcagcctgcactcggcccaccggggcagggactgccgctgcggagaggaagacgagtatttcgactgggtctgggatgacttaaataagtcatcagccaccctgctgagctgtgacaaccgtaaggtcagcttccacatggagtacagctgcggcacagcggccatccggggcaccaaggagctgggggagggccagcacttctgggagatcaagatgacctctcccgtctacggcaccgacatgatggtgggcatcgggacgtcggatgtggacctggacaaataccgccacacgttctgcagcctgctgggcagggatgaggacagctggggcctctcctacacgggcctcctccaccacaagggcgacaagaccagcttctcgtcgcggttcggccagggctccatcattggcgtgcacctggacacctggcacggcacactcacctttttcaagaacaggaagtgtataggtgtggcagccaccaagctgcagacaagagattgaccgactgtctcctctcgccgcagcgg

SEQ ID NO: 385150 - DNA, 772 bp, Homo sapiens
gggattgtttacgtctcgctccggggcggaaagtgggtcagggccgggccggcggagcgcgcagcgggggctgcagattctttccaccatggccagacgcccccggaacagcagggcctggcacttcgtcctgagtgcagcccgccgagacgcagatgcccgggccgtggctctagcaggctccactaactggggctacgactctgatgggcagcacagcgactcggactccgaccccgagtactccacgctgccgccatccatccccagtgcggtgcccgtgaccggcgagtccttctgtgactgtgctgggcagagcgaggcctccttctgtagcagcctgcactcggcccaccggggcagggactgccgctgcggagaggaagacgagtgtgagcgtggggcccagcccctgctgggactgcactgcgggcgggcctgggggtgggcagggcagagccccatggagctctcagggctgccccagcctgggcctctcttgcagatttcgactgggtctgggatgacttaaataagtcatcagccaccctgctgagctgtgacaaccgtaaggtcagcttccacatggagtacagctgcggcacagcggccatccggggcaccaaggagctgggggagggccagcacttctgggagatcaagatgacctctcccgtctacggcaccgacatggtaagttgcttcggcccagggtgcttctggggaacctggctccggcagcccagcctcgtgggggatcctgctagagtcg

SEQ ID NO: 385151 - DNA, 869 bp, Homo sapiens
  misc_feature (1)..(1): n is a, c, g, or t
  misc_feature (5)..(6): n is a, c, g, or t
  misc_feature (9)..(9): n is a, c, g, or t
ngcannagnccagcggctgcggcggcggagctcctccgaggtccgggtcaccagtctctgctcttcccagcctctccggcgcgctccaagggcttcccgtcgggaccatgcgcggcagtgagctcccgctggtcctgctggcgctggtcctctgcctggcgccccgggggcgagcggtcccgctgcctgcgggcggagggaccgtgctgaccaagatgtacccgcgcggcaaccactgggcggtggggcacttaatggggaaaaagagcacaggggagtcttcttctgtttctgagagagggagcctgaagcagcagctgagagagtacatcaggtgggaagaagctgcaaggaatttgctgggtctcatagaagcaaaggagaacagaaaccaccagccacctcaacccaaggccctgggcaatcagcagccttcgtgggattcagaggatagcagcaacttcaaagatgtaggttcaaaaggcaaagttggtagactctctgctccaggttctcaacgtgaaggaaggaacccccagctgaaccagcaatgataatgatggcctctctcaaaagagaaaaacaaaacccctaagagactgcgttctgcaagcatcagttctacggatcatcaacaagatttccttgtgcaaaatatttgactattctgtatctttcatccttgactaaattcgtgattttcaagcagcatcttctggtttaaacttgtttgctgtgaacaattgtcgaaaagagtcttccaattaatgcttttttatatctaggctacctgttggttagattcaaggccccgagctgttaccattcacaataaaagcttaaacacattgtccaaagggaaaaatgtt

SEQ ID NO: 385152 - DNA, 1415 bp, Homo sapiens
tttccctacacattagctggccccttttatgaccaatgactcataaggcaagatgtgtggtggcatcttcggacaggcagcaggctttaatagggcagcctgggttggtggaggcaagcaaagctaattggcatgcgtgggaatcaaaccccaggccctgggctcattagcccatggtcaaaacaactgagccagaggaggtaataatttgcccaagaatatcagtagttcctttattagaagaaaatggctgatatggaagttggggaatctgaattgccagagaatcttgggaagagtaataagctcttagtctcaacaaaaagtgttttttcatctcagcgcgtaaagggtgctatatgggaacaaagaagtattttaaaattataactactcattctttctttagccttagttaatttgagcagaagccacaacaagcaaaccacaataaatttagaattggcagaaatccacattaactcctcttcccaagtttccacactactaccatttacagttgtaggtttgtaatgtataattatgtaatgcagaaactagctttgacttgtgtaacgatgcactgtcaaagtaagcaaagtaagaattgaaattccacattcccagaatttaacactcagctgctcctctagtaataagttcctggggataatacattaaccaacattggttgaaacatacctgagtaatcatatcaggatgcatgttaagctgataaaacaataagatcccaaaatgcagtagctcaaaaaaaagtagaagttaatttatctcctgggggacagctctggttctcaaattttacaggctcagaatcacctgcagggcttgtgaaagtacagattgctgcgctccgcccccagagtttctgatttagtaggtgttaggctgaaccaagaatttgcctttctaacaagctcccaagtgatgctgatgacttgtaggaatggatttacttctaggattagacttcagctcactctgtttgctgaactctttctaatatttcttaagttggtagactctctgctccaggttctcaacgtgaaggaaggaacccccagctgaaccagcaatgataatgatggcctctctcaaaagagaaaaacaaaacccctaagagactgcgttctgcaagcatcagttctacggatcatcaacaagatttccttgtgcaaaatatttgactattctgtatctttcatccttgactaaattcgtgattttcaagcagcatcttctggtttaaacttgtttgctgtgaacaattgtcgaaaagagtcttccaattaatgcttttttatatctaggctacctgttggttagattcaaggccccgagctgttaccattcacaataaaagcttaaacacattgtccaaagggaaaaatgtt

SEQ ID NO: 385153 - DNA, 630 bp, Homo sapiens
tgcggccgccaaccactgggcggtggggcacttaatggggaaaaagagcacaggggagtcttcttctgtttctgagagagggagcctgaagcagcagctgagagagtacatcaggtgggaagaagctgcaaggaatttgctgggtctcatagaagcaaaggagaacagaaaccaccagccacctcaacccaaggccctgggcaatcagcagccttcgtgggattcagaggatagcagcaacttcaaagatttggtagactctctgctccaggttctcaacgtgaaggaaggaacccccagctgaaccagcaatgataatgatggcctctctcaaaagagaaaaacaaaacccctaagagactgcgttctgcaagcatcagttctacggatcatcaacaagatttccttgtgcaaaatatttgactattctgtatctttcatccttgactaaattcgtgattttcaagcagcatcttctggtttaaacttgtttgctgtgaacaattgtcgaaaagagtcttccaattaatgcttttttatatctaggctacctgttggttagattcaaggccccgagctgttaccattcacaataaaagcttaaacacattgtccaaagggaaaaatgtt

SEQ ID NO: 385154 - DNA, 302 bp, Homo sapiens
caatgcagttttagagtgctcattctttcaacttatttgacaaatatttactgaatgtctgccataaggcagtaaaggcacagaatgactcaaagcctttttgcccttatggggtgtaatttctagtggtggagacagacaatgagcaagtaaacaatcaatcggctaatgataactactgtgaagaaaataaagcaggacaagggaatagagtatgccatcattaagactggttagggaaagcttctttgaagacatggcagctattgaaaacctgactgatacaaagaagcaagtcatgt

SEQ ID NO: 385155 - DNA, 263 bp, Homo sapiens
tgaggcaggaaaatcgcttgaacctgaaatgtggaggttgcagggagccaagactgcaccagtgcgctccaggtgatggagtgaggtaatattttagaaagattaaataactaatgaagaggcaggagaaagaatcggagataattcccatgtttctagaactagaataagtagattagtagtatcattacactgtaatataatgcagtacagggcagtagtttaaaatccatgtcctagaattagtttccatagtcacttgc

SEQ ID NO: 385156 - DNA, 534 bp, Homo sapiens
aagagttttatgcaaaaacttatacaaaaatttacactcttaccagcagaaagcctcagcgccactgagtgctgttgtattgttaatcttgattaatctggtatgtgaagaaggatgtttcaatgttttgtctgtgtctctctgattattttgcttgttgattggccagttgttaattctgtctttgtgagttgtctttttctcagtacttggcctatttgtctttgatttgaaaaagctctttatgttgtagtcattttaattcctgtcatatgttttgtaaacaatttttcgagttcataatttttcaatcttgtttgtattatattttgccacacaaaaattttaaatttgtatagtcaaatttatcagtctttttccttatgttggaccttctaatctcaaggtactaaatataatctagcatttttttaaacattaaaaatttttaatccatctataatttattttaggatagggagtgaggcaggggaaggtatctttttaaataaaaatcgttgctaaatggtaggc

SEQ ID NO: 385157 - DNA, 564 bp, Homo sapiens
ctcataagtttgttggtctcatatatgtcttctttagaaaagtgactattcatgccctttacctactttttaatgggattctttttttctcttataaacttgtttaagttccttatagaggctggatattaggcctttgtcagatgcgtagtttgcaaaaattttctcccattctggaggttgtctgtttactctgttgacagttttttttttgtttttttttttgctgtgcagaagctcttaagtgtaattagataccatttgtcaatttttgtttttatcatgattgtttttggtgtctttgtcattcaaaattgacatagaaaattctcacattgttgcagcattttaaaaaatctgttactaagtataatatacactaagaccctaatttggtttactaattttttttaaaggaaacacaccatatgttgataaaggtttatctaggcagttaagattatactaacttttattttttctttgtatcacctaaattttccacagtaaacaattttttataatctgctttttttaaaaaataaaacatagtaggaagtcatt

SEQ ID NO: 385158 - DNA, 279 bp, Homo sapiens
gttaacacagttcttttcatatatgcaacatgaggggatggaggaatgttagagccctgtgcttaagagactcccatgcttctctcaaatagaaaaacaatttataatttttattgacttactgagtgttttttttccttctttttgtctctttgaaagggagcaaaattagggccacgaagatcaagttaatgggagtattttcatagggagaggaaggctgcaatgccaggaaagctgtgacccttgacttgttgcatgctggagtaattcggttga

SEQ ID NO: 385159 - DNA, 524 bp, Homo sapiens
gagttttggggattatgacattttgacaatgtacaggataacatctcatgtccatctcaccaaggtccttcctgctctgcccttggtttcccctccattctcacctctcacttcccttccctgcccctttgcagactcaccacccctcatgccccagaacgcttttcaaaccctttagaaatgggctgttttctcttcaggaaggccttcccctgctgtacacctggcaacctccaagtcatcctacaaactctgatcaggtgacagccccaatcccctctctctaacctgcagccttggcggctccttctcctgaatgtgctcacagtaggttttataggccatcattgcagcaattgtgcataatggctagtttgtctgtgcttctctcctccacatttgcttacaagcacttcgacgcccagagcataaggtttcatctttgtacctgccagttatctaaactggggcctggtacacagtagccattcaaatgtttgttgcatgaataaatgaatgaagtc

SEQ ID NO: 385160 - DNA, 457 bp, Homo sapiens
acacccagctaattttcatatttttcagagagacggggtttcaccacattggccaggccgatctcaaactcctgacctcatgtgacccacattggcctggcaaagtgctgggattacaagcatgagccaccacactggcctagcttctttaatacaaggtatacagttatatttgtttcaatgtgcttatctacagattctctcatctgtgtcctttttattgttttttaattctcacctgatgtgtcctttctaagtcagtttaagtagattgatttttttcccccttcttatcatggattacagttttctgtttctctgcattcctaacattattttatttggggttagacattgagcattgtaacttattgggtgctggatttttttgcattttgtgttaaaattctttgagctttgttttggtatacaataaagttacttaaaaacaattttc

SEQ ID NO: 385161 - DNA, 466 bp, Homo sapiens
tgggcattctattctaaatgtggcttcctatactgattacatggagcaattagctgattaatcctctcctccatggagaggctgtgaaagcagaagaaacagcagcagttcacaagtttcatgagggcaaattagttcctctgtcccccagcataccagaaaaagcagcagttcctcaaaatgaagatctacattaatcagacacttctgtgacacaccactcctcagccaaatgttgaaaagctttgagtactctcaaggtacccctaaggagtgccttccctgcctaaaagagtgtcataaccacttaggggactttctttaaggatgagaacatttcaactggcagccaattatcaaggacatctagtacagcttgaagcagaacatatttgttttttgtgtttgtcttaaaaagacattcatcagccatcatgtcttttggttgcagaaaagcagagacctg

SEQ ID NO: 385162 - DNA, 968 bp, Homo sapiens
ctagtcagcacaggcaatggtagcaatcacaaatctcagtcaaaatatcgcagtgttggctgggtgcagtggtcacacctgtaatctcagcactttgggaggttgaggtagtgcggatcacctgaggttcaggagctcgagaccagcctggccaacatagcgaaaccccatctctgctaaaagtacaaaaattagccgggcatggtggcatgggtgtgtactcccagctacttgggaggctgatgcagcagaatcacctgaacctagaaggcagaggttgcaatgagcaaagatcataccactgcacccagccactgcctctacttttatacctatgtgtgttccttgccccccagtttattaatttatttggggactttctttagcatctgtcactctgctctaagatacagtagaacagcttttgtgagcctccaaatctcccatttaagaacagagtctccttctattctagtgatatttaaactcagaaatcataactggcctttagattgtcatgttctgtttacacagtgtatatgatgtatttttttttttttttttactcctttcaacagagctaaactcttcttgctcctttcaatgatgtagtgaagtaggattcattttctccagtttatggagagaggaaacaggctgatgagatgtaacttgtcagtggtcgtattagtaaatggagttgttgggacctgaacaaggtcttctgatgtaatccgtggttcttttgtagtctggaaagccgctgcctaaggaagaggtggcagtgctgattcaggtggtcctttgccattccaaaagaaagctggattgccttaccaaatctccaggtttttcgttatacctcttcactcaggctctgcccagaactcaaggtttgttttcatttttaaagcagttttttttttcatatttgaaatttacacttcctgtgtgtctgtgactagatt

SEQ ID NO: 385163 - DNA, 668 bp, Homo sapiens
  misc_feature (1)..(2): n is a, c, g, or t
nngggaagtcttttgagaatatttgttctcttattttttgtttgtttgttgctggcaaaaaaaaaagtaactttaaaaactcagaaaagccactgaactgtattttgtgaccttatgattagttttatctttcaactgatttttattgttacttttactcaatatcaacagtacttcaatagatatttattagttatgttcaatctaatgacttaaaacagttgaaaaggaggaaaatcaactccagtccacacatacagtcatgttacattaagatgtcatgttgtatgtcacacagtttctagattgatttctcttgtgtataagttataacatcaaaaatgccaaagggtatataaaataagctacaataatattcaacagaacttaacctggaccttatgttgtaataatttattcatattagctgtagtcttctgtatttatattttcagtatttattatgaatgacatggaaattcgtgtatttattgtggctttttattgcagtgtgtatatatatataacaaataagcatttttaagtcttatccttaagtttcttttattagtggcacttgtattatgctgtactttttattacatattgtacaatatcttgtccatttgtttgcagcagagtaaaaccggtttctaagttgtaactac

SEQ ID NO: 385164 - DNA, 275 bp, Homo sapiens
gacaagtaatttgggtttattctgagacttctacttctgaattctctactacaggttgtatgccacagtgattaagattagtttccaggaagacagcagaaagaattgaaattctgggaaattcctcttcatgttcctgtttttaaaaattcctttctgaggagccaggggcttgtgccgtaatcctgataactcaggaggctgaggcgggaggatcacttggggccaggagttcaagaccagcctaggcaatgtagtgagacggtgtctgtaaa

SEQ ID NO: 385165 - DNA, 778 bp, Homo sapiens
gacttctcttataggctgaaatgcatgaactgttaatcagaaatctctttcccctgagattaaaaagctgtagctgttggccttcttcacctctttccttctgcctcagtagtttgcatctgttattccctctgcctggaacagactctgttccccccaccagcccctccaagatatgctgccttggaaacttccttgactacttctctctcagctggatgaggttctttgttctatatgcagtcacagcaccctgtgcttttccttcaggacccttgtcatagtcaataattacagtattatatgactttttttgtttttttgatgtgatgccccactcgacaatcccgattctctaaggggtaaagtactttctcagaggcaagagagaagcagaatcttttagggtttagtttgaaaaaaactgtctgatctgggaaagctcacctttccctgttttgagaatcattgctttaaatttttattttcaaaggcatcaaataataaaataatctactggatatagcttcagagttaccaagaataaaaaaaaattccaaatgaagttatttttgttaatttatttatataaaaagaaggcagattttaagattttgttgaagctttaaatttgaaagaaacctagagattattcagacaacagcatatcactgtaggaattccttctgtttcttaattttattctgattgttatatcctggcaatgtaagttgtacaagaaaggtcttcctttatcactttggggaaaatggctcaa

SEQ ID NO: 385166 - DNA, 356 bp, Homo sapiens
agagtggaggagatggtgttctcgtgttaattgaggctgagaaagcagcactgctcacgttttgctttattttcttcctctcctaggcagaatcagtgttacatttgtggtcagatgagctaacgacatccttcctgacttctttctcagaattaggaaaccctgattagcatttagaacctcattttcacagacttcactcattaaaacatcaagacctaggtaacgcaccactgaaatttcataatatggaggatatgtttaaatatgtttaaaatatgtatttttaactgtggttaaaatatgtttttaaaatgtttatgagtcaaaataattaaaattgccatttaacgtaa

SEQ ID NO: 385167 - DNA, 434 bp, Homo sapiens
cctaggaccccgactctggctgtggctgtggatgcttctgaacagtgctaagtggaagcccatgaaagaacagactgttctcaaggcccatggaggaaaagatgttacaagccatccctccagattcctggacaagctctgagtccctgcccagaaaccaaaaggcagaatcagtgttacatttgtggtcagatgagctaacgacatccttcctgacttctttctcagaattaggaaaccctgattagcatttagaacctcattttcacagacttcactcattaaaacatcaagacctaggtaacgcaccactgaaatttcataatatggaggatatgtttaaatatgtttaaaatatgtatttttaactgtggttaaaatatgtttttaaaatgtttatgagtcaaaataattaaaattgccatttaacgtaa

SEQ ID NO: 385168 - DNA, 1364 bp, Homo sapiens
attcagcacgcgccccgtccgctgcagtccgccggcgagggagttacgcacgtcctgattctcctggagtctccagcccgcccagtggccgcagtcacccaggtccagaggcggcggtatcacaggctctccgacatgtctatgctggctgaacgtcggcggaagcagaagtgggctgtggatcctcagaacactgcctggagtaatgacgattccaagtttggccagcggatgctagagaagatggggtggtctaaaggaaagggtttaggggctcaggagcaaggagccacagatcatattaaagttcaagtgaaaaataaccacctgggactcggagctaccatcaataatgaagacaactggattgcccatcaggatgattttaaccagcttctggccgaactgaacacttgccatgggcaggaaaccacagattcctcggacaagaaggaaaagaaatcttttagccttgaggaaaagtccaaaatctccaaaaaccgtgttcactatatgaaattcacaaaagggaaggatctgtcatctcggagcaaaacagatcttgactgcatttttgggaaaagacagagtaagaagactcccgagggcgatgccagtccctccactccagaggagaacgaaaccacgacaaccagcgccttcaccatccaggagtactttgccaagcggatggcagcactgaagaacaagccccaggttccagttccagggtctgacatttctgagacgcaggtggaacgtaaaagggggaagaaaagaaataaagaggccacaggtaaagatgtggaaagttacctccagcctaaggccaagaggcacacggagggaaagcccgagagggccgaggcccaggagcgagtggccaagaagaagagcgcgccagcagaagagcagctcagaggcccctgctgggaccagagttccaaggcctctgctcaggatgcaggggaccatgtgcagccgcctgagggccgggacttcaccctgaagcccaaaaagaggagagggaagaaaaagctgcaaaaaccagtagagatagcagaggacgctacactagaagaaacgctagtgaaaaagaagaagaagaaagattccaaatgaatccttcccagccggggccttccgaccactcagctgtcagggcactgcgggggcagacacctctggcctgaagtcacagcagagttcaccccagagcgcctgggcgcatcttgtggcatgcccatgggctgccgagtcctgccctctcgccacatttcccccaagttacattcccaggaggacctttttaatgttctcaatcgtggctctcagacacaaataaatttttttgtaaactctga

SEQ ID NO: 385169 - DNA, 1287 bp, Homo sapiens
attcagcacgcgccccgtccgctgcagtccgccggcgagggagttacgcacgtcctgattctcctggagtctccagcccgcccagtggccgcagtcacccaggtccagaggcggcggtatcacaggctctccgacatgtctatgctggctgaacgtcggcggaagcagaagtgggctgtggatcctcagaacactgcctggagtaatgacgattccaagtttggccagcggatgctagagaagatggggtggtctaaaggaaagggtttaggggctcaggagcaaggagccacagatcatattaaagttcaagtgaaaaataaccacctgggactcggagctaccatcaataatgaagacaactggattgcccatcaggatgattttaaccagcttctggccgaactgaacacttgccatgggcaggaaaccacagattcctcggacaagaaggaaaagaaatcttttagccttgaggaaaagtccaaaatctccaaaaaccgtgttcactatatgaaattcacaaaagggcgatgccagtccctccactccagaggagaacgaaaccacgacaaccagcgccttcaccatccaggagtactttgccaagcggatggcagcactgaagaacaagccccaggttccagttccagggtctgacatttctgagacgcaggtggaacgtaaaagggggaagaaaagaaataaagaggccacaggtaaagatgtggaaagttacctccagcctaaggccaagaggcacacggagggaaagcccgagagggccgaggcccaggagcgagtggccaagaagaagagcgcgccagcagaagagcagctcagaggcccctgctgggaccagagttccaaggcctctgctcaggatgcaggggaccatgtgcagccgcctgagggccgggacttcaccctgaagcccaaaaagaggagagggaagaaaaagctgcaaaaaccagtagagatagcagaggacgctacactagaagaaacgctagtgaaaaagaagaagaagaaagattccaaatgaatccttcccagccggggccttccgaccactcagctgtcagggcactgcgggggcagacacctctggcctgaagtcacagcagagttcaccccagagcgcctgggcgcatcttgtggcatgcccatgggctgccgagtcctgccctctcgccacatttcccccaagttacattcccaggaggacctttttaatgttctcaatcgtggctctcagacacaaataaatttttttgtaaactctga

SEQ ID NO: 385170 - DNA, 406 bp, Homo sapiens
gggcttcagggtgaagtcccggccctcaggcggctgcacatggtcccctgcatcctgagcagaggagagggaagaaaaagctgcaaaaaccagtagagatagcagaggacgctacactagaagaaacgctagtgaaaaagaagaagaagaaagattccaaatgaatccttcccagccggggccttccgaccactcagctgtcagggcactgcgggggcagacacctctggcctgaagtcacagcagagttcaccccagagcgcctgggcgcatcttgtggcatgcccatgggctgccgagtcctgccctctcgccacatttcccccaagttacattcccaggaggacctttttaatgttctcaatcgtggctctcagacacaaataaatttttttgtaaactctga

SEQ ID NO: 385171 - DNA, 1569 bp, Homo sapiens
attcagcacgcgccccgtccgctgcagtccgccggcgagggagttacgcacgtcctgattctcctggagtctccagcccgcccagtggccgcagtcacccaggtccagaggcggcggtatcacaggctctccgacatgtctatgctggctgaacgtcggcggaagcagaagtgggctgtggatcctcagaacactgcctggagtaatgacgattccaagtttggccagcggatgctagagaagatggggtggtctaaaggaaagggtttaggggctcaggagcaaggagccacagatcatattaaagttcaagtgaaaaataaccacctgggactcggagctaccatcaataatgaagacaactggattgcccatcaggatgattttaaccagcttctggccgaactgaacacttgccatgggcaggaaaccacagattcctcggacaagaaggaaaagaaatcttttagccttgaggaaaagtccaaaatctccaaaaaccgtgttcactatatgaaattcacaaaagggaaggatctgtcatctcggagcaaaacagatcttgactgcatttttgggaaaagacagagtaagaagactcccgagggcgatgccagtccctccactccagaggagaacgaaaccacgacaaccagcgccttcaccatccaggagtactttgccaagcggatggcagcactgaagaacaagccccaggttccagttccagggtctgacatttctgagacgcaggtggaacgtaaaagggggaagaaaagaaataaagaggccacaggtaaagatgtggaaagttacctccagcctaaggccaagaggcacacggagggaaagcccgagagggccgaggcccaggagcgagtggccaagaagaagagcgcgccagcagaagagcagctcagaggcccctgctgggaccagagttccaaggcctctgctcaggatgcaggggaccatgtgcagccgcctgagggccgggacttcaccctgaagcccaaaaagaggagagggaagaaaaagctgcaaaaaccagtagagatagcagaggacgctacactagaagaaacgctagtgaaaaagaagaagaagaaagattccaaatgaatccttcccagccggggccttccgaccactcagctgtcagggcactgcgggggcagacacctctggcctgaagtcacagcagagttcaccccagagcgcctgggcgcatcttgtggcatgcccatgggctgccgagtcctgccctctcgccacatttcccccaagttacattcccaggaggacctttttaatgttctcaatcgtggctctcagacacaaataaatttttttgtaaactctgagcccttcagcaagagagtttaattataatcattacaaatacatgcattcatgtaagtgtgcacacgtgtgtgtgcatgtgcgcatctgtgtgtgtgtgtgtgtgtcactatctccgtttgctctcggttcccttcaataacaatgaatggtgctttcttctgaaagactcagcctaattaaaggattaagaggcaatagcttgga

SEQ ID NO: 385172 - DNA, 794 bp, Homo sapiens
attcagcacgcgccccgtccgctgcagtccgccggcgagggagttacgcacgtcctgattctcctggagtctccagcccgcccagtggccgcagtcacccaggtccagaggcggcggtatcacaggctctccgacatgtctatgctggctgaacgtcggcggaagcagaagtgggctgtggatcctcagaacactgcctggagtaatgacgattccaagtttggccagcggatgctagagaagatggggtggtctaaaggaaagggtttaggggctcaggagcaaggagccacagatcatattaaagttcaagtgaaaaataaccacctgggactcggagctaccatcaataatgaagacaactggattgcccatcaggatgattttaaccagcttctggccgaactgaacacttgccatgggcaggaaaccacagattcctcggacaagaaggaaaagaaatcttttagccttgaggaaaagtccaaaatctccaaaaaccgtgttcactatatgaaattcacaaaagatcaaatccagagcaaggcctgtaacaatcctggtttctacatttacttaagtgaactttgctaaaggctaaaaatttctgatacaagaatccatcatcaaaactttagacacatttgcaccttcattgatatagcttactgtctctaccagcttgacagttttccctttgactttcagatctgttttgaatctgtgtgttcacattttgacatcatgttttagaactgtgatctcgcatgtaccctctcttccttaatccctcc

SEQ ID NO: 385173 - DNA, 310 bp, Homo sapiens
gcacgagaaaaatagtcttttcttacattttcccctctaatgtcttacctgccataccactgtctgctgtccagctgaactataccaggagccatatgtgttgttttaaattttctagtagctgcatgttaaaaagtcaaaagaacctgatggaagtaattttaataatgtagttaacccagtgtatgtaacatgtcaattcagcatagcaagcaatgtaaaaaagcattcaggagatatttatattcttttttttttttcctagacagtctcgctgtgtctccagcctgggcgcagtggtgcaatctca

SEQ ID NO: 385174 - DNA, 476 bp, Homo sapiens
  misc_feature (421)..(421): n is a, c, g, or t
  misc_feature (428)..(428): n is a, c, g, or t
  misc_feature (448)..(448): n is a, c, g, or t
  misc_feature (456)..(456): n is a, c, g, or t
ggggtttcaccatgttggccaggctggtctcgaactgctgacctcatgatcctcccacctcggcctcccaaaatgctgggattacaggtgtgagctgctgcgcctggcctctacagttattttcttctggggatcattttattgttggtttgtacttttctctcatttttcttttaaatacattttttactccatgaagaagcttcatctcaacctccgtcatgttttagaaaccttttatcttttccttcctcatgctactcttctaagtcttcatattttctcttaaaatcttaaggctattaaaattacgttaaaaacttaacgctaaggcaatatcttagtaacctattgactatatttttttaagtaggttgtattaaatctctgatctttcaaaggaggaaaaaaactttattcnggcgggntttccctcaaggttccggcnggcccccntcaggcaggtaggccccttt

SEQ ID NO: 385175 - DNA, 607 bp, Homo sapiens
atcttttagtcttggggaagtgtcagtgatgactgctgccaaaaactgggttggatttgtatgaagcttcgggacagggtaatccagctgatccagtgcgatgactttgacatgtaatagaccaaggaattcatttgtgtcagggtatggagccttcagcttggactgccagatgtagaagatccaatggagaattctgaggcccaaggtgattttagaactactacacggaaggagcctgcccagacatctgcactgtactgtgatctggtgcagattgagaattctagcagtttgggagaagttaaagcctctcaacagggaacactgcatttaaaggatcctgtaaactgcagcaccaggaaaaccatagtccaagtcttcattcttcagcttgcagtcacgtcaccaccatatgctgtacactagagtatttatggcttgaatcacacatggagccagtcttatctcaggcaaccatgctgtctgcatcagtataagataaaactgtgctaatgacaggagggcatgtttaaatgtacgtttccatgtatgggataaaatacttcgtcaaatgaagcttggtcaaatgaagcttcatgctact

SEQ ID NO: 385176 - DNA, 856 bp, Homo sapiens
aattgcatttcctaatgaggtagcttggaccagaaactttaatgaagatcttttttttatagccacaagtgagatataatattagactttaaactccctacccctctgtagcagacaggaacccgctggaatctttgctgggaactgtggaacaccaatttggtgcacaaggggtaagttgaagcaatgagctttcattgcagttagatgaaaggaaacaacttgtctgtgtctgggatggcatttactggatcctgaacagcccactctatgtaaaggccaaagatacccccaagctggaatttgagatactcttttggaagagaattagatgagtgactctttgaaaataaataaggattttagaggaggggtagtgattatagaaatcaggtgctttccctcttatccattataaacgaggggcctctttatagaaatggaacttaaaaaggattcaggactttatattgcaacagagcaccttaacaaatattttcttacttgatgctcacagtaactatatgaacttggtacagtggatgtccctgcgggtcagaaaaatgaaattacctttccactatcaaagctagacagggaaacagctagaacttcaactccaagtcttccaagtctcatgcactttcagatatttctttctttttttctttgttataatcaggagataaaaatgtaaaggagagtagagaaatattttaaaatgaagaaatccattacacttcctgtgtagtttggtgatatcctcatagattttcttgttccatgcaaaaaagttagtgaatagaacttcccggtctttagctggttaacacgtccacctcagacactgagtgcc

SEQ ID NO: 385177 - DNA, 2663 bp, Homo sapiens
  misc_feature (15)..(15): n is a, c, g, or t
  misc_feature (18)..(18): n is a, c, g, or t
  misc_feature (26)..(26): n is a, c, g, or t
tccatgtctgttacnccngggagtantgggatatcgtcgagccaggcctcgaggaaggccgaaagccgctgacgattagaacacagaagtttaaagcaatgttgtggatgtgtgaagagtttcccctctctctggtggagcaggtcattcccatcattgacctaatggctcgaacgagtgctcattttgcaagactgagagatttcatcaaattggaattcccacctggatttcctgtcaaaatagaaattcccttgtttcatgtcttaaatgcacggattacatttggaaatgttaatggctgtagcactgccgaagaatctgtatctcaaaatgtggaagggacccaggctgattcagcttcccacatcacaaactttgaggttgatcaatctgtgtttgaaattcccgaatcttactatgttcaagacaatggcagaaatgtgcatttgcaagatgaagattacgagataatgcagtttgccatccagcaaagtctgctggagtccagcaggagccaggaactttcaggaccagcttcgaatggagggatcagccagacaaacacctatgacgcccagtatgagagggccatccaggagagcctcctcaccagcacagaaggcctgtgccccagcgccctgagcgagacaagccgttttgataatgacttgcagctagccatggagctctctgccaaagagctggaggaatgggagctccggctccaggaggaagaggctgagctccagcaagtcttacagctgtcactcactgacaaatagacctttcagcctgtgagcctctgcacaaagcagaggctgtgggctgtcacagatgctgtgtcaaccagggccctagggctaagggcctgcaccttgcgtgcatgcagcaggcaacaactgccccttctttatgcagaggtgcagaaccagggactcctgggcccatccaggctgctccctggggtggagaagggaccagggattgcaggccccatctccaggctaaggggaggagagcatcatcactttccattagctgtattggcttgcaggtcacatttttactaccagctttagacaaaaccccaatccccgcaggtttgtagataaatttttatcaaggagtgataacaagacaagttattgcagagtcagggtgcttttatatataagagcagcagccgcctttgtaaagtgtgatctatgagaattggagacacttctttactgttcaccaaagaaatgggtaatctgtgctgatctccttatttttacctttttacagggtttctaggacattgtcattattcttcctccatctatctgattccattccttccacacccagctaaagttagaggagatacatatagaatctattttagattattgttaactatttgcatcaaattaagatacacaaatggccatggatgttgccttagccttaaacattactaatagtttcacatcacctcactgcacgcatcgaaggatctgatttgaatttgtaaaggcaattcttttgagagcaggattctccaggctaaatcaaaggcagctaatcctgtccctgaaggagcagctaggggaacctgaggcttgttcttgaagtgggcaagctggccaaaatattggaacacacagaaccaaaccaggtgtgttctacacctgcatgagtgaaggatttccacgtagacacctaggaagagcccgcatgccctagactcactccagaggaaggattgatttgcaaccagaaagggagctgaaaaccacggagctccatggctcttcattcaaaagggaaaataatgattccacgttgctttttagagttcaaatcaacatctttctggataaatctattttttaacaatctttttattatttgtaaaagatataaaaacaactcccatcagtagcaatacaaggttatacattttaaccagattttctcaggccttttttggatacctttagtagttaactctcttttgtcaaaccctcttgtatataaccatcgcacaacatacagaaccctggggaatacagccaagggcactgctcactgtggcccgtgtattcattcccacaggctgcactgaaataacctggtaaacaacaccctcctccattttgcgtctatttcttctattgtgcttctttggggataggaagagaaacataactactgttccaggtaacgtctgtatcatacagttagtgttgccagtgaaacgttcccagatacaaagaattgtgcttttaattccatttcacaatctgttttgttttttttttttgtcattgtctgaccaaaattccttctgcacatgaggccagtataggcaacgtcacatttgtttgtttcaaatatgcagtgtggtattttgtttactttgcatttaccgtgagcaaagatacttcttggaatggctgcagtgaggccgtgtcattggctcacaaaagtgactcataggtaatttctgtgtttgcattccactgctctgctccctaaggtccttgactttctccccaggaattcacttaaaaagggactgagcattgtgtcaacctgttgcagtgtttttcatatatgtgttcactctaaaaatgcaaataaagactgcttccttagagggtgctcatacaaaa

SEQ ID NO: 385178 - DNA, 726 bp, Homo sapiens
ctagagtatccccgcttacacctgagtagtacacttctctcctccagtgcccttggtttctagaatatgcccaaatgatgtctgtcgcatctggaaaagtggtgccaaactgcgcgtcgatatcacattgctgggatttgaaaacatgagctggataagagggaggcgtagttttatatttaagggagaaggtgagtgacttctcttgtagtaatcactgctcaagcaaaattacagggtgatttttaaccaagaaaatgctttcacattcatgtgacttttctgtctgatccttcctagggcatgtttttttggttattcttattaattattcagctctccatccctgtcttcgttcttgtctggctagctctccttcatgtgtcctttaccacccagcagttacccttgtgatgtgtctgcttcactttcctgagcctttgagcacaggccttctgtgtgtatctctgtataaccctccataatcaggcatgagaaatggcattgctcacccaatgttgtgcatacataatttctgtgaattctgtaataatatattttataaaggacattgatggaatatattgctaataagaatgcagattattaagaaaaattccgcacctttggggaagatggctcagagcttcctatgtgttgtggaaagctggtcagataatccctgtgcaaataggtagtcgataatcagtacactgtaggttttac

SEQ ID NO: 385179 - DNA, 3800 bp, Homo sapiens
cgcagaagtctgtccgcgagctgtcagcgcgggcgggaacgccgcggggcgcggggtgggcgcggccgacctggtccctgagccggccggcgaccccggacctcccgcgcgccccgcacccgaccggctcagccggccggcagcgtaacacgccctacgctcgcttgctcgccggcctcagggcaggcaggcgggcgcgggagaccccgccggggccgagacttggggcgggcgacgaggaccaggttacggcctcctcgccatgtcctcggcctgcgacgcgggcgaccactaccccctgcacctcctagtctggaaaaacgactaccggcagctcgagaaggagctgcagggccagaatgtggaggctgtggacccacgaggtcgaacattattgcatcttgctgtttccttgggacatttggaatctgctcgagtcttactccgacataaagcagatgtgacaaaagaaaatcgccagggatggacagttttacatgaggctgtgagcactggcgatcctgagatggtgtacacagttctccaacatcgagactaccacaacacatccatggcccttgagggagttcctgagctgctccaaaaaattctcgaggctccggatttctatgtgcagatgaaatgggaattcaccagctgggtgcccttggtttctagaatatgcccaaatgatgtctgtcgcatctggaaaagtggtgccaaactgcgcgtcgatatcacattgctgggatttgaaaacatgagctggataagagggaggcgtagttttatatttaagggagaagacaactgggcggagttaatggaagtcaaccatgatgacaaagtggtcaccaccgaacgcttcgacctttcccaagaaatggagcgcctcactctggacttgatgaagccaaaaagcagggaagttgagcggcggctcacaagccctgtcattaacaccagcctcgatactaaaaatattgcttttgaaagaactaaatccggattctggggctggaggacagataaagcagaagttgttaatggttacgaagcaaaggtttacacagtaaacaatgtgaatgtgatcaccaaaatacgcacagaacatctgaccgaggaggaaaaaaagagatataaagcagacaggaacccgctggaatctttgctgggaactgtggaacaccaatttggtgcacaagggggacctcaccacggaatgtgctactgcaaacaaccccacagccatcacgcctgatgagtacttcaatgaagagtttgatctgaaagacagggacattggaaggccgaaagagctgacgattagaacacagaagtttaaagcaatgttgtggatgtgtgaagagtttcccctctctctggtggagcaggtcattcccatcattgacctaatggctcgaacgagtgctcattttgcaagactgagagatttcatcaaattggaattcccacctggatttcctgtcaaaatagcttcccacatcacaaactttgaggttgatcaatctgtgtttgaaattcccgaatcttactatgttcaagacaatggcagaaatgtgcatttgcaagatgaagattacgagataatgcagtttgccatccagcaaagtctgctggagtccagcaggagccaggaactttcaggaccagcttcgaatggagggatcagccagacaaacacctatgacgcccagtatgagagggccatccaggagagcctcctcaccagcacagaaggcctgtgccccagcgccctgagcgagacaagccgttttgataatgacttgcagctagccatggagctctctgccaaagagctggaggaatgggagctccggctccaggaggaagaggctgagctccagcaagtcttacagctgtcactcactgacaaatagacctttcagcctgtgagcctctgcacaaagcagaggctgtgggctgtcacagatgctgtgtcaaccagggccctagggctaagggcctgcaccttgcgtgcatgcagcaggcaacaactgccccttctttatgcagaggtgcagaaccagggactcctgggcccatccaggctgctccctggggtggagaagggaccagggattgcaggccccatctccaggctaaggggaggagagcatcatcactttccattagctgtattggcttgcaggtcacatttttactaccagctttagacaaaaccccaatccccgcaggtttgtagataaatttttatcaaggagtgataacaagacaagttattgcagagtcagggtgcttttatatataagagcagcagccgcctttgtaaagtgtgatctatgagaattggagacacttctttactgttcaccaaagaaatgggtaatctgtgctgatctccttatttttacctttttacagggtttctaggacattgtcattattcttcctccatctatctgattccattccttccacacccagctaaagttagaggagatacatatagaatctattttagattattgttaactatttgcatcaaattaagatacacaaatggccatggatgttgccttagccttaaacattactaatagtttcacatcacctcactgcacgcatcgaaggatctgatttgaatttgtaaaggcaattcttttgagagcaggattctccaggctaaatcaaaggcagctaatcctgtccctgaaggagcagctaggggaacctgaggcttgttcttgaagtgggcaagctggccaaaatattggaacacacagaaccaaaccaggtgtgttctacacctgcatgagtgaaggatttccacgtagacacctaggaagagcccgcatgccctagactcactccagaggaaggattgatttgcaaccagaaagggagctgaaaaccacggagctccatggctcttcattcaaaagggaaaataatgattccacgttgctttttagagttcaaatcaacatctttctggataaatctattttttaacaatctttttattatttgtaaaagatataaaaacaactcccatcagtagcaatacaaggttatacattttaaccagattttctcaggccttttttggatacctttagtagttaactctcttttgtcaaaccctcttgtatataaccatcgcacaacatacagaaccctggggaatacagccaagggcactgctcactgtggcccgtgtattcattcccacaggctgcactgaaataacctggtaaacaacaccctcctccattttgcgtctatttcttctattgtgcttctttggggataggaagagaaacataactactgttccaggtaacgtctgtatcatacagttagtgttgccagtgaaacgttcccagatacaaagaattgtgcttttaattccatttcacaatctgttttgttttttttttttgtcattgtctgaccaaaattccttctgcacatgaggccagtataggcaacgtcacatttgtttgtttcaaatatgcagtgtggtattttgtttactttgcatttaccgtgagcaaagatacttcttggaatggctgcagtgaggccgtgtcattggctcacaaaagtgactcataggtaatttctgtgtttgcattccactgctctgctccctaaggtccttgactttctccccaggaattcacttaaaaagggactgagcattgtgtcaacctgttgcagtgtttttcatatatgtgttcactctaaaaatgcaaataaagactgcttccttagagggtgctcatacaaaa
